United States Patent Application Publication US 2005/0228172 A9 - sequence listing, part 61

SEQ ID NO: 260712 - DNA, 576 bp, Homo sapiens
gaaattgtgcattcagggagctcggattttgagacagtagcttgccgatgctcccagctgaatgaagcccttccttctacaactcagtgtctgagaggttttgtctgtggcttgtcctgctacagtaccatcatttgggtactttttaggtaaagatggtttgtgagtggctttatgttgcatgctgactacaatgagatttttaaatttttttagggcagtgggaacataaaaatgaattttaactatgattactaagggatttaagtaggagcatgagtgacactgtcatacatatggctggcagcaggcaaacacttcttaggtatgaatcagaaaaaagagagggaagaaagccagtgagggcagggtgagccatcwgatatatcagtgcacagaaacgtcctgaggtctttacatcaggaagtcaagctagaaatagggagacctgggtattagtcagggttttctagagggacagaactaataggatagatgtatatatgaaggggagtttattaggagaattgacttacacgatcacaaggtgaaaccccacaataggtcatctgtaag

SEQ ID NO: 260713 - DNA, 575 bp, Homo sapiens
actggctgaatgaagtaggaaaggaatcagggatgtaactgttgctcagaattctcttactacttctttaacggtctttcaaacaattctcttgtttttaattttactttcatatctattcccagagaacctgatgttgccaattccagagactttgtagattctgcaaagcatatttgtttttttcttggcttcttccactgctggtttaggattgagctttctttgaaccccttagtcagttaccactcatccagctttaaaaattttgctgctgttgtctcttttttgtttgtccttatgattttgtgccctttaaaaagttcttttctgatgttttagtgtagttttgggaaagagtaaactaaatagaaatttacctgaaggtctctcttgttttcctaattattttaaaaattacaccagtcrttcaaaaatacatgacaatatatgacatgacatgaatttaagattcaagcaatttatcattatatgaaagaaaatgtgactctttcccctccccttcaattccatattttacctcttctgagatgaacaattttaactatttgata

SEQ ID NO: 260714 - DNA, 582 bp, Homo sapiens
gagaaaaagatagtatctacaatttatgtctgagtaacaagtgggttacagaacattatacctatagaaagttccctttatgtttatttatttgttaataaataatacacagaattactatatagcaagacacacaaatttctattgctgcattttcagtttccctttctttcgtctccattctgctattaagcctatccactaaatttttctgatttaaaatagtgcatttttcagttctcaaattttcatttgatttttttgtagttttaattttgcttctgaaaataatcctctaaggagatttgagattgggctgttatgggaacaaggatgcttttcattgtctttattgcttgaaggtttggaagactaataaatatttgtataaattttttttaatgaaaaaaatttaaaaatattcctagaaaggacttcaagctctctgagaaattcagatttttattttctctacaattcataattaaatawtccctgttaaaccttgggcagatggcatgatgggagagataggacttagcttcaggtggccctcctgggaatttcatggtactactctaa

SEQ ID NO: 260715 - DNA, 572 bp, Homo sapiens
tattcaaacagttggctatatttgattggccaaaacttggtgattagcaygagtgtaggctacggtctgtttacacctttacttgttatagtttacaatgtacagaaaaacctttaggccaaacttaaaatatgtaaagagacagtttttggctaaacttgatttaagtctattttctttttctcccatacttccttcccctgctttgtgacgaatttgattaaatatggcttctctagcctctagtttaacccctgaggccaactagcatgtttgaagttcaagactaacctgatttatcatgttgatccaggaattcatacctgtgacgaaatagagaggggtcatgaattacaaacatggctgagaagtctactccagtatttaagggaagttaattctcagaaaagaggaggaaaaactaggcagatattccagaagtttctgcagtggctaaataatctcagtggactcttcaagctgtaaaccaaaaataaaatactaagccccccaacagactgaatggatcacttctctgggccacggggattccaaagatacagaaaaactag

SEQ ID NO: 260716 - DNA, 595 bp, Homo sapiens
tctgcattcaaatcccagctccaccacagccagctgtgtaacctaggtcgagttacccaacattactattcctcaattttctcttcagttagttgaaaagaacaacagcatgccaaatttttatgaggattagagctaccatataaaaagaatctggtacaaagtatggatgcatacaagttctttatcatttcagaagaaataggatctcttaggcattttcctcwcggtgaacaattattataggcatctcaactttattgaccttggcttttccacttgcccaaacataacaaatttactaccctaaaagaattagctttgaccatgcctgtccccaagtatctaatgaaaatattggtgtaggtacaaaataaatgctcttgttctttcctctcttccacctcctctctctcactctgtctctctctctctctctctccctctctctgtctcatacacatacacacacacacacacacagtgtcttagtgcaagtagaaccatcaatgagattaaaatgtttcactagatggaaacaagagaaaaaatacaaactctaaagaaagatgctgcattgctatctttctaatga

SEQ ID NO: 260717 - DNA, 595 bp, Homo sapiens
tctgcattcaaatcccagctccaccacagccagctgtgtaacctaggtcgagttacccaacattactattcctcaattttctcttcagttagttgaaaagaacaacagcatgccaaatttttatgaggattagagctaccatataaaaagaatctggtacaaagtatggatgcatacaagttctttatcatttcagaagaaataggatctcttaggcattttcctctcggtgaacaattattataggcatctcaactttattgaccttggcttttccacttgcccaaacataacaaatttactaccctaaaagaattagctttgaccatgcctgtccccaagtatctaatgaaaatattggtgtaggtacaaaataaatgctcttgttctttcctctcttccacctcctctctctcactctgtctctctctctctctctctccctctctcygtctcatacacatacacacacacacacacacagtgtcttagtgcaagtagaaccatcaatgagattaaaatgtttcactagatggaaacaagagaaaaaatacaaactctaaagaaagatgctgcattgctatctttctaatga

SEQ ID NO: 260718 - DNA, 587 bp, Homo sapiens
tgttattacttaattaagaaatctggcagtagggagaaagaaacagaatggtagctgaaaasggcaggaggatcaagtaaagaatttttcccccaagattggaaaggcctgtgtatatttcacaggcggaaaggaaaaaggtaggagaaagatgtatgctttggcatgagggtcgggataattatagagacaaggttctaaaagggacaggaagggaatgggactgagaacagagtttagccttagaacaaagggaagagacagacctttccaactgagactgtgttcttgtcatttccgccaaatcataaacacgccttacatttatttgtttagtgtgcagctaacctctaggtgtactcacagctgctcttaagttagattcttcttcatcatcatcaaatacagccaccatttatagaccgtgtgcccagcagtttaactgtgtcatctcataagaagaataccattatcattcccatcatacagatgaagaaactaagggaaaagatattataatgaacttgaccaagataacccagctgctaagggagacagttgtgttggatgctagacaattcaattct

SEQ ID NO: 260719 - DNA, 587 bp, Homo sapiens
tgttattacttaattaagaaatctggcagtagggagaaagaaacagaatggtagctgaaaagggcaggaggatcaagtaaagaatttttcccccaagattggaaaggcctgtgtatatttcacaggcggaaaggaaaaaggtaggagaaagatgtatgctttggcatgagggtcrggataattatagagacaaggttctaaaagggacaggaagggaatgggactgagaacagagtttagccttagaacaaagggaagagacagacctttccaactgagactgtgttcttgtcatttccgccaaatcataaacacgccttacatttatttgtttagtgtgcagctaacctctaggtgtactcacagctgctcttaagttagattcttcttcatcatcatcaaatacagccaccatttatagaccgtgtgcccagcagtttaactgtgtcatctcataagaagaataccattatcattcccatcatacagatgaagaaactaagggaaaagatattataatgaacttgaccaagataacccagctgctaagggagacagttgtgttggatgctagacaattcaattct

SEQ ID NO: 260720 - DNA, 589 bp, Homo sapiens
tgcggtcggtgttacagttataacatgagcgatgaatgcrtgcttccacagtggagtgccagaaagaccggcagcatttctgagaaggtaaacgggaggaagtaggcttgcttagtccacttggagaagcaggtctgggattgttgtgagagtctctgccctaggtagaccctgcctcatgatcccctctagagattggtaaaaattcgaattctcgggccccatcagaactactgaaaagagcctcctgtgagcacaggctcgcagtaagtgggggtgacggtggtcgcgccggcagcgccgccttgggcctgcgggaggcgcccgagaggcaggggcgaccacggcggctgcgcagagtcctccctatgccggcggtcgcaccagcgggatccgcctggctcagctgacagctcccgagaacggaagaggcggcgcgccggttgagcagggcgtttctaggcctggtcggctggcggcggtgagtgggccccaggcaagggcggagggcggaactttggggttcggcactgccgggcggccggaaggtacggtggggatagctctctgggcgcgcgaggcagagaag

SEQ ID NO: 260721 - DNA, 595 bp, Homo sapiens
tcagccttcaggctgttttagacttgaaggcagggttttgccagggaatccttggctgcctcctgtctatatcaacaagtgttttcaagagagaggaagaggcagatttcacctgcagaagaggcaacgtgactacagaagccgagattggagtgatgyagccacaaaccaaggaatatggcaaccaccagaagtcagaagagccaaggaacagattctcccttagaactgccagagggagtgtggccccactcatgctttgatttcagatactgattttggacctcaggtctctagaactgtgagagaatatatttctattcttttaagccaccaaattgatggtagtttgttacaccatccataggagctaacacatggatcaccccaaatgttagcaagaaggtgaaggaattggtactctcatatcctgctgacagaaatacaaaataaagtggtatgaccacttgggaaaataagggtagtttcttaaaaagttaaacataatatctatcagatgattcagccatctcaatcctacacatttacccaaggaaaatgaaagaatatgttcataaaaagacttgtacatgaa

SEQ ID NO: 260722 - DNA, 568 bp, Homo sapiens
agaggaagaggcagatttcacctgcagaagaggcaacgtgactacagaagccgagattggagtgatgtagccacaaaccaaggaatatggcaaccaccagaagtcagaagagccaaggaacagattctcccttagaactgccagagggagtgtggccccactcatgctttgatttcagatactgattttggacctcaggtctctagaactgtgagagaatatatttctattcttttaagccaccaaattgatggtagtttgttacaccatccataggagctaacacatggatcaccccaaatgttagcaagaaggtgaaggaattggtactctcatatcctgctgacagaaatacaaaataaagtggtatgaccacttgggaaaataagggtagtttcttaaaaagttaaacataatatctatcagatgattcagccatctcaatcctacacatttacccaagraaaatgaaagaatatgttcataaaaagacttgtacatgaatattcacagcatatagttaaactggaaatatttttcaaggggtgaatgcaaaaccaaatagtca

SEQ ID NO: 260723 - DNA, 562 bp, Homo sapiens
ggttttcacacacccttcacccacattcacccaacattaatatcttgcataacyatgatgcatgtcaaaaccagagttgcacagctcttaaatccgtcatccacgttgagcatataaaagcatctggctactggaaatgaaaataagggatttttgaagagtgatatgtcttctgaaagctctgcatgtgctgtgggttcctctaccacctcattcgcaaaagaataggatgtgaattgcttgttttttcatctcaacttagaagaagaagcatcaaagggaattctcagagagcttaatgtgtatttcctgaagtctgggggtggggacacactgcacttgagtgtgactcccctctgagcactcaagggtgagagacaggctggacagcagctgactggtaagccaagggaaagatggctgggttgacataggcctgcatacacagaatttgtcagagcaagagatgcatggattttacataacagaaatgtgaaccacacacaagaaagctggcatgaggtcatcttatatcctgtccaatagggctacctaggagggc

SEQ ID NO: 260724 - DNA, 550 bp, Homo sapiens
gggggtggggacacactgcacttgagtgtgactcccctctgagcactcaagggtgagagacaggctggacagcagctgactggtaagccaagggaaagatggctgggttgacataggcctgcatacacagaatttgtcagagcaagagatgcatggattttacataacagaaatgtgaaccacacacaagaaagctggcatgaggtcatcttatatcctgtccaatagggctacctaggagggcaaagtcctcagtagagagaagctgatggcatagtctgactcatagggattggagagggmataagcaacacaccgaatgagagggcaccattcacatgaacagagttgcagagagatccttgaagatggtgtggaagtggagagaggacaaggagtgaaatctccaaagaatacatgatggcatctatgaaatcattacctttaaactcacgccagtgccagagaatatttgaaaattgttgtgggttttttttaaaaaaaaaaaaaaaaaacaatctcaaacttacagaagcatgcatgtacaata

SEQ ID NO: 260725 - DNA, 550 bp, Homo sapiens
gggggtggggacacactgcacttgagtgtgactcccctctgagcactcaagggtgagagacaggctggacagcagctgactggtaagccaagggaaagatggctgggttgacataggcctgcatacacagaatttgtcagagcaagagatgcatggattttacataacagaaatgtgaaccacacacaagaaagctggcatgaggtcatcttatatcctgtccaatagggctacctaggagggcaaagtcctcagtagagagaagctgatggcatagtctgactcatagggattggagagggaataagcaacacacygaatgagagggcaccattcacatgaacagagttgcagagagatccttgaagatggtgtggaagtggagagaggacaaggagtgaaatctccaaagaatacatgatggcatctatgaaatcattacctttaaactcacgccagtgccagagaatatttgaaaattgttgtgggttttttttaaaaaaaaaaaaaaaaaacaatctcaaacttacagaagcatgcatgtacaata

SEQ ID NO: 260726 - DNA, 645 bp, Homo sapiens
gtatacacatatggcctgacaaaaaataggtaacagttgttggataaagaattatatttgcagaaatagaatggaaaagatactgttaacagtattatttctgggaaaagaggaaagggaattgttggatcaacaaggtcactggtcttgtagtttttactgtatacacttctatatttatacagtgttttaatttttgtgagcacgtattttcaatattaatttcttaaaattgtattaactaagcagaaaactaagcagagatattgcggacctgaacttttgagcttttagcttcatgggttcgtattacgggatacaatgcccatggggtagcaaatgcctccagggaacaggcaagtaaaatacataagcaaagtggactgcaatatggaytgcagcaagtgggggcaaggcaagccctgtgcacagtggccaggtgctgccaagtccagccaattactgttacacagaaacatgggaccaatgttgtcagatcacccagttttcaaaagaagttcaaaatctagaatatttttagagaagtttcctgatttttaaatgaaagcaattgattgaaaaggtttgaggtttaagatgcaggcaaaacaaaatgtctgtggcctaaattcaacctgtttgcac

SEQ ID NO: 260727 - DNA, 586 bp, Homo sapiens
catattaacaatacttaacacacaaagctaaaataatgggctctctggttcttccattaaagtaatttggaagcggcaagtaaggacaatacctggcacatagtaggcactccacaaatttattgagaaacaaattagaaacaaaacagctagaattatcagccaactacctgacagggagagaggacatgtcctgaaaagtggacacaggcctaaagtaatctattattctgaagctattaggggtacaaataaagctcctgagagcagcactctgcactgcacaacacaaagctcctcttacaccctggttaagaggctcagctttgtagccaggatccaattgctaccttmcagctgggtgaacttggttaagtaccttaatctcacttaacattggtttcctcatctgtaaactctgcctcatagggttgtgagaattcaattagttaatacatgcaaaaatcatagaatagtgcaggtacataaaaaacattcaataaagactagctatggacaaaaataccatcatcatgaaaaagacgaccttatgttcaggatgatctaattaataaggcaggaaagt

SEQ ID NO: 260728 - DNA, 586 bp, Homo sapiens
catattaacaatacttaacacacaaagctaaaataatgggctctctggttcttccattaaagtaatttggaagcggcaagtaaggacaatacctggcacatagtaggcactccacaaatttattgagaaacaaattagaaacaaaacagctagaattatcagccaactacctgacagggagagaggacatgtcctgaaaagtggacacaggcctaaagtaatctattattctgaagctattaggggtacaaataaagctcctgagagcagcactctgcactgcacaacacaaagctcctcttacaccctggttaagaggctcagctttgtagccaggatccaattgctaccttacagctgggtgaacttggttaagtaccttaatctcacttaacattggtttcctcatctgtaaactctgcctcatagggttgtgagaattcaattagttaatacatgcaaaaatcatagaatagtgcaggtacataaaaaacattcaataaagactagctatggacaaaaataccatcatcatgaaaaagackaccttatgttcaggatgatctaattaataaggcaggaaagt

SEQ ID NO: 260729 - DNA, 499 bp, Homo sapiens
tagaatagtgcaggtacataaaaaacattcaataaagactagctatggacaaaaataccatcatcatgaaaaagacgaccttatgttcaggatgatctaattaataaggcaggaaagtaaataacaaaggtatggaagatcttcatccaaaattattaaaacaaaatgttttggttttgtagagagctgtttttaattatctggaaaattcatgtgaaatactccattgaaaagcaaatctgcagagctgaggacagtgttctgtgaaacactggaattagagtgcctrgacacgagtttcagctctgccagttgccagctgtgtagcactgggcaagacacttaagcatgcttcagttttctcatccataaaattaagatcatagaaaagttgttatcagaactatattatgacttccatgggccctgggtacatttgcctttatgagttgcttcctccctaaaataatattaaaagttgtttgtaccactgactgaa

SEQ ID NO: 260730 - DNA, 524 bp, Homo sapiens
gcgacagctagagggaggcctcactcgagacagaggctgtgctggctgtccaaaacctcttctgagcctgggtgatctctgtaagacacaytttcagctgctccacctcagctgtccccacccaggccctgtgctgacaggacacttctgcttcagggggaaagtcctgttcagggtgcaaactatgcctgcctcatctttctactatgacaagcccagtatagagttccacaccaatagatgttgctcccacagggctagaattcacagtgacagctaagtgccttgccctgtatcccctcctccaaaactcccgtaattctaagagttaggtactagatatgcctattttacagatgaagaattgaggcagagggatgttaaagcaaatctaccagatcatagtgaatgcatgagtcagagtgggccaggagaggggtaattaccagcacaaagtacctgatatgatttggctgtgtccccacccaaatctcattttaaattgtagctgtcataattccaac

SEQ ID NO: 260731 - DNA, 604 bp, Homo sapiens
ctattttactaatttcacttgttttaaacaaatattttagtacatactttaattawtttttactctttagctatgtttctgtacatgtttttagtggttgctctagcttatcaaaatctaacttaatattaacttatttctggtaaaatgctgaaacttaatgatattatagtttcattatattatagctttattacaccctttcttttctttgtgagattcttgtcatacatatttcatatacatacatgttgattccaaaaatacagtgtcacaattttaaacagccacatgtcttttaaagaaattaagagggagaaacgaagaaacatctctttcagctttgcccacatatttactttttctggtgtacttcgttctaacttttacctccaagttaccatctagagatactcactcagcttgatggccttctcttagcagttcgtgtagggaagttctgctagcaatatattttctgttactttcttgagagtgcatttttttttgaaggatcattttgctggatattgagttcttgccagatggatttttcaggggtttttgatttttcttctttcagtatgctctttgaatataccat

SEQ ID NO: 260732 - DNA, 524 bp, Homo sapiens
gcgacagctagagggaggcctcactcgagacagaggctgtgctggctgtccaaaacctcttctgagcctgggtgatctctgtaagacacactttcagctgctccacctcagctgtccccacccaggccctgtgctgacaggacacttctgcttcagggggaaagtcctgttcagggtgcaaactatgcctgcctcatctttctactatgacaagcccagtatagagttccacaccaatagatgttgctcccacagggctagaattcacagtgacagctaagtgccttgccctgtatcccctcctccaaaactcccgtaattctaagagttaggtactagatatgcctattttacagatgaagaattgaggcagagggatgttaaagcaaatctaccagatcatagtgaatgcatgagtcagagtgggccaggagaggggtaattaccagcacaaagtacctgatatgrtttggctgtgtccccacccaaatctcattttaaattgtagctgtcataattccaac

SEQ ID NO: 260733 - DNA, 581 bp, Homo sapiens
cagccttaataagtaaatttgataatagttgttactgagaaattataaacatgaagaaatattttgtaggaccagggtttgtagtggtatatgcaggcacagccataatgtgtgccgtttgatgaataatgatgaaatagaagtatagatattaaatatccttcttcccaaatggccaagagagatcaaggcagaacactcagagtgaggccaaacctgcacctacttccctgggcacaatggctctgccaagcccaaggtcagcctcattttgcctgccctttcccacgagggcagcctgctggctggtagagttccgtgtcttcccttctagctggagcctggcagctgcaaatgtccataattatggaagatccactagttttctgctctgtggttgaaacaaggacagtttctctttttattgctgttctgtggcttcatgttctgaatcgccgstattattaataatggccaaggggatcttattagcatagggtggacctagccatgcatctctctaagagcggttgtgagagctgacaggttaacaaagctactcacataaacggcagagccat

SEQ ID NO: 260734 - DNA, 452 bp, Homo sapiens
aagggactttattctactgtcatcctgtcatctttatgcagaagattgctaaagagatttttgcttagatagattgattagaacagctgagctgaagcaacttgattagaatatagatggtcacatgccgtttttcatagcagccttgcagtgtgcctctttctatgcatggtttcccctgctttgaaattcttcatgctttcctgggacattgtgatgggacacttgatcagctgatcctggggctgggttcatggaggtcgtgcttttagatcaccctgcataaggccaccctgcataaggctacctgactgggagtcccttgggtaatcaacatgcagaagaatggtagagaaagcctacaygcactccaggtatgcccacattaggtataaacgtctcatgtgtaaatgtaccagctgggttaggccaaacaagccttcattaaaata

SEQ ID NO: 260735 - DNA, 554 bp, Homo sapiens
agattccttttacttacccttgggctactgaggatgtatttagcacatgcgrgcagctggaaatgcctggacattcacggcactccatcatgacttattctggcagaagcatgaaagtgatgctcccaggctgggaaccaacagtgtccccatgaaagcctcctgtggctttgaaatgacttttgcaaagatgatgacagtgacagaaatctaccatggctgactccatcttgcttctaacctcacaggcttgctgtctttgctcattcgtgggtgtaggccaagccaaccatggaaggaattcagcttacagtttaacttcgaagcaaggatgatagcagtccttcccccaaactggccacctctttgttcagggctgaaactgcctttgtaagactaaataaatgtcataagcttaggattatgagatggccccaaattccgctaaaatataggcatcgtttctgtaatcccttgatgcttagaagtcatgtggccaggagtcacaagatttgtgactcctccaattgctcctagagatgacatcactgcca

SEQ ID NO: 260736 - DNA, 592 bp, Homo sapiens
aggtactcaatttgtaggtctttatgaaaaagtctcactttgcaaaatttactaaaataaaaagcaaattatccagatatccttagattccttttacttacccttgggctactgaggatgtatttagcacatgcgagcagctggaartgcctggacattcacggcactccatcatgacttattctggcagaagcatgaaagtgatgctcccaggctgggaaccaacagtgtccccatgaaagcctcctgtggctttgaaatgacttttgcaaagatgatgacagtgacagaaatctaccatggctgactccatcttgcttctaacctcacaggcttgctgtctttgctcattcgtgggtgtaggccaagccaaccatggaaggaattcagcttacagtttaacttcgaagcaaggatgatagcagtccttcccccaaactggccacctctttgttcagggctgaaactgcctttgtaagactaaataaatgtcataagcttaggattatgagatggccccaaattccgctaaaatataggcatcgtttctgtaatcccttgatgcttagaagtcatgtggccaggagtcaca

SEQ ID NO: 260737 - DNA, 531 bp, Homo sapiens
  misc_feature (1)...(531): n = A,T,C or G
ttctcttgttctcagctgtcanaaattttaactcaacagactaggacactcctgaggccagcraccaggtctgaacccgacacctagcagggttcactcaatacatgcttggtgattgaatcaggaagtaaagccaataaccaaaaggggaatcattgggaccgatgtggtagcacatgcctataatcccagcactttgggaggccaaggtggatggatcccttgagcccaggagttcaataccaggctgggcaatatgaaagatacaaaaattagctgggtgtggtggtgcatgcctgtagacccagctactcagagggctgaggtaggaggatcacttgagctctggtgatcaaggttgcaggaagccaagattgcactaccaaactccagcctgggtgacagagtgagaacttatctcaaaaaaagaaaagaaaagaaaaaaaaaactttcttaagagaatcatttaattataacatttttaaaaaacaaggataaagctaagaacataagacaatctggtctcattt

SEQ ID NO: 260738 - DNA, 517 bp, Homo sapiens
gtctgaacccgacacctagcagggttcactcaatacatgcttggtgattgaatcaggaagtaaagccaataaccaaaaggggaatcattgggaccgatgtggtagcacatgcctataatcccagcactttgggaggccaaggtggatggatcccttgagcccaggagttcaataccaggctgggcaatatgaaagatacaaaaattagctgggtgtggtggtgcatgcctgtagacccagctactcagagggctgaggtaggaggatcacttgagctctggtgatcaaggttgcaggaagccaagattgcactaccaaactccagcctgggygacagagtgagaacttatctcaaaaaaagaaaagaaaagaaaaaaaaaactttcttaagagaatcatttaattataacatttttaaaaaacaaggataaagctaagaacataagacaatctggtctcattttttcattacattgatgaggaaattaagtctcagagaagctgactcatttgccca

SEQ ID NO: 260739 - DNA, 517 bp, Homo sapiens
gtctgaacccgacacctagcagggttcactcaatacatgcttggtgattgaatcaggaagtaaagccaataaccaaaaggggaatcattgggaccgatgtggtagcacatgcctataatcccagcactttgggaggccaaggtggatggatcccttgagcccaggagttcaataccaggctgggcaatatgaaagatacaaaaattagctgggtgtggtggtgcatgcctgtagacccagctactcagagggctgaggtaggaggatcacttgagctctggtgatcaaggttgcaggaagccaagattgcactaccaaactccagcctgggtgacagagtgagaacttatctcaaaaaargaaaagaaaagaaaaaaaaaactttcttaagagaatcatttaattataacatttttaaaaaacaaggataaagctaagaacataagacaatctggtctcattttttcattacattgatgaggaaattaagtctcagagaagctgactcatttgccca

SEQ ID NO: 260740 - DNA, 456 bp, Homo sapiens
tgtatatgaagcttgtatcctacatccttgctgaactcatttatttcaatagcttttagtggatttcttaggatttastatatacaagataatgtcatcttcaaacagagacagttttacttctttttaatctggatgcattataggtcattttcttatgcaactctcttggctaggacctctcatataatgttgaatgaaagtggtgagaatagatgttcttgttctgttcttgatcttaaagggaaggaattcagtgtttcactgttaagtgtgatgctatgtgtgggtttctcacagatgccctttatcaagttgaaaaagttgccttcaattcccagttatttgaatgttgtaatcatgaaggggtgttgtattttgtcaagggttttctctgtatctattgacaagatcatgtgggattttgtctttattcaatatatcaacagcattaat

SEQ ID NO: 260741 - DNA, 610 bp, Homo sapiens
aggtgcctggaccttctagcagcttttcatcaatgttttcccattttaggggtggcaagctcataattacctgtcttcagctttctgctagtattcagggcagggcagcaggaaaattgattgaaggatgtgaaacacggtgtcctatttcaaacatggattatcctaatacaacacagacactgtaagggaaaaaaattgtatttttttttttaaagaagactatttgtcgcrgaaactgatttttaacaactgtggaagggatcttccaaagcctgtatggactttctttgcaggaaatgacaccagttcaggttggagaggactgacagcagcctttccaaagggccttcatcctattcaggtcctctcagggtgtcttagagagacatggaggcagcatggctggttttcctttccccatggcagacaccaaggcaaaggcaggagtgaatacaatttctctatctttcattcaaatggaagaatcatcaggcatgaaaaaggcctccaggttcaaagtgatgagaaggtagatctttcatggaattttcttttattttctaagatctaaaacaaaacaaaacagaacaaaacacaacctggccat

SEQ ID NO: 260742 - DNA, 514 bp, Homo sapiens
accagtgggccatgaaagaaaatgtaagagcttctcattgtattaaatcttaatgagaaaggaaagagttatctgtaatgttttattatcaggtctctaatcaagatggataggcacccagaggaagccagtggcacctcactaggttatttgccttactgacatgctttgcagcttacatgtgtcacaagaagttcgtttaaagattgtatcatctaatgttactgagttatctttgggaatagaaaattgatttcaaaagtgtgtgcacagagatatcagttgcacctcggtagtccagagagcagaacagtttggcccagtcacccccagcaagggtcaaaaacaaaacaggagccccatgtggacacagattccaggygtccacttctagctgacatggagtcagtcacagaaactgcatataccctttcccttaaaacaacagaaaaaagaatttaggaaatgatgtttttcaggacactttacatcaagcagtgaaggacagtgatta

SEQ ID NO: 260743 - DNA, 600 bp, Homo sapiens
ttcaggactctccccatcactgacaatacatcagtaaacaagacagatgcaacctctaccctgctagaacttaccttttgccgggggaagatcgrtaatgataaaataagtatttgttgaatgaaataaataacctagtcattatgctgccacaaagttggccaaaacatttgaatttgccaagaagtttattcttaaaatagatttatatctgctattattaatcaataaccttggtcaacgtctatatataatgctttgagattaatcagctactgatgaaataacatataataaaccataagtacaaaaatatatacatagggcatatattcaaaaatgtttgattgatagtgatgcgtgatcagcaatgtttgcagagcatcagtctaggtccaggccaactatgggaagagtgaatgtgtgatggaccactcttcccatttcaaggaggtacattggtctcctaaaagaatatatcatagaacctgcctttgaggatgaccaatcttttattttaacatctttgtttctgttgaaatattctgtttggctttcttcctataagatgggaaagaagaggaggaagaaggaagagca

SEQ ID NO: 260744 - DNA, 552 bp, Homo sapiens
tgaactctgaagccgttctgccttggttcaaatcccagtccctcttggcagatgcrtgaactttggaatgttttagaacttccctgtttcagttacgccatctataaactggaaattatactattacctgtctcacagggtgggtaagaaataagtaggtaagcatttgcaaattgcttagagctatttgaaagctctatgtaagtggcagctaccattacaattgttagatgctcaggtttttataaggtcaggttcccagaaatacctgtctccttcaatctaattttaatacataagcactcttccaaccatgttttaaataattagttcagctctgtgtaacagaagttttcttttacaatggttattatgtgcaacaattgtcttgtgatgtgcaatttccacatctgccttgaaaggtagacgtcatcatctctgtctagaaaataaggaaaggggaagtacagagaactctcagagccttggattaaactgaggattaaattccagtccagctgattataaagtccttattcttcccatttattt

SEQ ID NO: 260745 - DNA, 588 bp, Homo sapiens
ttctgatcctgggcgtgttcatcagtgcctatggctatcagtgctcacgggtgaggtatgygtgttacggagaatctttatactcagaattctctaaaactatgctttccaaattctctctctgttggcttttgtatttgtgtttttttctcattcttctttcatctatctttctttgctctgtggcagcagtccctaacctttttggtacgagggaccggtttagtggaagacaagttttccacagacagaggggttgtgggggatgattttgggatgagactgtcctacctcagatcatcaggcattagttagattctcataaggagcacacagcctagatctcttgcatgcacaattctcaatccggttcctgcttctatgagaatgtaatgccatcactgacctgatgggaggcagggctcaggtagtaatgctcacccacctgccactcacctcctgctgtgcagcccacttcctttcccccaggggttggggacccccgatttatgggaccctgactacttcagtggacactcctcttttaatccagcttattatatgcttgttacatgaagctcctaccaa

SEQ ID NO: 260746 - DNA, 588 bp, Homo sapiens
ttctgatcctgggcgtgttcatcagtgcctatggctatcagtgctcacgggtgaggtatgcgtgttacggagaatctttatactcagaattctctaaaactatgctttccaaattctctctctgttggcttttgtatttgtgtttttttctcattcttctttcatctatctttctttgctctgtggcagcagtccctaacctttttggtacgagggaccggtttagtggaagacaagttttccacagacagaggggttgtgggggatgattttgggatgagactgtcctacctcagatcatcaggcattagttagattctcataaggagcacacagcctagatctcttgcatgcacaattctcaatccrgttcctgcttctatgagaatgtaatgccatcactgacctgatgggaggcagggctcaggtagtaatgctcacccacctgccactcacctcctgctgtgcagcccacttcctttcccccaggggttggggacccccgatttatgggaccctgactacttcagtggacactcctcttttaatccagcttattatatgcttgttacatgaagctcctaccaa

SEQ ID NO: 260747 - DNA, 607 bp, Homo sapiens
tgttgatttcaatattaatgctaagatgcgataataaaaatgctcagtggatatagcatgcaaacatatgtatgtacattttcaaatcattttgttaaggattttgttttctgggagatacagttgtattttgggaaaaaaataaaatcagatggtcttggtatagattttaatgctaactagctgtgttatcttgagcgtgatatttaaacgttctggatcctctcattaacttgagagtaaaacaacctacctcaaaatattgttgtaaatacttagtgaagtaatttatataaaaaaaaacctcctgtagaatatctgacatttgtgtagtgagttaacatttgaaaaaataatcagaatgcttagacatataaccaaatttttcttcagcagacacatttaaaagtatccctctctaaaattttgagccaaagagaaaaattttggcctatgggtttttatctaaaaaaatagttgtgctgttatttgtatctaacagtttttaataaatccaaygcaacagaattttaagtggctattattgatgtgtcaaagataaatagtaagatttttttagatcaaagaagtttaaaatcttttgggt

SEQ ID NO: 260748 - DNA, 504 bp, Homo sapiens
taatttttcaacaggtattatttacttactaacataaaaccagtcactttactttcatagatcaagtttaaaccatacacacagcaagagaggtgagcatattttctcaagcaaaaagtaaaggcggatgattatggagacagtgtgtgtagactcacaaggtctctgggagagaattatttgaattggtgactttaaggaaaccttgggtgtggtatttatatattcttccaggtaaatttatatcacccctccttgccttttagaaagattatttttattsagcacagaatagttatcaaagaatatttattacataaatataaagtatcaagcatgataatattcactatttaatttagggaaaagaacattgccattggctttgacatttcctatgtgcccttccccatcccagcctggtctcccctctctctcagaagcaaccaatattctaaatgttatttctcagccctttctgcccttttaatttatttattgttt

SEQ ID NO: 260749 - DNA, 500 bp, Homo sapiens
agctataatcagaatccagtacttttccatcattgcagataaattcctttayggtactcctaaagagctgtactctgccccaaccctaaaccctggaaaccacagattggttcttcatcactataattctgtcattttgagagtggattggcttttttacactcagcataatgtcactggggttcaccaaagctgttagtatatgaatagtgtgctttatttctgagtggtattccattgtgctatagtattataaaaagtactatagtttatttatccattcacccttgaaggacatttgggcttttttttttctcctagtttttgtctattataagtaaagctgctatcaaaattcacataaaacttttttgtgtggaaatataagttttcatttatttaggataaatacctaagagagcaatttctgggtcatatggtaagtatatatttaattttataagaagatactgaactgctttccagagacactacatttc

SEQ ID NO: 260750 - DNA, 500 bp, Homo sapiens
agctataatcagaatccagtacttttccatcattgcagataaattcctttatggtactcctaaagagctgtactctgccccaaccctaaaccctggmaaccacagattggttcttcatcactataattctgtcattttgagagtggattggcttttttacactcagcataatgtcactggggttcaccaaagctgttagtatatgaatagtgtgctttatttctgagtggtattccattgtgctatagtattataaaaagtactatagtttatttatccattcacccttgaaggacatttgggcttttttttttctcctagtttttgtctattataagtaaagctgctatcaaaattcacataaaacttttttgtgtggaaatataagttttcatttatttaggataaatacctaagagagcaatttctgggtcatatggtaagtatatatttaattttataagaagatactgaactgctttccagagacactacatttc

SEQ ID NO: 260751 - DNA, 443 bp, Homo sapiens
tcttatggctgaaaccagggagcctgtgaattttcaatgagttgattcactgcatgctttcccacaggagctgtggggtttgtggatttttattaagcattttctaggagattctgtcttttctgggttgtaattctcatgggttcagagtgcaaatgtctaggttaatacctccagctccaagagggtctgcaggataatggtgtaactgtgacaaatacggtcatgccaaaaaacagaagccacttcacattcagggaggaagagaattaacaccgagaagaggcttacacaaycattgcaaggatacgagagggaaaggggtatagattagaaagattgcttttgggaaatctcaggaaagctaccatcagaaatccttggtatcttcagactctgaaaattgctgagaaacccccatgtcacccctctgcgcatgtcac

SEQ ID NO: 260752 - DNA, 469 bp, Homo sapiens
tatgcttcgccctgatgatctttgctttccttctgataattcagagagcccctgaggaatttttcactctgcagttggagatccctctgaagccctgagtgttggtgcacccagcaccacaatcatcccaaacacaattttgtttctgacctgctgctttgctttttacactctttctggttcctggcctacaygcttgtgatccaacacagctgtttcagattcagaaccatctctcctttcccccaggctcaaggctacattctgggtggcccagggtgagaggaccggatccccaggcaaaggtgtccagctgcagttggcagatttttgagttttcattaaccaagtcatcaagcattatacttgtttcattaataatttagtctgagttacaatattcagtatttaaataatctccaatttcattaaatacatagaacatagtaactgataagactgatatttt

SEQ ID NO: 260753 - DNA, 494 bp, Homo sapiens
actaggcttgaagggaaccagctgcattgaagggaatgacccagtcctgtcaggattcatctcctgctgagtagagagccctggggcctggaataatcagcagtggtacccaggcagtactcgacatgggccttgggtgagagtcagagatgtgctagcttcatgtgtgacgtagcacatttccagytgtgatggctatgggcagagacttcttctgcttaaggaaagtaggaggaaaagtaatggggattttgccttgcaacttaggtaccttgcaacttaggtaccaattccaggctttggctcttggatggcatttcagggtcagccctgggtcagagaggagcctactgccctgaagggtgagtctcagtcctggcagcattcaccacacattgactgaagacaccttgggccttgaatgagcattggaggcagccaggcagtacctatcagatacatttaacaaagagattgaaataattaaaaagaat

SEQ ID NO: 260754 - DNA, 531 bp, Homo sapiens
agacttgggtggggacacagccaaaccaaagcaggcagtgaagttatttatgctcaggttacccaataaaataatttagcaaaacaaaaggtttctaaaaagaattttctaaaatcactgtatagcagtgtgtatgcttgtcactcattgacaaggatggttcctggcaagttacatatttttctccacaaaataagtgaataaataaataaaaatgccccaatacctattctctcagcaatttgcaggtgagaccctcaccctttttggtcaggcagtggtggctgttaccacgaagctccctgaagtcaccttcctgtaaattctccacgagcatttttggcttggccacattaaatggaaataatgctgttggaactattgctgttatgtccacaataaatgcagaattccagatagctgtgaatcaagctgaactaaggagaccrtccactctctaggactggaaatctctgtaggcttctttcaattagtttttgatctaaaaatgctttaaatgtatgtgttttt

SEQ ID NO: 260755 - DNA, 529 bp, Homo sapiens
gattagcaaattattctaagatagttaacactttaagacaaatgtgcccaaatctatcgaacactgtgttttttgtatacacataaaggcacagggctcccagggcacttgtcctctctggtgggactaaaagctgggtttgccagttctcagccaatggtgcacacatgtaacttaggcctgaggtcaagtaaagctggttttttttttttttggtatatttttaagtttgtaaagttttaagacaagrtcaggtgcactttcactagtttaagtaaatgtaaacttgtgcatgacccagtcagtatttgagaaaccaaattcagaggaaattatttatcccataaagattttgcacccaccacagcctggggttgcagttgcaggtatttcaagactttagacttgggtctatttcaaatacgtgggcatagataattcttctacatttttataaacgaagtagctctggttcttcatctagtagaggaggtattgctctaacttttcatggggtaatcacagcaaa

SEQ ID NO: 260756 - DNA, 529 bp, Homo sapiens
gattagcaaattattctaagatagttaacactttaagacaaatgtgcccaaatctatcgaacactgtgttttttgtatacacataaaggcacagggctcccagggcacttgtcctctctggtgggactaaaagctgggtttgccagttctcagccaatggtgcacacatgtaacttaggcctgaggtcaagtaaagctggttttttttttttttggtatatttttaagtttgtaaagttttaagacaagatmaggtgcactttcactagtttaagtaaatgtaaacttgtgcatgacccagtcagtatttgagaaaccaaattcagaggaaattatttatcccataaagattttgcacccaccacagcctggggttgcagttgcaggtatttcaagactttagacttgggtctatttcaaatacgtgggcatagataattcttctacatttttataaacgaagtagctctggttcttcatctagtagaggaggtattgctctaacttttcatggggtaatcacagcaaa

SEQ ID NO: 260757 - DNA, 603 bp, Homo sapiens
gtttttaatataattaatttcactgtaaatgtatgtattttaattattctcacagtgatttggtgtctttattaatacagtattttttccataaatgggaaagacgtatttgaaagacttcaaacacaataatcttgcaagaggaaaagtttgtcctatctaaaaactcatatatataagtggtaggctcataayctccgcgttcaggcaaactgaactccaagaagccctgcaaggctcccgtgaggccccagttgttttcggagagctcaattccaaaaggctgggggagacggacagagctccatgcctcgcccacccaacaggagcatctcccacgggctccacccttcccactctttccacagttggctgcttagatggcacctgactgcagcttgctccagactcaaagacagagcctgtaactctctaagagcagaggaatgttcacgagcaccctaagaggatagcagggaaggagaatccagaaaacagagacagaagggtgggacaggtggcaggagatgtatagccttctaaatagaaatcaatcgcattaacaaaaaatcagtccaccaccggccacctctttcaaacgct

SEQ ID NO: 260758 - DNA, 603 bp, Homo sapiens
gtttttaatataattaatttcactgtaaatgtatgtattttaattattctcacagtgatttggtgtctttattaatacagtattttttccataaatgggaaagacgtatttgaaagacttcaaacacaataatcttgcaagaggaaaagtttgtcctatctaaaaactcatatatataagtggtaggctcataatctccgcgttcaggcaaactgaactccaagaagccctgcaaggctcccgtgaggccccagttgttttsggagagctcaattccaaaaggctgggggagacggacagagctccatgcctcgcccacccaacaggagcatctcccacgggctccacccttcccactctttccacagttggctgcttagatggcacctgactgcagcttgctccagactcaaagacagagcctgtaactctctaagagcagaggaatgttcacgagcaccctaagaggatagcagggaaggagaatccagaaaacagagacagaagggtgggacaggtggcaggagatgtatagccttctaaatagaaatcaatcgcattaacaaaaaatcagtccaccaccggccacctctttcaaacgct

SEQ ID NO: 260759 - DNA, 603 bp, Homo sapiens
gtttttaatataattaatttcactgtaaatgtatgtattttaattattctcacagtgatttggtgtctttattaatacagtattttttccataaatgggaaagacgtatttgaaagacttcaaacacaataatcttgcaagaggaaaagtttgtcctatctaaaaactcatatatataagtggtaggctcataatctccgcgttcaggcaaactgaactccaagaagccctgcaaggctcccgtgaggccccagttgttttcggagagctcaattccaaaaggctgggggagayggacagagctccatgcctcgcccacccaacaggagcatctcccacgggctccacccttcccactctttccacagttggctgcttagatggcacctgactgcagcttgctccagactcaaagacagagcctgtaactctctaagagcagaggaatgttcacgagcaccctaagaggatagcagggaaggagaatccagaaaacagagacagaagggtgggacaggtggcaggagatgtatagccttctaaatagaaatcaatcgcattaacaaaaaatcagtccaccaccggccacctctttcaaacgct

SEQ ID NO: 260760 - DNA, 603 bp, Homo sapiens
gtttttaatataattaatttcactgtaaatgtatgtattttaattattctcacagtgatttggtgtctttattaatacagtattttttccataaatgggaaagacgtatttgaaagacttcaaacacaataatcttgcaagaggaaaagtttgtcctatctaaaaactcatatatataagtggtaggctcataatctccgcgttcaggcaaactgaactccaagaagccctgcaaggctcccgtgaggccccagttgttttcggagagctcaattccaaaaggctgggggagacggacagagctccatgcctcgcccacccaacaggagcatctcccacgggctccacccttcccactctttccwcagttggctgcttagatggcacctgactgcagcttgctccagactcaaagacagagcctgtaactctctaagagcagaggaatgttcacgagcaccctaagaggatagcagggaaggagaatccagaaaacagagacagaagggtgggacaggtggcaggagatgtatagccttctaaatagaaatcaatcgcattaacaaaaaatcagtccaccaccggccacctctttcaaacgct

SEQ ID NO: 260761 - DNA, 569 bp, Homo sapiens
attgttggtaacaatgcaaaataatatttattaactgtcattggatgggttcaggttaaaaaaccacctagcaaccagtgcgacacacctgcgttctcatttacctgatgcagtatgaagacacrgagatccctttccataagacagcaaatttccaaatgtcacttgtaagtggcagaagtaaaagcatgcattgaaaaagaataagacttgtcctcatgtcaaattgtggcccaggatatgaacgttgctgatggtgtcacaatcagctgattagccatttcaggcactattatgtttgaagtacgccctgattgttggagcattaactttggtattgagatgctaagcgcttcttttatctccttcactaagaataagcaacgatagaggaatattttaatttataaaggaggagaaggaggaaaggttggggacgggaaggaggatccgaggatgtaggaggggacggaaaagaaagtaatttgctctttatgacggctttgatgcatacattaatagctttagattcttcctaagctctttagaataaactaaaatgaacttcc

SEQ ID NO: 260762 - DNA, 569 bp, Homo sapiens
attgttggtaacaatgcaaaataatatttattaactgtcattggatgggttcaggttaaaaaaccacctagcaaccagtgcgacacacctgcgttctcatttacctgatgcagtatgaagacacggagatccctttccataagacagcaaatttccaaatgtcacttgtaagtggcagaagtaaaagcatgcattgaaaaagaataagacttgycctcatgtcaaattgtggcccaggatatgaacgttgctgatggtgtcacaatcagctgattagccatttcaggcactattatgtttgaagtacgccctgattgttggagcattaactttggtattgagatgctaagcgcttcttttatctccttcactaagaataagcaacgatagaggaatattttaatttataaaggaggagaaggaggaaaggttggggacgggaaggaggatccgaggatgtaggaggggacggaaaagaaagtaatttgctctttatgacggctttgatgcatacattaatagctttagattcttcctaagctctttagaataaactaaaatgaacttcc

SEQ ID NO: 260763 - DNA, 620 bp, Homo sapiens
gcggaaaacagcggcgacatcgcggtgagacggcggggtccgcgggagaggagccgcgggggactcgcctccagctgtccggacccgcggtttccgcgctggtgggagcgcccgggactcacctgctcggccacctgcgccarcagcatccacagcgccgccaagccccgccatccgcgcgcgcggggcttcatccaggagcgctccgaggggctaggggccaccggagggtccccggccggcagcgtgcgagcgggcagggaggacccgacccaggcagagcgcgggaggattccccacagcgactccgccgccgcgccggggttattactgaagctccgtgcggcgcggggggcggagtggcagccgcggcggcgggggcggcgggagcggtgggagagcgcggggcgggcaggggagagaggaggggaggaggtgagggcgggggggtcagaggaccgaggaggggagagtgcagggacaaagagcagaggggaggaggcgaggtcagcggggcgctgaggcggaggcgagaggggagcagagggaaggcgggagacagcgggcagcgccagaggaggaggacgcgggaagatggagctgcccacggcctgcagtcc

SEQ ID NO: 260764 - DNA, 620 bp, Homo sapiens
gcggaaaacagcggcgacatcgcggtgagacggcggggtccgcgggagaggagccgcgggggactcgcctccagctgtccggacccgcggtttccgcgctggtgggagcgcccgggactcacctgctcggccacctgcgccagcagcatccacagcgccgccaagccccgccatccgcgcgcgcggggcttcatccaggagcgctccgaggggctaggggccaccggagggtccccggccggcagcgtgcgagcgggcagggaggacccgacccaggcagagcgcgggaggattccccacagcgactccgccgccgcgccggggttattactgaagctccgtgcggcgcggggggcggagtggcagccgcggcggcgggggcggcgggagcggtgggagagcgcggggcgggcaggggagagaggaggggaggaggtgagggcgggggggtcagaggaccgaggaggggagagtgcagggacaaagagcagaggggaggaggcgaggtcagcggggcgctgaggcggaggcgagmggggagcagagggaaggcgggagacagcgggcagcgccagaggaggaggacgcgggaagatggagctgcccacggcctgcagtcc

SEQ ID NO: 260765 - DNA, 595 bp, Homo sapiens
gtctcagggctgcggatgggcctgggtctcggccgccacgggggtcgatcgggctactgtgtggacagggtggccaaggaggcagcaggtgtgcggtcaacagcctcgccagaattctgctgtagctggatggggtgtgtgagcgcgcgggtgtacatgtgcctgggtgtgcgcgggtgtacatccacacctgactgcgtgtgcgcgagtacacgctgtgagcccatagtgtgtctggaattggtgggttcttggtctcactgacttcaagaatgaagccgcataccctcgcggtgagtgggtacagctcttaaggtggtgcgtctggagtttgttacttctgatgttcagatgtgttcrgagtttcttccttctggtgggttcgtggtctcgctggctcaggattgaagctgcagacctaggcggtgagtgttacagctcttaaggcagagcgtctggagttgttcgttcttcccggtgggctcgtggtctcgctgggctcaggagtgaagctgcagatcttcacggtgagtgttacagctcatgaaagcagagtggacccaaagagtgagcagtaggccgggcgcggtggctc

SEQ ID NO: 260766 - DNA, 595 bp, Homo sapiens
gtctcagggctgcggatgggcctgggtctcggccgccacgggggtcgatcgggctactgtgtggacagggtggccaaggaggcagcaggtgtgcggtcaacagcctcgccagaattctgctgtagctggatggggtgtgtgagcgcgcgggtgtacatgtgcctgggtgtgcgcgggtgtacatccacacctgactgcgtgtgcgcgagtacacgctgtgagcccatagtgtgtctggaattggtgggttcttggtctcactgacttcaagaatgaagccgcataccctcgcggtgagtgggtacagctcttaaggtggtgcgtctggagtttgttacttctgatgttcagatgtgttcggagtttcttccttctggtgggttcgtggtctcgctggctcaggattgaagctgcagacctwggcggtgagtgttacagctcttaaggcagagcgtctggagttgttcgttcttcccggtgggctcgtggtctcgctgggctcaggagtgaagctgcagatcttcacggtgagtgttacagctcatgaaagcagagtggacccaaagagtgagcagtaggccgggcgcggtggctc

SEQ ID NO: 260767 - DNA, 636 bp, Homo sapiens
ggaggcctaagtgggctttcatacctcaataggcacttggcaaggagtctggcactgccagtgaacagagctgggccggaggaacaacagatcaacacagagcagcacagcraagccacgggacaggagtggttaaaaggctggggtggcacgagcacgcacagaggcaggtgctaagagcgaagggcaatcaaagcaccagaggagcatgccttgtccattgtcaggaccatgtaggttaggtcaatttcagatatgctagaattaactctcaaagaacacagtgaactcattctcattcagctgtagtcttttgttagagtggagtaaggatcagcttaaagactcaagatgatagagcagaggcagctcctgatcaccactgttaaagagaggggacaaagtgatgagtaaacactgatcctggaagctgattatctaagaaaccatatggggatccatcaaaagagtgaggggagaacagagaagaatgaagctgagtagctgcctatctgggattggtatggagccaggagaagctcctcaacatggggaaagggtgaatgagtgagagcccccacgggatccaaactttccacaagggcctgtgaaatgctgagaatgagagactccctc

SEQ ID NO: 260768 - DNA, 544 bp, Homo sapiens
actcattctctctcttgccaccctgtgaagaggtgccttctgccatgattgtaagtttcctgagacctctccagtcatgcagaactgtgagtcaattaaacttcttttctttataaattacccagtcttaggtattttttcatagcagcatgagaatggactaatataatggatttacagccaaattctaccagacatacaaagaagaactgataccaatcttactgaaactattccaaaaaaaaatcawggaagagggacttctccctgactcaatctatgaagccagcatcatcctgatatcaaaatctggcagagaaacaatgattaaagaaaacatttggccaatacccctgatgattatagacacaaaatccttaacaaaatactagcatcctggagcacatcaaaaagtaattcaccttgatcaagtaggctttattcctgagatgcaagattggttcaacatgaaaatcaataaatgtgattcaccacataaacacaataaaaaacaaagaccatatgatcatcttaataaatgcgg

SEQ ID NO: 260769 - DNA, 599 bp, Homo sapiens
gcacagcattctgacatcgacctgggatgcgggagcttggtagggggaggggcgtccrccattgctgaggcttgagtaggcggttctatgctcacagtgtaaacaaagcagcagggaagctcaaactgggcagagcccactgcagctcagcaatggctactgtctctctagattccacctctagggacagggcatatctgaacaaaaggcagcagacagcttctccagatttaaacgtccctgcctgacagctctgaagagagcagtagctctcctagcatggcgtttgagctcccataatggacagactgcctcctcaagtgggtccctgatccccatgcagcctgactgggaggcatctcccagtaggggccaacagacacctcatacaggtgggtgcccttctgggacaaagcttccagagaaaggatcaggcagcaatatttgctgttctgcagccactgctggtgatacccaggcaaacagggtctggagtggacctccagcaaactccaacagacctgcagctgaggggcctgtctgttagaaggaaaactaacaaacagaaaggaatagcatcagcatcaacaaaaagaaca

SEQ ID NO: 260770 - DNA, 599 bp, Homo sapiens
gcacagcattctgacatcgacctgggatgcgggagcttggtagggggaggggcgtccaccattgctgaggcttgagtaggcggttctatgctcacagtgtaaacaaagcagcagggaagctcaaactgggcagagcccactgcagctcagcaatggctactgtctctctagattccacctctagggacagggcatatctgaacaaaaggcagcagacagcttctccagatttaaacgtccctgcctgacagctctgaagagagcagtrgctctcctagcatggcgtttgagctcccataatggacagactgcctcctcaagtgggtccctgatccccatgcagcctgactgggaggcatctcccagtaggggccaacagacacctcatacaggtgggtgcccttctgggacaaagcttccagagaaaggatcaggcagcaatatttgctgttctgcagccactgctggtgatacccaggcaaacagggtctggagtggacctccagcaaactccaacagacctgcagctgaggggcctgtctgttagaaggaaaactaacaaacagaaaggaatagcatcagcatcaacaaaaagaaca

SEQ ID NO: 260771 - DNA, 513 bp, Homo sapiens
agctatcaggaacacagatgccagagcccactccctgggggacctgagcaagtcactccctgtctctgtacacmtctctaaaatgagcttaactacagcctctactcacaagattgctgcaagctttggatgtgctaatatatgaaaagtttttagaacagtttctagaatgcaataggcatgctcgcgtttgttatgtttttgttttgctttattttattttattttattttatttctaggcttagcctctacttacttctgatcaaacactgaggttcatgctagatgttgggtacaggctttatataggaactcaatctatgctttttctcatcacactgcataagttgaacattttttgtcaccctttgtcaccagctgtccagtatttggtttctgaagaggtggagacctattggcaagaacagagaagtctggccactttgcacatgggcttgaattgtacctaagaggaggactgatcatacgtctggagttagaggagagagtt

SEQ ID NO: 260772 - DNA, 486 bp, Homo sapiens
tttgcaaggcaccagccccgtgacaggtcgtgtcttgggattgcagaaggacatatttacttgaaacttcaggtctctgtagcagccctctctcacggtcatctgtcctgcaggcaaggatgaaatgtagaataaagactcacatgcatgccccacagtaaaaggcagatgatgagctaataaaatctctttcaaagaatcttagccatactggcatgtgtttgtgttaatgaccaactggccaactattaatactccacttttctgacctgtcttcataagttgtaattcgtgaatttcattcattctaagatgcacatattttccctmcatatttttatattaacatctttaaagtcaacatttgttttgcgattgatgtcatcatacatttgctgaaatgtacctgcttcttttctactctttccatagttgaaaacaccagtggattttcagcagaaacaccaatattaaatacacctgttc

SEQ ID NO: 260773 - DNA, 578 bp, Homo sapiens
cattgatgaaaaccttgtgaaaggaaaataaatcttgggacctcaaaattactaagctaaagggagaagtcaagctgggaactgcttagggcaaacctgcctccccttctgtcagtcatccctctgaggctcacctgagacaaacgcatatctgattgcttcctcacccctatgtttatgtaaaaatgcagaagtgctgagccagactaaatagtgtattcagtggaaggctgatcaaggacacaaaagaatgcaaccgttgtcttgtatctacttgtaacctggaagctcccactmtgagttgtcccgccttaccggacgtaccaatgtacatcttacacatattgattaatgtctcatgtctccctaaaaatgtacaaaagtaaactgcaccactgaccaccttggacacctgtctcaggactttctgaggctgtgtcataggagtgtccttaatcttggcaaaataaactttctaattgaccaagacctgtcttagatattttgcattcacaggcttcacactgaaaagcaaagaaggaagaagagaagtaggagaaagaagagtttaagattat

SEQ ID NO: 260774 - DNA, 353 bp, Homo sapiens
tcattttggattttcaccctccaatatcaatcatccaagcagttaaaacatgctattgtcagataccacataatttaaatcatctgatttaacttttgaaatttagaagcctccaatgggatacacctaatgaagcatttaataaacttaaagtaattgaggatttagttccaaaggatctatgtcatcggatagcatcaaatcctgaaactcctaaagtttacaaggcagagacagtaaattctgaaaaagtgcttaatcaaaataaccacttaaaaytgagtaatgagatcttgggaaataaaagcccttatctcagaagcagtcactgtaattaacattcagtgaataac

SEQ ID NO: 260775 - DNA, 548 bp, Homo sapiens
gtttaaagtctcttgaaataattcttctgttaggattctggttaagctaacaacttgatacattcaaaatgtttcattctgcctttgatgtttagggattattyaacagcattttaagttatctaaaatatttacaagctttttcagcatttagggtttatcctttttaatgtaagcaaatagctattgattagtatttccttttctttgataaatgacagcatattacacagaattttttccatcctacgtttccacttaacaatatgttctgttcatcattccacagaagtatatagacatgtccctcatcgcatttttacagatacataatattccatggggtgtttatccaaccagtcctctactgatggacatttgcattatttccagtcttttgctgtgataatgactgttgcaattccttgtattaggctgatgcaaaagcaattgcagtttttgcaatcaaaagtaatggcaaaggaaacaccaaaagatgcatttattaagacagtgcaaaagtaactttggtttttacatcttttgtt

SEQ ID NO: 260776 - DNA, 543 bp, Homo sapiens
tgatgaggtctgtgtcggttaatggaaaatgacacatgactttattgactaggttgatgaattcactccaaaaaactatcaagccttcataactctaccaagaatagagaagagttgtgctgaaaacttcaggccaattgagttcccttacattttttcccactatcaaaygctagactactaataaggagaacagattcatcttaaaaggtagccatttatccttgctcattgttgggatcatatccaaagagccacctaattggtggagaatataacagtattttgattacttggaaatcagaaagtcagcaaacaatcaaacaagacagtctcagattcattaagtcagtgaaaaatcaagatttaacacactatagaagtgtccaatttgcaactggttttcgagtaaaatgaatcttaatagtgaatttaacaacaagagactttcttggaaaatttcaccattcaagaaaacaaatctgtaagcacgtaaaaccttacctatttatttatactcatgtggtcaaaagaaattggtaa

SEQ ID NO: 260777 - DNA, 593 bp, Homo sapiens
aagctatttttttcttccaccaaacctgctggaatctccctggagattatttcattggtgcatgcaaacstctaaactcatcttactgtatacgttaaatatgtgtagtttttgtgtattaattttagctcattaaagctgttacttaaaaaaaaaaccctttgcttttgttggaagtattagtatttgccctactttttaataatagaaatataattcttcttgtcaaatttcaaactttcctatcacaactagctagttccttagaatctatacatttgtgcccttccctctgttcttcattttaaaatttttatttgcttttttaaatttttaaaaatatttttatttacttttctgcaataggatttggggttcatcatgtggcacagatggctctctgtcacctgagcacatgggtagaggacatttctcaatgccccttgcacttctgggcagtcatatgagttcctccaggaacaccacccttgtcccgcacaccctcctgtgctctctctgtcctcagtccccggatggctgcagtggggaactaggtcctggaagaggaaaggtcacaggatggaagaaacctg

SEQ ID NO: 260778 - DNA, 593 bp, Homo sapiens
aagctatttttttcttccaccaaacctgctggaatctccctggagattatttcattggtgcatgcaaacgtctaaactcatcttactgtatacgttaaatatgtgtagtttttgtgtattaattttagctcattaaagctgttacttaaaaaaaaaaccctttgcttttgttggaagtattagtatttgccctactttttaataatagaaatataattcttcttgtcaaatttcaaactttcctatcacaactagctagttccttagaatctatacatttgtgcccttccctctgttcttcattttaaaatttttatttgcttttttaaatttttwaaaatatttttatttacttttctgcaataggatttggggttcatcatgtggcacagatggctctctgtcacctgagcacatgggtagaggacatttctcaatgccccttgcacttctgggcagtcatatgagttcctccaggaacaccacccttgtcccgcacaccctcctgtgctctctctgtcctcagtccccggatggctgcagtggggaactaggtcctggaagaggaaaggtcacaggatggaagaaacctg

SEQ ID NO: 260779 - DNA, 496 bp, Homo sapiens
gagagagagagagagagatggttctttcagaacaaaaacagtttaaattatctgataccctctaacaattacaagtcaagactgtgagactccctcacccctatatgctaggcaggcaaaaataaaagtcacaactgccaattggttaagaatattcacgtattccaagacagtttctgaagaatggaccatccaccaaattgcctcaaagtgtacaccaatatcatagaaatgtccagatgcctgcgtattgaatggggtggagggacttgggatcttcttgattaggctaacactgctctatgtagcttctttttctccacactcttttctgctcagcaggatcgttagagtttccatgggtgttcgttagaaatgtagatgccaggcttctacccaggaattgttgactcagaaaagagagatccaggcgtttgagctgtccaaacaarctccccaggcgagtttgatgcttactgcaatttgagaactacaa

SEQ ID NO: 260780 - DNA, 620 bp, Homo sapiens
gcgggctgtgcttgacctgaatctgtctgtctatttggagagagtagctccacagaaacccaacaggtgactatggcttcatgtatttatgggtgtcgtttgaagaagcacaggttaccttcatgtgaaaaccacaccactttggagatccacacctggctcagagtacaggtacatctcaagctacagcagctataggaacccttaatgggggccatcagaggtgttgagatcctacaatgccaattaacactcccttaataacacctgagaaaatggagccgtgcacctgtgagaatcacattttccagggctgctacctccstcatcagcaagtctcttcttcttaacctgtgaaagctgtaggagggccttgagtgctctcaaggctcatttcaatgatcccattttcaactatcccagaagaacacaacatacttccttgggagctcttgtggctctgaagacctctcattaaggtaaatacattcttgcagagctaagccactattgccattaatgtctggcacccagccattgtatggattcccagagcacagggtctcatgtggtgagatgcagagaaaagggggaaggcaagagagagggaaagcaaagaa

SEQ ID NO: 260781 - DNA, 571 bp, Homo sapiens
gaattccattaaacacaagcacatgtgtatacacacgcaaacatacatgtacacgtatatgtgcgcgcgcgcacacacacacacacacacacacactgctttgaacaagtctgaggcctcagtccattttccaataatggataagtcagctttgcaaaaccacaaatcacaaacacttgccttggttttccttttgccaataaaatcaggttgaaatttaaaaaaaataaaaacttataattcctggttgtaaatttttctaggagaaatttcaagtattgttgcagcatagcaggaaaagatttgcattccagttggtggttctggtattactcagggtgattgcaggaagtccccagctgcttgggcaggaaatgggcccttgatttttttatttaacagacgatacttcaaggtaaagcagctcacagaattattggcctcagaaattgtattaagaataatagtttccacaaataattgctaraaattgttcattctacaattgtaagcatttcatgtaaggtgaaaacactaatgacccaccgcccattgctgagaccgccaacct

SEQ ID NO: 260782 - DNA, 613 bp, Homo sapiens
gtctaagacctttagcagagtccacgtaagtctgtaaatgagcaaatttattcataaactgccagaaaatcaataaaactatgagttggccaggcgtggtggctcacgcctgtaatcctaacattttgggaggccgaggtgggctgatcacctgaggtcaggagttcaagaccagcctgtccaacgtggtgaaaccccatttctactaaaaatacaaaaattagcctggtatgatggtgggtgactgtagtcccagctactcgggaggctgaggcaggagaattgcttgaacctaggaggcagaggttgcagtgagccaagatcacgccattgcactccagcctgggtgacaagrgtgaaactccgtctcaaagaaataaataaataaaactataattcacaaattacatttatctagaaaactgactgtaaataatcctaatattaatttagtatggtattttatatcagccaattatcatttctctttaactatcccctcctccaaatctagatataataccatagtcattcatgtttaatttcaaatccctagaggaaatttatagaacactttgccaccatgcttgtgttggcttagtgttttattctg

SEQ ID NO: 260783 - DNA, 613 bp, Homo sapiens
gtctaagacctttagcagagtccacgtaagtctgtaaatgagcaaatttattcataaactgccagaaaatcaataaaactatgagttggccaggcgtggtggctcacgcctgtaatcctaacattttgggaggccgaggtgggctgatcacctgaggtcaggagttcaagaccagcctgtccaacgtggtgaaaccccatttctactaaaaatacaaaaattagcctggtatgatggtgggtgactgtagtcccagctactcgggaggctgaggcaggagaattgcttgaacctaggaggcagaggttgcagtgagccaagatcacgccattgcactccagcctgggtgacaagggtgaaactccgtctcaaagaaataaataaataaaactataattcacaaattacatttatctagaaaactgaytgtaaataatcctaatattaatttagtatggtattttatatcagccaattatcatttctctttaactatcccctcctccaaatctagatataataccatagtcattcatgtttaatttcaaatccctagaggaaatttatagaacactttgccaccatgcttgtgttggcttagtgttttattctg

SEQ ID NO: 260784 - DNA, 551 bp, Homo sapiens
gctatgacagtgaggaggcagagagagcttctagagtgactgccaaaactctatatcctggactagatggtggtttcagcagccttcttctatatctgtattatattcttatatttgtaccayattttaattttttcaaataaaacacaaatgattccaattttactggcttctccgaaaattaaattacttctgaaacttttactttttactttaatccaagagtctgttttatctcataagcaactaccaatgttccatcatcacgctgaatttagaagtattttgatataggaaactcaaacaacccaataccaaaaacacaaataaccaaatttaaaaatgggcaaaggccctgaaagaatggccaatatatgaaaaaaaaaatgctctcattaatcatcaggaaaatacaaatcaaaaccacaatgacatatttacctcattcctgttagaatggctattgtcacaaagacaaaaagtgttggtcaggacacagagaggcgtgaactcttacataactgttggtgggaatgtaaactgagacagcc

SEQ ID NO: 260785 - DNA, 604 bp, Homo sapiens
  misc_feature (1)...(604): n = A,T,C or G
ctaccatattgcttttgaaaaactaaatgctctctcagcaagtgttgagcccacattaaaacaagggaacttcagaaccaataatatcttttaatgtctgcttggaaataaaactggtgactctctggcatcaaataacagaccaccaacagagactctgaactaatgttcaactgtgaacaaacaaatgtcagcttaccaattgcatgatctataccgactttagaaactcatagacaaaaagagccttgttaaaggtggacagtatcctctgggaaaacttacaaggccccctctgacagtgaactcantggtaataatagcactgatgagttccaagccgagtaattcattctctcctctgaagacagaatgaaacagggttcttgactgagtaggacagacaaggtaacctggctttaatatctccatattagaattactatgaaactcrttaattttatcagtgctcacagtagggaacaaccaccactttcttagaagactaagggcattatttgaaattataattctaaaaccaaccaccaggacaaaaccaacaaaaaaaaaagatgcaaagaaaacagatcacatcgtgaaagat

SEQ ID NO: 260786 - DNA, 624 bp, Homo sapiens
atgtgactcctgctatttgctttttcttttcttttttctttttaaaattrttttgtagagatggaatactgctatgttgcccaggcttgttttgaactcctggccttaagctagtctctcgccttggcctcccaaagctctgggattacaggtgtgagccaccacactcagccccatgtgctgtttcttatgcttaatgttttttggttattttttttttatctttgacagcctgagccaatatctatgtgtactaggaaaatgccacacagaacactgagcctggcatcacatcagccgttggcctgagtgcaaatgatatctgcaagaccaaacagataaagctatatgtataagtctcagaaagagtaggaggactcaactttggtgatcactttatcaagttaatctcaacaaataagcaaggggtgggactcaacctcttcattcttactgtagcaatctggaatcagtccatcaccatgactgatggtgtaaaatgacataattactcattaatctccacttagaaagtatatattgctactggctggaaatactgcagcaaccaggaggaccttcacatttctaccatgtagaagaattaaagattattacattctg

SEQ ID NO: 260787 - DNA, 624 bp, Homo sapiens
atgtgactcctgctatttgctttttcttttcttttttctttttaaaattattttgtagagatggaatactgctatgttgcccaggcttgttttgaactcctggccttaagctagtctctcgccttggcctcccaaagctctgggattacaggtgtgagccaccacactcagccccatgtgctgtttcttatgcttaatgttttttggttattttttttttatctttgacagcctgagccaatatctatgtgtactaggaaaatgccacrcagaacactgagcctggcatcacatcagccgttggcctgagtgcaaatgatatctgcaagaccaaacagataaagctatatgtataagtctcagaaagagtaggaggactcaactttggtgatcactttatcaagttaatctcaacaaataagcaaggggtgggactcaacctcttcattcttactgtagcaatctggaatcagtccatcaccatgactgatggtgtaaaatgacataattactcattaatctccacttagaaagtatatattgctactggctggaaatactgcagcaaccaggaggaccttcacatttctaccatgtagaagaattaaagattattacattctg

SEQ ID NO: 260788 - DNA, 624 bp, Homo sapiens
atgtgactcctgctatttgctttttcttttcttttttctttttaaaattattttgtagagatggaatactgctatgttgcccaggcttgttttgaactcctggccttaagctagtctctcgccttggcctcccaaagctctgggattacaggtgtgagccaccacactcagccccatgtgctgtttcttatgcttaatgttttttggttattttttttttatctttgacagcctgagccaatatctatgtgtactaggaaaatgccacayagaacactgagcctggcatcacatcagccgttggcctgagtgcaaatgatatctgcaagaccaaacagataaagctatatgtataagtctcagaaagagtaggaggactcaactttggtgatcactttatcaagttaatctcaacaaataagcaaggggtgggactcaacctcttcattcttactgtagcaatctggaatcagtccatcaccatgactgatggtgtaaaatgacataattactcattaatctccacttagaaagtatatattgctactggctggaaatactgcagcaaccaggaggaccttcacatttctaccatgtagaagaattaaagattattacattctg

SEQ ID NO: 260789 - DNA, 624 bp, Homo sapiens
atgtgactcctgctatttgctttttcttttcttttttctttttaaaattattttgtagagatggaatactgctatgttgcccaggcttgttttgaactcctggccttaagctagtctctcgccttggcctcccaaagctctgggattacaggtgtgagccaccacactcagccccatgtgctgtttcttatgcttaatgttttttggttattttttttttatctttgacagcctgagccaatatctatgtgtactaggaaaatgccacacagaacactgagcctggcatcacatcagccgttggcctgagtgcaaatgatatctgcaagaccaaacagataaagctatatgtataagtctcagaaagagtaggaggactcaactttggtgatcactttatcwagttaatctcaacaaataagcaaggggtgggactcaacctcttcattcttactgtagcaatctggaatcagtccatcaccatgactgatggtgtaaaatgacataattactcattaatctccacttagaaagtatatattgctactggctggaaatactgcagcaaccaggaggaccttcacatttctaccatgtagaagaattaaagattattacattctg

SEQ ID NO: 260790 - DNA, 601 bp, Homo sapiens
ttaactctcattttctatcactttaattcaggccatcctttagaggattaagtataatccattcttatgtcctacacaactgagtgtgtagtaccagtacgtaatcctaatgtaatggcacaccccagatgacctttttgtgtgttggcatggtttttcagtttaagcaaaagtttaattgattgaaacttgaagttcacatttttttttctacacaccaatattgaagagaagtcctacaaaatacttattctatggaaaaaaacaaagtccactttagatctaaaatggttgcataaaattttgagaataacttaaatgttatatgaatgtaagtaaaaattttactgtaaactttgtaaatgctaactataaacagaaaacaagtatatcttayataaagaaatgtgtagactctctgtattaatccattatcacattgctataaagaatacccgagacagggtaatttacaaaggaaagaggcttaattgactcacagttctgcacggctggggaggcctcagggaacttacaatcatggtggaaggggaagcaggcacgtcttacatggcagcaggggagagagagcatgtgaagg

SEQ ID NO: 260791 - DNA, 601 bp, Homo sapiens
ttaactctcattttctatcactttaattcaggccatcctttagaggattaagtataatccattcttatgtcctacacaactgagtgtgtagtaccagtacgtaatcctaatgtaatggcacaccccagatgacctttttgtgtgttggcatggtttttcagtttaagcaaaagtttaattgattgaaacttgaagttcacatttttttttctacacaccaatattgaagagaagtcctacaaaatacttattctatggaaaaaaacaaagtccactttagatctaaaatggttgcataaaattttgagaataacttaaatgttatatgaatgtaagtaaaaattttactgtaaactttgtaaatgctaactataaacagaaaacaagtatatcttacataaagaaatgtgtagactctctgtattaatccattwtcacattgctataaagaatacccgagacagggtaatttacaaaggaaagaggcttaattgactcacagttctgcacggctggggaggcctcagggaacttacaatcatggtggaaggggaagcaggcacgtcttacatggcagcaggggagagagagcatgtgaagg

SEQ ID NO: 260792 - DNA, 559 bp, Homo sapiens
atattttaatttcttccatcccaccccaccataatattcttacctctatgacagtgctcatcaaaatttgtagctattatttgtttaaatgacttcattatgcttcttaagaggcataaactttctgctatattcatctttgtatgcctgtcacacattacattggctgagacaaggtaaatatttaatacatatctattaaataagaaacttaaaaaaataaaagagtgaatgaataactrtatctaggaagtatgaaagtgacttatcttttagcatttttcatcaaggaattaagaaatgtgtggggaaaaagttaagaggccccagttaaaatggcttttatcccaaattcaggcaataacaaaagttgacgaggatatacagaaaaaggaacacttgcacactgtcagtgggaatgtacattagtatgacccttaaggagaacagtctggaggtttctcaaaaagcaaaaattgagctatcatatgatccagcaatcccactcctgggtgtataaccaaaagaaaggacatagtatatcagagagatatctgca

SEQ ID NO: 260793 - DNA, 559 bp, Homo sapiens
atattttaatttcttccatcccaccccaccataatattcttacctctatgacagtgctcatcaaaatttgtagctattatttgtttaaatgacttcattatgcttcttaagaggcataaactttctgctatattcatctttgtatgcctgtcacacattacattggctgagacaaggtaaatatttaatacatatctattaaataagaaacttaaaaaaataaaagagtgaatgaataactgtatctaggaagtatgaaagtgacttatcttttagcatttttcatcaaggaattaagaaatgtgtggggaaaaagttaagaggccccagttaaaatggcttttatcccaaattcaggcaataacaaawgttgacgaggatatacagaaaaaggaacacttgcacactgtcagtgggaatgtacattagtatgacccttaaggagaacagtctggaggtttctcaaaaagcaaaaattgagctatcatatgatccagcaatcccactcctgggtgtataaccaaaagaaaggacatagtatatcagagagatatctgca

SEQ ID NO: 260794 - DNA, 594 bp, Homo sapiens
tgtagctattatttgtttaaatgacttcattatgcttcttaagaggcataaactttctgctatattcatctttgtatgcctgtcacacattacattggctgagacaaggtaaatatttaatacatatctattaaataagaaacttaaaaaaataaaagagtgaatgaataactgtatctaggaagtatgaaagtgacttatcttttagcatttttcatcaaggaattaagaaatgtgtggggaaaaagttaagaggccccagttaaaatggcttttatcccaaattcaggcaataacaaaagttgrcgaggatatacagaaaaaggaacacttgcacactgtcagtgggaatgtacattagtatgacccttaaggagaacagtctggaggtttctcaaaaagcaaaaattgagctatcatatgatccagcaatcccactcctgggtgtataaccaaaagaaaggacatagtatatcagagagatatctgcactccatgtttatttcagcactactcacaatagccaaaatttggaatcaacctaagtatccatcaagagatgaatgaataaagaaaatatagtacatatacaaa

SEQ ID NO: 260795 - DNA, 594 bp, Homo sapiens
tgtagctattatttgtttaaatgacttcattatgcttcttaagaggcataaactttctgctatattcatctttgtatgcctgtcacacattacattggctgagacaaggtaaatatttaatacatatctattaaataagaaacttaaaaaaataaaagagtgaatgaataactgtatctaggaagtatgaaagtgacttatcttttagcatttttcatcaaggaattaagaaatgtgtggggaaaaagttaagaggccccagttaaaatggcttttatcccaaattcaggcaataacaaaagttgacgaggatatacagaaaaaggaacmcttgcacactgtcagtgggaatgtacattagtatgacccttaaggagaacagtctggaggtttctcaaaaagcaaaaattgagctatcatatgatccagcaatcccactcctgggtgtataaccaaaagaaaggacatagtatatcagagagatatctgcactccatgtttatttcagcactactcacaatagccaaaatttggaatcaacctaagtatccatcaagagatgaatgaataaagaaaatatagtacatatacaaa

SEQ ID NO: 260796 - DNA, 559 bp, Homo sapiens
atattttaatttcttccatcccaccccaccataatattcttacctctatgacagtgctcatcaaaatttgtagctattatttgtttaaatgacttcattatgcttcttaagaggcataaactttctgctatattcatctttgtatgcctgtcacacattacattggctgagacaaggtaaatatttaatacatatctattaaataagaaacttaaaaaaataaaagagtgaatgaataactgtatctaggaagtatgaaagtgacttatcttttagcatttttcatcaaggaattaagaaatgtgtggggaaaaagttaagaggccccagttaaaatggcttttatcccaaattcaggcaataacaaaagttgacgaggatatacagaaaaaggaacacttgyacactgtcagtgggaatgtacattagtatgacccttaaggagaacagtctggaggtttctcaaaaagcaaaaattgagctatcatatgatccagcaatcccactcctgggtgtataaccaaaagaaaggacatagtatatcagagagatatctgca

SEQ ID NO: 260797 - DNA, 474 bp, Homo sapiens
aaatgtgtggggaaaaagttaagaggccccagttaaaatggcttttatcccaaattcaggcaataacaaaagttgacgaggatatacagaaaaaggaacacttgcacactgtcagtgggaatgtacattagtatgacccttaaggagaacagtctggaggtttctcaaaaagcaaaaattgagctatcatatgatccagcaatcccactcctgggtgtataaccaaaagaaaggacatagtatatcagagagatatctgcactccatgtttatttcagcactactcacaatagccaaaatttggaatcaacctaagtatccatcaagagatgaatgaatraagaaaatatagtacatatacaaaatggaataccattcagccataaaaaacaatgagttcctgtcatttgctacaatgtggatagaactggaggtcattatgttaagtgaaacaagccaggcgcagaaagacaa

SEQ ID NO: 260798 - DNA, 647 bp, Homo sapiens
cctttgagtttatttctacatttcatagagtagatgctctttatagataaactcttttggaaaaagtccagataactggataattaactattaatatcactttttgaaaattaaataktaatatgtttcttccaggaaaaattatttaacaggttttattcagactactaagacatatgaaaacctgacattaactctttggttttctaaagattctcttcaggaaaatatgccatcagtctttctaaatgtattcaattttatctcagcagtcttgaacctccatctacatgatgttaatatacctccaaacagccattcacatttcttaaggtgatgaaatatgtattacctataatattcttaactacgttattgtaaggcatatttatcatgccacataatcctgggcgaaaattggatataataacaattcccaaaaatgcctcttgacaaagagttggaattcaacttttttcttctactgctaaggatgtttgcatcatgtctttggaaaaatgtatctcataattgcaaagccctaattcctgatgctccattaacaatattactcaagatattgttgctgatgtggctgcttatattattcccaagtgaatttgtagatatttagcaatagctgaggc

SEQ ID NO: 260799 - DNA, 647 bp, Homo sapiens
cctttgagtttatttctacatttcatagagtagatgctctttatagataaactcttttggaaaaagtccagataactggataattaactattaatatcactttttgaaaattaaatattaatatgtttcttccaggaaaaattatttaacaggttttattcagactactaagacatatgaaaacctgacattaactctttggttttctaaagattctcttcaggaaaatatgccatcagtctttctaaatgtattcaattttatctcagcagtcttgarcctccatctacatgatgttaatatacctccaaacagccattcacatttcttaaggtgatgaaatatgtattacctataatattcttaactacgttattgtaaggcatatttatcatgccacataatcctgggcgaaaattggatataataacaattcccaaaaatgcctcttgacaaagagttggaattcaacttttttcttctactgctaaggatgtttgcatcatgtctttggaaaaatgtatctcataattgcaaagccctaattcctgatgctccattaacaatattactcaagatattgttgctgatgtggctgcttatattattcccaagtgaatttgtagatatttagcaatagctgaggc

SEQ ID NO: 260800 - DNA, 647 bp, Homo sapiens
cctttgagtttatttctacatttcatagagtagatgctctttatagataaactcttttggaaaaagtccagataactggataattaactattaatatcactttttgaaaattaaatattaatatgtttcttccaggaaaaattatttaacaggttttattcagactactaagacatatgaaaacctgacattaactctttggttttctaaagattctcttcaggaaaatatgccatcagtctttctaaatgtattcaattttatctcagcagtcttgaacctccatctacatgatgttaatatacctccaaacagccattcacatttcttaaggtgatgaaatatgtattacctataatattcttaactamgttattgtaaggcatatttatcatgccacataatcctgggcgaaaattggatataataacaattcccaaaaatgcctcttgacaaagagttggaattcaacttttttcttctactgctaaggatgtttgcatcatgtctttggaaaaatgtatctcataattgcaaagccctaattcctgatgctccattaacaatattactcaagatattgttgctgatgtggctgcttatattattcccaagtgaatttgtagatatttagcaatagctgaggc

SEQ ID NO: 260801 - DNA, 614 bp, Homo sapiens
tactccctgttttctttatcacaaaaagaaaagtagataataataaggtatttcaagagaaagagagaccacattcacataacttttactacagtatattgttataataattctattattagttatgttcatataattattagtaaaaggaatataattatattcctatataattatagaagtayactactcctatacataatatattagtataactaatataattctattatcattagtagtgttagtttaactaataaactaatagaattattaaactaatataattagcctattagtttaatactactcccataatgagtatattagtttaaacaaatactactactataataattagtagtagtttaactaataaactactataattattagttaaatttcactatgcctaatttttaaattacagtctattataagtatgtatgtgtaggaaaaatagtacatgtttactatccactgtttcaggcatcaactgggggtcttaatacatatctttttacagataagggtggagctacagttaccttccaaaaggtagtattgccactgccattgttgcctgctaatgtaaattccaaagaagtagatga

SEQ ID NO: 260802 - DNA, 614 bp, Homo sapiens
tactccctgttttctttatcacaaaaagaaaagtagataataataaggtatttcaagagaaagagagaccacattcacataacttttactacagtatattgttataataattctattattagttatgttcatataattattagtaaaaggaatataattatattcctatataattatagaagtatactactcctatamataatatattagtataactaatataattctattatcattagtagtgttagtttaactaataaactaatagaattattaaactaatataattagcctattagtttaatactactcccataatgagtatattagtttaaacaaatactactactataataattagtagtagtttaactaataaactactataattattagttaaatttcactatgcctaatttttaaattacagtctattataagtatgtatgtgtaggaaaaatagtacatgtttactatccactgtttcaggcatcaactgggggtcttaatacatatctttttacagataagggtggagctacagttaccttccaaaaggtagtattgccactgccattgttgcctgctaatgtaaattccaaagaagtagatga

SEQ ID NO: 260803 - DNA, 614 bp, Homo sapiens
tactccctgttttctttatcacaaaaagaaaagtagataataataaggtatttcaagagaaagagagaccacattcacataacttttactacagtatattgttataataattctattattagttatgttcatataattattagtaaaaggaatataattatattcctatataattatagaagtatactactcctatacataatatattagtataactaatataattctattatcattagtagtgttagtttaactaataaactaatagaattattaaactaatataattagcctattagtttaatactactcccataatgagtatattagtttaaacaaatactactactataataattagtagtagtttaactaataaactactataattattagttaaatttcactatgcctartttttaaattacagtctattataagtatgtatgtgtaggaaaaatagtacatgtttactatccactgtttcaggcatcaactgggggtcttaatacatatctttttacagataagggtggagctacagttaccttccaaaaggtagtattgccactgccattgttgcctgctaatgtaaattccaaagaagtagatga

SEQ ID NO: 260804 - DNA, 601 bp, Homo sapiens
aggacttgatcagtataatcctctacctaacacaacttggaatggggcagagagtaaagaaatggacctcggtaaggaygtgcatgagcactaagagatagtgcttgatgcaagagcaataataacaacaataaccacaacaaaggtatattattgggagcattagagaagaacaacagaaaactaaaaatgttgtggatgttacctccaagcaagaaaatgggactagggacacaggccctttttgttttttgcttgcacattctgtaattagaaaatgttattttatagacacacatatcaaataataggagaaaaaagatatttcatgtaagattagtttattctcaatattctgaattagaatattggattaaaacaatatttagaatgatagaagctggattaaaacaactttaaaacaagcatttgtactgcattgacatctctatacaagttgctgtcatactagttgagaagagcttggggacctggacttgggagatttaatggaccgataaaattactcagaggggtaaccttataaagaattctgaaaccaagaatttggaagtctaagaaaagaagggacaacaatgca

SEQ ID NO: 260805 - DNA, 643 bp, Homo sapiens
ttggaatgggaatgtttatcctatgcctgtctcaccattgtattttgagagttcatgttgtttgattccacaggttcacagatgaagagaaattttgtgagaatgaactgtaccgtgaagctcacctgcatctgatttaggtaatatttaaataagaccttggactttagactggacttgaggctggaatgagttaagatttgtggatttgttggaatggaatgactgcattttgcatgtgaagacatgaattttggggaacctggggcagaatgttacggactgaatttttaaagtgtaccctcaaaatctgtatattgaaatcgtaactgtcaatgtaatggtattagtagtgggaccttcaggaggtaattaggttgtsatagtagaggcctcatgaataggcttagtgttcttataaaagggacctaagagagctctcacttctttccccatgtgcttatacaaaaacccaacagtctgcaaccgcaaaagggccctccccaaaaccagaacatcctggcactctgactttggacttccaacccctagaacagtaagaaatactttttttgttatttgtaagccactcaatctatggtattttgtatagcagcccaaactaagacactcctctacacta

SEQ ID NO: 260806 - DNA, 567 bp, Homo sapiens
ttatgtcttcgtatatatttatattgtggaatgattaaatcaagctgcttaacacatctcttatgtcacatatttatctttttgttgtgagaacactgaaaatagactttttagcaatcgaaaaaaggcaaacccttaaaagyagagagtagaatgctagttaatgctggaggcaagggatagggaatggggagatgttgttcacagggtacagtttcagttagacacaaagattgagttttagagattgactttatagcagagtgactatatttaaaaatgacttcttgtacatttcaaattttctatttaaaatacacatagtatctgtattcccagttcttaaaacatgacctattaaataacagatttgcaagactgaatgatttttttttaccttgtcctgatctctagattttttttaaactttatctcattaattgctaattctctctttatgaatgttaaatacttaaaatagcaccaaacataactaaacaaaacaaaaacaaaatttgttttttatttcaaatggcatgttccattgcgttctaagactggactgtc

SEQ ID NO: 260807 - DNA, 567 bp, Homo sapiens
ttatgtcttcgtatatatttatattgtggaatgattaaatcaagctgcttaacacatctcttatgtcacatatttatctttttgttgtgagaacactgaaaatagactttttagcaatcgaaaaaaggcaaacccttaaaagcagagagtagaatgctagttaatgctggaggcaagggatagggaatggggagatgttgttcacagggtacagtttcagttagacacaaagattgagttttagagattgactttatagcagagtgactatatttaaaaatgacttcttgtacatttcaaattttctatttaaaatacacrtagtatctgtattcccagttcttaaaacatgacctattaaataacagatttgcaagactgaatgatttttttttaccttgtcctgatctctagattttttttaaactttatctcattaattgctaattctctctttatgaatgttaaatacttaaaatagcaccaaacataactaaacaaaacaaaaacaaaatttgttttttatttcaaatggcatgttccattgcgttctaagactggactgtc

SEQ ID NO: 260808 - DNA, 567 bp, Homo sapiens
ttatgtcttcgtatatatttatattgtggaatgattaaatcaagctgcttaacacatctcttatgtcacatatttatctttttgttgtgagaacactgaaaatagactttttagcaatcgaaaaaaggcaaacccttaaaagcagagagtagaatgctagttaatgctggaggcaagggatagggaatggggagatgttgttcacagggtacagtttcagttagacacaaagattgagttttagagattgactttatagcagagtgactatatttaaaaatgacttcttgtacatttcaaattttctatttaaaatacacatagtatctgtattcccagttcttaaaacatgacctattaaataacagatttgcaagactgaatgatttttttttaccttgtcctgatctctagattttttttaaactttatctcattaattgctaattctctctttatgaatgttaaatacttaaaatagcaccaaacataacwaaacaaaacaaaaacaaaatttgttttttatttcaaatggcatgttccattgcgttctaagactggactgtc

SEQ ID NO: 260809 - DNA, 528 bp, Homo sapiens
tgaggcaggcagatcactttaggtcaggagttcaaacccagcctggcccacatggtgaaaacccatctctactaaaaatgcaaaaattagccaagtgtggtggcaygcacctgtaatttcagctacttgggaggctgaagaagaagaattgcttgaacccaggaggcggatgctgcagtgcactgagatcacgccactgcactccatccagcctgggtgacagagcaagactcctccgtctcaaaaagcaacaacaataacaacaaaaacaaatagaataagtgaagagatttgatcttataattggttggaatatcccataacactgcactgtttatgtttgcacaataatgaaagttcattgagtacatgttcactgacatatatggatcctcagaaatatatatcttaaacatatatataagtatatataaatgtatactcatacgcataactcagatgtatgcaaagacttcatatatctagaatgtatattgtgtatattctatataatatgtaatggaggtt

SEQ ID NO: 260810 - DNA, 528 bp, Homo sapiens
tgaggcaggcagatcactttaggtcaggagttcaaacccagcctggcccacatggtgaaaacccatctctactaaaaatgcaaaaattagccaagtgtggtggcacgcacctgtaatttcagctacttgggaggctgaagaagaagaattgcttgaacccaggaggcggatgctgcagtgcactgagatcacgccactgcactccatccagcctgggtgacagagcaagactcctccgtctcaaaaagcaacaacaataacaacaaaaacaaatagaataagtgaagagatttgatcttataattggttggaatatcccataacactgcactgtttatgtttgcacaataatgaaagttcattgagtacatgttcactgacatatatggatcctcagaaatatatatcttaaacatatatataagtatatataaatgtatactcatacgcataactcagatgtatgcaaagrcttcatatatctagaatgtatattgtgtatattctatataatatgtaatggaggtt

SEQ ID NO: 260811 - DNA, 712 bp, Homo sapiens
cttgtgagagggctttcattttcagagttttaaataactggaatttccattttcaattttagtagaaaatataaaattcttacttctcaataggaaaggaggtgatttataaagctatctatataatctctctmtatatatacacacacaaattggaaaatatatattcagtagtttcaatattctgtttcagaaattttgaaattactattagccatccattctcagtaatatttttctgtaaacaggaagagaatatatctcatttcttttcttattcatcaagctccaagaaaataaaacaatattttctactacggaaatgtgatctacccaatctgaggtcttgatactcttcatcacgaaggtccctaaggaaacgctacatgggttatataaagaataaatacatacatatcaaaatttgggagaacagtatgataatggttatactttatccttgatggatatattgatagaggaggtttgtaggagcatacacacacacatttttctgaaaataattacttctttgaacatcagctatgacaaattcttaaatcaccatcgttgttaccattatcatcatcatcatcactctaattcaagtctatgagaagaaaattctgttttatgcaaagcttttgatttctcattccagaaggaaaatcttggttctgtaagaatatgtgtcccagctgattatgttgct

SEQ ID NO: 260812 - DNA, 540 bp, Homo sapiens
acactgccggtgggaatgtaaattggtaaaaccactatggaaaacaatatagagattccttaaagaactaaaagcaatctaccattcaacccagcaatcccactactagacatctacccaaaggaaaaaaaatcattctattaaaaagacacctgcacacgtatgtttattgcagcacaattcacaattgcaaagatattaaaccaacctaagtgcccattgaccaatgagtggataaagaaaatgtaatacatacgctccatggaatactackcagccatacaaagaacaaaatatcttttgcaacaacttgaatagagctggagattattactctgagtgaagtaactcaggaatggaaaaccaaatattgtatgttctcacttataagtgggagctaggctatgggtacaaaaaggcatatagagtgatatggtggactatggagactcataataggaagggtgggagtggaggtgaggggtaaaaaactacatattgggtacaatgtacactactcggggtgaccagtgcacttaa

SEQ ID NO: 260813 - DNA, 609 bp, Homo sapiens
ctcagttaatgtttgctgaatcttgcaaaatgaatgtttggataaattaatgtacatattccaaacatccttaattggcagatacccacattggatctgaaattaggtttttttcctcttttatctatggagccaagtaccctgatgatcaagagccttggtgctgaagccggaatagaaaagtgtgatgtttggctttccttattgggctgctgtgaggtttacgtgaaatattatgagaggaatacttcactcagtgcctggtctgtcgtaggtggttgagagttatagtgcttgttgttctatgcgttactattatcatttctgtgagactgatttatggtgataataataataataatgataatgataatgataggtaataatgataaygataatgataggtatctaccgagtcgctaaaatttcagttgctctgatgacccagtattcttgctaaattcttcacttgaattaagtttctctacatagctcaagccataggagttcaagtctaaaagttagtgttgttacagaaacaaacaaaacaccagttgaactccttaaattacaacctcactcaatcccgcaatacaaatccaatgtttt

SEQ ID NO: 260814 - DNA, 609 bp, Homo sapiens
ctcagttaatgtttgctgaatcttgcaaaatgaatgtttggataaattaatgtacatattccaaacatccttaattggcagatacccacattggatctgaaattaggtttttttcctcttttatctatggagccaagtaccctgatgatcaagagccttggtgctgaagccggaatagaaaagtgtgatgtttggctttccttattgggctgctgtgaggtttacgtgaaatattatgagaggaatacttcactcagtgcctggtctgtcgtaggtggttgagagttatagtgcttgttgttctatgcgttactattatcatttctgtgagactgatttatggtgataataataataataatgataatgataatgataggtaataatgataatgataatgataggtatctaccgagtcgctaaaatttcagttgctctgatgacccagtattcttgctaaattcttcacttgaattaagtttctctacatagctcaagccataggagttcaagtctaaaagttagtgttgttacagaaacaaacaaaacmccagttgaactccttaaattacaacctcactcaatcccgcaatacaaatccaatgtttt

SEQ ID NO: 260815 - DNA, 499 bp, Homo sapiens
gagacactgactgcagctgccatgtggctcagtatgagtgcccagctgcagactgctatggatgggttactgaaggacctcagagccacactcacactgtcccttctagtaacttctctatgtgcaaatgtacaaaatgaggggggaggttatgakaagaacaagatgtctctttcagtttttcacatctgtcctattgagtcaatgacgacatccttttcaataaaaagggtgaatagtaatatcagagtctccaacggcctcacctggttcttccacccccgctacctgctcctctctcccacgcatctctgaaagtggaaaccccatgcttccagttgcctgggaagaagtgttgggccagtttctcccttcctctcaccctgtgtccagtccaccagcaaattctattgtctttactttcagagcactcgagggtgtgactggctgacgccaccctgctgccctctgcccacatctctgtcacacccgaatgggt

SEQ ID NO: 260816 - DNA, 606 bp, Homo sapiens
ttttactgttcaaattgtttgcactttgggcattaggagttcttctagttggaatttgtatttgacatccctccatatcttagtyctttcagggttctgttacaaattgccatagactgagtggcttataaacaacagaaatttatttctcatacttttggaagctcagaagtctaagggtgccaacatagttgggttctggtgagggccctgttccaggctgctgactgctttcttctcattgtatattcatatggtgaaaaaatgctgagagagctttttagggtttcttgtataagggcactaatcctattactgttttaacagcctgatgggttcttcttgcctgctgcccaaaaagccaatgcactgagacagcaggttttgcagcaaagaaagagtttaataattgcaggtccagccaagcagaaggatgtgaaacatttctcaaatcccctgccccaagaacttggaggccaggatgttaaggataatttgagggtagcggtctagagacttggtgtgacttattggttggggatgaaaccataggagtatacaaaccatcttcatgtgctaagtcagttcctgtgggattgggggtca

SEQ ID NO: 260817 - DNA, 606 bp, Homo sapiens
ttttactgttcaaattgtttgcactttgggcattaggagttcttctagttggaatttgtatttgacatccctccatatcttagtcctttcagggttctgttacaaattgccatagactgagtggcttataaacaacagaaatttatttctcatacttttggaagctcagaagtctaagggtgccaacatagttgggttctggtgagggccctgttccaggctgctgactgctttcttctcattgtatattcatatggtgaaaaaatgstgagagagctttttagggtttcttgtataagggcactaatcctattactgttttaacagcctgatgggttcttcttgcctgctgcccaaaaagccaatgcactgagacagcaggttttgcagcaaagaaagagtttaataattgcaggtccagccaagcagaaggatgtgaaacatttctcaaatcccctgccccaagaacttggaggccaggatgttaaggataatttgagggtagcggtctagagacttggtgtgacttattggttggggatgaaaccataggagtatacaaaccatcttcatgtgctaagtcagttcctgtgggattgggggtca

SEQ ID NO: 260818 - DNA, 606 bp, Homo sapiens
ttttactgttcaaattgtttgcactttgggcattaggagttcttctagttggaatttgtatttgacatccctccatatcttagtcctttcagggttctgttacaaattgccatagactgagtggcttataaacaacagaaatttatttctcatacttttggaagctcagaagtctaagggtgccaacatagttgggttctggtgagggccctgttccaggctgctgactgctttcttctcattgtatattcatatggtgaaaaaatgctgagagagctttttagggtttcttgtrtaagggcactaatcctattactgttttaacagcctgatgggttcttcttgcctgctgcccaaaaagccaatgcactgagacagcaggttttgcagcaaagaaagagtttaataattgcaggtccagccaagcagaaggatgtgaaacatttctcaaatcccctgccccaagaacttggaggccaggatgttaaggataatttgagggtagcggtctagagacttggtgtgacttattggttggggatgaaaccataggagtatacaaaccatcttcatgtgctaagtcagttcctgtgggattgggggtca

SEQ ID NO: 260819 - DNA, 606 bp, Homo sapiens
ttttactgttcaaattgtttgcactttgggcattaggagttcttctagttggaatttgtatttgacatccctccatatcttagtcctttcagggttctgttacaaattgccatagactgagtggcttataaacaacagaaatttatttctcatacttttggaagctcagaagtctaagggtgccaacatagttgggttctggtgagggccctgttccaggctgctgactgctttcttctcattgtatattcatatggtgaaaaaatgctgagagagctttttagggtttcttgtataagggcactaatcctattactgttttaacagcctgakgggttcttcttgcctgctgcccaaaaagccaatgcactgagacagcaggttttgcagcaaagaaagagtttaataattgcaggtccagccaagcagaaggatgtgaaacatttctcaaatcccctgccccaagaacttggaggccaggatgttaaggataatttgagggtagcggtctagagacttggtgtgacttattggttggggatgaaaccataggagtatacaaaccatcttcatgtgctaagtcagttcctgtgggattgggggtca

SEQ ID NO: 260820 - DNA, 532 bp, Homo sapiens
tctttgcatttaccatgtttgctgttcagtaagcctcttgaayctgtaatgttctttaccagctttggaaaatgccttcctcttacatctgtaaatattttttctgcccatttatcactctccactccctctgagacatatattccatttatgatagccttcttgatattttcccacaagttgttaagactgttcctttttaccagttgcttttctctctattcttcagattggacaatttctattgatttgtcttcaagttcactatttcttttgcagcctttaatccattcttaagcttattcattttaaatttcatataatgtacttttcaattctaaaattcccattaggctcttttacatagtttccatttctgtgctgaaacattctctatgtttattatgcccatattttgcttcatgttcttgaatatattaataatttgttttacagtctttatcttctaattccaacatctgtattatctccaagtctattttattgactctccctacacccaccccaccct

SEQ ID NO: 260821 - DNA, 532 bp, Homo sapiens
tctttgcatttaccatgtttgctgttcagtaagcctcttgaatctgtaatgttctttaccagctttggaaaatgccttcctcttacatctgtaaatattttttctgcccatttatcactctccactccctctgagacatatattccatttatgatagccttcttgatattttcccacaagttgttaagactgttcctttttaccagttgcttttctctctattcttcagattggacaatttctattgatttgtcttcaagttcactatttcttttgcagcctttaatccattcttaagcttattcattttaaatttcatataatgtacttttcaattctaaaattcccattaggctcttttacatagtttccatttctgtgctgaaacattctctatgtttattatgcccatattttgcttcatgttcttgaatatattaataatttgttttacagtctttatcttctaattccaacatctgtatyatctccaagtctattttattgactctccctacacccaccccaccct

SEQ ID NO: 260822 - DNA, 548 bp, Homo sapiens
cacctttcagttatatcttgcatacaaaatgtttagacagttttttttaattggatgtcaacattaacaataggcacattttacattttaagaaaacaaagcctagaaatgtagtactagcattcctggataaccacaatcagttaaaggtagcagtagctgtctcatcaaaactggatatkctttctacattgtatcagggatcccaacagtccccatgatttttaatgtatcttctcactcatttacaacacaggcctgccctttataagcatcagaattagcaattttcattatacactgggaactcatcacgttcacagagcatcttactgatctatgtcccaggtgcctagcacacagcctggaatatataactggagctcaagaaatgttttacagattggagaaatctgatataataatcacaacaacccaacaaaaaaggcaagggatattatgatatacagctgataaagaaagcacagtttgggaagttaatgtcttgttcaaaaagacatagttaacaaagggaaaagctgatactg

SEQ ID NO: 260823 - DNA, 548 bp, Homo sapiens
cacctttcagttatatcttgcatacaaaatgtttagacagttttttttaattggatgtcaacattaacaataggcacattttacattttaagaaaacaaagcctagaaatgtagtactagcattcctggataaccacaatcagttaaaggtagcagtagctgtctcatcaaaactggatatgctttctacattgtatcagggatcccaacagtccccatgatttttaatgtatcttctcactcatttacaayacaggcctgccctttataagcatcagaattagcaattttcattatacactgggaactcatcacgttcacagagcatcttactgatctatgtcccaggtgcctagcacacagcctggaatatataactggagctcaagaaatgttttacagattggagaaatctgatataataatcacaacaacccaacaaaaaaggcaagggatattatgatatacagctgataaagaaagcacagtttgggaagttaatgtcttgttcaaaaagacatagttaacaaagggaaaagctgatactg

SEQ ID NO: 260824 - DNA, 611 bp, Homo sapiens
ttaaaaaaaacacagaaatgggaggaaatcaacttgcagatgtcacttgtctccagattttcctgttttatcaaatttagaacagcacttttcaacagaagcaaagcactagctacgaatgctggtcacatagggaattacaaactcctagcagtcacagtttagaaagtaaaaaggaacaagggaaattaatttctaaaacatacyaaatataatcaatatattcaaaatatattcaatataagtggaatatatccaaaatattttcatttaaacatttaaacaatataaaattattaatgagatgctttgccttcttttctgtctttgtactaactctttaagatctagaatgtgtgtcacaccaagtgccaggttccagcccaagctgaggtccaagcgggggtggtgagtgacaggtagctgggaaaacactcgaggaatcacagagagtttcgacatgcctttattctctctctggacacaagccgttatgtacagcattagcagggtaattataccttatatagacaatagtggctcccagccaagcacaagctcacatgagtggttacctaatgtacttcatgtgacatggttacataatgtgt

SEQ ID NO: 260825 - DNA, 455 bp, Homo sapiens
cagcagacataatcaagttccaactaaattttagattcctcatacttgtggaccaacaggtaaagaaatgagttactgtattatgaggagtaatcaaccctgagagctagcatttctgctacacaatggggatggggagaagtatgaatgtggggtgattcattgggcatcttttggtgcactgtgataatggtgaatgagcaactttggcagttataggccaacaaaaaagcaaggcatctaaaggtttagatctcttggggataaagatgtggaactacccagcagtcaacccacaacccacaaagactggtgtccaattatgtccaagagcaagaaaaaatctagaataaatggkgtggcaaatttatagtgaatatcaaatacagccttgagattacttgcaacaattaagactattagctgtttcactacccttcttgccttaagtcttt

SEQ ID NO: 260826 - DNA, 549 bp, Homo sapiens
actttggaagcagaaaaagtcattgtggtgacctggaaaaaaaaaaaaaaactattagggtcagagaaggaaactataaggatattgaggtgaggaaamtgaagataattattgctatggttgtttgtgattacatgaggctatcctcgaaacctcagagatccggaagggaaatacctagaggaaggagtagagcccagctgctatagggtgacagctatattcctagactggtgcagctgggtaatgtgtgctacgcttagcaaacaataactagtgcatattatgcaccagacattgtgctaagtgttagagctacaaagatggaagacgacagaggctctcaacatcctaatggggtccaatattgtggaaataatgtaatgttatcaatggtaataggagtatggaaagtactgtggaaaaaaggcaataactgagtttgggaataatcagggaaatcttcactgtgtatgacatccaaattgtgtctttaaggataaagtggttggacaagatatgagaaagggcattctaggaataaagaca

SEQ ID NO: 260827 - DNA, 627 bp, Homo sapiens
ggtaaaaattttcttccattctgtaggttgtctgttcactctgataacagattcttttgctgtgtagaagatctttagtttaattagatcccatttgtcaatctttgcttttgttgcaactgcttttgatgtttttgtcatgaaatctttgcccatgcctatgtcctgaatagtatcacctagattttcttctagggtttttacagttttgggttttacatttaagtctttaatccatcttgagttaatttttgtataaggtgtaaagaaaagatccagtttcaattttctgcttaaaagccatgtctatttttttaacggatttgtctgaaggactgctggaatgttgctggcatgactcttactgtccaaagtggtaaactttcaaaayacagaagaccaaagatactgttgtgagcaatgaatatcactttacaagtgtgcccatggtagttaatacattttcaaaaataataagctgctgccaagattagaagctataaacagctttaaaaaaagacttgggctgccacattattctggtacttatgtgtgaatactatatgtcttttctagctctgagagtcaattactgcatttattaccgatattgattggtaagaaaag

SEQ ID NO: 260828 - DNA, 574 bp, Homo sapiens
gcccttattttgaaaatctgtaggatcacggataaaataatttctccaggaaaaatgtagtgagtcacaaataatagagtcaaagtttttcttacaagttcttttggttaacattacattatgattaacttgttttgtagtattattattactatgttagttaccagcttactgctaagaatatcattgtagagttcttaaattgartattacgtgtaagtccttttgggacctataagactcataggatattttttacactaactctaccagcaaccacaagttccccaaaagtatgtttaaatttaaaggtggttaggagaaaggatctatagaaaatatgtaagaaaatgctggtcatatcataaaagcccaaggaagaatgcagttttctttgtgttcctccacacttctccatactaaacaaaaatgtataagaaggtactcaccccatggtttatggttatgccatcctatttacagcaagagccctgtatctctaggcacggatgatactacagcagccaacaatcagagtccccactcaagtcagctgaagaagccaagacaagtg

SEQ ID NO: 260829 - DNA, 574 bp, Homo sapiens
gcccttattttgaaaatctgtaggatcacggataaaataatttctccaggaaaaatgtagtgagtcacaaataatagagtcaaagtttttcttacaagttcttttggttaacattacattatgattaacttgttttgtagtattattattactatgttagttaccagcttactgctaagaatatcattgtagagttcttaaattgagtattacgtgtaagtccttttgggacctataagaytcataggatattttttacactaactctaccagcaaccacaagttccccaaaagtatgtttaaatttaaaggtggttaggagaaaggatctatagaaaatatgtaagaaaatgctggtcatatcataaaagcccaaggaagaatgcagttttctttgtgttcctccacacttctccatactaaacaaaaatgtataagaaggtactcaccccatggtttatggttatgccatcctatttacagcaagagccctgtatctctaggcacggatgatactacagcagccaacaatcagagtccccactcaagtcagctgaagaagccaagacaagtg

SEQ ID NO: 260830 - DNA, 608 bp, Homo sapiens
acagcaattgttcagggaataagagagataaccttaaactctgaccgccggtgagctgggcggaacagagccatatttctcttctttcaaaagcaaatgggagaaatatcgctgaattctttttctcagcaaggaacatccctgggaaagagaatacacgcctagaggtataggcctataaacggccccctcaggtgtgcctgtcttttatggtcgagactgcaggggtgaaatagaccccagtctcccatagcgctcccaggcttattaggaagaggaaattcccacctaataattttggtcagaccagttgctctcaaaaccctgtctcccagggatgccctctctcaccactcctattcaatatagtgttggaagttctgrccagggcaattaggcaggagaagtaaataaagggtattcaattaggaaaagaggaagtcaaattgtccctgtttgcagatgacatgattgtatatctagaaaaccccattgtctcaccccaaaatctccttaagctgataagcaacttcagcaaagtctcaggatacaaaatcaatgtacaaaaatcaccagcattcttatacaccaataacagacagagagcc

SEQ ID NO: 260831 - DNA, 598 bp, Homo sapiens
aattgtaaatagtgatgatcacaaaggagaatccacttgtcttgtttctatgctgaagttccagtgaagcagttcttgtcatgtttccagcctccagcaatttcctatcaggttgtggtttggatgcacagtggaagagtcatctgttcctccacctgactatgcggaatttatttctgaataatttggagcaatctgttgccttctcttgcataaagcattacataagaattgacaactcttagaactaatacttccatagatcctgctgcctttagcccaacctacaactgctgtcacattccaggggcttttactgactcttttgcaattatgagacttaaagtccaagctttgctatggtgggaagaaaaaggatttgaaacagacttggctctcagagaaagccactcacataaaataagatgctggatgctaactctgtctgtgtcccatgtcttggtaaaggatctcagtaggtgtgagtgagaacacacaagtctcctcctgcttggttcttctgtcttgccttaggatccatctttaccttttccartgctgattccttttagagtttggaagattgttgacaaatacc

SEQ ID NO: 260832 - DNA, 538 bp, Homo sapiens
cgtattccctctctgatgactttgaatcactaagtgcacttttaccatcttgtagccatgtgtttatgtgtctatccacccagtttattggtgaatttcttgacctctgtatctcaaagtctagaacaaagtctagaataaactakggaatcagtaattgttgaattgaattgttgatcttatccaacattaacaaaacccccaaacaacaaaagtcatctagactataatcatcaaaataatattttatatatggtgtaagctaagaataacatagtaagtccccaaccaactaaacgaacctccttttggccaaggagaccccagaaaaaccttaacaatggagttcttggttatgatgggacgggaggtcaaacatgactcattatacttcctcccttttgcagtttagacacaacaactgaccagcattcgtgttaaaatagagatcttaagactgacaaaaacagactctttgtggcaatgaaataccaacttataaacaggacctaaggccatgacagacaagagttaagtc

SEQ ID NO: 260833 - DNA, 564 bp, Homo sapiens
gtcagctacatgaggtattactatattgaggcatacccactgtaataagcctcctaaagaatcaagagctgatctgaacggacagaggtaaagaaagaacataccgargaaggtgagttttgaatgacaggaaagaatgaaacagtagtaaggaaataaaaagaatctcattcacaaaagtaagttataaagctttgtctcctatgaaattagtagaaaaataacagtaaagatgtttagtacatggctcgttatccagaaagaaaaaatacagaatgatggctctttcttcatgttttcatcaatttccatttacttattcagtaagtgtttattgagctcctactttgtcatgtactgttttggacgctgggaatataaaggtgaacagcacaaagttcctacttttatggagagataataaacacaaaacagacaaaatactgttcaattttaaataattataagtgcaaaaagacataccacatggtaatagaaactaagatggcttggagaggtagtggtggttattattataggtagagtggtcagggaaggtccccc

SEQ ID NO: 260834 - DNA, 564 bp, Homo sapiens
gtcagctacatgaggtattactatattgaggcatacccactgtaataagcctcctaaagaatcaagagctgatctgaacggacagaggtaaagaaagaacataccgaggaaggtgagttttgaatgacaggaaagaatgaaacagtagtaaggaaataaaaagaatctcattcacaaaagtaagttataaagctttgtctcctaygaaattagtagaaaaataacagtaaagatgtttagtacatggctcgttatccagaaagaaaaaatacagaatgatggctctttcttcatgttttcatcaatttccatttacttattcagtaagtgtttattgagctcctactttgtcatgtactgttttggacgctgggaatataaaggtgaacagcacaaagttcctacttttatggagagataataaacacaaaacagacaaaatactgttcaattttaaataattataagtgcaaaaagacataccacatggtaatagaaactaagatggcttggagaggtagtggtggttattattataggtagagtggtcagggaaggtccccc

SEQ ID NO: 260835 - DNA, 639 bp, Homo sapiens
agcttattttgtaacactgtcttattttcatgttttttttttatgggtgttcttcctgacatgctttcactgcctaaaggaactttattctgctccttattgtctgtcctctattgacctccagctccatccacgtcccataatcattctctattggaactaamtcagatacttttctgttgccgtccatttttaagccaaattggtttacttaaccttttgacagagtgatagttcaggatatcttttctagtttcatggctcttaagtttctggttatgttcatgaagcgttcaaaaatatgccctcattctttctgagatctcttcccctccctggaacttcattcccttgcctttaccgtctctacactgattaatttggattctcttcctagcagtttttcctaagtgtagaaccttttccccaagggactttagatttttgtttcaggagttcacaaggccttgacaatgaattagctttttagaccttactgcaggtgcaccccttgtacttttcagaaatttggatggtaaaaatcactcccaatttcagcttctctttttgtattgacctatccttcttccaaataacttgaagatttgagagatttgagtgtttgcctgctttggggtc

SEQ ID NO: 260836 - DNA, 639 bp, Homo sapiens
agcttattttgtaacactgtcttattttcatgttttttttttatgggtgttcttcctgacatgctttcactgcctaaaggaactttattctgctccttattgtctgtcctctattgacctccagctccatccacgtcccataatcattctctattggaactaaatcagatacttttctgttgccgtccatttttaagccaaattggtttacttaaccttttgacagagtgatagttcaggatatcttttctagtttcatggctcttaagtttctggttatgttcatgaagcgttcaaaaatatgccctcattctttctgagatctcttcccctccctggaacttcattcccttgcctttaccgtctctacactgattaatttggattctcttcctagcagtttttcctaagtgtagaaccttttccccaagggactttagatttttgtttcargagttcacaaggccttgacaatgaattagctttttagaccttactgcaggtgcaccccttgtacttttcagaaatttggatggtaaaaatcactcccaatttcagcttctctttttgtattgacctatccttcttccaaataacttgaagatttgagagatttgagtgtttgcctgctttggggtc

SEQ ID NO: 260837 - DNA, 651 bp, Homo sapiens
gacagtttcaacaatgtttgtcattttaaatagaaacttttcttagatggtacctcaaatagcatatttttcagaaagtacttttctttgatttctgttttctttagatattgtgacaagaagttttaagttctcaaagtagctggtattaaaagttgaatttaaaatctgtaaaatgtttccaaaataggggatggggcgggggtgagaagcagcagaacaaaacagatatgtcaaaagtataaaatatatyaaaaaacctcaatgattatagtttttaaaattcagaaacaatatattgaggcaaaaatttcaattacctcattttccttatttagttatttagaacactggcaagcaattcaaattcatcctctttttatttttgggatactttaccagcactagggtcaaatgaaaggagaaaatagattacaatatctagggaatgattattcatttgttcttgaatatcattttcttatgatatttacttacaaacctatgaaattttccaattcatgattaggttaaatggtctacttataaaaatttaattgacatgcttcatgggactatactttctgaacattttaagtatgagggaaggggaaaagaagtactactgtgacagagaaagttcaggacttt

SEQ ID NO: 260838 - DNA, 598 bp, Homo sapiens
taggccagagggctcagagctcaaaacaaaatgtcttctaggattttaatcacaacactgacccaaaaggctgccctgagactccagttcctacaggtccctcagctgccagggggcctagcagacatctggagatctgggaaggaagcacgaaggtggtacatttccccaagctcctccactgaaagcgtctggcttcaacaggctctcttacaccacaactgtgccttttacttccactgctcgctgtgctggtgcccgtgctcttctcctcagtyggtgtgtttttcttcccatcatttaaaatttataggatgaaaaaatacaggcaatgcctatttctctctatggagctgctgtaacatatgactctggtgcatttgcttctgtaacactaattgccacaaattgaattgagctcatctccatccaggcagttaacacgcgcacagcagctgaagagctctaatctgatcatatcctgaggccccagacttcctggcacatagattgggagccctgctgctctgcccaccactcgcagctttttctcaaatggctgcataataactgtagatgactaggtttatgtgagaaa

SEQ ID NO: 260839 - DNA, 653 bp, Homo sapiens
cagttggtgtgtttttcttcccatcatttaaaatttataggatgaaaaaatacaggcaatgcctatttctctctatggagctgctgtaacatatgactctggtgcatttgcttctgtaacactaattgccacaaattgaattgagctcatctccatccaggcagttaacacgcgcacagcagctgaagagctctaatctgatcatatcctgaggccccagacttcctggcacatagattgggagccctgctgctctgcccaccactcgcagctttttctcaaatggctgcataataactgtagatgactaggtttatgtgagaaagataatggtctgatgagaatgtgtactgaaggatcaaatgacagagagtaaaagccccaaataatataaagtttcaggaaccaagtcttaagggctgccagtacaccattatgctgttacatacaaaattatattaaaatgaaatctgctgtactctgtgtaaatctaccacttctttgtaagtttcaatcacagcttctcattttattgatgacatcattgtctgttttggtgctttctgtaaaaactttcytgccaaagaatgtcaagttcatatacttttcaaaaaagtagtttcaaagatactactagcacctgttacattcaa

SEQ ID NO: 260840 - DNA, 655 bp, Homo sapiens
agttttatttttaagcataagagttctggcatttgcagcagcatgacatggtagcaaaattatatctttggaatgtgacatacttgagtccaatcttatttaattattattagatcatatataagctgaatgacctaacggaagttaacagacctctctgatcctcagttatcttgtctataaaatgtatatatcaaagcctactttatatatgtgttgctmtaatgattaaatagtatcatgttaataaattgccctgcatactctgccagcaacccaataggatctcaaaaatgttcctcattatattcactaattatcctttctgaacaatcacattttacagaatcactcattagataattacattgatgactaatttctgatacaaaggtcttcacaaatgcagactttttctaagtttgttaaatcctaataccaaccatactacaactccagaaagactgggacaagaaacagcctcagttccatttctcaaacctttttctaatagcaatgccctgaaaattcaatttgtttccaccaagaatgagagatctagaaatgctgaagtacagattactattaggactcatatagtaggactggaggtgaggtcttatgacctattaataactttttaagtgtatgctat

SEQ ID NO: 260841 - DNA, 655 bp, Homo sapiens
agttttatttttaagcataagagttctggcatttgcagcagcatgacatggtagcaaaattatatctttggaatgtgacatacttgagtccaatcttatttaattattattagatcatatataagctgaatgacctaacggaagttaacagacctctctgatcctcagttatcttgtctataaaatgtatatatcaaagcctactttatatatgtgttgctctaatkattaaatagtatcatgttaataaattgccctgcatactctgccagcaacccaataggatctcaaaaatgttcctcattatattcactaattatcctttctgaacaatcacattttacagaatcactcattagataattacattgatgactaatttctgatacaaaggtcttcacaaatgcagactttttctaagtttgttaaatcctaataccaaccatactacaactccagaaagactgggacaagaaacagcctcagttccatttctcaaacctttttctaatagcaatgccctgaaaattcaatttgtttccaccaagaatgagagatctagaaatgctgaagtacagattactattaggactcatatagtaggactggaggtgaggtcttatgacctattaataactttttaagtgtatgctat

SEQ ID NO: 260842 - DNA, 655 bp, Homo sapiens
agttttatttttaagcataagagttctggcatttgcagcagcatgacatggtagcaaaattatatctttggaatgtgacatacttgagtccaatcttatttaattattattagatcatatataagctgaatgacctaacggaagttaacagacctctctgatcctcagttatcttgtctataaaatgtatatatcaaagcctactttatatatgtgttgctctaatgattaaatagtatcatgttaataaattgccctgcayactctgccagcaacccaataggatctcaaaaatgttcctcattatattcactaattatcctttctgaacaatcacattttacagaatcactcattagataattacattgatgactaatttctgatacaaaggtcttcacaaatgcagactttttctaagtttgttaaatcctaataccaaccatactacaactccagaaagactgggacaagaaacagcctcagttccatttctcaaacctttttctaatagcaatgccctgaaaattcaatttgtttccaccaagaatgagagatctagaaatgctgaagtacagattactattaggactcatatagtaggactggaggtgaggtcttatgacctattaataactttttaagtgtatgctat

SEQ ID NO: 260843 - DNA, 602 bp, Homo sapiens
tagaccacaacatgcaaaggaaaagagtctatcttttaaaaccactaagagttgagtgctttactggctgtatgccattcttcagaggttttctgttaaatatgaatatttcatccacttatctctccaaatgaaatttatcaatagcatttactttttccatttttagctatagctgaattaaatttcatcctaaattctttcatggaagaaaggttgggaagaagagaaggagaaacccatgattcccaattaactcaagccaatagaggtaggtaagtaaacagcaaacactattagtagatgattgcttcagtgtggcattcctgtcctgcaattatttataatttamaaacatgagagttctcactgatagaccataattagcagagaaatatgcaaggtctccttagagagagctcatagctccaaaaccagcagcatctgactataaactgctctattaatgtaactaaagaaggaatacatccataaaaaagtcagctaaagaggtgttgaaaaaggagccattataggcatattgtggcaatacccaaattagctaggccaggagactcttgcttgaggacatgggaacatgt

SEQ ID NO: 260844 - DNA, 544 bp, Homo sapiens
gaaatagaaacagcaataactacctgggtgaatcaggcaattcgcagagcctaattccttagcttttgtgtgtctccttcctctctttctttttcagctgcacatcctttctctctgcttctgacgtaasatacagccagaaactagtatgcatcacaacttgtcagactcctaacatggcatcttccccactttcctatcaaaagtcatcactgtcacaactaatgcccaagctcatttcaacctatccttcttctttgtcttcctttcttatatggaagtctgtctaaaccccagtggagccgtcaatcacttcacttgtccttctcacacggatgtagcacaaaacccaacctacccaacaagagtatcctgttccctggccattgtgatagggttaggaatattcaccagacccaagtcatcccagtcaggagcctctccaaaaattttgctcaaacaatcaagaaataggtattccatctttctctgaaattatgagagcaaaagaggatacagtctgcttctaatagtgaacagtttt

SEQ ID NO: 260845 - DNA, 568 bp, Homo sapiens
ctgatttctactacctatctttaaagctcctacttggcttagattctatggtccactagtatatactaataatgccttggccctgtccattgtgctgaactctcctagtattcttcctcttcttttacaccggctcactgctcatcttccaggaagccaggatagtctccactgttgggtcctttcacttggcacttgatagtactctgtctcagatgctcttttcccagatttttcagtgtgagtttaggctcaacraagaagagaatggaaaggatcactgcacagggtgggtgacggtttagaggtgagggcagcagcaagcattggatatggtgtgctggaacaagaaggagactgatattgtaaggaaaaccaatactccatattacatttaacactgactaacatgaagccaaccttgttctgatcagtatgggaagacaggctgtaatcatcagataagcttgtctttgagcattgtaaaacccaatattttatagctctgttactagccacttcctattccctgcagactctaagacattgggaagaacaaaaagaaaaa

SEQ ID NO: 260846 - DNA, 561 bp, Homo sapiens
cattttttcatgttattgacaccagtggagtggagaatgtctgtttcaaagagcctctagattctctttcaaggtaagtgaagaacacttggaaaaatataaattattaatgcacaggtgaagttactgaccttctaaatccactgcagcaagtactgatactcctgctcactcttctcccccatttcaggctatagagcttttatagctgccagayagaaatcccgtacttttccttccaacagcacaccttgcgtttaatttgagtgttccatcatttgtatcaaacacaacagagtgattaaaagagaatgaaatgatagagattagaaaatgataatggtgagaattgggaatgtactatccattctcaaagaagcaactatgatatccttggtaagcagaaaagaattctatggatgtagctgtggatattttgacttgcctctgtgccctccatgggcacagagcctggctgggtctttactcctcatatttcccaagaaggtgccagcatcagcatggtcttatgaaaaagaaactgattaacaaagagagaat

SEQ ID NO: 260847 - DNA, 525 bp, Homo sapiens
catagtgtcctccaagatcattcatgttgtcgcaattggcaggattattttttccttcttaaggttatccataccacattttctcattcatctttgacagacagaagctgtttcctcatcttagctgttgtgaataaygctataatgaaatagcagtacaactacctctttaatatattgaccttatttcctttggattcactggaattttgatagggattgcacagaatctgtagatcactttgggtagtactgacactttggcaatattaattctttcactccatgaactaacctttccatttatttgtgtgctttcagtttctttcatcaatgttttacagttttcagagtacagatctttcacctccttaaatttattcctaagcattttaagtttttgatgctgtcataaaagagattgttttcttaatttctttttcagatagtttgttgttagtgtatagaaatgtaacttatttttgtacctcatttatatattctgaaactttactgaaatgattt

SEQ ID NO: 260848 - DNA, 611 bp, Homo sapiens
gtgcttttcttaattgatttctacatacttttatatcattaaggctatcaacacttggcaagttggtgattgctatggactaagtatttgtgtcccctgaaaattcacattgaagcctaaatccccaatgatagcatttggagatgggccttggggagataattagataatgagggtagagccctcatgataggattagcacgcttatatgaagagacaaaagagagtttacttcctctctactcttttgaatttgaactcacagtgagaagatagtcttctgtaagccaaaaagagtgccctcatcaaacaccaaatctgctgtcaccttgaccttggacttctcagcctccagaactgtgaaaaataaatttctatcgtataagccaccaagttcgtgttattcaatctcttggagaygcatctataaaataatgatagcacctacctcacaaagtatgacatattatttttatgagtaccattttaaaatcatgaagtgacttaaaattccaagttgtggccaggagtggtggctcacgcctataatcccagcactttgggaggccgaggcaggtggatcacctgaggtcaggagttcgagaccagtc

SEQ ID NO: 260849 - DNA, 604 bp, Homo sapiens
tattgtgtgccacattacattttattgatagcaataagagaatatgtatccattttcagcagtaatttcaaaagtactccaaaaccaatgtagttaattttgttatagagaagtatgtaaaaatcrtctgtgtactcactgtttgactttaaatcaagctaatgagaacattaaaattatatagaatgaactggtactttatgaaaatctgtgtgaacacattgcaattaataagaataatgttcatatgtatattacatgcttcctatgtggtgggaaatatttattttaatctttagtagaacactctgacctagatactcttaaacccattttaaagatgaaaaaacagattgagagatattctataacttctaaagtcacacaatcagtaagtagcagaagtaatcctaaactcagtctgtctggcaccacagaccacaacatcaccccactactacatagcaatttttaaggagagtcagaatacctagaaattatgattttacacacggagattagatctcagactcaatactaggtatttcatgagaggcatgtattttatagttagattaatacaagcttttccaagagttgagct

SEQ ID NO: 260850 - DNA, 538 bp, Homo sapiens
ttcaggcatctagctagccctgccacaagcaatttgaaaagtaaatataaataatccactaattaaaaaggtaataatagcttaaacgattgtcattcaagtaagttagagtcacaagatgtttggttcyttatagaaattaaagatagcatctcatatccttgagctgttattcagaaaccttgaccctcaccagatgaaaaatgccaaccactgtcatgtagacctcagataaggaggaactaagaagtgaatgctgactactgtccttattctaaatttcttccttgaaagcctgtagagtcatgcccaaaggctagatcttaacattcctttcttctgaccccaagtttttagacaaaacattgcttccttaaccaactgtaaatcaaagaatcttagaacccacctgtttgtaagcctctactttaagatactcccaccttttggggccaaaccaatgcataacctccatatattgatttatgattttgcctgttacttctgctttcctgaaatgtacccttacctttcatag

SEQ ID NO: 260851 - DNA, 569 bp, Homo sapiens
gtggttttaatatttaaatattgaaattattatatagtgtgtgtgtgtgtatgtgtgtgtgtgtgtatatacatatatatatatataaaatctccaagaacatgcctgatatgcaaaataaggtctacctgccaattctaaatgtttttccttgccaatcttctccccagaaccacatccaatctgagatccagctgctttcaaagactcatgcaatttccaccagacaacaacctatttgggttgcactcccgtaatcaagagtcaaatgggttatttgcacacagcagctctctggcccctttgttyttcaaatcaggttcctgccttctccaggtcacaggccccttagagatgccattatataagaaataaacttactgttttctttaacactttgagagcataaggcttctgggtccccttctgtttgcatctgtacacaatggatgtagcaccccttgagggggaaaaagacaaaaagaaaatgttatgctttggacatgaattaaaggggaaagcttgaaaataagtgtatcttgcaataacccacataactgacaagtgct

SEQ ID NO: 260852 - DNA, 569 bp, Homo sapiens
gtggttttaatatttaaatattgaaattattatatagtgtgtgtgtgtgtatgtgtgtgtgtgtgtatatacatatatatatatataaaatctccaagaacatgcctgatatgcaaaataaggtctacctgccaattctaaatgtttttccttgccaatcttctccccagaaccacatccaatctgagatccagctgctttcaaagactcatgcaatttccaccagacaacaacctatttgggttgcactcccgtaatcaagagtcaaatgggttatttgcacacagcagctctctggcccctttgttcttcaaatcaggttcctgccttctccaggtcacaggccccttagagatgccattatataagaaataaacttactgttttctttaacactttgagagcataaggcttctgggtccccttctgtttgcatctgtacacaatggatgtagcaccccttgagggggaaaaagacaaaaagaaaatgttatgctttggacatgaattaaaggggaaagcttsaaaataagtgtatcttgcaataacccacataactgacaagtgct

SEQ ID NO: 260853 - DNA, 545 bp, Homo sapiens
caagtgagcacaaagaattataaaaataaaacacattcccagctatctaaaggcaacacatttttaacagagccaagagaagtcaaagactggtgtgttgtaaatgcaaatagttaaaaatattaacatgtatttttaaaaccttggtaaggtatgacatatacacaaagtaataaagggttcaagaaatagaataaatgaaggtaatataaaattcatttccttattttaaattgctttaaaagataactaaggcaaaaatattaaaatttaaaaaaattaaaaatgcattgtgtttctascatgtgtaaaaataaaaaatgtacgacaacaacagcacaaatgatggaaggaagaaattgggaaatactgttgttaaatccttatactacatgtctggtagtctaatattatttaaatatagactgattaaagatgcatattatgtaacctatggcaatgactaattctttaatagaaaaatcaacaataattcaataatggagctaaaatgaaatattcaagaatggattgcaaaggagcaa

SEQ ID NO: 260854 - DNA, 555 bp, Homo sapiens
aatattttaaaactactaaaaattgccattaaaagtcatatatcaaaactcatgaaaatgcgtataacataaatggattatttttaaagaagattaaatgacatttgtgttgtttagtctgtcccattcttacgaccaattgacaacagttttctcttttttttactttcacatttctaaaatgtaaaatcccaatggacttgctttctactccatcccccagtataattttatccaattgcttattttgttggcatgaactttagggatgtaactgtgagttagcaatgacataactactgatggatcttttgggataggccttattcagaaatcaagatgtggagacctcatgaggatccaataagtcagaggtggagggggtcagccacagataagctgtagagtggagctgaaactgacaacagggacatgtttatttataacagaagcacgtggaagtatgaaaacaagataggtttasgttttagtccagaatcctaaaatatgaatagtctgaaaatggaagaaaaagattttaatgcatgccccgat

SEQ ID NO: 260855 - DNA, 535 bp, Homo sapiens
taaatttattacatgataaagtaattctgaaaataaatagtgaaaattgattttcaatcaatgattttaaaatagttgtgtgatcaatcgtcatttcggaaaaaaatatattggaccactatattacctacactgaaaaaaattcaaaatggatgacaaatataaacgtataccaaaattatattggactaaaaacaaaaaaaattattagaaaatgtatgattttctaagtatgaaaaaaaaacccaaaccataaaagcctaacatattagaccacattaaatttaaaaatgtctgaatggcwaaatcaaaccataaactatgtccaaagaaaaacagaaaaaactaagaaaaaatattgtcacatcattacagataaaggctcatttccttaatacacaaaaagctctatcaatataatagctcaaaaaatgtgcactgtagaaaaataaacaacattgaacacagttacacttaaaaagaaaatacaaatagttcttaaatatatgaaaaggtgcttaatctcacccatgca

SEQ ID NO: 260856 - DNA, 500 bp, Homo sapiens
cattttaagaatagtcttgaaattatttatcaggtcataattgagttgataatgygcaaattcatgtggttttcttattcgttagagttgatgggtttggagtagaaatgaggagttgcttgcaataatagaatcagaatatattgtgattggaagacacactaagttctttagtccaaatatcctcaaggggcttactccatatgagaatatcatgtacttcaccaaaggtcaaaagataatgggcattttttaaaaaatctttcttataaacatgcactcccctgcttgatctcgatattgagagttcttaatttattcttaaaggctatgctcattagatttttgagttttaaaaggacaacaataaacttggaggtttggatatctgattatctgtttatgtgattttaattagccatggactccagcctaaatatttattagttttctaaccttttgttggattgctaccattaaacatcctctgactgttgtaa

SEQ ID NO: 260857 - DNA, 500 bp, Homo sapiens
cattttaagaatagtcttgaaattatttatcaggtcataattgagttgataatgtgcaaattcatgtggttttcttattcgttagagttgatgggtttggagtagaaatgaggagttgcttgcaataatagaatcagaatatattgtgattggaagacacactaagttctttagtccaaatatcctcaaggggcttactccatatgagaatatcatgtacttcaccaaaggtcaaaagataatgggcattttttaaaaaatctttcttataaacatgcactcccctgcttgatctcgatattgagagttcttaatttattcttaaagrctatgctcattagatttttgagttttaaaaggacaacaataaacttggaggtttggatatctgattatctgtttatgtgattttaattagccatggactccagcctaaatatttattagttttctaaccttttgttggattgctaccattaaacatcctctgactgttgtaa

SEQ ID NO: 260858 - DNA, 530 bp, Homo sapiens
gttatctcaataattgcctgaacactgtaatttgtctgtggaacacaagccaaaaggaagaaataaacctaaagtgattgctaggcattaaggatatcacccttcctataaacactgaggcttatggcctgctgctaacaaaggaatgtaaggactaacagactttattaagaggatccactccattctttagagatgattaagcataatattatccaaaaacaggaaggtgagcaagaagggcattgtgtttgcttctgatttcattatttcatttattcactgaattaattcatgaaatgtgttcttctcctgcacttccttgttagacaagaaggccctgatgagaccctagtgagatacagagaaaagatacagatcctgttttcaaggtgtttccagggatttcactgagctgaaatgcaaaaagatggagggattcattcagaacaactgaacatcttgagcaaaggccaagctgggcacagaatgcaacayaatcacaaaggattagcacaagaagagccagt

SEQ ID NO: 260859 - DNA, 596 bp, Homo sapiens
aacaaagacatgtggatgataactgtgaagtccatgaactccagaaagctgcatagatgaactataagcatttctaccctaaaagtagggtgcccaggaggccactctcttccagctgagcatcagccgttactgtgagagccaaagtgcagggacagcgacccagtcgcagcaagtactggtagcatttcctctctggagaatgtgctaggatcagtttcagatctgtgatttttctttctttctttgatctactattgaatagttatggagggataaagatggaaaactatcttcaaatgccactgagtacagtcaattatttttgtgtctcagataaatttaggaaatgaaacaaacgagctgragcagaaaaggtacttattctaaagttgactttgaatttctgcatctcataaatcaacacctttgctcagtcaacttccacaatttgaatgtatttttaggaatattaatatttgctattaaaacatgctctctccaagtaccatgataagtggctttctaaaactgttacagatattttattaccatcatttcattttaaaaatcaaataattctcatggaaattgag

SEQ ID NO: 260860 - DNA, 415 bp, Homo sapiens
ataattgtataattacaaagtttagtatgattgtgaaacaacattaaggaaagagaaatccctaaaaattaaaaataaaatgactcaaatcaaatgtgtatcctattggcagcatattcatttcaagaggaattatttcaaatgactgtaaaaaacagtaattggagtatacttccctaatgtggtatgacttaagagcacaaagaacttaagaaaaaaaaaacaccactcttgtaaaccgttttcagyaattatatcattgttcttgtgtcagcattgtgatttagagacaattaatgtgtataatgtgggataaaacaaatgaagaatcaagtaatattccaactctatcattgctgagattctcaatgtggaaaaaaatgtggagagatgtaagattgaagaaattaaataa

SEQ ID NO: 260861 - DNA, 608 bp, Homo sapiens
cagtgaaatgatttattttagatctggagcaggaaatgtacaacacgagactacaacatagccatgaagctcacaagaagaggtatgtgagtaagcytaagtattaggtttccatacttaggtttgcatctaaagatgaaacaatacttgaatattaatgaggttaaacctgtcagggatggaactccatcaaatatgttcaaatgtatacagtcatatatatccatttgagaggattctagaaaactaaatttttattttgaaaactgacatgtcaaagaaaagaatctggcatgtatccagtctttcctttaaagactgtacaactaggtaaccaaatgataaatgaggaatgcttctctttcagaaatattgcagccaataaatcaaaaagttataatgaaagaagataatcaccactttgcaacccataattaattaatggattaggtataaatcatcgatggctgttaacttcacaaattagatatgaagttcctgaacagcacaacttcacctctgaaataatctcaccaaaatattctagatccacctaacaattcacagacaaaaatagaggacagaagatcatgctaaatggtaacaca

SEQ ID NO: 260862 - DNA, 608 bp, Homo sapiens
cagtgaaatgatttattttagatctggagcaggaaatgtacaacacgagactacaacatagccatgaagctcacaagaagaggtatgtgagtaagcctaagtattaggtttccatacttaggtttgcatctaaagatgaaacaatacttgaatattaatgaggttaaacctgtcagggatggaactccatcaaatatgttcaaatgtatacagtcatatatatccatttgagaggattctagaaaactaaatttttattttgaaaactgacatgtcaaagaaaagaatctggcatgtatccagtctttcctttaaagrctgtacaactaggtaaccaaatgataaatgaggaatgcttctctttcagaaatattgcagccaataaatcaaaaagttataatgaaagaagataatcaccactttgcaacccataattaattaatggattaggtataaatcatcgatggctgttaacttcacaaattagatatgaagttcctgaacagcacaacttcacctctgaaataatctcaccaaaatattctagatccacctaacaattcacagacaaaaatagaggacagaagatcatgctaaatggtaacaca

SEQ ID NO: 260863 - DNA, 548 bp, Homo sapiens
taggtaaccaaatgataaatgaggaatgcttctctttcagaaatattgcagccaataaatcaaaaagttataatgaaagaagataatcaccactttgcaacccataattaattaatggattaggtataaatcatcgatggctgttaacttcacaaattagatatgaagttcctgaacagcacaacttcacctctgaaataatctcaccaaaatattcyagatccacctaacaattcacagacaaaaatagaggacagaagatcatgctaaatggtaacacagggatgtaatcggcaaaatccacagtgtggaaaattcaacaggaaaaaatgtgtgagtttcttcaacacataaatatcaaagataaaaaaaaagacaaagaaaaaagacagtggaacctatagattagaagctaattaagagaagacttctgatttccatctgagaagagttttgaagtcatcactcacattcttgcaataagaaaaagctgaaaataataaaaatcaatgactttttgcgaaactatcagagaaacaacatggtac

SEQ ID NO: 260864 - DNA, 548 bp, Homo sapiens
taggtaaccaaatgataaatgaggaatgcttctctttcagaaatattgcagccaataaatcaaaaagttataatgaaagaagataatcaccactttgcaacccataattaattaatggattaggtataaatcatcgatggctgttaacttcacaaattagatatgaagttcctgaacagcacaacttcacctctgaaataatctcaccaaaatattctagatccacctaacaattcacagacaaaaatagaggacagaagatcatgctaaatggtaacacagggatgtaatcggcaaaatccacagtgtggaaaattcaacaggaaaaaatgtgtgagtttcttcaacacataaatatcaaagataaaaaaaaagacaaagaaaaaagacagtggaacctatagawtagaagctaattaagagaagacttctgatttccatctgagaagagttttgaagtcatcactcacattcttgcaataagaaaaagctgaaaataataaaaatcaatgactttttgcgaaactatcagagaaacaacatggtac

SEQ ID NO: 260865 - DNA, 548 bp, Homo sapiens
taggtaaccaaatgataaatgaggaatgcttctctttcagaaatattgcagccaataaatcaaaaagttataatgaaagaagataatcaccactttgcaacccataattaattaatggattaggtataaatcatcgatggctgttaacttcacaaattagatatgaagttcctgaacagcacaacttcacctctgaaataatctcaccaaaatattctagatccacctaacaattcacagacaaaaatagaggacagaagatcatgctaaatggtaacacagggatgtaatcggcaaaatccacagtgtggaaaattcaacaggaaaaaatgtgtgagtttcttcaacacataaatatcaaagataaaaaaaaagacaaagaaaaaagacagtggaacctatagattagaagctaattaagagaagacttctgatttccatctgagaagagttttgaagtcatcactcacattcttgcaataagaaaaagctgaaaataataaaaatcaatgactttttgygaaactatcagagaaacaacatggtac

SEQ ID NO: 260866 - DNA, 602 bp, Homo sapiens
gggaacgactgacatcggtgcagttgattgggaagcctttcctgattgaagtagcgttgtgtcgcatgaacattcatgttgtatagctctaaacccttttcccttcttgtaaccaagccgcgtacagaaaggaaaggcttatttttttttcaaggcaggctgctgggaggktattaaaaagaatattgcaaaggagctgaataagaaataaattcctgatgacaatttgggaatgcttagcagacatataaggccctttctctaataagggcaaaaaagaaattatggtccacagttaaacctccctaaaaagggcgtttgacacctctttatatatctttccaatactataaaagtaaatgagagaatacaaaaggctctgcatatagtaactctcactctgttaggtcatcaataataatttcttaatctaactcctattttttccgtctggctttaagatagagatcataaactgtcaactcatggatgagtctgtctatcaaaactccctccaaaattaaaacgtaaataaatttgatgttactattttaaaaataggagagaaatgtcagtttctgaattttccttagaagtaaaaa

SEQ ID NO: 260867 - DNA, 608 bp, Homo sapiens
gccctcacccaccaggaatgtcaggcaactatcaggtgataggcagttatttgactgtctcaaataataattggttgcagccagtgccagagaaagacagtctgtcaataaacagcaacacctgaaactagtgatcagcagcttcccgataaggtctcaggagttgggcaagtgggctcaagcatgcatattaagaggcaaaatgatagagtttagctggtatatgatctcctagggacattcaactggtaaagggagaatatcttgagtatgtgtaaaatttccataaacacgctgcacatactcccctcccaagtgctggcaggccactgtgcatgcagacagyccacccttggggagaaaaagaggagaaggaacacaacaccctggaagcatgccaatgtctaaaaccccaagtcaaaggtcaaactacacacttgaactctcaagtcacccacttggccctattttaagtgtactttactttctttcatgcctgatctgaagctttttaataaacattcacttctgctctgaaacttgcctgagtctctctttctgctttgtgcccctcagttgagttctttcttctaaggaggcaagaattg

SEQ ID NO: 260868 - DNA, 608 bp, Homo sapiens
gccctcacccaccaggaatgtcaggcaactatcaggtgataggcagttatttgactgtctcaaataataattggttgcagccagtgccagagaaagacagtctgtcaataaacagcaacacctgaaactagtgatcagcagcttcccgataaggtctcaggagttgggcaagtgggctcaagcatgcatattaagaggcaaaatgatagagtttagctggtatatgatctcctagggacattcaactggtaaagggagaatatcttgagtatgtgtaaaatttccataaacacgctgcacatactcccctcccaagtgctggcaggccactgtgcatgcagacagtccacccttggggagaaaaagrggagaaggaacacaacaccctggaagcatgccaatgtctaaaaccccaagtcaaaggtcaaactacacacttgaactctcaagtcacccacttggccctattttaagtgtactttactttctttcatgcctgatctgaagctttttaataaacattcacttctgctctgaaacttgcctgagtctctctttctgctttgtgcccctcagttgagttctttcttctaaggaggcaagaattg

SEQ ID NO: 260869 - DNA, 608 bp, Homo sapiens
gccctcacccaccaggaatgtcaggcaactatcaggtgataggcagttatttgactgtctcaaataataattggttgcagccagtgccagagaaagacagtctgtcaataaacagcaacacctgaaactagtgatcagcagcttcccgataaggtctcaggagttgggcaagtgggctcaagcatgcatattaagaggcaaaatgatagagtttagctggtatatgatctcctagggacattcaactggtaaagggagaatatcttgagtatgtgtaaaatttccataaacacgctgcacatactcccctcccaagtgctggcaggccactgtgcatgcagacagtccacccttggggagaaaaagaggagaaggaacacaacaccctggaagcatgccaatgtctaaaaccccaagtcaaaggtcaaactacacacttgaactctcaagtcacccacttggccctattttaagtgtactttactttctttcatgcctgatctgaagctttttaataaacattcacttctgctctgaaacttgcctgagtctctcyttctgctttgtgcccctcagttgagttctttcttctaaggaggcaagaattg

SEQ ID NO: 260870 - DNA, 580 bp, Homo sapiens
gataacagccctttcccaaaacaaatccccttcctgcctggggactagactggctttgcaggactaacaaattagccacgggattagaaattatggtttaggagtcatgcagctggaggatgcaagattctgaatttccccaaattgctcctaggataataatataactattgtaaaatctaagatcagtgcttgagatatttttgagaccttgtactcagtggatcagctggcaccactcagctcaataaactggctyatctggtcttgtggcctccacccaggaaccgactcagcagcttcgactccctatgatttcatctccaacccaaccaatcagcactccccacttttcaaaactctacccactaaattatccttaaaactctgattcccaagttttttggaagacttatttgagtaataataaaactccagtatcctgcacagccagctctgcatgaattaaactctttctctattacgattcccctgtcttcataaagtggctctgtctaggcagtgggcaaggtgaacccactgggcagccaccttgccatggaaatatttaataatatta

SEQ ID NO: 260871 - DNA, 580 bp, Homo sapiens
gataacagccctttcccaaaacaaatccccttcctgcctggggactagactggctttgcaggactaacaaattagccacgggattagaaattatggtttaggagtcatgcagctggaggatgcaagattctgaatttccccaaattgctcctaggataataatataactattgtaaaatctaagatcagtgcttgagatatttttgagaccttgtactcagtggatcagctggcaccactcagctcaataaactggctcatctggtcttgtggcctccacccaggaaccgactcagcagcttygactccctatgatttcatctccaacccaaccaatcagcactccccacttttcaaaactctacccactaaattatccttaaaactctgattcccaagttttttggaagacttatttgagtaataataaaactccagtatcctgcacagccagctctgcatgaattaaactctttctctattacgattcccctgtcttcataaagtggctctgtctaggcagtgggcaaggtgaacccactgggcagccaccttgccatggaaatatttaataatatta

SEQ ID NO: 260872 - DNA, 580 bp, Homo sapiens
gataacagccctttcccaaaacaaatccccttcctgcctggggactagactggctttgcaggactaacaaattagccacgggattagaaattatggtttaggagtcatgcagctggaggatgcaagattctgaatttccccaaattgctcctaggataataatataactattgtaaaatctaagatcagtgcttgagatatttttgagaccttgtactcagtggatcagctggcaccactcagctcaataaactggctcatctggtcttgtggcctccacccaggaaccgactcagcagcttcgactccctatgatttcatctccaacccaaccaatcagcactccccacttttcaaaactctacccactaaattatccttaaaactctgattcccaagttttttggaagacttatttgagtaataataaaactccagtatcctgcacagycagctctgcatgaattaaactctttctctattacgattcccctgtcttcataaagtggctctgtctaggcagtgggcaaggtgaacccactgggcagccaccttgccatggaaatatttaataatatta

SEQ ID NO: 260873 - DNA, 580 bp, Homo sapiens
gataacagccctttcccaaaacaaatccccttcctgcctggggactagactggctttgcaggactaacaaattagccacgggattagaaattatggtttaggagtcatgcagctggaggatgcaagattctgaatttccccaaattgctcctaggataataatataactattgtaaaatctaagatcagtgcttgagatatttttgagaccttgtactcagtggatcagctggcaccactcagctcaataaactggctcatctggtcttgtggcctccacccaggaaccgactcagcagcttcgactccctatgatttcatctccaacccaaccaatcagcactccccacttttcaaaactctacccactaaattatccttaaaactctgattcccaagttttttggaagacttatttgagtaataataaaactccagtatcctgcacagccagctctgcatgaattaaactctttctctattacrattcccctgtcttcataaagtggctctgtctaggcagtgggcaaggtgaacccactgggcagccaccttgccatggaaatatttaataatatta

SEQ ID NO: 260874 - DNA, 532 bp, Homo sapiens
attcaataacctcccactaggtctcttccacaatacgtggggattattacaattcaagatgagatttgggtggggacacacagccaaaccatatcagaaatcataaaacatctgtgcttgaatatgcgcagtayctaaggctaggactgaggaaagagtctttttgccctgttactacagcaagagtatagaaggccttgttcagttgttgacctgatataattgtctcatcggcctacttaaagtatcactccatactaccttacagcagagaactataaagaggaacaggaaacagactcctagatagaagtctcatgtagtgagcaagctttagacctctgttcttggaaagaatgttggaaaagtggtacctgcaagagtcagacccagaacaagtcctgagtcttccctcagttgaagcacccaggtactactgctactaatagctcagaatcatcattagacatttgattgtatgtggccaatgaaaagtgggttccagtgctgaacttacaattagtaaagagtg

SEQ ID NO: 260875 - DNA, 609 bp, Homo sapiens
gcctgtgggctgtagtttgtggttgatgatctaagcattcacctaaaaatgttagcagaaaaaagagcaaaataaacccacagtaagtagagaaaaacaaataaacataacagtagaagacagacaataattgataaaattgacaaagtcataatttgtttctttagaatgcytaatgtaagtgataaacttagcaaaaataatagaaaaaagtataaattcttaatattaagaatgaaaatgggctatcactacagatccaataggcactaaaaaaaaattagaaattactgaattacaaattacaaattagtaatgtagataaaatggaaaaaggtactgaacaaaaataatttattaaaataagtagaaaatatgtagaaactaaataaattccaaagccttctcaaaaagatgaaaataggcacagatggtttcctccatgaatactactaaacatacaaagagtaactaatgttaatattacacaaactttttcagaaaatagaagatggagagaaggctcatcattttatttcattaggttggattaacagcaaaaccaaaggctgacaaagacattaaaggaagaaaatatagcccaatatc

SEQ ID NO: 260876 - DNA, 555 bp, Homo sapiens
aatcaagaagataaataatgttattattcactagaagcagaaaacgccttctgacaaaatccaacacctattcatgatgacatcacttagctacctagtaatagaagaaaacttcctaaatttgataaaaggcacatatataaaagcacttttaatggtgaactcatgagtgcttttgccctaagactaaaatcagaatgaggcaaagtatatacactcatatctcttctattcactttcacactagagattctaatgaagtaagataaaataagaaataaaatatataaaggttggaatatgagaaataaaacttccagaaagcatgatttctatgaagaaacgctaaaggaatctacaaaaatgctaaatctaatataagaaataagttatatttcaatatactaacaaaaaatgctgaaaataaaattaaaaataaatagcacaggaatatgtaaactacttaagaacaaatttaataacatgtrtaagaactctaatgtactgtatggcattccttagaaagtttaaagaattaagtaaaaggagaggatt

SEQ ID NO: 260877 - DNA, 613 bp, Homo sapiens
acccaacaatttcttaaagcaaggaacaacaataataacagacattcactgagaaccttctcagagtgctgttgagaaaacccactagaaagaaatcacaagcctttcccattagtctctaaagactaccaggtatgtgtatttgataattaatacattctaaaaggctgagaagctgaatagagtttttgttagcacttctgggctagcacggcaaaactggaactcaaggcctgctgataagggagtccagtgggttgaaatcgtgaaaaccacattttaggaattaggccaaattagaaataaactggacctcacatcttcaaatcatctagttcttgaagttgaattaagatcatcagtgattattattgctactaactgcttgacagaagcttgtcaayattttatttgtataacattatttatttgtataacatttttctataaaatatcagtaacacaataaaaatactctaagagataagataaagcaatgaaaaccaagagcagccatacacaataaaacagaaacataggaaatggagataatgtaattgtcagacattaatgtaaaaataactatgaccactatattctagataatagagga

SEQ ID NO: 260878 - DNA, 659 bp, Homo sapiens
aaaatttccttctatccctaatgtgctgaattatttgatcatgaataggcatgattttgtcaaataatttttctacatctattgagatatgatttttctcttttattttgataatgcgataactttcattgatgattttagaattgttgataaatgctcatttagccatgatgtagtttctcttcatacagttctggtttaaattcgctaatattttaaggcacatttttgcttctatattcttaaaggatattggcttacactttcttataatatctttatctggttttggtgttaagttatacctgcttcagtaaataagtcagaaattatttcctcttcttttgttttggaattwatgtaagttgacatattttttccttaaatggtagaatttgccacataaaccttccatgattttcattttggaaattactatgactacaaattaatttttaggtacagacctattcagatttcaattattcgtgtgcaaattttaagttgtagttttcaacaaatttgtcagttttatctaagttatcaattttttttttaacttttcagttcaggggtacaaatgcaggtttgttacatagataaacttatgacatgatgattgattttaaaactgtttctatgcgtcagaagtccaggcg

SEQ ID NO: 260879 - DNA, 557 bp, Homo sapiens
caatctctggttctctcatgggatcttaccacggcttgttttcagggattttagggggagttcagggtttgtttgtttgttttttctaggggtggggggttgttagattgcgactaggccttactccaggacatggactggcaaactacagcctgtatagtgccaaatcaagcctgcctcttgacttcgtaagtgcagtttcaatgaaacaaagtctcatccatttgttaatgtatyatctatgactattttgttctacagagcagagttgagtaaccataacacagaccacatggcctacaaagcttaaaatgtttactctctcaccataccctgaaaaattgctgactcttttataagacatttttcttacaccttaggtgggcattttattgcttcagatggatatccacaactttaagaaaattctctcctctttggctgaaatggagctctaatgtctctcaccactattaatatctctgttcagctctcaactgtgaagcagctactcccctggtaagcctaccagtcttactctgtacttgtgcacccaa

SEQ ID NO: 260880 - DNA, 622 bp, Homo sapiens
ctgatcaccttatttaggcttgtttgtatgtttttataaggcagaattgtggcaagcccaagaggtcctcctttctctctaactttgcagattcaatctctggttctctcatgggatcttaccacggcttgttttcagggattttagggggagttcagggtttgtttgtttgttttttctaggggtggggggttgttagattgcgactaggccttactccaggacatggactggcaaactacagcctgtatagtgccaaatcaagcctgcctcttgacttcgtaagtgcagtttcaatgaaacaaagtctcatccatttgttaatgtatcatctatgactattttgttctacagagcagagttgagtaaccataacacagaccacatggcctacaaagcttaaaatgtttactctctcaccataccctgaaaaattgctgactcttttataagacrtttttcttacaccttaggtgggcattttattgcttcagatggatatccacaactttaagaaaattctctcctctttggctgaaatggagctctaatgtctctcaccactattaatatctctgttcagctctcaactgtgaagcagctactcccctggtaagcctac

SEQ ID NO: 260881 - DNA, 510 bp, Homo sapiens
ttaatttctccagaaatataacactgggtaggtcaatagaagattgcaatttgttttttttggaaatttttccaaagttgttcaccatttcaaagatctctttgctcaaggcattgctactcatggtatttaacttgccataaccatttaagtcacctgtatcaattttcaatcatagcttgcatagtcatgtgcttatatagtcctcacattaaaatgtcaagtataaagaaaagrtgtcaaaatattctattggttattatttttattcccctaaaaacaactttattcatcataaaatgccgtcaagcatctggctacttcattatgtcaactaatgtagttattcctatatgttttaataataaaacattattttactataaattatttttcttcaattattagaaagttatattgaaactttaaactgatccgagaaggtgagataaagaaatgtggagttcattcaagacattgaagggatcattggttctgaaggaactgaga

SEQ ID NO: 260882 - DNA, 510 bp, Homo sapiens
ttaatttctccagaaatataacactgggtaggtcaatagaagattgcaatttgttttttttggaaatttttccaaagttgttcaccatttcaaagatctctttgctcaaggcattgctactcatggtatttaacttgccataaccatttaagtcacctgtatcaattttcaatcatagcttgcatagtcatgtgcttatatagtcctcacattaaaatgtcaagtataaagaaaaggtgtcaaaatattctattkgttattatttttattcccctaaaaacaactttattcatcataaaatgccgtcaagcatctggctacttcattatgtcaactaatgtagttattcctatatgttttaataataaaacattattttactataaattatttttcttcaattattagaaagttatattgaaactttaaactgatccgagaaggtgagataaagaaatgtggagttcattcaagacattgaagggatcattggttctgaaggaactgaga

SEQ ID NO: 260883 - DNA, 510 bp, Homo sapiens
ttaatttctccagaaatataacactgggtaggtcaatagaagattgcaatttgttttttttggaaatttttccaaagttgttcaccatttcaaagatctctttgctcaaggcattgctactcatggtatttaacttgccataaccatttaagtcacctgtatcaattttcaatcatagcttgcatagtcatgtgcttatatagtcctcacattaaaatgtcaagtataaagaaaaggtgtcaaaatattctattggttattatttttattcccctaaaaacaactttattcatcataaaatgccgtcaagcatctggctacttcattatgtcaactaatgtagttattcctatatgttttaataataaaacattattttactataaattatttttcttcaattattagaaagttatattgaaactttaaactgatccgagaaggtgagataaagaaatgtggakttcattcaagacattgaagggatcattggttctgaaggaactgaga

SEQ ID NO: 260884 - DNA, 561 bp, Homo sapiens
tatttttcctcacaatacaccagtgttctttaatttaacctatctcatcacaaaacactgcattattgtaatatttctctttgctgtcttgaaagttcctttggctcacatattttgccaagaagtgcaataaatctgtgtcaagggtgtctagctataatacacaaagctgacataaaaattacttgtgaattttattttcataacaacaaactaatttgctatactaaatgatgaagacacaggtgaactagggcactgggttcagatcttcayaggacaatagttcctaaaacataatgctttcaatagaagaggcccattaagaaagaagtcaaggcgaaaattaaggcatatatttaaaaaaatatatctggggaagacctcagatagtaactgtatcaaagccaccatttttacattgtagatttgggaggttgctcctaagacgaatagtaaaggtggccttcagccaccctaacccagacattgttctctggactgtattgcctctctcatactctccttgcaatgtatcagtagctatacaggacgagacac

SEQ ID NO: 260885 - DNA, 615 bp, Homo sapiens
ggctaacttttaaaagtgaaattgtgaaactaaatatttatatcattagcccttcctgcaccttaataattatgttgataaataaaaatatcaataactttttctctgaaatattactgctaacttataaatcaattatgttttgtttttgagggcagaatttgtcccagggcaggtaatacaactccttttcccaaagctcttaaacacattaawcacagaatgcaaaggagaaaacatgtctcaaaagcagcctacacctagtcaattttgtatgcttctttcccaccccttgagaaacctggccctgacccagtgaaaaatttaatgaagcaactcaaaattgatagtcaaatgagacaaaagaccaaacttatgttcacaacaggaaactaaagttttgaaaaggttaccagtaaattatttcactctctattgctctgagtttctgaaaacatatttatcgtactcaatagcagcagcctcggccagaaacttgaaagtttcttcagggatttagattaccatgtgcaaacgtttcaagccagaccaataaccttgcattccttctcaaagatccaaatcatatcccaagagacagagcaaactatttag

SEQ ID NO: 260886 - DNA, 628 bp, Homo sapiens
tgacaaatactcattaagaaataaatattaaggatagagttttattccattgctgaatttccactgatgtgcatgtaaatataactaaaatttcccatgcagcttgtctatacatattacactattgaatattcagagatgggctaaagtgaagcaaggagtaacatgtaaactatttattatctggttaattccatcttctaaccrcatagtaaatagtgtctctatttcataaattgttttacatatggcactgcatttttaaggtgactgcattcactatttatacctgttttacgtaaaatatatgaaggatggcttttaaaaatcacttttattatctcaaattaatacagattattacaagatcaatttgtcatacttgttgctattactcatggcagaggccaaaataatctgaattacaagcttcattccttatcagtgaccacatacagacttcatctttttctcatcttaattaaaactattttccctttctcttttcaaatttcttaatgatattctaatccaatttacataaaacatttctcatctgttaaagatacctcagccaacagatggtgctatgtataacatttttatgatagtgtatagtatttaaaga

SEQ ID NO: 260887 - DNA, 628 bp, Homo sapiens
tgacaaatactcattaagaaataaatattaaggatagagttttattccattgctgaatttccactgatgtgcatgtaaatataactaaaatttcccatgcagcttgtctatacatattacactattgaatattcagagatgggctaaagtgaagcaaggagtaacatgtaaactatttattatctggttaattccatcttctaaccgcatagtaaatagtgtctctatttcataaattgttttacatatggcactgcatttttaargtgactgcattcactatttatacctgttttacgtaaaatatatgaaggatggcttttaaaaatcacttttattatctcaaattaatacagattattacaagatcaatttgtcatacttgttgctattactcatggcagaggccaaaataatctgaattacaagcttcattccttatcagtgaccacatacagacttcatctttttctcatcttaattaaaactattttccctttctcttttcaaatttcttaatgatattctaatccaatttacataaaacatttctcatctgttaaagatacctcagccaacagatggtgctatgtataacatttttatgatagtgtatagtatttaaaga

SEQ ID NO: 260888 - DNA, 628 bp, Homo sapiens
tgacaaatactcattaagaaataaatattaaggatagagttttattccattgctgaatttccactgatgtgcatgtaaatataactaaaatttcccatgcagcttgtctatacatattacactattgaatattcagagatgggctaaagtgaagcaaggagtaacatgtaaactatttattatctggttaattccatcttctaaccgcatagtaaatagtgtctctatttcataaattgttttacatatggcactgcatttttaaggtgactgcattcactatttatacctgttttacgtaaaatatatgaaggatggcttttaaaaawcacttttattatctcaaattaatacagattattacaagatcaatttgtcatacttgttgctattactcatggcagaggccaaaataatctgaattacaagcttcattccttatcagtgaccacatacagacttcatctttttctcatcttaattaaaactattttccctttctcttttcaaatttcttaatgatattctaatccaatttacataaaacatttctcatctgttaaagatacctcagccaacagatggtgctatgtataacatttttatgatagtgtatagtatttaaaga

SEQ ID NO: 260889 - DNA, 556 bp, Homo sapiens
gatctttcaaggctgtctgttcacatttagcgatggggaacaattaatgctttttgagcagcagagtgcaagaattcagagttttggtatcttagtctgggcttcaattctttaactccaacctacttttcaagcctttggttcatcagttccctgagctactgtatagctcagtcatattgatcttgcaagatgctgtggataactcactttgttgagattcttccttatacaatctggatatgcagccaataatccacaccagcgttttatgcaactttttatttgaaggatttctgatcacaaaggccayaggtatttttgtccaattatgaactcttccaactcttaatattactgtatttattttaatttgacctcacattgctttttgctatattattccttaaaagaaacaattcaatttattctgtttctgggttattgagtgaactggaaactcagtggaaagtacagctggtaacatcaacacatgaaattgatggactctaataaccattttcagttgggttttgtccttttagcagccaactga

SEQ ID NO: 260890 - DNA, 642 bp, Homo sapiens
caaatagtacatgtagaattctgatttactttaattaaaatagttaagtattttatgcattgaaatttattattgaaaataatatatattatttttattcaataatttcaataacattcaataatacattattgaaaatatatgtatattaacaaatattaatgtaatatatattaatgtatacagtgtatatgacacacaaatatgtatatatacacataaattagtagctcactacagggttgacatgtgtctttcttttaaatgacatcaaattatgattttaaaaatgagagagattttataacacagcaaatrgttttggctgatatgtcaatgataatctttctgattcaatataaatcaccatttacccaatagattttggtttttcctcaggatttttatgaacatttgctctggaataggatttttacagaaaattataatcctgctggctatccagcatattagaagcatctattctactaatcttaaatttaccctttttcaccaaatcagatttacatgccaaactttacaaatacctctgtgaaagttttcttttaacttaaaatagtagcactacactgagttgtttaaaagtaaatgacttgtgaatttactaacaaagtggactta

SEQ ID NO: 260891 - DNA, 642 bp, Homo sapiens
caaatagtacatgtagaattctgatttactttaattaaaatagttaagtattttatgcattgaaatttattattgaaaataatatatattatttttattcaataatttcaataacattcaataatacattattgaaaatatatgtatattaacaaatattaatgtaatatatattaatgtatacagtgtatatgacacacaaatatgtatatatacacataaattagtagctcactacagggttgacatgtgtctttcttttaaatgacatcaaattatgattttaaaaatgagagagattttataacacagcaaatggttttggctgatatgtcaatgataatctttctgattcaatataaatcaccatttacccaatagattttggtttttcctcaggatttttatgaacatttgctctggaataggatttttacagaaaattataatcctgctggctatccagcatattagaagcatctattctactaatcttaaatttaccctttttcaccaaatcagatttacaygccaaactttacaaatacctctgtgaaagttttcttttaacttaaaatagtagcactacactgagttgtttaaaagtaaatgacttgtgaatttactaacaaagtggactta

SEQ ID NO: 260892 - DNA, 560 bp, Homo sapiens
cctatagtttattctaatgattttatgattttagtttgaattaaatatagtaaattgtttttaaattaaaacatattatactctattactagtaagcttttcacccagaactatctgtgtcgtaactctcagctctcatgatctggcacagggatcctgtatgtmgctgcagcttccatcttgacctttgattactttttcagctctctgacagactcatacagacatagttgatcagcttttgatgaaacaaggctacaacaaagaattagtgcttctgatatcaaatgttaatgataagcagacttcaatcataaagatgcatttgagaaaaatttaaatctttgatttaaaaaacaaaaaaaaggctataattccatagtatttataattcaatatagaaattttcaaagtcatgcaaaaccttaataatttagtatttccctttgttaacaaagcctttagttaccagtaaatgtatgctagaggtctatttaaataaacatttatttaatgaattttaaaatatcttggtgttaaaataatcatcagtacaagca

SEQ ID NO: 260893 - DNA, 560 bp, Homo sapiens
cctatagtttattctaatgattttatgattttagtttgaattaaatatagtaaattgtttttaaattaaaacatattatactctattactagtaagcttttcacccagaactatctgtgtcgtaactctcagctctcatgatctggcacagggatcctgtatgtagctgcagcttccatcttgacctttgattactttttcagctctctgacagactcatacagacatagttgatcagcttttgatgaaacaaggctacaacaaagaattagtgcttctgatatcaaatgttaatgataagcagacttcaatcataaagatgcatttgagaaaaatttaaatctttgatttaaaaaacaaaaaaawggctataattccatagtatttataattcaatatagaaattttcaaagtcatgcaaaaccttaataatttagtatttccctttgttaacaaagcctttagttaccagtaaatgtatgctagaggtctatttaaataaacatttatttaatgaattttaaaatatcttggtgttaaaataatcatcagtacaagca

SEQ ID NO: 260894 - DNA, 595 bp, Homo sapiens
cacagtaggtaaaaatttgtttcatgtatccccaaaagaagttcttagtctattccctgtatcattaaagtttcctgaggagaatactaaggattaatttaatatgttcaaaatgcatcagagtataacctgaattttgattcccactaattcctccccattttggtttacccttccycaactgaattaagaatgggtgttgaggaaacattaagaaaatgtgaaaaaagtaacttgcacctggaaatacatagttcatagcattcatcatgtaaagaaacagaaatcactacttttctcaaggcctgtcatattcaaagaaatgtttttgggtaatattccatataaactagtattatggttctgctgcaatcaccacccagtgggttattcaagtcctcttcccctccttcagttaggagtcccagactgtggacagtgtggaccccagagttcaaaagatgtgagtcagagtcccagggaagtatttgagtttgtcagtggttctgctaatgaaggtaatggacggtagtatttaaggacttttccagaggcagcctatcatcatccaaaagaactttctgtgataatggag

SEQ ID NO: 260895 - DNA, 595 bp, Homo sapiens
cacagtaggtaaaaatttgtttcatgtatccccaaaagaagttcttagtctattccctgtatcattaaagtttcctgaggagaatactaaggattaatttaatatgttcaaaatgcatcagagtataacctgaattttgattcccactaattcctccccattttggtttacccttcctcaactgaattaagaatgggtgttgaggaaacattaagaaaatgtgaaaaaagtaacttgcacctggaaatacatagttcatagcattcatcatgtaaagaaacagaaatcactacttttctcaaggcctgtcatattcaaagaaatgtttttgggtaatattccatataaactagtattatggttctgctgcaatcaccacccagtgggttattcaagtcctcttccyctccttcagttaggagtcccagactgtggacagtgtggaccccagagttcaaaagatgtgagtcagagtcccagggaagtatttgagtttgtcagtggttctgctaatgaaggtaatggacggtagtatttaaggacttttccagaggcagcctatcatcatccaaaagaactttctgtgataatggag

SEQ ID NO: 260896 - DNA, 556 bp, Homo sapiens
ttctaataaatacaaaacacaaagtgatcaacacttattattctctttctgggaccgctttgatgtgtcttagctaccttttatacattaaatttattatatttttagcaaacctattaactgataagtttactgattataatttttattagaatgaataacattttataaaaatttgagagcattattcagaaaattacaagtgctgtattatccagtgctttctagcatcmacattcagcctagaatattgccatgatactgtatttaaataactggcatgttaaaaaacacacacacgcacatattaataaatcataggtgctctgtgaaggtaatctattacacactatggtttaaaacatgattttataatgcatgataccacaactcactttggaatgcgtatgaatgatgtattagtgactttttctaaatacgtattccatcactcttaagcacactgtagaaatgatgcgtaattttgttttataaataatatatctttaaaagacgttagtttctataaatatttaaaatatttttgtagtataaa

SEQ ID NO: 260897 - DNA, 600 bp, Homo sapiens
atctatgccacgagcatatccaccgcctccaaaagattcctcctgtccactattattctcattactattttgtgtgtatgtgcgtacgttattctaagtaatcactttggaagacttacacatttactttgcccatatcatgtcacaggaggtaccttcagagcctacagtgaatctaatctaatctatgaaatctaatcatttcatagaggatttattttaaatttaaacytcaattctctcaagggaattggatgtaacaacccagctagaactattagtatttttttaaaaagggcctgacctcgttgggctgtaagaaattcctaacatgtttttacttgataatggtggcatcactgaaaaactgttaaatgtttaatgtcacttctcttaggtgataatagttgcatggaataataaattctgataactatatctgttttaaattcttctttttttttttaagagacagagtctcgccatgttgcccaggatggacttgaactcctgagttcaagtgatcctcctgccccagccttcagagtagctgagaatatgtgccagcttaaattttcattactttaatgaaacccactg

SEQ ID NO: 260898 - DNA, 514 bp, Homo sapiens
gacctttctgtaaagaaactcttattactgtgatatatcacctcgaaaactactgcaaaaaaatccagcaattttgattctagtttttaaggaagagaacgtcttacacccatctaatataaagttagctttataaagcttgccttttaaaaattctatwgaaatattgagataaaaaattgatccaccataactttaggcccttataaaaaattaatggctctctgacatataaggaaaaaaaaaaaaacagaaaaagcaccaaaactgtctcaaatggttattttggaaaatttaaacacagaaaatctaggctttcaatcctttagaaaagcatatgagcttagatattatgagaccattgacttacccagggtaagcataaaaatacactaaaataatggcagctgatgggaaatatttatattaacaatatatatcgaaataggtataaatatccaaaggcacatcatgctatcttgggtctggaaaaacaaattttagcattcattta

SEQ ID NO: 260899 - DNA, 455 bp, Homo sapiens
gtggctgtctaccagccaggaagtgggcctgcattatcatttcaactctgcaggttggcctaaccctaaccctaacccctctgcaggtacgcaagaatcaactgtgcaggtacattgatcttggaattccaacctccagagctgtgagaaataaatgtctgttttttaagcccccaagtctgtggcattttgtgacagtagcctgagcagactaaggcagtaattggtaccaagagtcaggaaagagataagaaaccggtagcttcaacagtcgctgcaaatcctcctgtaaccaatttgtgtacattaagaaccagggcctctsagatctaggaaacaactgcaaatggtatggaggctggctaccactatatcaacaaaaaagctacttcaagtagcaatcacaaaaaatacccccaaaaagggctgagtctttcgaacaaagacattaattc

SEQ ID NO: 260900 - DNA, 507 bp, Homo sapiens
attcaggaaacttaggaaggacaagatgccacagcacatcagtttgataataaggcttggagagatgtgattttcaaagcttgaacctatcaaactgattctagtgtttgccacctccagtctcacatataatttttcaaccaggacaggatgacaaaaaaacacagaaatgtgtctgaggtgttaatatagaatgcaggttcagattgcaggtrggctttgttttagaagcaatgagattgccacacacagaaagacatttaaaacattaccttaagctaaacaaacaccacattttcaaggtgcctcatcattaaccttggaatgttgatatgcccagggacagaaaacaacacaatgacaggctatagaaaaggcaaagaatatttgtagaggatggtgtgtgtgtgtgtgtgtgtgtgtgtgtgtgtgtgtgtgtgtgtgtcatggagagggagaggaagacaagagacagagaatagcatgacaaaatggaaatgcatgttt

SEQ ID NO: 260901 - DNA, 569 bp, Homo sapiens
tgacttggagtagaagcattttatgtgttttattcagaagggaagaagggagagtctaaatctaaagcaattattaattggcaatgcaattgcagctgctggtgattctgtataatccacactaggtccctaaagggaaacaaaaagagataaggtagacccattatgattctgtatctgtctttgtagtataccagctttttaaaaggtatttccatataataatatgggtcaactaattcctaaatgtaaatcagaagatactgtactttttcacaactccaaatgtgttcggcccacaatttaagtggaaatactaataatctatcaacaaataatactaaaygtgcccacccaaccttcacttgcacatctgttatattgaaggcaatatgctaactgtggtgggatggaactataagggacacaatcaaaaatatgcggtgtaccaaacaagtacttaggaactgagagtgattcatcatgagagatagaaattcaaggtgactggccagcatagacaacataattaaaggaagagatatattgatttgaagtttttccaacct

SEQ ID NO: 260902 - DNA, 609 bp, Homo sapiens
ttcttttgcagaataaaaggaaataaaccatggggatatagatcaatggtagatgatcagatacctgggcagagttgagaagatgtgactagctctagggtaaacatatttatctaattgctgaaaaataaaagttgatgacttgcctagaataacttggaaaattatctacataaaaattatctttctgtagatagttagtactttttttttttaaccagaggttgctctgatattcattcaggaattgaggtcactgctaagtcactgaaaactaaatgggtctggtatgacaggggccagagagtctttgcagcacccagcaggatatgtaggaccgtcttcatattcattgttatattttagtgctgcatactcaaaaaaactatatrcgctctccctttatttgcataatgatttttaaaggaaaaagtaatagatattaatattatatatttcatgtaaaaaattctaactgtaagttctcctcccctggattctgaatccctattaccaatagtaaccattattacaaattattattgtgtaattcaaaagctttctacatatgcaaacaaatatgtgggtgtactacacatacacaggcac

SEQ ID NO: 260903 - DNA, 609 bp, Homo sapiens
ttcttttgcagaataaaaggaaataaaccatggggatatagatcaatggtagatgatcagatacctgggcagagttgagaagatgtgactagctctagggtaaacatatttatctaattgctgaaaaataaaagttgatgacttgcctagaataacttggaaaattatctacataaaaattatctttctgtagatagttagtactttttttttttaaccagaggttgctctgatattcattcaggaattgaggtcactgctaagtcactgaaaactaaatgggtctggtatgacaggggccagagagtctttgcagcacccagcaggatatgtaggaccgtcttcatattcattgttatattttagtgctgcatactcaaaaaaactatatgygctctccctttatttgcataatgatttttaaaggaaaaagtaatagatattaatattatatatttcatgtaaaaaattctaactgtaagttctcctcccctggattctgaatccctattaccaatagtaaccattattacaaattattattgtgtaattcaaaagctttctacatatgcaaacaaatatgtgggtgtactacacatacacaggcac

SEQ ID NO: 260904 - DNA, 618 bp, Homo sapiens
ggtttgttgttcctggaggcctgactggacaattgtagaccatcaatgttgatgtttaagtcaatcaacagtttgagaatcatatgaggaaagaatatgatacccagttgttatctgatgattttttattgacaccttcagatacaagtaagaacagaggcatcaaattttgcataatgggtgtcagcaagtttgagaaaawtttcctggaggaaatactgctgtgtttttacaaaatacctcagtatgtgtcaattcagtggcacagcattttctgtggaaaaaactcaggcattgatgcctcagaattgaagaatgattcacaacaactggacaaaggatgaagaagttttaagaatatcttaacacaattatttaacttaatctttcctttttatgtgcaagaatgttaggataaatatctaagtctaaaagagctctttcaattaaaaataaatttgaagtgacaaaaagtatatgcttttggttatttggcagattttaaaacattttctagtagttcattaaaatattctgttgtaattaataatgtctgagacttgatgacacatggtgtgtaactactcaaaaaaaaaaagttaaattctttggcaattt

SEQ ID NO: 260905 - DNA, 618 bp, Homo sapiens
ggtttgttgttcctggaggcctgactggacaattgtagaccatcaatgttgatgtttaagtcaatcaacagtttgagaatcatatgaggaaagaatatgatacccagttgttatctgatgattttttattgacaccttcagatacaagtaagaacagaggcatcaaattttgcataatgggtgtcagcaagtttgagaaaaatttcctggaggaaatactgctgtgtttttacaaaatayctcagtatgtgtcaattcagtggcacagcattttctgtggaaaaaactcaggcattgatgcctcagaattgaagaatgattcacaacaactggacaaaggatgaagaagttttaagaatatcttaacacaattatttaacttaatctttcctttttatgtgcaagaatgttaggataaatatctaagtctaaaagagctctttcaattaaaaataaatttgaagtgacaaaaagtatatgcttttggttatttggcagattttaaaacattttctagtagttcattaaaatattctgttgtaattaataatgtctgagacttgatgacacatggtgtgtaactactcaaaaaaaaaaagttaaattctttggcaattt

SEQ ID NO: 260906 - DNA, 618 bp, Homo sapiens
ggtttgttgttcctggaggcctgactggacaattgtagaccatcaatgttgatgtttaagtcaatcaacagtttgagaatcatatgaggaaagaatatgatacccagttgttatctgatgattttttattgacaccttcagatacaagtaagaacagaggcatcaaattttgcataatgggtgtcagcaagtttgagaaaaatttcctggaggaaatactgctgtgtttttacaaaatacctcagtatgtgtcaattcagtggcacagcattttctgtggaaaaaactcaggcattgatgcctcagaattgaagaatgattcacaacaactggacaaaggatgaagaagttttaagratatcttaacacaattatttaacttaatctttcctttttatgtgcaagaatgttaggataaatatctaagtctaaaagagctctttcaattaaaaataaatttgaagtgacaaaaagtatatgcttttggttatttggcagattttaaaacattttctagtagttcattaaaatattctgttgtaattaataatgtctgagacttgatgacacatggtgtgtaactactcaaaaaaaaaaagttaaattctttggcaattt

SEQ ID NO: 260907 - DNA, 608 bp, Homo sapiens
tcagcatttacatattttcctctaataaataaacccatgcataatttacttaatagaaaactaaagacaataaattagaagagctagaaaaatatgactattttcttaaatgcatcacattcaaattagagaaatctaaggcccaatatcacaaggtcaaagtaatcttactcaagcctgacttcaaattgtcttaatttacaaaataggttcatccatgagagtctttccaaataaggcaatgctagagaaatatctaggaaattggatatagtgtttacatgttgataaactacttttgcctggattgtaatggatttattcatttttcttcatagcaaataaaaaataaaaatatgttttagtattgggaggatgtatgtgtcraggaatttatccatttcttctagattttctagtttatttgcgtagaggtgtttatggtgttctctgatggtagtttgtatttctgtgggatcggtggtgatatcccctttatcattttttattgcatctatttgattcttctctcttttcttccttattagtcttgcttgcggtctatcaattttgttgatcttttcaaaaaaccagatcctggattcatt

SEQ ID NO: 260908 - DNA, 601 bp, Homo sapiens
gggtttaacatagccagttgctttatattaataaaactcatttgtttcatagatacaggaacgtttcccactacctaaattaaaaaagcatggtttagattgagaaggattgagaccagaaaatggaaagtcattagtaaccctgcagcatactccaaatctctggtgtttgctgtctctgcttattgttgttatgtcaccatagagtgggtttctcttttttsttttctgttgggtttggtttcgctttgtttcttatttttgtttttccctaatgagcttgattgcttgttcagaacaggaattttgctgcttttagcaccatcagccaactgaattgaaccccaatgacctaactcaaaaatatctgaaaagaaaacttggttactccagtgtgggttaagtatctattgcacataattggttttggccaggtaggtgagcttatgtagtccaaacccgtagatgtaaatgagaagaggggaaatttcttaaaagccataattgggctggacaggtgtcctagaggttttctactgcattgttaattcaccaaagcttattgtcatgggatgtcaatattaaattgctggtggctgag

SEQ ID NO: 260909 - DNA, 571 bp, Homo sapiens
gcttatgtagtccaaacccgtagatgtaaatgagaagaggggaaatttcttaaaagccataattgggctggacaggtgtcctagaggttttctactgcattgttaattcaccaaagcttattgtcatgggatgtcaatattaaattgytggtggctgagagtcagggctatttcctggtctgttttaacttctctgtgataagtgtattatgcatatgaaaatgtgcacttcaaagcatgaaaggcagtcttcccatttgggaccacattttaaatgtagccaatcaacaatcaactaatgttagttcttatacattgactatggttcatatctggagataataatcaaatacagcatttcaattagcagaataagcaggatgaatttgactcctaaataattgcagcagatctttaaataagaaattctgtagagaaagattatgtgaggaagaagggagaatctttaatttttttatagtacatatttcaaatatctgcctaaatgcttgagtgtaaagcaatttaattcagttctaaatatttgtaaatcatttccgaagtccagact

SEQ ID NO: 260910 - DNA, 571 bp, Homo sapiens
gcttatgtagtccaaacccgtagatgtaaatgagaagaggggaaatttcttaaaagccataattgggctggacaggtgtcctagaggttttctactgcattgttaattcaccaaagcttattgtcatgggatgtcaatattaaattgctggtggctgagagtcagggctatttcctggtctgttttaacttctctgtgataagtgwattatgcatatgaaaatgtgcacttcaaagcatgaaaggcagtcttcccatttgggaccacattttaaatgtagccaatcaacaatcaactaatgttagttcttatacattgactatggttcatatctggagataataatcaaatacagcatttcaattagcagaataagcaggatgaatttgactcctaaataattgcagcagatctttaaataagaaattctgtagagaaagattatgtgaggaagaagggagaatctttaatttttttatagtacatatttcaaatatctgcctaaatgcttgagtgtaaagcaatttaattcagttctaaatatttgtaaatcatttccgaagtccagact

SEQ ID NO: 260911 - DNA, 534 bp, Homo sapiens
tctgctctgcaccagtaccatgctgttttggttactgtagccctgtagcatagtttgaagttggatagtgtgatgcctccaattttgttctttttgcttaraattggcttggttatttgtgctcttctttggttcagtatgaattttaaaatagttttctctattttcaaataaatatattacaagaaacattaatgcaaaatttctcatgattttgtgtgagatataaagactgcataatgtattatactttaatttcctccccttgttatgaaataaatattaaaataacctttcagaaataagaaggtcaaagtcttagagtactatgctcttctagagataatttatttattttatccttttcaaataaagcaaagaatttgatatggtaggccaagaaatttccaaggttcatgaggcagcatctttcacatatatttagcaggtgatcaaaaatataacaccgaaataattgaatagcactagaagagtaactagtttggagatactaatacaatcatgtgttgatta

SEQ ID NO: 260912 - DNA, 619 bp, Homo sapiens
tggttttttttcacgtcagaaatatatatatgttttatgacatacatcaactgatagaattttatgaaatttcatgtttgaaaatctcagatgattacagcatattcccaaattcagtatgatagccgccattaaatcttatatatactccagtcactgatgaaagcctgtaaacctaattatatgttgtgattctttagtaattcattagaaaaggrgtattttaaatagtatttggtgaagtccctataaatctcatgacagtaatattcagcaactacatttacttattcagtgagtcatcttcagatttcataacttagcaaactacacatataccaattgaatgtttgtgtgtgttggttgaactgaatcataaacatggaaaagactaaaagataagatatacctaaatattttagaaatatgaaaatataatgcaatgcagttttaaaaattatgtactacttaatgtactgctattttttattttttttggattcggggggtacatgtgaaagtttgttacatgggtatattgtgtaatactggggtttgggcttctattgaacccatcacccaaatagtgaatatattatcattatccaataggtaattt

SEQ ID NO: 260913 - DNA, 619 bp, Homo sapiens
tggttttttttcacgtcagaaatatatatatgttttatgacatacatcaactgatagaattttatgaaatttcatgtttgaaaatctcagatgattacagcatattcccaaattcagtatgatagccgccattaaatcttatatatactccagtcactgatgaaagcctgtaaacctaattatatgttgtgattctttagtaattcattagaaaaggggtattttaaatagtatttggtgaagtccctataaatctcatgacagtaatattcagcaactacatttacttattcagtgagtcatcttcagatttcrtaacttagcaaactacacatataccaattgaatgtttgtgtgtgttggttgaactgaatcataaacatggaaaagactaaaagataagatatacctaaatattttagaaatatgaaaatataatgcaatgcagttttaaaaattatgtactacttaatgtactgctattttttattttttttggattcggggggtacatgtgaaagtttgttacatgggtatattgtgtaatactggggtttgggcttctattgaacccatcacccaaatagtgaatatattatcattatccaataggtaattt

SEQ ID NO: 260914 - DNA, 637 bp, Homo sapiens
gtctgtgtgttttggattttccattagtagctttgtcttcttttaaatagagattcaggagatccagattccactattgtcccagaatcctcccagtaatattaatatgaacagtaaaaataaatcctatttgagttttttaaaaatatatttgctaggcattgttattagtagtttatgttaaattacctcacctaattctcatagtaacactgttgggcactattattaatcttattttacaaatgattttaacaaaaaagtaaataatttacccaatatcttacatttagagagtggtagagccaaaagttaaaatgcctgtttagttaatcccaaagttctttagacttctggtgttaatawcatgttaagaatcctataatttatagtatgtgacaatataaagacaaacattttttctgtttttgttttaaacaaatagtaatttattttctcattaaaatgggtagtgttaatagtcatagtattatctagagagtcatttcatttttctctgtgatactacttgctgtatttacgattgttagaatgaaattcaagagttttttttaaaacttcacaaagctccctcttgttgtttgtctttttttaagtattctgaaatatatcctgg

SEQ ID NO: 260915 - DNA, 461 bp, Homo sapiens
cctctccttctgaaagagtggccacctcataaaagtgaagagaacactgtcagtgggaatgtaaaacggtgcagccactgtggaaaaacttayggcatttctcaaaaaattgaaaagagaattaccatatgacccagcattttcacttataggtataatatataccccaaagagtagaaagcaggactccaactgatgtttgtacaccatgttgatagagcattattcacagtagccaaaaaaatggaagcaactccagtgtccattgatagatgagtaaataaacaaaatgtgaaatacacatgcaatggaatattatccagccttaaaaacgaaggacagtctgacatatgctttgacatagatgaaccttgaggacatcatactaagtgaaataggccagtcacaaaaagacaaacactgtatgattccacttacgtaagatatcaagaacagtcaga

SEQ ID NO: 260916 - DNA, 461 bp, Homo sapiens
cctctccttctgaaagagtggccacctcataaaagtgaagagaacactgtcagtgggaatgtaaaacggtgcagccactgtggaaaaacttatggcatttctcaaaaaattgaaaagagaattaccatatgacccagcattttcacttataggtataatatataccccaaagagtagaaagcaggactccaactgatgtttgtacaccatgttgatagagcattattcacagtagccaaaaaaatggaagcaactccagtgtccattgatagatgagtarataaacaaaatgtgaaatacacatgcaatggaatattatccagccttaaaaacgaaggacagtctgacatatgctttgacatagatgaaccttgaggacatcatactaagtgaaataggccagtcacaaaaagacaaacactgtatgattccacttacgtaagatatcaagaacagtcaga

SEQ ID NO: 260917 - DNA, 538 bp, Homo sapiens
ataggtataggcaacaggtaagaaagaactggaaaagagcctcatagatactcaaagcagcrtaaactaaaacaaggaaatactgttttgcctatagagtcagttaaaagactgataatagccttggtaattatgcggtgaaatgaacactctaagattagctttattcctcattcttactttagtataaaatcttaggaaagccgcttaagctttttgagcctcgattttctcatctgtaaactggggattataatagtatcacttgcagggttagtctgagaattagacgggctaatacattttaaatgaactttgtaaattcaaaagtaatatacacacaggtatatataattattgggtcctatagccctttgttctcaaagaacaaaggggatgtaagggaatgggtagagttgtttccttgatgctatctttaagatcctgcactaaaacattgtagctttgttaagctactctccagagatggcactgaggactgagatacatggatattgttataggagcagcagaaact

SEQ ID NO: 260918 - DNA, 439 bp, Homo sapiens
ttgtagtatcttaagcataccctcctgatgaaacaccatagttacagctttttaccttaaatcattatctgatgtatcctactcaccaaactcagaagatagttttgcttctgaaaaatattatattttgcattgyttttaattaaggctggcatagagattgccacaaactgttgctctcaccctgctctgtggcacttaacaaataattggatgtgtaaattgcttcaatgctgatattctctttcctgtgaaccacaaatgattatcaaatgtgttgaggatactaatgaagaatgaatttttccttctcttcatggaaaatcgcattaggtgtaattggataaaaccaaggataaacaatcaatcattcctcatttgggatcaggttgacactgagatcattagacactgaacagggcatcacttctgcctctgc

SEQ ID NO: 260919 - DNA, 439 bp, Homo sapiens
ttgtagtatcttaagcataccctcctgatgaaacaccatagttacagctttttaccttaaatcattatctgatgtatcctactcaccaaactcagaagatagttttgcttctgaaaaatattatattttgcattgtttttaattaaggctggcatagagattgccamaaactgttgctctcaccctgctctgtggcacttaacaaataattggatgtgtaaattgcttcaatgctgatattctctttcctgtgaaccacaaatgattatcaaatgtgttgaggatactaatgaagaatgaatttttccttctcttcatggaaaatcgcattaggtgtaattggataaaaccaaggataaacaatcaatcattcctcatttgggatcaggttgacactgagatcattagacactgaacagggcatcacttctgcctctgc

SEQ ID NO: 260920 - DNA, 515 bp, Homo sapiens
cctccagcctcctccaggtggctctactggactaaatcaagacagtccccatattggctcactttgtatggtaggggacacagctcttgcaaggaatgctcatgcttccctggcctgggactggcatgagtcccaaggcagcagcactccaaagaagtcagccattctcatgccttttagatccccacctggtargagttagaccttggccataccatcaatttcatctttctcaaaagtgagttgggcttctaagcctctcagcctcaggaaacactttcactgctctctgagggattctctcctccaagcccatagttagaaggttgcccctcctcccaactccctgagagcgtggaaagcttggcaaagtaatgcttccccctcccctccatcaagagatagcttctccaatctcttttgtctccattctctgacccttcttctggggccctcatgtagctgagaagcccaacaggcatacccaggttctcaaggccatttattttgaaaat

SEQ ID NO: 260921 - DNA, 515 bp, Homo sapiens
cctccagcctcctccaggtggctctactggactaaatcaagacagtccccatattggctcactttgtatggtaggggacacagctcttgcaaggaatgctcatgcttccctggcctgggactggcatgagtcccaaggcagcagcactccaaagaagtcagccattctcatgccttttagatccccacctggtaggagttagaccttggccataccatcaatttcatctttctcaaaagtgagttgggcttctaagcctctcagcctcaggaaacactttcactgctctctgagggattctctcctccaagcccatagttagaargttgcccctcctcccaactccctgagagcgtggaaagcttggcaaagtaatgcttccccctcccctccatcaagagatagcttctccaatctcttttgtctccattctctgacccttcttctggggccctcatgtagctgagaagcccaacaggcatacccaggttctcaaggccatttattttgaaaat

SEQ ID NO: 260922 - DNA, 515 bp, Homo sapiens
cctccagcctcctccaggtggctctactggactaaatcaagacagtccccatattggctcactttgtatggtaggggacacagctcttgcaaggaatgctcatgcttccctggcctgggactggcatgagtcccaaggcagcagcactccaaagaagtcagccattctcatgccttttagatccccacctggtaggagttagaccttggccataccatcaatttcatctttctcaaaagtgagttgggcttctaagcctctcagcctcaggaaacactttcactgctctctgagggattctctcctccaagcccatagttagaaggttgcccctcctcccaactccctgagagcgtggaaagcttggcaaagtaatgcttccccctcccctccatcaagagatagcttctccaatctcttttgtctccattctctgacccttcttctggggccctcatgtagctgagaagcccaacargcatacccaggttctcaaggccatttattttgaaaat

SEQ ID NO: 260923 - DNA, 628 bp, Homo sapiens
gcccagaatagaaagacctctagggtgttgaggaagaggtgtttgcctcattcatcaattaccttgtatggttatagtgatatcacgaagattacataaaaccttataccaggcaggcagaagaaagaaagacaatctgttctgatagggttaggggagactcacaaaatgtggagtagcaatatgtgcaaaaagcgttcattaaaactggttaaaacagcaaaaagctgaaagtaacttaaatgtctagctaataaaagggaaatgattaaatcaattatgggccattgacctgatgggttattatgcagctatgtatttatatattttaaggtttttcttttgcaaaagttttatctgctgtactttgaaaagaagaaaatcatctgtggtttgattaccctgagataatcactattaaattttggtttattttctttcaatttatgtttctgttttctttataatgcagcagccattrtaagggataattataaagatgaggtagcaaaattgtaaaatgctataacaagtaaatgagcaagataaaaagtttttacaactatgggaataaatagtacataggaaaaaggatgaaaaagaactacactaacattttaatggtggc

SEQ ID NO: 260924 - DNA, 555 bp, Homo sapiens
ccaaaacaacctttccaggtaagaatcaggatgcattttcctattaaccattagttttgtgagctttggcaagttacttaaatgtcctggttccatttcttcattttaaaacgagaatattattatattttattcatcatgaggattagagatcatgtaagtgaaagtatacttaaaatttctaaactcataataggtaatcagtaaatgctagaaaatactaattttacttctaaaaacatatttccactctccttcagaagagagaagttaattcacaaaacatcaatagtccaatatcactttatattataaaataactataagtaactatgcagtgtataaacactaaaatgttggccagctctaatcaatcagattttaactggattaaactaaatttccatgagtrgagctggacgccagcttaggagtcagtacagttggctctgctgtgacttgctgtgagcccgtgggtggttcatttagactccatttacaaaactggagtgctgaactaaaagatgtctctctgttaagtgtctctgtgtttga

SEQ ID NO: 260925 - DNA, 555 bp, Homo sapiens
ccaaaacaacctttccaggtaagaatcaggatgcattttcctattaaccattagttttgtgagctttggcaagttacttaaatgtcctggttccatttcttcattttaaaacgagaatattattatattttattcatcatgaggattagagatcatgtaagtgaaagtatacttaaaatttctaaactcataataggtaatcagtaaatgctagaaaatactaattttacttctaaaaacatatttccactctccttcagaagagagaagttaattcacaaaacatcaatagtccaatatcactttatattataaaataactataagtaactatgcagtgtataaacactaaaatgttggccagctctaatcaatcagattttaactggattaaactaaatttccatgagtggagctggacgccagcttaggagtcagtacagttggctctgctgtgacttgctgtgagcccgtgggtggttcatttagactccatttacaaaactggagtgctgaactaaaagatgtctctstgttaagtgtctctgtgtttga

SEQ ID NO: 260926 - DNA, 544 bp, Homo sapiens
ccgctgcactccagcctgggtgacagagcgagactccgtctaaaaaaataataataataaataaataaaattaggccaattaataaccctacaatggcctttaggggttcaagtgaaagggggagtcctgaatctttcactttaaatcaaaagctagaaatgattaagtttagtgaggaaggcatgttgaaattgagataggccgaaactaggactcttgctccamatggccaaattgtagatgcaaaggataagttcttgaaggaaattaaaaagtactgctccagtgaatacatgaatgattaaaaaaaaaaaagtgaaacagccttattgctgatatggagaaagtttcattgattaggataaaagatcaaaccagccacaatattcccttaaaccaaagcctaatccagagcaaggtcctaactctcttcaattctattcaggctaagagaggtgaggaaggtgcaggaaaaggtgctagtttaaagctagcagaggttagttcatgcagattaaggaaagaagccatctccataacaaa

SEQ ID NO: 260927 - DNA, 601 bp, Homo sapiens
gctcaatcaggcagcacatttgttaaccagacatttccttggctctcctaaattggactgaagtagcctactttttatagcatcccagggacagttctcttcagagaagctctagggagttagactgcacttccacagaactccagcttgttgctaccggcttgagattgggatgggtgaggagagggggtgagtagagtatgtaaatgaatgcctagaactgtctctcagcggacctccacccttgcacattcctcttcagcttatcagaaggtcaggccaggctgggttgaaactggaggayggagtaacagagatttggcgcttgcgttttctggaaacttatgaccaatttgggtttctttaccctgaccgcaaatctggagtagggaccacaaggcatcacttacctggatttattattggtcttcactgtattcttttgaacttattttgttttgaagtacagtgtacacccctgctcagctgtgaaaacaaatcaaaccaaccaaacacctttattcttttcctgaacatgtatgtaacagccaggaggagtagaagaaacacactaaagcaaaagaaaacaaattgtagaagg

SEQ ID NO: 260928 - DNA, 601 bp, Homo sapiens
gctcaatcaggcagcacatttgttaaccagacatttccttggctctcctaaattggactgaagtagcctactttttatagcatcccagggacagttctcttcagagaagctctagggagttagactgcacttccacagaactccagcttgttgctaccggcttgagattgggatgggtgaggagagggggtgagtagagtatgtaaatgaatgcctagaactgtctctcagcggacctccacccttgcacattcctcttcagcttatcagaaggtcaggccaggctgggttgaaactggaggacggagtaacagagatttggcgcttgcgttttctggaaacttatgaccaatttgggtttctttaccctgaccgcaaatctggagtagggaccacaaggcatcacttacctggatttattattggtcttcactgtattcttttgaacttattttgttttgaagtacagtgtacamccctgctcagctgtgaaaacaaatcaaaccaaccaaacacctttattcttttcctgaacatgtatgtaacagccaggaggagtagaagaaacacactaaagcaaaagaaaacaaattgtagaagg

SEQ ID NO: 260929 - DNA, 620 bp, Homo sapiens
tccgtgatgtggagttgtgggctgttggttaccacctcccggcaggtgtgagaagggaaggaaagagtgggggaggattgttcctggctctttaacttacttgtccctaaaacatttcttttacattgtaattaggcttgatagcactattactgtgcaatttcgagtatattagggttgaagtgagctgttgtgagctggaatgggcattttcatcttatggctataagcgttcggagttctaatccactgatacaaaaagagactcggtaaaatgaaaattgaaaaaacttataacttatttatattttggaatataacttattattcacttggagtctgacttatacataatattgcaacaaatgttctgataactgaatgcttgrcctgacccaatgaggtaattcagccaatgtacaaattcattatctaagtattctaaaataaagaatgacatttgtaaaactgcaaatattatgtaccaattttgagcttcggaagttgcagtttcttttgagatttttaaaaaattgggggggttcactgtatctctgtctgcaaatcttagagaacactctatatgcgttcagtaaatattcattgagactcaatatgtg

SEQ ID NO: 260930 - DNA, 591 bp, Homo sapiens
tctgctctcaggtttctactgaaagtggactattttgatgacgtgatgagtcctagactctcaggattcacagatacacatcagaggattaaaggggctctaagcatggggtttgtgagagttttgggttttctatcctctgtgaaatgatcaccttgtctttgaaaatagttctttagtgttagcatgtcttacttgagatcaacamaggcggttagtcccatcatttcctttgggtagggacaatccttagtgatgccagggctctcagggttcatttaggagattgtcctgagaatgccccgtaacagagaatacctatggtttcttccagaaagtgttcctttgacttgtcaatagtgagcaggaggcctttctgatcacttagcactagagggtggcctcagtatttatgaactcctgtgagagggcggcaggatgaaagtactagtagtagcactagaaatgaagtattatttatttcttcacaaggttgatgttttccttcacttcccccaacacatacccccatttttagagaaatgttacctccttttataaataagttcagagagaagttttgacctgctc

SEQ ID NO: 260931 - DNA, 571 bp, Homo sapiens
atgtaattatgcaatgtgtggtgtttcataactggcctctttcacttggcctaatgtttttgaggttcgtccatgttatagaacatatcagtactcatttctttctatggccaaataatattccattgtatagatacaccacattttgtctattcatgcatcagttgatggacatttgggttgtttccaatttttggctatcataaataatgctgccataaacactagtgtacaaatttgtgtgtggatatatgtttttatttttcttgcgcatatacctaggggtggcattgctggatcatatagtaactctaagtttaatcatttgaggaactacctgttttccaaggcagctgcaccattttacattcccatgaatagtgtatgagagttccaatttctccacatcttcttcaacacttgttattgtttgatattttgattctgtmtatgctgttgccttttacaaaattattttcctctgaaaaaaggcaacatctctcttacctagacagttttctcctttcctgatgtcgttacctcagtctagctcttcatcatctcacacaga

SEQ ID NO: 260932 - DNA, 586 bp, Homo sapiens
tatgaaagaaaactcaactaagtatttgagaattccattatcctatcctaaagacaagtcatcatttctaagaacaggccccaaagtagaattaytctgtatatcattctcaatatcattttgctgtgtttatgattcaacagtgctatttttaccttgaagaagtctttacattttattttttcaaaataggtacaaacacattgcacaaaattcaaaaagaacacaaagttatgtgccagctatcctcccctagaaaagtattttcaactctgaaaaccttagctaggtttaaagcagagacctaactacaaagctattttgaagtgctaaattaatttaaatgaggatgatagccatgcttaagtccttaaaggcagcaagcatacaaaggaatataatcaaattagcctcctattgcaatcttcagtatacccaggtcattaacaaatctctgcagccaaccaagataactttctgagatatagtataatactgtttatatacttcttttcaaatttctaaaaaacccaaaccatttaactgattctccggttactgtttttctaagggggggcagaactaa

SEQ ID NO: 260933 - DNA, 564 bp, Homo sapiens
gtgagtatctttcacacatatagaatgtgtagtgatcaagccagggtatttgggatattcgttactttgagtatttttcatttatatgcattggtaacatttcaagtcttcttccagctactttcaaatatgcaatatacagttgctaacaatgatcaccctagtagctatcaaacattagaacttatttcttctatctaactctcggtttgtacctattcaccaatctctcttcatttccccctcccaccttcacatacttcccactccagtatctattattttaccttctatctctatgagatcaaattttttagctctatcatgtgagtgagaacatgtggtatttttctttccagaaggactagttaagtatctactgttactattaatgattaaaattatcataaacagatcatataccctctttcagtagtttggtrtagcaaatgggattaaatttatcttttttctaaagcattttattgaagtaaaacatatactcataaacgtacacaaatcataattgtactgcttgacaaatattcagaggtggacacacca

SEQ ID NO: 260934 - DNA, 564 bp, Homo sapiens
gtgagtatctttcacacatatagaatgtgtagtgatcaagccagggtatttgggatattcgttactttgagtatttttcatttatatgcattggtaacatttcaagtcttcttccagctactttcaaatatgcaatatacagttgctaacaatgatcaccctagtagctatcaaacattagaacttatttcttctatctaactctcggtttgtacctattcaccaatctctcttcatttccccctcccaccttcacatacttcccactccagtatctattattttaccttctatctctatgagatcaaattttttagctctatcatgtgagtgagaacatgtggtatttttctttccagaaggactagttaagtatctactgttactattaatgattaaaattatcataaacagatcatataccctctttcagtagtttggtgtagcaaatgggattaaatttatcttttttctaaagcattttattgaagtaaaacatatactcataaacrtacacaaatcataattgtactgcttgacaaatattcagaggtggacacacca

SEQ ID NO: 260935 - DNA, 412 bp, Homo sapiens
gcggcacgcctggtagaaatgcttctctgggagaggagggtcttagggttgagccaaacagcgcatcctggaataggatgaggacagcaggtctgggtgcggcagggaggccaatttgttgataataactaaagattatcttgcccaccatgagacgttagacaactggacaatatatatgaaagaactatttttcgcacatwgaacaaaggcagtgcaggactttgaatgtttatagctacttcatttgtactactcaaaaactggaaaaacccaaatatctttcaatatgtggatggatacatgaatgtgtatattcatacaaataaatacttttcagccacaaaaagaataaacgagggctgggtgcagtggctcacacctgtaatcccagcactttgggaggctgagg

SEQ ID NO: 260936 - DNA, 540 bp, Homo sapiens
gctgtgggggaccatcatatctcagtttatgatggggaggtcaactggaggatgtctagtctgcaggcctcagcagctgggaaggattatgctaatcggggaactgagtggggagaggagcctaggtaagtggggcagcgtcctgagtggctggagagagctgctgaaaacccagtgtggctgtcaggtaccaacctggggaggctgctcttgggatgcctctccaggtttagtgacttggcagaagcacattgggaaaagatgcagaggaggattcctctgtctcataaaactcatctccctaggtaattttgcttagagcaatggttctcaaatttaagcacataaaatcccatagagatcttgtgaaaacacagcttgctgggtcccactcacggggtttctgattctatacatctggggagaggcctgwgaatttgcatttctttctttctttctttctttttgagatggagtctcgctctgtcgcccagactggagtgcagtggcgcgatctctgctcactgcaagttccgcctc

SEQ ID NO: 260937 - DNA, 519 bp, Homo sapiens
caacatttatctgagcccctcctgtaggtaagaaagtgtgttacagaacaatttcatgcagctccacattgaggtttttgaattattggctttttctttgggcagaggagacagagagacgttgaatgggatgggccttcgagagccctaaggttcagaaccctcatgtccacgtacacggccacgaatgcaaaccttttgtcttttagctgtcagggaaaaaaaaatgtcattgatgagagactaggctggccaccatcagctcctcagtgagctctgtcttgccaagygctccagtccctgtgacagggtcatgctgcttccaggtcagatgtggtcctgagatgttggatctgctatgatttatgtcatcacagacaccctcacggtcaggatccatcctgcctgtttgaatgcctactcagagctcagaattctatcatcattatttattgtgtttattccctaccaaatacgttcatgagatcttaatggtgctggttatttgaaaaaggaaca

SEQ ID NO: 260938 - DNA, 551 bp, Homo sapiens
tttgagaaataaatgattgaacaacaactgagtsagtgaatggcctgtgaacaaatttgagggagggaatccgagttggtgcatctgcttataccaagttcacttccattgccatcttcctaactctctactcaaggaaggaggaggtgctattccttggttggcacctataatattaattgagtgctgttttactagatgcagtggatattgtgtactttaggcagaatcctagtctctactctctcctcttgtgattcttgttacagacctaatgtcaggccaccctttatctccatcttttttttttttattacctcttctgagcttaaagttggttagtcaagttagaccagaatttgcccttcaggccagtcttctttctcctttatctctcttctgcttacctctaagttgttccaagatttagattatagagggggaggagaagcccttgcttgggtaaaatgcttaagctacatgattcaaacttttcacagataattattacactgagatattgggtgtttgctttgatcttaatacagtgg

SEQ ID NO: 260939 - DNA, 476 bp, Homo sapiens
tccagaggtgcccctcactcttccagtcatgtaataatagaacttagatatggtttgggagacccaaaaggaaagagwtataaaccaaagcaatgacaggccagaacttcttgttttgtgatattttccacatggccacaaaatggctgctgcattccttaaatcacatctacattcaagtcaggaagaaggaagcagaaatggcatcagctgcactgttcgttttatcagtagagtaaaaatgttttccagaatcactctcctaacgctccatccccaacgacaatgacacacacagtcatttaaagtctaatgagccacacctggctgcaaggggcctctgagaaagtaacttttcccagctgctatagtggaaggtggcaagagaggggaattgaaacagatattggggagccaaatagcaacgtctgccataggtattattactcattgtaatatatttaagtcatataagt

SEQ ID NO: 260940 - DNA, 496 bp, Homo sapiens
ctcacaatcatggtggaaggcaaggaggagtgagtcacatcttacatggatggcagcaggcaaaaagagagcttgtgcagagaaactcctgttttttaaaccatcagatctcgtgagacctactcattatcrcattatcatgagaacagcatgggaaagacctgcccccatgattcaatcatcccccactgggtccctcccacaacacgtgggaattatgggaactacaagatgagatttgggtgaggacacagagccaaaccatatcaccttcttcaccaagttaaagactattttttttttcaatttgagagcaggtactgtttattaaccaaccagcttagaaaaataatcatggtagacaccttggttcatttttctaataagcctgttgatcttgtcctccctgttgccagcatctccaccttctacaagatgggtggtctttttcttcattccaactcgtggagaagacaatttgaagggccacaggaag

SEQ ID NO: 260941 - DNA, 603 bp, Homo sapiens
tggctctacaatcctcagcatgttaatcgaagccttgttgagcttcacgaaggttccattgaagactygacgaaggcaaagaagctgcaacatctttcgaacctttgggctcacgccattgatacctctgattctgaagacaaacgccaatttgggttctgcaggtacatagaagttgccagcttttcttgccatcctcgccattcgaatttcagttctgtacatctgccaaagactattgacttacaggtcaggtctgactttgagatagccatcgaggggtgaggcccacaggcctatagggcactgaagagggagaaaggggggtgtctgggaggtatgcaaagagaaagtggtaagtggcgggccctaaccctgcaataccctatccctgccctttagtaagccatgttccggtgagtgttgttctctgagcaattacattcatcctttcttttcttggggaggactcatgggtaaaaagagttggcagctttcttcccacaagacaagagcgatatcctctcctttatggactaaggaagaaatgtggaatctggggaagggtctgtccttaactctcaccttggttttcagaaatga

SEQ ID NO: 260942 - DNA, 603 bp, Homo sapiens
tggctctacaatcctcagcatgttaatcgaagccttgttgagcttcacgaaggttccattgaagactcgacgaaggcaaagaagctgcaacatctttcgaacctttgggctcacgccattgatacctctgattctgaagacaaacgccaatttgggttctgcaggtacatagaagttgccagcttttcttgccatcctcgccattcgaatttcagttctgtacatctgccaaagactattgacttacaggtcaggtctgactttgagatagccatcgaggggtgaggcccacaggcctatagggcactgaagakggagaaaggggggtgtctgggaggtatgcaaagagaaagtggtaagtggcgggccctaaccctgcaataccctatccctgccctttagtaagccatgttccggtgagtgttgttctctgagcaattacattcatcctttcttttcttggggaggactcatgggtaaaaagagttggcagctttcttcccacaagacaagagcgatatcctctcctttatggactaaggaagaaatgtggaatctggggaagggtctgtccttaactctcaccttggttttcagaaatga

SEQ ID NO: 260943 - DNA, 603 bp, Homo sapiens
tggctctacaatcctcagcatgttaatcgaagccttgttgagcttcacgaaggttccattgaagactcgacgaaggcaaagaagctgcaacatctttcgaacctttgggctcacgccattgatacctctgattctgaagacaaacgccaatttgggttctgcaggtacatagaagttgccagcttttcttgccatcctcgccattcgaatttcagttctgtacatctgccaaagactattgacttacaggtcaggtctgactttgagatagccatcgaggggtgaggcccacaggcctatagggcactgaagagggagaaaggggggtgtctgggaggtatgcaaagagaaagtggtargtggcgggccctaaccctgcaataccctatccctgccctttagtaagccatgttccggtgagtgttgttctctgagcaattacattcatcctttcttttcttggggaggactcatgggtaaaaagagttggcagctttcttcccacaagacaagagcgatatcctctcctttatggactaaggaagaaatgtggaatctggggaagggtctgtccttaactctcaccttggttttcagaaatga

SEQ ID NO: 260944 - DNA, 603 bp, Homo sapiens
tggctctacaatcctcagcatgttaatcgaagccttgttgagcttcacgaaggttccattgaagactcgacgaaggcaaagaagctgcaacatctttcgaacctttgggctcacgccattgatacctctgattctgaagacaaacgccaatttgggttctgcaggtacatagaagttgccagcttttcttgccatcctcgccattcgaatttcagttctgtacatctgccaaagactattgacttacaggtcaggtctgactttgagatagccatcgaggggtgaggcccacaggcctatagggcactgaagagggagaaaggggggtgtctgggaggtatgcaaagagaaagtggtaagtggygggccctaaccctgcaataccctatccctgccctttagtaagccatgttccggtgagtgttgttctctgagcaattacattcatcctttcttttcttggggaggactcatgggtaaaaagagttggcagctttcttcccacaagacaagagcgatatcctctcctttatggactaaggaagaaatgtggaatctggggaagggtctgtccttaactctcaccttggttttcagaaatga

SEQ ID NO: 260945 - DNA, 287 bp, Homo sapiens
atgaaggcaactaggatgatttctagcaaacaattccaggacttatgatgtgggttgcaatggattgcccacccagtgaaatggaagtctggrtatagaataacatgatgttttccaatactacaaatggttcactattgcttgaatgtagggttaaggcagcaagaaataaggtgaggctccattatgaagtcccttttctaccatattaaaagatcagtgatgctggccatcaaagaattttgagaaatggaaaggcatgtttggatctgttctttataaatttc

SEQ ID NO: 260946 - DNA, 594 bp, Homo sapiens
ctgcagtgaacatagttcaggtattccttcgacacactgatttcatatcctttagatacatacccagtagagagatcgctggatcaaatgattgttctattactaattttttgaggaaactccatactgttttccataatagctgtactaagttacattttcaccaacagcatctgagggttcccttgtatctacattcctggtcaacacttgttatctttcatcttgttgataagtcattgtaataggtgtgaagtgctatcgcattgtggttttaatctgcattttcctggtractagtgctgtcgagcatcttaaaaatatacctgttggtatatgaaaagtatataaaaaataaagctggggggttggagtactggggagatattggtcaaaggatacaaaatttcagttagacaagaggagtaagttcaagagatctactgtacattatggtgactataattaataatattgtatatgtaaaaattgctaagagagtagattttaaatgttctcaccaccaagatatgctaaatatgtagggaattgatatgttcagtagcttgattcagtcgttccacaatgactatc

SEQ ID NO: 260947 - DNA, 621 bp, Homo sapiens
gctagcctgttgaatgtagagatgacacagggttcagtgactccctttactttaggcaacagccaaccaaccacgagacatgtaaggctatccttgaccagccattaccagatgaccttgccagctgactgtagacataagatgagatcacccaaactttgcccagatcaatagaacttccctgcttacccatagacttataagcaataataaaagtgtattgttttaaaccgttgaatattaggggagtttgtttcttagtaataggtagctgatacaactgacaactacctacgtttcctttctgcaaaagaagatcatagtcatagtctgcaacaggactaagtgaattttgtgtagtcctggcaaagtcgttctgaggcatccattcatctgcatgtgataagaagaaaacagaattactttsttttcaacagcttgcattagatttccacttgggaaggaactgtttttatttggaaaaatacagtagaagccttcttatctgatataattagaagtagtagttggctggttaatgtagcagaaaaattagagtttcctgttagccatgagctttcagctttctgtagagagcatttagtatgttttgttgaagaa

SEQ ID NO: 260948 - DNA, 573 bp, Homo sapiens
ggaacatcacacactggggcctgttgtggggtggggggacgggggaaggatagcattgggagatatacctaatgttaaatgacgagttaatgggtgcaggacaccaagatgkcatatgtatacatatgtaactaacctgcacgttgtgcacatgtaccctaaaacttaaagtataatttaaaaaaaaaattaaaattagccagccatgtagtcccagctactcaggaggctgagatgggaggactgattgagcccaggagctcaaggctgcagtgagccgtgattacaccactgcactccagcctgggtgacagagtgagaccctgtctcttaaaataaataaatggaaaaaaaaaagaacaggctgatctggaggcagagcaggtcagcaatctcaggaggatgaggcaagaggttgcgtcagcttggaaccatgacagccactccaaggcatatcccccagggcacctgacctgcagcaaaggaacctgggagagcaacttaggccaaggattccaggggcaggaaaggcgagctaattattttttttttattcattcttttctgaccatt

SEQ ID NO: 260949 - DNA, 573 bp, Homo sapiens
ggaacatcacacactggggcctgttgtggggtggggggacgggggaaggatagcattgggagatatacctaatgttaaatgacgagttaatgggtgcaggacaccaagatggcatatgtatacatatgtaactaacctgcacgttgtgcacatgtaccctaaaacttaaagtataatttaaaaaaaaaattaaaattagccagccatgtagtcccagctactcaggaggctgagatgggaggactgattgagcccaggagctcaaggctgcagtgagccgtgattacaccactgcactccagcctgggtgacagagtgagaccctgtctcttaaaataaataaatggaaaaaaaaaagaacaggctgatctggaggcagagcaggtcagcaatctcaggaggatgaggcaagaggytgcgtcagcttggaaccatgacagccactccaaggcatatcccccagggcacctgacctgcagcaaaggaacctgggagagcaacttaggccaaggattccaggggcaggaaaggcgagctaattattttttttttattcattcttttctgaccatt

SEQ ID NO: 260950 - DNA, 581 bp, Homo sapiens
ttttatatacaagattatgtcatctgcaaatgtagttttacttcttcctttacaatgtggatgccttttatttcattttcttgcctaaattgccctggctagaatctccgatataatgttgaatagaagtaccaaaagtggacattcttgtctagaccctgatcatagggagaaggttttastatttcaccatgaagcaccatgttatctgtgagtctttcataaatgccctttatcaggttgaagaagttcccttctatttttagtttgttgagtgattttatcaagaaggagaattcaattttgtcatatttttctgtatctgttttgatcatgtggtttttgtcctaaagtctattgatatggtatattacattaattgattttttggatgttaaaccaatctttcattcccgggataaatcgtatctagtcctagtgtataatcctttttatgtattactggatccaatttgctagtattttgttggggatttttgcacctatattcctaggagatattgttctgtaattttcttttcttgtaatgtctttgtctagttttggtatcagggtaatgc

SEQ ID NO: 260951 - DNA, 421 bp, Homo sapiens
atttttttttcttgttctcaaactttgactataatatgcttgggtgtgtttcccttgtatttatcctctgtgggatttgttgagtttcttgaaactgtgggttgatgttttggggtttttataattagctgtagaaaattctcaaccatttgacttcaagtatcatttgtatctcattttctttcccctctgcaactccaattacatgtatgttgtacattttccatatatttcttatgcaactttctatttttcaaacatattttctattwgtgtgctttagtctggtttttccatcctacattctcattcaccaataatatctgtttaatatttttcagttttgtaatatttgatttttaaaaactgagtacagatttctgttgaaactctccatgttgtcacctattttcttgcacac

SEQ ID NO: 260952 - DNA, 559 bp, Homo sapiens
ctgtcctgtttaatactcacagaattcttattcctaaatggcaaaaattgtttggtactcagtgactcctttcttctttagatgtggcatacactttctagctyactacagatcccaccactcaatattgttttgtacccaactcgccttattcattttcatcacccatacttgtctatagtcatttgatttctacatcctcaaatcaagtaggacaataggatattctctgttcttcagactgaacagaggaagaagcttctgaggcaataaaatggatttatgttaggcataaagtgaggcacagcttaagaatttgcaaatgcttccatgggaatcctaccgagttttaggctgtatctttcccctctcttctcccaggaatatttatccctctcatactagcagtgttggcagcctcaaacttcaattttgtctctatagtcctgtggaattgccaaaacactctgctgacttttctacctttttatagctgcctcttgactattggcttcttagcctctcctcttctgctaaaaatggacaaattctcccagta

SEQ ID NO: 260953 - DNA, 559 bp, Homo sapiens
ctgtcctgtttaatactcacagaattcttattcctaaatggcaaaaattgtttggtactcagtgactcctttcttctttagatgtggcatacactttctagctcactacagatcccaccactcaatattgttttgtacccaactcgccttattcattttcatcacccatacttgtctatagtcatttgatttctacatcctcaaatcaagtaggacaataggatattctctgttcttcagactgaacagagraagaagcttctgaggcaataaaatggatttatgttaggcataaagtgaggcacagcttaagaatttgcaaatgcttccatgggaatcctaccgagttttaggctgtatctttcccctctcttctcccaggaatatttatccctctcatactagcagtgttggcagcctcaaacttcaattttgtctctatagtcctgtggaattgccaaaacactctgctgacttttctacctttttatagctgcctcttgactattggcttcttagcctctcctcttctgctaaaaatggacaaattctcccagta

SEQ ID NO: 260954 - DNA, 531 bp, Homo sapiens
accatacagtataggcaaggtatttctakaatatgttacaaatagactagacgctccatccctacagtgtagatgggactatgttaggtggacttggtgactgtagcttcgttaacctctggcataatgcttaaaaaaaagaatatgtaataattattcagggatttggtataaatgtccatcatcctttcaatcattcatttagtcattgtttattgcatatgctggcctagtttttaggcactcagaatcaatgtaagctttggttttgttaggataataaagataataaatgaataaagaaacaaacaaatatgataacttaagataatcttaagtacatatgataagcagaataatggctctaaaagatatccacattctaatgtgtaggatccgtagatatgttactttacatgacaaaggggactttgcagatgtcactaaggtttagaactttaaaatggggagattatcttgcattaacctgaatctgagtctttaaagactgagaatctttcttggctgcag

SEQ ID NO: 260955 - DNA, 564 bp, Homo sapiens
gagtccctcatttaaaaaaggaaaccaactttatctgtcttaatttgcttcatctagcatgattgaaagcctgcaatattttttaaattggtaatctttctttcctcataactatgtttatttgtggggactgatgattgccatgcatactttctgtttaaagagatgcctgttttagaggtttcaaaaccgtctttgatcttaggcagaactgagcagctatatgtggaattattttttgagttttcatataattttttctttcatctctgactttggttaargattgcgcttgcatttttcacagaagaattatctttaattgacagcattaaatagatatgagtgaatattcttatataattttcctgaggctatgtctacaaggagaactgatataattgtcttggtaatccaggctcctggaccctttctgttttgtactggtgtgacctgaatgttctgtgtcctcttctgtccatgatggcaactgtatgcatgcactatttagaacacaacagtgtgtctcttcagaagcctacccatcaactcctgtccctgagt

SEQ ID NO: 260956 - DNA, 582 bp, Homo sapiens
ttctacagctcaatctatcagttttctccccttttgcacaaaacactaattaaacatgaatgtcctgctcagagttaggaggctcaagttctaggttgagtcctgtcactaacagtgttgtagtgggacagtggttagcctatcaaattgttccttatctttgaaatgatagaattgattaagattatttctaagttgccttcctgccctaaaattttgagaygctgtgactgcctgagaagggataattacacttttcagctagtaattagttttgaaaaagcctttggataaactgcttctaagataaactctttacgggaagtttgagtgtgtgtgtatatagtcagtggtgttactatattttaaagaattaaacatcctaagagaagtgactcagtcctaaagtagatgagtttttcagaatcagttttctctattaaaagaattcactgacattttgctcacattttgtctggggtgaaaacaaagagacaaagtggctgaaacgcctgttgacctggttcgtgttcagaaaactcaattagatgacagggccaagagactggccaaagtaaggtc

SEQ ID NO: 260957 - DNA, 596 bp, Homo sapiens
gcttcatactctcttaccatattccacgaactatggtaaatttaaccattttaggaaggatatttaatttgtttcaatttttaaaacttgtatatcaggtgctctgtgtttttggttcaacatgtgagaagcttggaagtcaccactttgccctaacacgaagtaaaaagctgatcaaagtgaaaattcagcccttcttcgatccttaagagaagtgaggttacagggcaaaccactgtccccaaaatcaaagacactgataggtgaatacagagaatgacaatttaccagagcmggaacccaagagcagaaacccctttgggaaccaatgccaaggcagggaaacctgaactgtaattgaaaaattgcttgaggctcagtgtgaacaagactaagtgctaaaaactccaaggagacccaatcatcaggagagggggcacgctttcatgagctttgtctcttagagttccacaaagtcctcacagtgaatatcagagaaaaatcctcttgtgcttttggtagtgggaggggaaaaggaaccatttgagatatatcgaatattcttttcttcttctcaagttttgcagtcaggaaaa

SEQ ID NO: 260958 - DNA, 596 bp, Homo sapiens
gcttcatactctcttaccatattccacgaactatggtaaatttaaccattttaggaaggatatttaatttgtttcaatttttaaaacttgtatatcaggtgctctgtgtttttggttcaacatgtgagaagcttggaagtcaccactttgccctaacacgaagtaaaaagctgatcaaagtgaaaattcagcccttcttcgatccttaagagaagtgaggttacagggcaaaccactgtccccaaaatcaaagacactgataggtgaatacagagaatgacaatttaccagagcaggaacccaagagcagaaacccctttgggaaccaatgccaaggcagggaaacytgaactgtaattgaaaaattgcttgaggctcagtgtgaacaagactaagtgctaaaaactccaaggagacccaatcatcaggagagggggcacgctttcatgagctttgtctcttagagttccacaaagtcctcacagtgaatatcagagaaaaatcctcttgtgcttttggtagtgggaggggaaaaggaaccatttgagatatatcgaatattcttttcttcttctcaagttttgcagtcaggaaaa

SEQ ID NO: 260959 - DNA, 558 bp, Homo sapiens
ggttaagttcttccctcatgatctggattgtcagattccccagtgaggatgtatgatcaaaggcagattttcctcctcttacaytttgggaactcacagttttttgtctgtctcccagagtttgcagtggcatgtcgtttctttcaaaggatctatgaattttcagcttttgttttagattcaaggggtacatgtacaagttttttgcctgggtatattgtgtgatgctgaggtttgagatacaaatgatctcatgacccaagtactgagcatagtacccgaaattcatttttcaagctttaccccattgctccctcccctctccagtggtcccaagtgtctattgttgtcctttttatatccataaatgcacaacattcagctctcatttataagtgagaacacacagtattgggttttctgtttctgcattaatttgtttaggctaatggccgccagctgcatccatgttgctgcaaaggacataactttgttcttttattatggctgtatagtagtctatggcatgtatgtaacacattttctttataaaattca

SEQ ID NO: 260960 - DNA, 589 bp, Homo sapiens
aatatacagatattgatattaaaaactcagtggaggggataagcagcagattaggtatagctgaaaagacattaaaaagctaaaagataaggctgaggcaattacccagaaagcaacctataaatcatgaaaaaatgtgaatgatagactaagaaatatttgtgataggatgaggagatccaatattctattaggagttttggaagaaaacaatggaaaaaataagaaatatcaaaattaaggggtggaagttggttagtagaagaaaaggtagcaaatgtgcagagagagtcagaatagacaagtgtgtgagacccagccctaacttcctttgggtcctgacagctttcttcttacagtaatattttactggatgatggtttctatatgrtggtctttgcagaggtctgattccttacaacacacctctttgcataaagcaattctgagtgaacctctgttctttgcagtgaaacaggacttaagtaaatataagatttaactaagagaagtttgcacagatgcttctgggtgatagaaagataaacaggactctaattcatgaatatgctaattaattttctgcttt

SEQ ID NO: 260961 - DNA, 523 bp, Homo sapiens
atgctttgtggaggatggaggcagggtgaagggcagtgcgttgaaaarcactttggaaaaccttcagtctcccacttcaatcaggcttgtaaggcgaggctactagaaacttaatcacacccttatgttagtcatggtgttcctatggtcagtacatgcataaccaggaatatgagttcaactagaaataatgcacaaactaattcacacacaggttgaaagaaagagagaggattctacaggcagaacataaaacagaggggtaatggttatatttcagaaaaatctgaaaaatgggaaatctgtgaggagctgagcagagtagttcgttttaaggttagctgagtgaaaattaaaatgtgagtgtgtatggatgtgtgggtgtgtggttttcccagacaggctccaacttaccatttgtctttatggggatgattggcttttgggtttatgtctacaggctctggaaggaaggcctgggagttcagtggagagctcactgaatttgaaggctttgggccta

SEQ ID NO: 260962 - DNA, 581 bp, Homo sapiens
tcatgtcacatcctgtcatcatcaccaatatcattctcatcctcayggttgtctccgtccacattccatgtagtatattggttctaatatagaactactgttaaaatcaacaaattaagtgcagcttaatatgaaatgttaaaacataattaagaaggtaagtttcatacatgtaatggttataagtctctttgtggcaacagaaacctaacttttagtggtttaagcaaaacaaggagaataattggctcatgaatattgaggatccaagagtatagttgcctgtaggccctgctaaatctaagagttaaaaaatgaggtttgggctgtttctctcttttgctatcagtcagctctgtttccttctttgggtatcagctttatttacctgaattctctggtcatatctttctatgttgcgggaaagagccaccagaagcccatacgattatagctcttgatccaaaagacagactagagctctagcgcttttgcctatgtcagctcttccttgggctaatctctttgccaggggtctgagatactaattaactttgtcttgtgtgcattttttttgtttg

SEQ ID NO: 260963 - DNA, 526 bp, Homo sapiens
catgtaatggttataagtctctttgtggcaacagaaacctaacttttagtggtttaagcaaaacaaggagaataattggctcatgaatattgaggatccaagagtatagttgcctgtaggccctgctaaatctaagagttaaaaaatgaggtttgggctgtttctctcttttgctatcagtcagctctgtttccttctttgggtatcagctttatttacctgaattctctggtcatatctttctatgttgygggaaagagccaccagaagcccatacgattatagctcttgatccaaaagacagactagagctctagcgcttttgcctatgtcagctcttccttgggctaatctctttgccaggggtctgagatactaattaactttgtcttgtgtgcattttttttgtttggcaattgagccaacatctatgattgacaacattacagagagtatgacttagggaacattggttcttcaaataaaatttggttgaaaataaaaacagcgtccagatagcagactc

SEQ ID NO: 260964 - DNA, 646 bp, Homo sapiens
acccctttcctacccctctctactctgaagttagacttgttcaagttgtagagggcgtttgttattagatcaccagcattcctcattttcctcccaaatagcaatttgtttcgccattaagaagtataccctatttgcagcratgtagttgggtgagattgattgcactctgcacttcagggatgggtcccaattctcttaagacaatccaagtgtcccggggccattgtaattaggccagggacggacacatgacctagatgggtttaaagggctaggaagagtctagtgtatttaaggactaaaaatctgaggaagaaagtgaaaaattacccataacccaccaacccaaacatatttatcattccaatattgatgagatgttaggaggtttttttgggttttttttccagatgaattagaaataatgttaggaaattattgctattctcttgggataaagcaggacttcctaagtatttcacccaagctagaaactataatgaaaaatatcaatctcacctcataaaagtttacaccttttatatagaaaaatagacaaataagaaaagacatatgcaacagtgtgttaaagaattaatgcttttaatgctactaacgtgaacagcttttacaaattagtaat

SEQ ID NO: 260965 - DNA, 644 bp, Homo sapiens
gggtcaggtgatacctattctatgaagactttaatttatcagctccagctcttgtttctcttttcctctctcatagaatttgtaatccaaattatccgatttagctcttagggatattactctttattatattaattcattaatttcacaaatgatattaacatgtactgtgtgctaggcactcttctatgcagtggtgaactataaaggtccttctgcaaatggagtgaaaattctaaaaacaaaataaagaactaagtaaacaaggtgattatacaaaataataaggcctatatagaaattccacagttgcaatagagaatgactgggcattgggaattgggcattgttggtgaatttagatgcagtggttaggaatcgctctgtaaacaggagacatctgactaattcttattttgtaagtaatttttattcctttaaataaattaaatttaggtctgaggaggaaggaatgatcttgaattcaaatcatgccctgycattattttgttcttttatttactcattcatttgtccgtaaagcatttgttgaactccaaattttgtaccagcaactatgccagggagtagacatttattcattaatttatttaaacaaggaatagttattgaatgcctagtaa

SEQ ID NO: 260966 - DNA, 426 bp, Homo sapiens
tttgatagaatagcatcaaatctgtagattgcaatgggaagtatggccattttaacaatacttattcttccagttcatgagcttggattgttttttcatrtgtttgtttaatctattagttagcagtgttttgtagttctccttgtagacatctttcatctccttggttacagttattctaggtattttatttttttttgtgtgtggggctattgtaaattagattgtgatcttgatttgattctcagcatgaacattattggtgcatagaaatgctactgattttcgtacattgattttgtatcctgaagctttgctgaagtcatttatcagttccaggagtcttttggtggattctttggcattttctatgtagagtattatattgttcatgacaagaggtagtttctcctgtgtggatgtctt

SEQ ID NO: 260967 - DNA, 426 bp, Homo sapiens
tttgatagaatagcatcaaatctgtagattgcaatgggaagtatggccattttaacaatacttattcttccagttcatgagcttggattgttttttcatgtgtttgtttaatctattagttagcagtgttttgtagttctccttgtagacatctttcatctccttggttacagttattctaggtattttatttttttktgtgtgtggggctattgtaaattagattgtgatcttgatttgattctcagcatgaacattattggtgcatagaaatgctactgattttcgtacattgattttgtatcctgaagctttgctgaagtcatttatcagttccaggagtcttttggtggattctttggcattttctatgtagagtattatattgttcatgacaagaggtagtttctcctgtgtggatgtctt

SEQ ID NO: 260968 - DNA, 580 bp, Homo sapiens
acaaataaatataaaggccatagaataatgttccaatctctaatagatgctaaraaaagccaaacagcaaatctggatagccaaaaagtctgacacttttaatcaaagtatgagtggaccagggaaaactacaaagatccacagggaaagattgtttcagtgtatcagtgatacagcatctgacaaatcaccggtgactagtggccaccaaataagcagaacttggtatgattccatgctggacctacgggatcctagggcacacctacagtcagagtgaagagatgatgagaataagcatctttgtgactgagagatcataatggggagttgaagagtggaaagattggtaaatgaagaattagtagatatgaattacatgacactggaaaggcagttaacctctgaggttgtcttctcttaggagttataattcttatgctgtacattcaaatattaaaatccatgaaggattggtcccaggacctccatggatattaaaatccatgaatgctcaagtaccatatataaaatagcatagtatttgcataaaacctatgtacatgctctgtatacttta

SEQ ID NO: 260969 - DNA, 580 bp, Homo sapiens
acaaataaatataaaggccatagaataatgttccaatctctaatagatgctaagaaaagccaaacagcaaatctggatagccaaaaagtctgacacttttaatcaaagtatgagtggaccagggaaaactayaaagatccacagggaaagattgtttcagtgtatcagtgatacagcatctgacaaatcaccggtgactagtggccaccaaataagcagaacttggtatgattccatgctggacctacgggatcctagggcacacctacagtcagagtgaagagatgatgagaataagcatctttgtgactgagagatcataatggggagttgaagagtggaaagattggtaaatgaagaattagtagatatgaattacatgacactggaaaggcagttaacctctgaggttgtcttctcttaggagttataattcttatgctgtacattcaaatattaaaatccatgaaggattggtcccaggacctccatggatattaaaatccatgaatgctcaagtaccatatataaaatagcatagtatttgcataaaacctatgtacatgctctgtatacttta

SEQ ID NO: 260970 - DNA, 617 bp, Homo sapiens
atcttattgaatttttatggtttcaggtcttagatttaagtctttgatccatcttgagttgatttttgtataaggtaagagatgaggatccagtctcattcttctacagctgcttgccaattatcttagcacatttttagaatagggtgtcctttcaccattttatgtttgcttgtttgtttttttgctttgtcaaagatcagttggctgtaagtatttggctttatttatgggttcactattatgttccattggtctatcttcctatttttataccagtatcatgctgttttggtaactatagctttgttgtatagtttgaaattgagaatgtgataaccccagatttgttcctttttgcttgttctttttactttggctatgtggggtcttttcttggtttcatacaaattttaggatttttttttccagttcagtgaagaatgatcatggtattttgatgggaatatcattgtatttgtagattgcrtttggcatcatggtcattttcacaatattgattctacccatctgtgagcatgggatgcatttccatttgtttgtgttgtctatgatttctttcagcagtgtcttgtagttttccttgtagtgatctt

SEQ ID NO: 260971 - DNA, 618 bp, Homo sapiens
atctatgtgaggcagtttctgagctttctaatatattttattggtcartttgtttttccttgtgccaaaaccacattgtctcaattactataagttcataataagtcctgatatttggtgaggcaaatcttctctccctacttttcttttttcagtattttaaatccttaccaggtaacataaaaaacgctgtaggtcaaatagggtagaattggagaattgtcatctttatgatattaaattatcctatctatgaaagtgttatctcccttaatttattaagtactcccttaatatctcttaatgaaattgcacatttttaaagtagaaggcatgtaacgtttgttagatttatttttaagtattttattttctctggtactattttaaatgcgtctgctctttaattatgtgttttagtttgctgttggtatatagaatgtaaattacttttacatattcatcttatatcaagctaactgactaaattctcctattactgctaatagtttatctatgtattgttttgagttttttatgcaaataatgacaaataatgccaaaatgaccatttaatttcctcccttctcattcttttgtctctcatttctttttctt

SEQ ID NO: 260972 - DNA, 568 bp, Homo sapiens
tctaatacaatgtagatgctatgtaaatagttatactgtattttggtatttgaattcttttttattcttgtattattttttaaatagttttgatcagcgactggttgaattcgtggatgcaaaacctgtggatacagagggacagaggcctactgtacatggcacatggtaggtattcaaagatatttggcaaataaatgaatcaattaattgatcagagtaacaacaataagttctttgaatccaacatttgcccaacactttttcctttcttcctcctggtcacaagcttatgtctcaaaattcaatgtcagcccactaagtgaggactgggctctaaaacctttcactattaggarggcaagtggaaagcacacactgttattatgatgattattgtcatccagccttaatgaaatcgacgtgtggttaaataacagtttgctgagtgtaaattgttattgttattgataaaccatttcctttacctgacaaatgcagtgctgtactccaggcaagggagcaatccctgctgtacagacccataatcattccaaagatgcagagg

SEQ ID NO: 260973 - DNA, 529 bp, Homo sapiens
cttggccaatatgataagaaaaaaaattaaaggcagaaggattggaaagcaaaaaaataaaattatcattatttgcatttgatatcaggttacagaaaagaatccatgagaatccattgatcaatcactcatacaaaaaattagtattgggggatcacagatgtaaatctgaaaggcaaaacaatagtgctttaaaaaaataacatagaagtactttctatgtargagaaatttttttaaacaatacacacaaaaaaacactgatcatgacaggaaaaaagtacaattctgactacactagaattttaaaactgttcatcatataagaaagtgaaaaggcaagccatagagtggaagaagatatgtataaaaattataactggccatattctgaatatgtaaagaatgattacaaatcaataactaaaagacaactcagtaggaaagcagaggagagatttgaactggaacttcacaaaagaggaggttctcaacctcgtttgtcatcagggaatgcaaattaaaataa

SEQ ID NO: 260974 - DNA, 529 bp, Homo sapiens
cttggccaatatgataagaaaaaaaattaaaggcagaaggattggaaagcaaaaaaataaaattatcattatttgcatttgatatcaggttacagaaaagaatccatgagaatccattgatcaatcactcatacaaaaaattagtattgggggatcacagatgtaaatctgaaaggcaaaacaatagtgctttaaaaaaataacatagaagtactttctatgtaagagaaatttttttaaacaatacacacaaaaaaacactgatcatgacaggaaaaaagtacaattctgactacactagaattttaaaactgttcatcatataagaaagtgaaaaggcaagccatagagtggaagaagatatgtataaaaattataactggccatattctgaatatgtaaagaatgattacaaatcaataactaaaagacaactcagtaggaaagcagaggagrgatttgaactggaacttcacaaaagaggaggttctcaacctcgtttgtcatcagggaatgcaaattaaaataa

SEQ ID NO: 260975 - DNA, 507 bp, Homo sapiens
tgtctgctctaatgggatgtgaacagttctcagaatcagggaaatcataacatggaggacttatacgtttgtaattaccctccgttctaattgggagccacacaagaagttttgatgggaaagactgaccctgttggctgggcttccttccacccttccttttctccttcttccctcctttcttccctcctccctacttttttccctcmtctctctcttccttctttcctccctccctcctcccttccttccttctttcctttctcatttattaagcatttggaatgtacaaggcaaccagggatgtggtgattagagaagacatgattcttaagttttaaagggctctcagtggcacagcataaagaggagaaaagcaggcagcagaataataggtacagtgtgataccatttatataaactacttttgttatttttatttgttcatgatacatgtatttaatggatacttataagtataaaaacagattaggcagaaattatcaa

SEQ ID NO: 260976 - DNA, 557 bp, Homo sapiens
aattgtcctggtgagcctgatgtaattgcagaagttcttataagaggagggtgggaaaggcagagtgagagaaacagatttaacagcagatatagaggttggcatgatgtgaggaagcggccctgaactgagraattcaggtggcctttagaagctggaaaagtgaattttcccctccagaatctgaccttttctgtaatcctaaaacttctctaaaaaataaagtctatgaatagtaataagaaagagagaaaaacatgcagacccctttggtttaaatctgggtcaggcacttgcaagttgggaactcttaggaaggttatttaatctctcagcctcagcttactcggctgtaatatatgtctctttctacccacccgatggagctgttgtgaaaaacaagttaatgcctagtgtagttcctggcatcgtgtagcaagcactcataagtattaggcttagggatgggggggaagtggagatgttgtttgttttctgtaaacactcaagaagacattgaaattttacttgctgggaagctgttgctcagaactgcc

SEQ ID NO: 260977 - DNA, 557 bp, Homo sapiens
aattgtcctggtgagcctgatgtaattgcagaagttcttataagaggagggtgggaaaggcagagtgagagaaacagatttaacagcagatatagaggttggcatgatgtgaggaagcggccctgaactgagaaattcaggtggcctttagaagctggaaaagtgaattttcccctccagaatctgaccttttctgtaatcctaaaacttctctaaaaaataaagtctatgaatagtaataagaaagagagaaaaacatgcagacccctttggtttaaatctgggtcaggcacttgyaagttgggaactcttaggaaggttatttaatctctcagcctcagcttactcggctgtaatatatgtctctttctacccacccgatggagctgttgtgaaaaacaagttaatgcctagtgtagttcctggcatcgtgtagcaagcactcataagtattaggcttagggatgggggggaagtggagatgttgtttgttttctgtaaacactcaagaagacattgaaattttacttgctgggaagctgttgctcagaactgcc

SEQ ID NO: 260978 - DNA, 615 bp, Homo sapiens
ccttcaggctgtggggcagagtcagggttggaaagagaaggggacagtgccaggagccagggctgcgggccagttctccctacatttgccacattctagggaggagtgccttcaaattttaatttgaacttgacccttccaggccatgatgaaagaatatttgtcaagataggaagataggtattatttacagtgtgataccttaattcaaacaggtgatatgtgggcctctatttatactcttgctcaggccctgcaaatgtttggggtgggcctgtgagagtgaccaagggaggtgaacagcctagacaagcaagactgcttcttgagggcctacgctgctctttgggacgagaactaccaagtggaagccccaggtaccctgtttccccggggactggctatactcctcaggagcacctggtaggatctcttcttggatgtgagggtgaaaactggtcccaatgtcaaatgaaaacaactttgcacctgctcatttggaacaaaggaagaggcctggaccttaggaggtttagatttggggttcccagtgcaaaaggaaaatgaaatcttgagaccccwaactcacaatgccaaaggaaaaagttaagtttg

SEQ ID NO: 260979 - DNA, 598 bp, Homo sapiens
gcttctaatacagtcagggagatcagcaatagctagtccatcagtgtgctatcagagtttgtctgctgagagtattgtgggagtcaggctcagaggagggagttctgatcctgtggggagtcaggaaagactggttggaggaagaggcatctgactcacacaataaacatgaagcatgcatggaaagcaaggaacatcttcctttccttcctgcaggaaaccagggagcatcttcgcctcgctgggagcatctgggaagcagagagagaaacagctgtgttccctgaccttctgttgaagtgcaggaactcagaggygtcacttctcttattaatccagctgtgagcattttttaggctagctgtccccccatccctgaacccctgaggaatgaggtgcagagcctccaaacaatatcattaaaatgcttcccaggaagagactgaagcccagcgggtgagaagctgacagcagcacttagccatgccggtggagatagaggctgaggctgagacgggaagtgcctcctgtctggctctgcacccactagtgagccaaccttggacacatcccctcacctctgggccttggttttctc

SEQ ID NO: 260980 - DNA, 572 bp, Homo sapiens
tttcttgtcagcatgtcttcttggaaggccatattcatcttggctctctctcagaccctggaatctacacagaacaaaataatgagcagtccagggtcaggacggtaaatatgatttctaatactcaactggaatggtaggtaaacataagcaaatttagtaccaattatatttagtagttgccactattgctcgtgtattatgtgtcaggcactgtatgataagtatgctgtatcattttctcatgtaatccttatgacaaaccagtaagtaggtacaattattgtccctatattttagtcaaaaaaaactcctggaacttaaaaagaaaaaatagtttgaccgagggcaatagattggttttgcmctcaggtctgccagacaccacgagaacctgaccttttaaccatcatgttctgcctggtaaacgtgctcaaggaggggttctagaatacatgggaaggtcagcccctggctcatctggcaattaaaggcaaggcactttctcatggagctttgaattctccagctgtaaaattaatgggttagctctaagcccttgaattaaccag

SEQ ID NO: 260981 - DNA, 476 bp, Homo sapiens
gggaaccacatggcaacaacatgacagaaggggttcaatcacaggacagcaagatgggtccacacgacctttactgttctttcttctatgagagtcttatgccaatttgtcttaaaaattgaaattttcaaattttcaaattgaaaargccaatgcttgtgctccctaggacctgatcttgccaattttgaggctgctctatttgtctgctgcaatttgctatggtgactcagcaggaggcagggaggaggcacgacagccagcgctcagccttcctcctgaagatgttgcttggctaagggaggggacactgggtgggaggtccccaagataattgctctgaatatatttgttgctgatgttccctttgtcttcagcaggcgccagatttccccactctagccgagttctcacttggttgaacattcgaacaaacgcccattagggaagcttgtcactttctcatttgagggaaa

SEQ ID NO: 260982 - DNA, 476 bp, Homo sapiens
gggaaccacatggcaacaacatgacagaaggggttcaatcacaggacagcaagatgggtccacacgacctttactgttctttcttctatgagagtcttatgccaatttgtcttaaaaattgaaattttcaaattttcaaattgaaaaggccaatgcttgtgctccctargacctgatcttgccaattttgaggctgctctatttgtctgctgcaatttgctatggtgactcagcaggaggcagggaggaggcacgacagccagcgctcagccttcctcctgaagatgttgcttggctaagggaggggacactgggtgggaggtccccaagataattgctctgaatatatttgttgctgatgttccctttgtcttcagcaggcgccagatttccccactctagccgagttctcacttggttgaacattcgaacaaacgcccattagggaagcttgtcactttctcatttgagggaaa

SEQ ID NO: 260983 - DNA, 476 bp, Homo sapiens
gggaaccacatggcaacaacatgacagaaggggttcaatcacaggacagcaagatgggtccacacgacctttactgttctttcttctatgagagtcttatgccaatttgtcttaaaaattgaaattttcaaattttcaaattgaaaaggccaatgcttgtgctccctaggacctgatcttgccaattttgaggctgctctatttgtctgctgcaatttgctatggtgactcagcaggaggcagggaggaggcacgacagccagcgctcagccttcctcctgaagatgttgcttggctaarggaggggacactgggtgggaggtccccaagataattgctctgaatatatttgttgctgatgttccctttgtcttcagcaggcgccagatttccccactctagccgagttctcacttggttgaacattcgaacaaacgcccattagggaagcttgtcactttctcatttgagggaaa

SEQ ID NO: 260984 - DNA, 553 bp, Homo sapiens
aaacgaggtcagaggatgatacttaatattgggggttagggaaggctgaactgataggatgatataccaatggagacctgatggaacagaraaaatgcaacacaaaatattttggacaagaaagttcaaaatttaaggaataggtaatgcaaagacaataaaagcggtgacctgcatttcactgtgaacatagcagctggtacactgagtgaggtagggataaggacagaggcaggagatcatataggtcattgtagtctgtctctgagtgaattgggaaatggctggttttgtgcagaagtatgacattatctgacatatatttaaaaagaaccatttatttattattctcttcaggtggtatcagaaactgattcctcccatagcatcctgccacaaaataatattgcaactttaattaatatcaatgtttggatttatttatggtaagataccactgggtgacagtcctgtgacctctgactgcagggaccaaatcattatcacttagagaatgagtggaacttaatagtttacacccagcagcagaaat

SEQ ID NO: 260985 - DNA, 553 bp, Homo sapiens
aaacgaggtcagaggatgatacttaatattgggggttagggaaggctgaactgataggatgatataccaatggagacctgatggaacagagaaaatgcaacacaaaatattttggacaagaaagttcaaaatttaaggaataggtaatgcaaagacaataaaagcggtgacctgcatttcactgtgaacatagcagctggtacactgagtgaggtagggataaggacagaggcaggagatcatataggtcattgtagtctgtctctgagtgaattgggaaatggctggttttgtgcagaagtatgacattatctgacatatatttaaaaagaaccatttatttattattctcttcaggtggtatcagaaactgattcctcccatagcatcctgccacaaaataatattgcaactttaattaatatcaatgtttggatttatttatggtaagataccactgggtgacagtcctgtgacctctgactgcagggaccaaatcattatcacttagagaatgagtggaacttaatrgtttacacccagcagcagaaat

SEQ ID NO: 260986 - DNA, 600 bp, Homo sapiens
taccatcaaagaattaaatcagtgatggaggatcacttgcagaagctctccaagatcagagagaataaagagagaccaataaaaagaataagtgggtaaataatacatatagaggaaaagaacttgtagaatgtttgatggttttagggtatctgacataaacattagaacacttagcagcaataaccagtgttaagagaggggaatatacaaactttaaaaaaaatcagcatacagatttaacattttcctctcatttatgcagaatcaattctacaagtcttgcattgtttttgataagaaaactgtttgcattcttacctttgtttccctgcacataatgtttttttccgtgcttttaagacttcctctttataaytggttttaagcaatttgattatcatctgccttacaaatacagctttacaattttttttaatcagaaaaacatctggtactttctcttttggtgaaaagtttactaagttgcttccaaaagaatgatttttttagaaaagactagcctcagacttctctttagtactaaatgtcataatgaaatgacattaaaatggagaattttgagggaagaaatttgaa

SEQ ID NO: 260987 - DNA, 565 bp, Homo sapiens
caaaaatgtacatacagagagttcccgtatacctctcgaccccacacattcacagcctcattccatatcaacattctgccttagagtggtttttgttacaatcaatgaacctgacacatcattatcacccagagttcatagtttacatagggttcacttttgatgatgtacattttatgggttttgtcaaatgtataatgacaggtatccactgttattatatcatgcacaatggttttgctgccctaaaaaaccccctgtgccctgcctattccataatcttcaacacatatttaagcttcctccattaaaaaaaatcttatatarccctgaaagtctgccgctgtatctcttgtctctttcacaggcaaacttcttcttttccttgctttcttatcaacctgctttagtctaccattcagcactagttttaatttgtttctttaaaaaaaacttaaaaattggacatactaactaatgtgtcacagtaatatcagtggggaggtagcagaaatggattcattattgatatatgtatatagttagcaatgattaaatcagggta

SEQ ID NO: 260988 - DNA, 605 bp, Homo sapiens
tgtttgtatctcctataggttctgtttctctggataactctaatacaataattagttaaattaagttaaaacagaataaacaagaatattgctgttagcacaaatggaatcatggcttcaaatgatttgtgtcagtgggactagtaattattctatctttgtgtgtagtttaaacgaaggaaggctatttgtgaatcagactccaatcatgcttctgataatggtggttgcactaccatctgaaggatagcattcatgggtaggctctgtggaaaggactggtgcttgtacacactaatagttattttgccagcacttgctcttgaaacacaaatggcacatacatacacaaatgtactcacacacacagagattctctttttgtagccagtaatgcctgcttttaaattcaagcaacaattagcagtcctgcattggaataggcattataaggtactatatgccttctgtggatgtaaaccatctttttcatctttgtatctctaaaccctaayagactgcttggaccataacatgcaccaaaaaatattgtatgatgaatggatttaatgcataaatgagtgcataaaatacatgctcgtctg

SEQ ID NO: 260989 - DNA, 581 bp, Homo sapiens
  misc_feature (1)...(581): n = A,T,C or G
aattttgatgttattgcaatgagnagtaaacattcacaacgtgtagggctcnacagtccntnnaattttcgtgtatgtgtagtaacaattctgcaagtattaagagaaataacttgttatttaagatwaaaaaaaaacccatggatgaggtaatacaatctttactgaccatctagacacaagcttgttacaagaacataaccttggcagatggatctccaattgctgcatgtcaaaaagtcagtctgccacctcacctgagggtggagaacctcttataccaaatatacctataaaaaagttttcttttttctatattcaatggacttttaatttcaaactattttatattagagttcattacaatgacatttgaaaaatgttaatatctccatgtattttgatgtctcatttattattaaagtttatattttgatacataaaagctaagcctttggaaggcttcttatcaatgtgtaacttcttcagtaacaataacatttagataaggaatattttggagatgggaaatattacaaaccatctcagtgaatccttgtgacatttatctcatttataat

SEQ ID NO: 260990 - DNA, 609 bp, Homo sapiens
tataatgtatcacatttattgatttgcatatgtttaaccatccgtacatctctggaataaatcccacctgatcctggtgatatgttttgactctgtgtccccacccaaatctcatctgaatttgtaattcccatgtgtcagggaagggccctggtgggagatgattgaatcgtgggagcagacttctcctttgctgttcttgtattagtgagttctcacaagatctggttgtttcaaagtgtgtggcacttyccccttcactccctctttctctcctgctatgccatggtaagacatgcttacttccccttcaccttctcccttgattgtaaatttcctgaggcttcccagtcatgcttcccattaagcctgtggaactgtgagtcaattaaacctcctttcttcacaaattacccagtctcaggtagttctttatagaagtgtgaaaattgactaatacagaaaattggtgcccaagtgacctattgctataaagatactgaaaatgtggaagtgactttggaagtgggtaatgggtagaggttgcaagagtttagagggttaagataggaagatgggggaaagtttggaagttcctaaagacttgtt

SEQ ID NO: 260991 - DNA, 587 bp, Homo sapiens
ttagttcttgttttttgtagttccttgaaatgtgatgttaggtttttaattactgatctttctacttttttgacgtaggtatttaatgctaaaaacgtcccttttagcactgcttttgctgtatcccacaggtgttggtatattgtgttgtcaatttaactcacagagaaaaattttaaaatttgcagcctaatttcttcattgacccagtgatcattcaggaaaataatgcttaatttctatgtatttgtatagtttgtgaaggtcttcattgtattgatttctggctttattccactgtggtctgagaagatatttgatacaattttgattttwaaaaaaaactttaagacttgttttatggcctaatacatggtctatcttggagaatgttccatgtgctgatgagaagaatgtgtattctgtagttgttggatataattttctgtaaatgtctgttaagtttatttagtctaaaatccaatctaagcctaatgcttacttgcttattttttgtctcgatgatctgtctagtgctatgagagaggtgttaaagtcccccactattattgtattgctatctcttt

SEQ ID NO: 260992 - DNA, 587 bp, Homo sapiens
ttagttcttgttttttgtagttccttgaaatgtgatgttaggtttttaattactgatctttctacttttttgacgtaggtatttaatgctaaaaacgtcccttttagcactgcttttgctgtatcccacaggtgttggtatattgtgttgtcaatttaactcacagagaaaaattttaaaatttgcagcctaatttcttcattgacccagtgatcattcaggaaaataatgcttaatttctatgtatttgtatagtttgtgaaggtcttcattgtattgatttctggctttattccactgtggtctgagaagatatttgatacaattttgattttaaaaaaaaactttaagacttgttttatggcctaatacatggtctatcttggagaatgttccatgtgctgatgagaagaatgtgtattctgtagttgttggatataattttctgtaaatgtctgttaagtttatttagtctaaaatccaayctaagcctaatgcttacttgcttattttttgtctcgatgatctgtctagtgctatgagagaggtgttaaagtcccccactattattgtattgctatctcttt

SEQ ID NO: 260993 - DNA, 587 bp, Homo sapiens
ttagttcttgttttttgtagttccttgaaatgtgatgttaggtttttaattactgatctttctacttttttgacgtaggtatttaatgctaaaaacgtcccttttagcactgcttttgctgtatcccacaggtgttggtatattgtgttgtcaatttaactcacagagaaaaattttaaaatttgcagcctaatttcttcattgacccagtgatcattcaggaaaataatgcttaatttctatgtatttgtatagtttgtgaaggtcttcattgtattgatttctggctttattccactgtggtctgagaagatatttgatacaattttgattttaaaaaaaaactttaagacttgttttatggcctaatacatggtctatcttggagaatgttccatgtgctgatgagaagaatgtgtattctgtagttgttggatataattttctgtaaatgtctgttaagtttatttagtctaaaatccaatctaagcctaatgcttacttgcttattttttgtctygatgatctgtctagtgctatgagagaggtgttaaagtcccccactattattgtattgctatctcttt

SEQ ID NO: 260994 - DNA, 540 bp, Homo sapiens
aaaatgtcattccattctcttctagcctggaggttttctgctaaaaagtccactgttagtctgatgggatttcctttataggtgactatatgcttttctctttttaattttaaaaatcttttattcactttgactttagacatttcaaatatagtatgctgtggtgaattccttttwgaatatatttgactggggattggtgggccttctatgtctggatttctgactctcttgcaagacatgggaagttttcattgattattttcttaaatagattttctgagctttttattctctctttcccctagggaatatcaataatttgtaactctgattgttttatgtgattccagatgtcttgaagactttgttcttttttttttttttttttttttttttgcctgcttggattagttttaaaaaaactgtctttaagttctgagattatttcttcttcttgctctggtctataattaaagcttttgaatgtctttggtatttctttcaatgaatttatttccagaatttctgctttggttt

SEQ ID NO: 260995 - DNA, 540 bp, Homo sapiens
aaaatgtcattccattctcttctagcctggaggttttctgctaaaaagtccactgttagtctgatgggatttcctttataggtgactatatgcttttctctttttaattttaaaaatcttttattcactttgactttagacatttcaaatatagtatgctgtggtgaattccttttagaatrtatttgactggggattggtgggccttctatgtctggatttctgactctcttgcaagacatgggaagttttcattgattattttcttaaatagattttctgagctttttattctctctttcccctagggaatatcaataatttgtaactctgattgttttatgtgattccagatgtcttgaagactttgttcttttttttttttttttttttttttttgcctgcttggattagttttaaaaaaactgtctttaagttctgagattatttcttcttcttgctctggtctataattaaagcttttgaatgtctttggtatttctttcaatgaatttatttccagaatttctgctttggttt

SEQ ID NO: 260996 - DNA, 600 bp, Homo sapiens
tcctctgcctgtggaaaggggaaggaaaagtgggaaggactttgtattgtggtttgagtgccagcttagctacagtagaatagagcaactggtaaattgcggatatttttgacttcaatctctggctcccakgcagcatctctggacacattcaggccctgggggaaattgccatcctgaagagaagggccttgggcaaggtccagtgctgtgctggtttcaggtctaagccagagcagttccaatgttggtggccacggaaatgcttacatcatcacacccccagttccaagtggctcagtagatggagaatctatatgtttgtgagaaagtaaggggaaaaaaaaatcccaaagtctctgcctggtaatccagagaattcctttgagtcttatgcaagaccaccaaggtggtacctctgtgaatgtgcaaaaaccacagcattattaggcttggggcctaagtccccttaaatacttggaaagccttcccaagaaagacaggcacaaacaagccccgactgtgaagactaccataaatagctaactcttcaatacccagacaatgaagaatatatacaagtatcaaaaccatccagga

SEQ ID NO: 260997 - DNA, 560 bp, Homo sapiens
taaaacacctaggaatgcatctaacaaaggaagtgaaaggcctctacaaggaraactataaaacactactcaaagaaatcagagcagggcatggtggctcatgcctgtaatcccagcactttgggaggctgaggtgggcagatcacaaggtcaggagttcgagaccagcgtgagcaacatggtgaaaccacatctgtactaaaaatacaaaaatgagccaagcacggtggtgcacacctgtaatctcagctactcaggaggctgaggtaggagaatcgcttgaacctgggaggcaaaggctgcagtgagccaagatcacaccactgcacttcagcctaggtgacagagcaagactccaactcaaaaaaaaaaaaaaacaaagatgatataagacttaatattgttaaaatggccacactgcccaagtaaatgtgtagagttaatagaattcccattaaactaccactgacatttttcacaaaacaagaaaaatgtattttaaaattgatatggaaccaaacgagaacctgaatagtcaacacaatcctaagcaaaaagaa

SEQ ID NO: 260998 - DNA, 626 bp, Homo sapiens
aggggcccagagatatctcacagtaccccctgtgggtagaactcaggaaaaaggagagagtcacataatctagaagctgagctcagctgtatgttacaatcacccagtggacaggtcccaggcatgagagtagagtcacatcacataggtgctggaccaagcaatttgtcacaaccttcactgtggacaggtccccagaaaaagagaatcacatcatttaggtaacaaaacctgagttagtcactgttacttgtttgggcagaggtcaggaagaagtgtcacacaacatgtatgctggactaagcaatacgtcactctctctgttttaggyatggcccaggcaggagagaagggtcatatcacctaagctctggattcgcagataggccccaatctcttttttgggcaatgctcgggtaagagagcagagtcacatcaagtggttgatgggcccagagatatatcacattgccccttgtggacagggaccaggcaggggactcacatcacaatagaggtaggacaaggaatacatcacaatacgttttgagagcagaaccaaaaaagagtaacataatctttgtgttgagtgcagcaatatgttacacttttctttgtgggcagaa

SEQ ID NO: 260999 - DNA, 602 bp, Homo sapiens
caacacctgtgtgttggatccaaatagatgagtcgtagtctcaacaattgacttgatccatgtgtgagatcctagtttctatttgcattactattggtaccagtacctattaattcttccaccttctacatctttgttctgtatgaatrtatatacaaagattgatacatatacaagattatatgagtatttctatgtaaatatgtacacaaaaattgttcctccaaagacatttttcagtatcttagcatattctaagggtgcagatgtagaattatttctcttctctggctcagtagcatgtcagaatggaacataggtatagaatgttttttgtatagacaaagcttcactttcaggggcaaggtttgggaaataagctgatagtaaagtcatgtaacactttctgtgcaggttaacatttctggaccttgctttccttctcagtgtatgcatgagctattctcatgcaccactgggggccagtcttgattaatctacagttgaaatttagagaactggctgattgaatccacctgggctgagctaactgacattgaaatcagctgggctgagcttattggccagttaaaatcatctgg

SEQ ID NO: 261000 - DNA, 602 bp, Homo sapiens
caacacctgtgtgttggatccaaatagatgagtcgtagtctcaacaattgacttgatccatgtgtgagatcctagtttctatttgcattactattggtaccagtacctattaattcttccaccttctacatctttgttctgtatgaatgtatatacaaagattgatacatatacaagattatatgagtatttctatgtaaatatgtacacaaaaattgttcctccaaagacatttttcagtmtcttagcatattctaagggtgcagatgtagaattatttctcttctctggctcagtagcatgtcagaatggaacataggtatagaatgttttttgtatagacaaagcttcactttcaggggcaaggtttgggaaataagctgatagtaaagtcatgtaacactttctgtgcaggttaacatttctggaccttgctttccttctcagtgtatgcatgagctattctcatgcaccactgggggccagtcttgattaatctacagttgaaatttagagaactggctgattgaatccacctgggctgagctaactgacattgaaatcagctgggctgagcttattggccagttaaaatcatctgg

SEQ ID NO: 261001 - DNA, 560 bp, Homo sapiens
atgagcaagagtagtaggagatgtaactcaatgcaagcaagaggttggagtaatgtgagatacaggtcatgactcaaagaaatgtaagcagtgtctggaagctgaaaaaggcaaagaaatgattttcctctcagagcctccagaaggaatcagctcctctgacaacttggctttagcccagtgaaactgattttggacttgacctccacaactacaaaatagcaaactcatatgtagttattaaaagttgaggtaaaattcacgtaacagttaactgtttcagagtataattaagtggcatttagtgcattcacaataccatctctaatttcaaaactttttcatcactccagaggaaaatcccttgcccataaaatagcaattccccatcttactgtcttctaccccttgcatcccctagmaaccactaatctgctttctctctataaatttgtctattctggaatgtttcatataaaagcattgatacactatgtggccttttgtgtctggcttctttcacttaacataaggtttctgaggctcatctatgttatacc

SEQ ID NO: 261002 - DNA, 507 bp, Homo sapiens
tctacatttgttctgagaactacatacatgagggaaataagggggaaaaccaggttggctatctggggactatctagagttaatttttgtatatggagcaaggtaggggtccagtggcattctttggcatggcattatctagttatcccatcaccagttgaagagattattctattcatgaatagtcttggtgccctggtaaaaaaatcaactagtcatagatgtttggtttatttctgaacattaattctatttttttggtctatatgtctagccttatgttagtatcacatggttttggtcactgtattttggtagtaagttttgaaatcaagaagtgtgattcctccaactttgtttttctttttcagtgttgttttgattattcrggattccttgcaattccatataaatttgaaagttagcttttttatttttgcaaaaatggcctttggaattttgatggggtttcatcaatctacaaatatggttattttatcattatta

SEQ ID NO: 261003 - DNA, 563 bp, Homo sapiens
tggtccctaattgtttataatattctaattcttttagtttctgtaaagttagtagtaatatcctcactctaatttttgattttagttatttatgtcttctttctttttttcttcatcaatctagctaacagtttgccaaatttttatcttttcaaagaaccagattttgtttttattttttaaraattctctctattatttgccttttctccattttatttatatatgctctaatatttattattttaatccttctgctggcttgggatttagctttttctaattatttcaggtgtaaagttaggttgttgatttgagagctttcttttttattgtgggcatttacagctataaatttccctctgagcactgtttttgctgcatctcatatattttggtatattgcacttccatttttattcatctttaattttcctagtatttcctgtttgactcatttgttgtttgagtatggtttaattttcatatgcttgtgaattttccagtttttcttctattattgatttctggctttattctatcatggtcagagaaaatgcttt

SEQ ID NO: 261004 - DNA, 597 bp, Homo sapiens
tgttactctttcttttctatagatgagaaaaccacagacctatgtgtatggaaggcatctctttctcccttgtaaagaaagctaatcaggagaggagaaacaagaaaatgaaccccaatttccttcctttttaaactatttctctctttctcctttgttttctaaggcctccagcatgttctttctgactgtgcacatctgtctcaaactcmttctgccttagttgtccccagggacaaattgtagaatgtatggaggtcccataatggctgacttccaggtcctaaacctggacaggtgagaaggtactcacatcggtcactccatctcttctttcctttagtgtctacgcagccctggatctgcagacacaaaagacagtccctgagcactgggaatgacactgagtcaaagttctggcctctcccacaaatgcccttggcaccgactttgttcctgtaactgaatttttgctttgttctctccactgtggttctgagtagcaaagtggccttattccttgtcccaagtcacctaatactatccaagattgacacaaggacaggttctgagctgaatactctttggctgggaacc

SEQ ID NO: 261005 - DNA, 597 bp, Homo sapiens
tgttactctttcttttctatagatgagaaaaccacagacctatgtgtatggaaggcatctctttctcccttgtaaagaaagctaatcaggagaggagaaacaagaaaatgaaccccaatttccttcctttttaaactatttctctctttctcctttgttttctaaggcctccagcatgttctttctgactgtgcacatctgtctcaaactccttctgccttagttgtccccagggacaaattgtagaatgtatggaggtcccataatggctgacttccaggtcctaaacctggacaggtgagaaggtactcacatcggtcactccatctcttctttcctttagtgtctacgcagccctggatctgcagacacaaaagacagtccctgagcactgggaatgacactgagtcaaagttctggcctctcccacaaatgcccttggcaccgactttgttcctgtaactgaatttttgctttgttctctccactgtggttctgagtagcaaagtggccttrttccttgtcccaagtcacctaatactatccaagattgacacaaggacaggttctgagctgaatactctttggctgggaacc

SEQ ID NO: 261006 - DNA, 560 bp, Homo sapiens
ccacctttcggagcaggtgatattaatctcattttcaaaataagaaaactgaggaagaaagaagttaaaaaarttctccagggacctctggtgtaaaatggtagatctgggtttcacaatgaccttcctctggtgtctaagcctggaccaggctacagctgcaaaggcatcgagtgcccacctctgtgatgatggtcagttgcattcagtaaacatgcatggggccctggcatagtccatcaccagggggtgagttcacggagttgttcttgaagaatgcaggtgggtttttaaatgtcccttccactcccctgataactgctgaacatttctccaacttctgtgtatttgcacatgctgtgcccactgctggaatgcctttctgtcatttgaccacttgggtagcctcttcctgttgttcaagacccggctttagctgagtgtggtaggccctcctcagctgcagtggattttcctgcacacactcctgtgaaccattcctgtggactcagtgggatgctttctctattttggtgcagtttttaccagtcagtgttaag

SEQ ID NO: 261007 - DNA, 560 bp, Homo sapiens
ccacctttcggagcaggtgatattaatctcattttcaaaataagaaaactgaggaagaaagaagttaaaaaaattctccagggacctctggtgtaaaatggtagatctgggtttcacaatgaccttcctctggtgtctaagcctggaccaggctacagctgcaaaggcatcgagtgcccacctctgtgatgatggtcagttgcattyagtaaacatgcatggggccctggcatagtccatcaccagggggtgagttcacggagttgttcttgaagaatgcaggtgggtttttaaatgtcccttccactcccctgataactgctgaacatttctccaacttctgtgtatttgcacatgctgtgcccactgctggaatgcctttctgtcatttgaccacttgggtagcctcttcctgttgttcaagacccggctttagctgagtgtggtaggccctcctcagctgcagtggattttcctgcacacactcctgtgaaccattcctgtggactcagtgggatgctttctctattttggtgcagtttttaccagtcagtgttaag

SEQ ID NO: 261008 - DNA, 535 bp, Homo sapiens
tcttctttttgctctggtcccaggtcatcacccccagctttaagcctagctgtctataagcaggcaactgccctggtcctcagggaccactgtccctgtaaggcatctcctttctgaagccccaagtagtcctctcttagctgcttctgacctgcagttgtctcctctgcacccccacaccccacctcagtgcacagatagtctccctggctcccgggggtcctccttttctccttctcgctgctattgcctattactgtaaaagttcacttgtttaaggaacagtgactcacargtttgatgggttgttttaacctgcaggatatactttatttttgtacttttccattttattgctctcctaaacacttaaagtaatacattattatggaatgaggtcacacaaaagaaacttgagtaaatataaaagaaacagtaaataaaaataaaattcaatgactgttttgaagcaggcagcgttaccttttgcatatatccttttgtatctttctcaaagctcagagacatatgcaaa

SEQ ID NO: 261009 - DNA, 637 bp, Homo sapiens
tgatgggttgttttaacctgcaggatatactttatttttgtacttttccattttattgctctcctaaacacttaaagtaatacattattatggaatgaggtcacacaaaagaaacttgagtaaatataaaagaaacagtaaataaaaataaaattcaatgactgttttgaagcaggcagcgttaccttttgcatatatccttttgtatctttctcaaagctcagagacatatgcaaacacacaaagattttttttttttttttactgtagacctgggattattccctgcctcactctgcaacttgcttttttcacttcattttttcatgttgtataatttgtattttggtggacctcagytcccctgctttattctaggccagaagttgcaaagcatacttctgcaggacattgggtttccttaagttgaaccaagatgctgaattgttgacatccagtaataatcgtcattggttcagtttgcagaaagttaaataagtataatttttagcactttgactttctgccatgactttttattaaaacattggctctaccaccatttggactaactaggctctaaccccaaatgatttcaaagttactgcaaaattatacttagttatcttcagtttaa

SEQ ID NO: 261010 - DNA, 633 bp, Homo sapiens
ttaaggaacagtgactcacaggtttgatgggttgttttaacctgcaggatatactttatttttgtacttttccattttattgctctcctaaacacttaaagtaatacattattatggaatgaggtcacacaaaagaaacttgagtaaatataaaagaaacagtaaataaaaataaaattcaatgactgttttgaagcaggcagcgttaccttttgcatatatccttttgtatctttctcaaagctcagagacatatgcaaacacacaaagattttttttttttttttactgtagacctgggattattccctgcctcactctgcaacttgcttttttcacttcattttttcatgttgtataatttgtattttggtggacctcagctcccctgctttattctaggccagaagttscaaagcatacttctgcaggacattgggtttccttaagttgaaccaagatgctgaattgttgacatccagtaataatcgtcattggttcagtttgcagaaagttaaataagtataatttttagcactttgactttctgccatgactttttattaaaacattggctctaccaccatttggactaactaggctctaaccccaaatgatttcaaagttactgca

SEQ ID NO: 261011 - DNA, 526 bp, Homo sapiens
ccaccatgccaggctaatttttgatatttttagtagagatgggatttcgccctgttgcccaggctgatcttgaactcatgggctcatgcaatcttcccgcctgggtctcccaaagtgctggggttataggcatgagccactgtgcccagcttgttttgtttttaaatgaagcttgaagaattttttgaactatatacacttataactttgataaaaataaaatttcatatcaaaactgtaagtagcatcatttgtgtaaaagtagatttctcaaattattaaaaatattatcctatgcaattagacactgagcacatcaaagtttyatttaactggtaaaccaggggaacaagctgaacaacaacaacctggttcaaaagtattcaggcttcttgatattttgtgagagaagagatacttgtataaaattatcattaggtataaaacaggtaaattttctccagagtaataaaactatgagttttaacaaagcagcaaacatcacattttatcatttttctgcaag

SEQ ID NO: 261012 - DNA, 526 bp, Homo sapiens
ccaccatgccaggctaatttttgatatttttagtagagatgggatttcgccctgttgcccaggctgatcttgaactcatgggctcatgcaatcttcccgcctgggtctcccaaagtgctggggttataggcatgagccactgtgcccagcttgttttgtttttaaatgaagcttgaagaattttttgaactatatacacttataactttgataaaaataaaatttcatatcaaaactgtaagtagcatcatttgtgtaaaagtagatttctcaaattattaaaaatattatcctatgcaattagacactgagcacatcaaagtttcatttaactggtaaaccaggggaacaagctgaacaacaacaacctggttcaaaagtattcaggcttcttgatattttgtgagagaagagatacttgtataaaattatcattaggtataaaacaggtaaattttctccagagtaataaaactatgwgttttaacaaagcagcaaacatcacattttatcatttttctgcaag

SEQ ID NO: 261013 - DNA, 526 bp, Homo sapiens
ccaccatgccaggctaatttttgatatttttagtagagatgggatttcgccctgttgcccaggctgatcttgaactcatgggctcatgcaatcttcccgcctgggtctcccaaagtgctggggttataggcatgagccactgtgcccagcttgttttgtttttaaatgaagcttgaagaattttttgaactatatacacttataactttgataaaaataaaatttcatatcaaaactgtaagtagcatcatttgtgtaaaagtagatttctcaaattattaaaaatattatcctatgcaattagacactgagcacatcaaagtttcatttaactggtaaaccaggggaacaagctgaacaacaacaacctggttcaaaagtattcaggcttcttgatattttgtgagagaagagatacttgtataaaattatcattaggtataaaacaggtaaattttctccagagtaataaaactatgagttytaacaaagcagcaaacatcacattttatcatttttctgcaag

SEQ ID NO: 261014 - DNA, 581 bp, Homo sapiens
tcctcattttgctttatttccaagttttggagctttttcttgcacacttgccataaatatgaccaacttcaaaaaataaacacaataaaaacaaaacaatgtcattaagttctaagtagatactgtttgctgcctgctctgacctgaagattttcctctttgttagaaaaggtgtttttacaagaactagagaggtattaaagacatataatcaccaaaacgagatttctctacttggtatcatgaaaagtgttgaaagaaaaatgaaaaaaaaaggccacattttttatataatttggtttagtgttatgaaatgctttgtctattgttacttaaaatattctcatatttggtgtgctttcttattctagaaaccctacaggagatcagtagtttygcactgcattctgaaaagtcctaggagtggcctagggtcaagagtgagtcaggaagagagggcttggctcccttagccccgaccctgcctagtccccatccactcccagctcaccttctgctgtgttatgtagtgagctctgcataagacttcatttgaagtcccttccagataccagagccta

SEQ ID NO: 261015 - DNA, 581 bp, Homo sapiens
tcctcattttgctttatttccaagttttggagctttttcttgcacacttgccataaatatgaccaacttcaaaaaataaacacaataaaaacaaaacaatgtcattaagttctaagtagatactgtttgctgcctgctctgacctgaagattttcctctttgttagaaaaggtgtttttacaagaactagagaggtattaaagacatataatcaccaaaacgagatttctctacttggtatcatgaaaagtgttgaaagaaaaatgaaaaaaaaaggccacattttttatataatttggtttagtgttatgaaatgctttgtctattgttacttaaaatattctcatatttggtgtgctttcttattctagaaaccctacaggagatcagtagttttgcactgcattctgaaaagtcctaggagtggcctagggtcaagagtgagtcaggaagagagggcttggctcccttagccccgaccctgcctrgtccccatccactcccagctcaccttctgctgtgttatgtagtgagctctgcataagacttcatttgaagtcccttccagataccagagccta

SEQ ID NO: 261016 - DNA, 529 bp, Homo sapiens
  misc_feature (1)...(529): n = A,T,C or G
tggagacacaaggctgttcccaaacccccannnnnnnnnnnnnnnnnnnnnnnnnnnnnnnnnnnnnnnnnnnnnnnnnnnnnnnnnnnnnnnnnnnnnnnnnnnnnnnnnnnnnnnnnnnnnnnnnnnnagaggaccaggcatgtaagttcttccagaattgcacatgtcatttttaggtccacatcgaccttgagagaaccttctacatttttgtagatgagagaattgaggctcagagaagtgataagtgaggttgcacacctggcaaatacagcattgaacttcagacccagagcttctgaagttaagattcctaggcctttccacttggccatggccaccctcgcrtatgcatggtgtgcaactctgtgcctaaatgctatgctggtaaaatgctccaagatatagatgaatatgcttgaaacccttgccgactacaacaaaagctcaaaaaggatcggcaaatcctacagaaagtttagggacctgtatttaaagtagccagaacccaatacctgttacaacc

SEQ ID NO: 261017 - DNA, 595 bp, Homo sapiens
ggtgcatgtaaaatcaaggggaaatgcatgtgaggtgccctgggatcatgctatgaagagatcagctttcatcacagggtcaggaatacttctctgaggaagtaccatctaagctgtgacctgaatgatgagtaggagttggcaggtgaagaggaggagggtgtagtaggtgaaaataaagccagagggagctccctgagataggagggagtttgacccaaaggaactgtggaaagtctagggtggctggaattcagtgaccaagggatagaatgactggacattgcctaraagggtaggaaggggtggctcttgaagaaccttgagtgtcaggccatgacctctagaaattatcttagggaaatggggagctgtgatattatgaagtgtatacttggtctttgatcctttttcctggcatacatgtcctagaatccttagaatctccaaaaagtgatgtctttttgcatgctaatgagttgactgaagcctggaaacccttaggtagtttcaggatgaggggtggccatctgaaagagcaaggcagaattagagggttgagactttcagcctcccccatagggaggggagaggg

SEQ ID NO: 261018 - DNA, 484 bp, Homo sapiens
atgagttctacacctgcatccctcctgtgaaactccagaagcagaaagtacagtctatgaatgagatagtccagagcaacctctttaaaaagcaaggtgagtacacagcacccttgctggggtggggtaaggggccaataaaccccacatcattttggggaagcttggcaggagagggcaacctgtccagtgactataacatctcttttctcacaactcccttggtctgcataaatgcaaaaagtagaaagtagctgacaacttagatatcagaatctaaattgattttaggaaagctgaggttgcattgtttatttctcttgagaaagtttaatgagktttttttttccccctgtatggtttattattgctgtctttaactcaaagggaaatggataaagttccttttagtagaaagagcctttcacggggaagttctcaaaattttgagtgtgtaagaataaactggagagcttattaaaat

SEQ ID NO: 261019 - DNA, 604 bp, Homo sapiens
ttttcagatttcagaatatttgcatatatataatgatatatcttggggatgggacccaagtctaaacgcaaaattcatttacgtttcatatacacattatacacacractgaaagtaattttatacagtatttttaataattttatgcaagaaacaaagtttgtattaagtacttacacctagaattttccacttgtggtattatgttggtgttcaaaaagttgcagattatggagcatttcagatttcaaattttcagactggggatgctcaatctgtactagaaaatttataaatttcttttacaaaaaaaaatgagatttatttatttatttaagaggcagggtcttgctgtgtcgtccaagctggagtgcagtgacgtaatcatagctcaccacaacctcaaacctctgggcccaagagattctcccacatcagcctgccaagtagcttgggccacaggcatatgccaccatgcccaaataattttttatttttgtagagatggagtctcgctatgttgcctaggctggtctctaactcctgggcccaagccattctcccacctcagcctctcaaatcactgggataacaggcatgagac

SEQ ID NO: 261020 - DNA, 604 bp, Homo sapiens
ttttcagatttcagaatatttgcatatatataatgatatatcttggggatgggacccaagtctaaacgcaaaattcatttacgtttcatatacacattatacacacgactgaaagtaattttatacagtatttttaataattttatgcaagaaacaaagtttgtattaagtacttacacctagaattttccacttgtggtattatgttggtgttcaaaaagttgcagattatggagcatttcagatttcaaattttcagactggggatgctcaatctgtactagaaaatttataaatttcttttacaaaaaaaaatgagatttatktatttatttaagaggcagggtcttgctgtgtcgtccaagctggagtgcagtgacgtaatcatagctcaccacaacctcaaacctctgggcccaagagattctcccacatcagcctgccaagtagcttgggccacaggcatatgccaccatgcccaaataattttttatttttgtagagatggagtctcgctatgttgcctaggctggtctctaactcctgggcccaagccattctcccacctcagcctctcaaatcactgggataacaggcatgagac

SEQ ID NO: 261021 - DNA, 577 bp, Homo sapiens
ccagttagacccagtgaggcacagatcccagctcacctgggctttgttcctttcctgttcccaactgtggttcttcatgaagccctctactctctgacattagttccrtgagacacactaatctctctgcctttaataaacacccccactcccaacacacacatttttaaaaattaaagtagttgtatgggtttttactacttgtaagcatagagccttgataaagacatatgtgaaaaattaggttttaatgcactacaaggatattctaagagtaggtattagtgattttgccagacacttctcaatggtagtacctcataaggaagcactgtgtgtcagtttctaactgggacccttggacttgcaaggccatccagcaatacaccttgtgagcactcaaagccacaggataaataggctgcatcttcctggactttcaaatttactatatattatgtaatctaaaataactttctaaaattaaactaagacttcacatgaatatttaagataaaatactagacttcaaagaaattccctgcttgctggtaaactgcttcaggctaagtttgca

SEQ ID NO: 261022 - DNA, 431 bp, Homo sapiens
aaaaacaaatgtaaataacataaaatatttagatcacagaaacattaagcgtgattttagtgatgggcatgaattatgcttagtggatggaccatctatgtaacagcaaggagctgataatcctcactcttacagacaatagagacaaaccacagttcagaataaacagctagaaatttgtcatgttgaaaaggcagccaccatttaaatgtatcatatgtaaatatattgtaatctgagtcctgtcactgtggttgtatgtatagtttscattttccctcaagcttaattgctcaatatccattttcttgcattaatgaagcctctaaatatttaacttagaaaataggtatagccacccttttcttgagagccagtggaaggcccatattttgtacaatttgtaatgcacacatttgcattacactaat

SEQ ID NO: 261023 - DNA, 610 bp, Homo sapiens
tatcatatgtaaatatattgtaatctgagtcctgtcactgtggttgtatgtatagtttccattttccctcaagcttaattgctcaatatccattttcttgcattaatgaagcctctaaatatttaacttagaaaataggtatagccacccttttcttgagagccagtggaaggcccatattttgtacaatttgtaatgcacacatttgcattacactaatatattgctgagatctcatttaatttgaaaaaattttctcttcctccttctattttttttaagttatttgttgtcttctagaatttctccattctggactttggttggttgcatccccatggtgttatttaatgggctcatttatcccctgtatttcycgtaacatgatatttagactagaggctttatcagaatcagtttcaagtttctgccttattttgaaagtggtttgtgaatcttattgctttacattaaggaatatataatacttggatgcctctatttttgttaagattaatcatggatttttttatgttattagttcaatacaaccattataaaattccccacagggttttcacctcacagtttgataagtcatttattatta

SEQ ID NO: 261024 - DNA, 603 bp, Homo sapiens
aattggagaccattattctaagtgaagtaactcaggattggcaaaccaaacactgtatgttctcactcgtaagtggaagctaagctatgaggatgcaaaggcataagactgatacagtggactttggggacttgrgggaaaggataggtggagggtgagggataaaagactacaaattgggtacagtgtatactgtccaggtgatgagcgcaccaaaatctaacaaatcaccactaaagaacttactcatgtaaccaaacaccacctgttccccaaaaacctatggaaataaaaaaaataaaaatttacctaataattcacagttttaaatacttagtatcattaaatcattaggtggttttgtcattgtgcgaacatcatagagtgcacctgtacaaatttagatgatagagcctaatacacacctaggctacatggtataacctgctgctcctgggttataaatttgtacagcatgttattgtaccaaatactgcaggcaactgtaatgcaatgataagaatttatgtacctaaacatatctaatcatagaaagtatacagtaaaaatatagtgtaaaggattttttaaaatggtatagct

SEQ ID NO: 261025 - DNA, 476 bp, Homo sapiens
cctaatacacacctaggctacatggtataacctgctgctcctgggttataaatttgtacagcatgttattgtaccaaatactgcaggcaactgtaatgcaatgataagaatttatgtacctaaacatatctaatcatagaaagtrtacagtaaaaatatagtgtaaaggattttttaaaatggtatagctgtacagggcacttcccatgaatggagcttgcaagactggaagttgctctgagtgagtcagtgagtgaggggagagtaaagatgaaggcctaggacactactctatactaccatagactttatcaatactggacacttagactatgctacatttattacaaatatcttttcttcagtaacgaattaaacttagcttactgtcaatttttaattacaaactttttaattttttaacttttttactccttcttaatgacacttagtttgaagcacaaatacatcgtaca

SEQ ID NO: 261026 - DNA, 476 bp, Homo sapiens
cctaatacacacctaggctacatggtataacctgctgctcctgggttataaatttgtacagcatgttattgtaccaaatactgcaggcaactgtaatgcaatgataagaatttatgtacctaaacatatctaatcatagaaagtatacagtaaaaatayagtgtaaaggattttttaaaatggtatagctgtacagggcacttcccatgaatggagcttgcaagactggaagttgctctgagtgagtcagtgagtgaggggagagtaaagatgaaggcctaggacactactctatactaccatagactttatcaatactggacacttagactatgctacatttattacaaatatcttttcttcagtaacgaattaaacttagcttactgtcaatttttaattacaaactttttaattttttaacttttttactccttcttaatgacacttagtttgaagcacaaatacatcgtaca

SEQ ID NO: 261027 - DNA, 593 bp, Homo sapiens
acttctacacccaaagcacaagcaatagaaaacatttgctcgctgcccccagaagtctgattttggacttccgctattctccattgtaaatcagttaactcagcttgcttacatcatagcaggcttcttcatttgaagaggtgattttcataccacattaacaatcgtaataagatcctgtttctagstactcttataactctgaccactcacctggcaatctccactatcatctaatagaattctatttcttcagagtcagtctatccaacaggccctgagtttccacaatcttgtgtcatgaacgccactactttcaattcaaagagtcagaagtccttacttcctttgaactttatcaattctgtctctctcatctgataaaccaatatatccaaggtaggaaaaagaccacccactgccaaaccacagactcccctttacattcttccaaatagaaggcttattttcatacttatcataactgttatttacatccagaaaaatgcatctcaatagtatgtatggttgttgggtgggtagggggaggtcaatgtaccagggaggtgcataagaatcaccaaggtgggaga

SEQ ID NO: 261028 - DNA, 610 bp, Homo sapiens
cagtttaccaacatttcctcgactactctctccccagcctcttaataaccacaattccactcgctgtttcaatgagttcaacatttttagattctaggtgtgagatcacatgttatttgttctgggcctggcttactgcactttacataatgtcctccaggttcatccacattgttataaatgacaggatttcttttttaaggctaaatactattccattatgtatatataccatgttttctttatctgttcacccattgatagaactttgtttgatttcctgtcaggctgttgtgaataatactacaatgaccatgcaagtgcagctatatctttgacatactgatttcatttcctttgtatatatatcaactagtgtgactggtggatcacatggtagatctgtagatctattttttaatttggaagggacctccactcaattttacatagtggctatactattttattcccaccatgtgtgggggttccctctctacatcytcacttttttcataacagccatctttcatcattttgataatagccattctaactggtgttaggtgatatctcattgttgttttaatttgcatttcttacatgatta

SEQ ID NO: 261029 - DNA, 554 bp, Homo sapiens
gcctgtaaacatgtggccaagtgtgcaggggaaaaraaaataactatcagtcttttcaagagcctagggagtcacctttgaataaggcagtgcattttcatgtaaaaaaattacttgtttcttttggatatattctatatgctctatgccatacaaatcctcaaaaaaatgagacaaagaagcagcccttccttgaatgaaaaaaaaaattattcactgccaaacttatagtatacaagatctaacttttacatctttctggttaaatgccttggtgtcccatacttgccttggtaaaactttaatttttaagatgttacataaagccatttaaccacactggtcttgtattaattaataataaagtttacatttcttattgatcagactggccacatttaagagcttcacaacaaaaacaaattatgcttttgaggccatagggaaacaggtaacctcatacactattagttgaattgcatagggcttcaatccctaggaagaattttgcaatacctaagaatactctatatatattcatcctatgacccaaa

SEQ ID NO: 261030 - DNA, 554 bp, Homo sapiens
gcctgtaaacatgtggccaagtgtgcaggggaaaaaaaaataactatcagtcttttcaagagcctagggagtcacctttgaataaggcagtgcattttcatgtaaaaaaattacttgtttcttttggatatattctatatgctctatgccatacaaatcctcaaaaaaatgagacaaagaagcagcccttccttgaatgaaaaaaaaaattattcactgccaaacttatagtatacaagatctaacttttacatctttctggttaaatgccttsgtgtcccatacttgccttggtaaaactttaatttttaagatgttacataaagccatttaaccacactggtcttgtattaattaataataaagtttacatttcttattgatcagactggccacatttaagagcttcacaacaaaaacaaattatgcttttgaggccatagggaaacaggtaacctcatacactattagttgaattgcatagggcttcaatccctaggaagaattttgcaatacctaagaatactctatatatattcatcctatgacccaaa

SEQ ID NO: 261031 - DNA, 554 bp, Homo sapiens
gcctgtaaacatgtggccaagtgtgcaggggaaaaaaaaataactatcagtcttttcaagagcctagggagtcacctttgaataaggcagtgcattttcatgtaaaaaaattacttgtttcttttggatatattctatatgctctatgccatacaaatcctcaaaaaaatgagacaaagaagcagcccttccttgaatgaaaaaaaaaattattcactgccaaacttatagtatacaagatctaacttttacatctttctggttaaatgccttggtgtcccatacttgccttggtaaaactttaatttttaagatgttacataaagccatttaaccacactggtcttgtattaattaataataaagtttacatttcttattgatcagactggccacatttaagagcttcacaacaaaaacaaattatgcttttgaggccatagggaaacaggtaacctcatacactattagtkgaattgcatagggcttcaatccctaggaagaattttgcaatacctaagaatactctatatatattcatcctatgacccaaa

SEQ ID NO: 261032 - DNA, 546 bp, Homo sapiens
gtgtttgccagtttcttataagtgtttctcacttaataactaagagggtaaagaattttagtcagaacccctttactctcttaagtactctcttaattaagagagtaaagagttttagtcagaacccctttactctcttaaggagcccaaagagcttttgtttatatggtaattatctaccatatgtgccatattagaaattaaaactgagcaaaattttaaatatycccttatgagttcattttaaaataacaaaagtaacattttaatgagaaattacaatatttgataaaacaaagaattgatgagtgaaaacattttgcatttttacaaatctctttaaaatctgctttaatagaagacagctagatttttgtatctttctctgtgttcactctcctgtttttgtgtgttgaagtatatgaagaagatgtgaccacatagagaaaggtagttaggaaagaaagggctattttaatagccattttttagacaatcgtggctatttttgtttgatagtaaaccaacacccaattagcagtagat

SEQ ID NO: 261033 - DNA, 575 bp, Homo sapiens
ttatccaacattatttttatatcattgcaataaatgtcaactcagcaaaaactaaaataccatgttagaattatcgcaaagataattttgaccttgagaacctcctgcaatattgttaagattcccagagatccacagattatattctgacaatcatggtttaaagtctaagcaaatttctaccctacaatctagcaatttcacttctaaatgtttacacaaataaattaaaatgtatgtcaatcaaaatacttgtgaaggaagtttgtagcaayctcatcaaaattactaagaacgggaaatgaaccaaatatctatcaagaggagaaaggataaataaatcatcatatatctacagaatgtaatgatactagacaataaaaaaatgatagatgcgacaactggatgctttggtcgaaagcatgatgttaagtgagaggagaactacgtaaatgagtagatactgtctggttctatatgtacaaaattcaaataccagcaaaactgatctgtgatgatagaaagcatatcacgttcagggagaggtgggacaactggaaaggggctgaagggag

SEQ ID NO: 261034 - DNA, 577 bp, Homo sapiens
ggtgtcaggaaagagtagaggatgagagatgaagcaaagggcaagaatgaaacaagggtgatggatgaaattaaaattgtttatgtctgttacaggaactatttagcaataaacagtaatatttctgcttttgtgaaacagtattaaaatgcattgctttattttactgaataccaccatctccagatggtttgtgagaatgttaaataaaactagtttcagcttacatccctcaggcatacttctattagcattttttatcagaggaaatgttgatttatttcattgttttctgtctttatcagctacagaaaagtcatcccataatttatctcctctgtttgtttgaatactagaatcaggtgtagaatcctccctattcctcttctgtagcccccttatttagaccttcaccaagttctttagattttkgtttcacaaaattacgtaccttgagtattgttttgatctgatcatttctcttcccaaaagcccacaatctcttccacctgcttcttaggtcaagcaaaagtattgacttaaatttgagtcctttgaccgtacttgacttactgag

SEQ ID NO: 261035 - DNA, 583 bp, Homo sapiens
gttgaacaatgagatcacatggacacaggtaggggaacatcacacaccggggcctgtygggggatggggggcaaggggatggaaagcattaggacaaatacctaatgcatgtggggcttaaaacctaggtgatgggttgggttgataggtgcagcaaaccaccatggcacatgtatacctatgtaacaaacctgcatgttctgcacatgtatcccagaacttaaatttaaaaaaaaaatcatctgcctgtggctgacataaaatactttataatatacaatgcaatgattttttccctttagtattaaatgttctatcagtaatacataatattaattttctggttaaaaaaatggaaatataattaaaaagcaaactaaatttttaatataaaatacaaagccacccttcctttaaggcacctatgagagtggcttttaaaaatgaaaagctttaaaaaaaatgatacacacatttctttatttgcaaggtctttcttcatctcttgttttagggtaaaaactttaaattattgctgtgaaaaactcagcaccagagataacattagagctgcaacccatac

SEQ ID NO: 261036 - DNA, 584 bp, Homo sapiens
ttctttctttcctctttgaatcaagcagggaagtttccttctttcctctttggatcaaacgggtcagagaagagagctacacatttatgttggaagcagtcctccagacatgcctccgctggagctccgtggacctcctccacccctagtggcctgacttgtgacaggcttttctgccactccctggcattctcccaccagggcttcaaacaaagaaaaactgaggcaaggactctgacttwattgttttgggtctctgtgtggtttggcattgggtgccctgagctcatgttattgaaacagctctggaccattggaggatgggattgtctccctaggcagttgtccatttagctttcacctctgcctccaactgtgtcccacagatcaagaaaagatttgaaattcagactggagttgatggaattatgagcagcccctgaggagctgtgacaggagctacagagttcatttctcacagggaggccgtggagtttttcttttatcctctgcccaccccacatgcatcacaaaaattctaccccactcaggtcccgggatccacaccattgccttttgtacat

SEQ ID NO: 261037 - DNA, 586 bp, Homo sapiens
cttaatatcaacagttcaatttttattgagactggttcttttttcattgcctgttctttttacttaatggatgtggtatcctcccatatttttctaagtatataaaatattcttatggtaaaagattctgttcgagtcacgctattgaccctgtttcctttgagctctcctgtttggtgagtttgtctctccctcatggcgtagacagtcctcaaatgtttggagatctgtcattgtgcgcttatttttaatggagaatcctttagcgcctgtctgttgcctgttatgataattgccctattcagtcacctctgacccaagccttctctagctctgggtttctactgtgagcatgaaacatcttgtgttttaccatccttttcttttctcctctcctttccctctttcttttctttctttctttcttatcctggccaatggcattcctttgccgcttttttttttttttttttgtctttcagggacttctcatattttrtggtcagccagagtgtcccttcttgttttgagcatgagtatatagtaattattaaaattttgcccagtatttgaatagatttgttgc

SEQ ID NO: 261038 - DNA, 647 bp, Homo sapiens
gccgctgttttcctatctttctccctagaactgtaagttctccaagggcaggaaccacatctggctttgcttaccattaaatgccagcagcctgcccagtgccccacacatggaacgtgctgggtaaacagttggtgggtgagcagtgagcctgcacaccggtccctgtgtctgggacaccccctggagttgcttttgtcctgccccttccaccagcccaacctccttggagccctgagccagctggttctctcctttagctcaaatcctgggcctggtatttgtgatctgcattaatggccttgagggacacttcaaggtcttgastccagagacctcagaaggtccctgctgactgttgcctgaaacccttttcctaggaaaatatctctgaaataggtgggacttaggaggcagataataacagtaataaaatctgacattccctgagcaccctgcctcgcactctgctaagccctttacacacattttctccttgaaccctcagaacaatgtttctgtacaattacttccattgtacagatgagaaaactgagactcagagaggtaaatctgcccagctctgcaggattcccaagctgagctccctaaaagctgctgcagtcctgggccaggactcttctatg

SEQ ID NO: 261039 - DNA, 607 bp, Homo sapiens
atggcagagcaggagagaaagagcaaaggcggaagtgctacacactttkaaaacatcagatcttgtggaaactcactatcatgagagtggcaagggggaaatttgatcccatgatccaatcacctcccatcaggtccctcccccagcattgagaattacaattcaacatgagatttgggtggggacatggaaccaaaccatatcaggcaaagaccaggagacacatgtagaaggcaagatgttatctccacagatgtgggagggggctgcccagcactgtcccttctctcacgctgatccagccccaacctcagagagaccatctgcaaatttggaactccaagcacatcataaggagcaattctcacaagtccatgctcccaggtcagactgctgctaatcaaagtgttgcttcctctaattagagtgagtcaagtcattaaaaacactatccttcaattgttggagtgtgacatttcttcttgatcctaagacagatgcccctcagggcagaagtgggactggagggaggggaaggagtgggcagagggcagcagtagttttgctgctgacgccctgctgatgtgagcagtgcctgcccgggcag

SEQ ID NO: 261040 - DNA, 607 bp, Homo sapiens
atggcagagcaggagagaaagagcaaaggcggaagtgctacacactttgaaaacatcagatcttgtggaaactcactatcatgagagtggcaagggggaaattygatcccatgatccaatcacctcccatcaggtccctcccccagcattgagaattacaattcaacatgagatttgggtggggacatggaaccaaaccatatcaggcaaagaccaggagacacatgtagaaggcaagatgttatctccacagatgtgggagggggctgcccagcactgtcccttctctcacgctgatccagccccaacctcagagagaccatctgcaaatttggaactccaagcacatcataaggagcaattctcacaagtccatgctcccaggtcagactgctgctaatcaaagtgttgcttcctctaattagagtgagtcaagtcattaaaaacactatccttcaattgttggagtgtgacatttcttcttgatcctaagacagatgcccctcagggcagaagtgggactggagggaggggaaggagtgggcagagggcagcagtagttttgctgctgacgccctgctgatgtgagcagtgcctgcccgggcag

SEQ ID NO: 261041 - DNA, 607 bp, Homo sapiens
atggcagagcaggagagaaagagcaaaggcggaagtgctacacactttgaaaacatcagatcttgtggaaactcactatcatgagagtggcaagggggaaatttgatcccatgatccaatcacctcccatcaggtccctcccccagcattgagaattacaattcaacatgagatttgggtggggacatggaaccaaaccatatcaggcaaagaccaggagacacatgtagaaggcaagatgttatctccacagatgtgggagggggctgcccagcactgtcccttctctcacgctgatccagccccaacctcagagagaccatctgcaaatytggaactccaagcacatcataaggagcaattctcacaagtccatgctcccaggtcagactgctgctaatcaaagtgttgcttcctctaattagagtgagtcaagtcattaaaaacactatccttcaattgttggagtgtgacatttcttcttgatcctaagacagatgcccctcagggcagaagtgggactggagggaggggaaggagtgggcagagggcagcagtagttttgctgctgacgccctgctgatgtgagcagtgcctgcccgggcag

SEQ ID NO: 261042 - DNA, 678 bp, Homo sapiens
tatctgacatggtccttgccttccttaacatattagctttttgcttggaggaagtcctggggtagggtaggggagtaaacagacccacgggaagagacaggctgagtagggtgtcagggtgctgtgaaaggactggctagggcacgagacctaacgagcaggcagaggtgctcagacttggtgaggtgggaaatagggagccagcgaaggctctggagtaagtgggcacaagatgataggtgatgctatggaagccccactgggcggccctgagagtggtcaaaacatggcattgagtcaataggcacacccttggtgttgccccttctatgcctggctagttcatgagggaacagggagatttgcacaaagtttatttgtcttctgattataaatgggcagggcactgtttgaaagaagagagagaagtcaagaaatatttgtaaacaatgagaagagaagcgagaagacaaatggaaatcttgatggaggtggcactgctaaaaycttgtaatagtaataatatttcagctttgaccagtgtcctggcagaatgaggggaacacatacagctcaagtgaggttcagtcaggtgccagctggctgggaccctagcctttccctgaaggctgcctctggtaccaaaggttctctctgacttgggcaggaaaggtgccc

SEQ ID NO: 261043 - DNA, 603 bp, Homo sapiens
aagaaaacctaatttgagaagtactgattgtaaatatcattctgtctctcttacttaaaaacaaacccttgactctaggcagcccctgcattgcctggttgcattcccatctttatgttcacaagtccaaataccagtgcttttcaggcagaaatcctctgctttcagtgtgttaaagctttgtaggttggccggacgcggtggctcacgcctgtaattccagcactttgggaggctgaggygggtggatcacaaggtcaggagatcgagaccatcctggctaacatggtgaaactccgtctctactaaaaatacaaaaaattagccaggtgtggtggcgggcgcctgtagtcccagctactcgggaggctgaggcaggagaatggcatgaacccaggaggtggggcttgcagtgagctgagatcgcaccactgcactccagcctgggtgacagagcgagactccatctcaaaaaaaaaaaaaaaaatgctttgtaggtgactattctaccgaggaggtgaacactattgctgggagtctgtgaatgacagctgcatgcacatctcttaaatcagcagtggctcaggatgctacctgggtgct

SEQ ID NO: 261044 - DNA, 557 bp, Homo sapiens
atacagtcatgcaccacttaggatggggatgcattctgagaaatgcgtccttaggtgatttcatcattgtgcaaatatcatagagtgtactagcacaaacctagatggtacagcccaatacacacctaggctatatgatatggcctgttgctcctaggctacaaacctgtacagcaggttactgtactgattacggtaggtacttgtaaaacaatcctaagtatttgtgtatctaaacatagaaaawgtacagtacaaatatggtatttatacatatatacatatatggtatattctatgtatctacataaatacaaatatactcattgaaaattcgtagtacttgtgggtatgtttatgtgtgtgtttaaaaataggagaggtaataaatacattctacaaacttgcttttttcatttaacaaaatttcttggctatccagccacattatcagtatctaaaggtctcttattttttaaaaacagcttcaggattgtggtaggcagaagaatacactctgccccccagccctcaccagatgtccactgtgaatatat

SEQ ID NO: 261045 - DNA, 623 bp, Homo sapiens
cctgtacagcatgttactgtactcaatactataggcaattataacacaatggtaagtatttgtgtatctaaacgaatctacacatagaaaagcactttttcagctccattataatcttatgggaccactatcacatatgtggtccatcattggctgaaacatcattatgcagtgcctaattccaattaaatccaatcaaatgccaataaggccaagaataaccaagacaatctggggcacagggaatgacagaattaatctyaccaggtaagttttcttataaagctacaataattaaaacacagttgtattgctgtagggacagacaaaggtacaccagtggaattaagtaattacaatagtgttaaccatgtgattatactacctattttacaaacaagtgttttaaagtctatacttcaaaagacaccataagcaaagtaaaaacacaaggcatataatttgaagcaagatatttatagtcatacaataaataacgcattagtatccagactacataaggaaattcttaagaaaaagataatctaatacaaactggacaaagatatgaacatgcagatcacagaaggaaacttgatagccagtaaacaaatgaaaggtta

SEQ ID NO: 261046 - DNA, 557 bp, Homo sapiens
atacagtcatgcaccacttaggatggggatgcattctgagaaatgcgtccttaggtgatttcatcattgtgcaaatatcatagagtgtactagcacaaacctagatggtacagcccaatacacacctaggctatatgatatggcctgttgctcctaggctacaaacctgtacagcaggttactgtactgattacggtaggtacttgtaaaacaatcctaagtatttgtgtatctaaacatagaaaatgtacagtacaaatatggtatttatacatatatacatatatggtatattctatgtatctacataaatacaaatatactcattgaaaattcrtagtacttgtgggtatgtttatgtgtgtgtttaaaaataggagaggtaataaatacattctacaaacttgcttttttcatttaacaaaatttcttggctatccagccacattatcagtatctaaaggtctcttattttttaaaaacagcttcaggattgtggtaggcagaagaatacactctgccccccagccctcaccagatgtccactgtgaatatat

SEQ ID NO: 261047 - DNA, 597 bp, Homo sapiens
aagcttctgtgggaccagattctatcttccctctatgtgccccaagatatctagcatcgtgcctgcttggaatgttctgggygctcaatttagccatagatcataccactgatctccataataaactttaagcaacttatggagatcagacaaatgcacataaaatgtgaaatgaccacaaaaggtagcacagcaagtcttgtgataatcaggaagtagtattccaggtgccaaggcaggtagactgatgtgactgggatgacgggggtcgggggggaggatgcaaggtggaggggtgtggaccttgagctggccttgcaatatggcaggacttgggatgggagaggaagggattcctggtggagagcgctgggagcacaagcgcaggtggggtgtggagatgggcatggggcaggtgcaaggcaggggtcagaagccatgctgtggctcccttgtcccgatccaaaatagtgtcctcattagtcttccacccttgccctcccaccatgtgtctatcctattctccacagaccagatacctagagagatctttagaaaacataaacccaaatatatttatttcctatgtgaaaccat

SEQ ID NO: 261048 - DNA, 504 bp, Homo sapiens
aaatatataaatatataaggcaataagacaattaacagagtatgtggaccatctgggtttgtgttgaaggggtccagaaagaaagtgttcaaagagataagttttgaagggagaacatttagcccccagatgcagatttgtggtatgcagagtgagcacatgccaggkcagtggaaccaaagaatggcgaaaagtcatgaggcaaaaatgagcagaatggggatttctaaagtaattctttcttacactctttcctttgtgttactctgttaataatctctctttgatgtaatcaatggcattagttaacatttgctcagcacacgtttcaggcttggcaccaagtgtctggttttgtccttgccatgagataggcactatttataatctattttaatatctattttagtgaagctactgagatttataaaagagtttatttaacttgctgtaacagttagctttgctgtgtaacaaatcaccccaatttcagtagctaaaata

SEQ ID NO: 261049 - DNA, 504 bp, Homo sapiens
aaatatataaatatataaggcaataagacaattaacagagtatgtggaccatctgggtttgtgttgaaggggtccagaaagaaagtgttcaaagagataagttttgaagggagaacatttagcccccagatgcagatttgtggtatgcagagtgagcacatgccagggyagtggaaccaaagaatggcgaaaagtcatgaggcaaaaatgagcagaatggggatttctaaagtaattctttcttacactctttcctttgtgttactctgttaataatctctctttgatgtaatcaatggcattagttaacatttgctcagcacacgtttcaggcttggcaccaagtgtctggttttgtccttgccatgagataggcactatttataatctattttaatatctattttagtgaagctactgagatttataaaagagtttatttaacttgctgtaacagttagctttgctgtgtaacaaatcaccccaatttcagtagctaaaata

SEQ ID NO: 261050 - DNA, 504 bp, Homo sapiens
aaatatataaatatataaggcaataagacaattaacagagtatgtggaccatctgggtttgtgttgaaggggtccagaaagaaagtgttcaaagagataagttttgaagggagaacatttagcccccagatgcagatttgtggtatgcagagtgagcacatgccagggcagtggaaccaaagaatggcgaaaagtcatgaggcaaaaatgagcagaatggggatttctaaagtaattctttcttacactctttcctttgtgttactctgttaataatctctctttgatgtaatcaatggcattagttaacatttgctcagcacacgtttcaggcttggcaccaagtgtctggttttgtccttgccatgagataggcactatttataatctattttaatatctattttagtgaagctactgagatttakaaaagagtttatttaacttgctgtaacagttagctttgctgtgtaacaaatcaccccaatttcagtagctaaaata

SEQ ID NO: 261051 - DNA, 467 bp, Homo sapiens
agctgattaagaaaaatgtaaaggatcttgagaatactgttataaccttcttgactgaaaatattttaaacagatacaccttactattttgtctggattctctccttctataacataaatgaggagccataatcaatcagacaccagggtggtgaggggagcrtgagcaggactgcttagcagaactgtgagaaataaatatctgttatttaagccacccaatctatggtattctgttacggctgcctgagcagactaaaatcaagagaatcccaggccaagaggccatgcaaaatctaggtggtgggtaccagcagtgtcactgacacagtagcagagctgaaagccctgtccaagcagcctcatcatcttctcactggcctcaccctatttctcaaaatcacttgcttgccagagaagagctttttttctattccagaaatcagttggcagtatttagaggaaaa

SEQ ID NO: 261052 - DNA, 623 bp, Homo sapiens
tacccagtagtcattcaggagcaggttgttcagtttccatgtagttgagaggttttgagtgagttttaaaatccaacgtgatcagccaataagctaggggcttcatcatatcagctgtgaataataacagttgtatatcttttccatttctttcttttcttcctctttctggcttgctgaagtggctggaaccgcctcagtgagcatagcatgtctctattccccttcgcatcagacgaggcagcttgaaggctggagactggaatcatgttaagagccttgttggttggtacctggaagacttaaatagatgggrgttggcacagctgggaatccttgggtatctttctcttcaccatggtggctttagggctccaaaagcacatgtcccaagggagaaggagacacaagcaaaagttatggtgtcaccgtctatgacttggctttgtgagtcacacagtatttttcctgtcaccttctatttgtcagaagtgagtaaactagggctgccccatattcaaggaggggacaattagactccaccttttcatgggaggagtatcacagaatttgtggatgtattttaaaagcagcacaatcgatgttctaccccaaattattta

SEQ ID NO: 261053 - DNA, 623 bp, Homo sapiens
tacccagtagtcattcaggagcaggttgttcagtttccatgtagttgagaggttttgagtgagttttaaaatccaacgtgatcagccaataagctaggggcttcatcatatcagctgtgaataataacagttgtatatcttttccatttctttcttttcttcctctttctggcttgctgaagtggctggaaccgcctcagtgagcatagcatgtctctattccccttcgcatcagacgaggcagcttgaaggctggagactggaatcatgttaagagccttgttggttggtacctggaagacttaaatagatgggagttggcacagctgggaatccttgrgtatctttctcttcaccatggtggctttagggctccaaaagcacatgtcccaagggagaaggagacacaagcaaaagttatggtgtcaccgtctatgacttggctttgtgagtcacacagtatttttcctgtcaccttctatttgtcagaagtgagtaaactagggctgccccatattcaaggaggggacaattagactccaccttttcatgggaggagtatcacagaatttgtggatgtattttaaaagcagcacaatcgatgttctaccccaaattattta

SEQ ID NO: 261054 - DNA, 577 bp, Homo sapiens
gcgtggtaacggatgacaggacaccactttcaacgaaggagacagacatttccctggcctttctgaagagcgctttttggagagacaaacctgttgctcaggggctgagcattcccgtgtgttctccctgtacttcacctaaaaatatgcctgttttccacactgtgcacacccgggggtgggtgctgggcatactccacctgcttgtttgcctcccgttttctcatcagggagtaaacacagtaaacctaacgctccaggggaaggaaaaaacaaatcattcagggcccatctcaggtgactgatgaatgcggcaccgttttgaacgggtacctaatctggtccagatatgcctgctggggcygcaagaaccaagacacgttcaagcacgtttgctccggcaagcttgggcgagcaggtcaagacctcagagttttagaaagcaggggcgaagttttcaagcacgatgggaacacctgtaggtgcaggtgcctgagggtcggccgaccacctcgcatctgaggctggatccgcacacggagaacgacaactgctcacagggacgtgcgtccggagg

SEQ ID NO: 261055 - DNA, 604 bp, Homo sapiens
tttgacctccgtggtagcgtaatgactaaatcagaactgtgccattcaatcagcttttggtgtacttctgacattactataaattcttagactcagcttctcattattatcttatattcttatgttttaaaaaccttagttcttaaagatttcttattcttatcttttcctgctacatttgattccttagagcaatcatttgttctgattaaactattaacggaattattttttctacctargttgcacagggggatggacattatttccatctggctcaccttattcaaaatactaaaactataatcaaagcccattttagataatcatctcttaattgagctgtttgtccacttcttatttcatgaaattaggaaatgttcacacattctcattaagagcagtgatgccagtgatgcagtgtggtataaggatgaaagctggtacccagagcatgggataagctagagagaactctaaggacataatttaaagccatattctgcagagaatggaaaagtccaattctccattgaggcttcagttctggaaactaatctcaacaagaatgtaccctttttcattctcaactctaggaacaagc

SEQ ID NO: 261056 - DNA, 520 bp, Homo sapiens
gtgttaaatctatggacgaatttggggagaattaatatcttaacaacattgagccttccaaccaataaactagatctatttctctattttggtccttctaaatttctttcagcaatgttctataattgtcacatattttattatgtctattcatgtttcatatttaaatgctattgcaagtagtattgttttcaaatttcartttctgattgtttattgtggagttttgtctattgaccttgtatcctaagatcttactaatctcaaatattagttgttagtattttttttcaagatttaaaattttttacatacatgaccgtattagttcgttttcatgctgctgacaaagacatacccaagactctgctgtttacaaaaggaagagatttaatggactcacagttccacatggctggggaggcctcacaatcatggcagaaggtgaaaagcacatctcacatggtgccagacaagagaagagaacttgtgcagggaaactccccctttataaaaccat

SEQ ID NO: 261057 - DNA, 550 bp, Homo sapiens
gctgttcaagtctacctactataaccttactaattatcttctcattctctcaattagtgagaatgtattgaaatttctaactgtaattgtggatttgtctatttttcctttgaagttttatcagttattgcttyatgtatggtgaagctctgctattaagtgcataagtgtttaggattatgttctcatgataaactgattcctttatcactatgaactggtcttttaaaaatctcttagttagtatttatcctgaaatatattttatctgatattaacataggccttccagatttcttttgtgttatcatagtatatcttttttccattcttttactttgaatccatttatgtctttacatttaaagtgtgtttcttgtaggcagcatatagtctctgcgtttttatctaatatgacaatctcttcccctaattggtgtctttagatcatttatgtttaatctgagtatatcattagattaagactatcattttgttttctatttgttctgttttttgttctttttctaccttgttttggattatttgt

SEQ ID NO: 261058 - DNA, 573 bp, Homo sapiens
cattactctttaacagacatacttactttgcattccttcccatacttttctttggtctataatagaaaaaaaatagaaaagaactggagttacagaaagaaaaaagccagatgtctactctttccttaaacataacccaagaaatgtgtctggaaatccctggcatcctagagagagaraaacagcaacaacaaaacccaaaacccaaccttttttgggaagagggtagggaacatactataacaacatattataagtgataacatctcaagagtatatggatctgggctgggtggcagtggctcacgcctgtaatcccaacactttgagaggccaaggtggaaggattgcttgagcccaggagttccagactagcctgggcaacatagcgagatgctgtctctacagaaaaaagaaatagagtatatgcatctaatgctaggtaagtgagtgtctttccacagccacaactcttaggttcatttttggctcccaagttcactcccaagaactaacattcctaatgctttccacaatccctaaatcagagaggatacagctgtggcccgccca

SEQ ID NO: 261059 - DNA, 606 bp, Homo sapiens
atgacagtaatggctatcattcatgatactttacatatttcactggatttaatcttctcaataccatgaagatgacatcattatccccattttatagatgaggaagctgacactttcattttcagaaaatttacctgaggttatgcagtttgtaagtggtagccccatgagacaactggtctctgaagcccatggtattaatcactataatttattgactcttccaagtgatagtgatttgcagagtccctctgagaagcctctctggttcgtgatataaatgtttccccataactctggaattataactgagaaytttggagctccgggaattggaaaatataggttgggaacaatgtaattgataatcgtttgcacacatgtaacactttcagtttttatggcacttctaaatccatcactacatttgatcctcataccagcgctgtgacaacatctccatgtccaggtgatgacactgaggctcgattgaaaggtaggaggcctgctcagtctcagatggtagaaccataacataactggagcgctccaggtctgatctgggttatcttctgcttgactctttggccattccccagaaccaat

SEQ ID NO: 261060 - DNA, 551 bp, Homo sapiens
aggaataatgcttaaggcacagagagagattgtcttgttcagttacagcaggtagctggtggtattaagacttaacttcgagcctgcacttttaatccctaacatcattgtttttagacttatgatctgtattgttacattttagatcattagttataattaattaggttttctattaattttacatggggcaaatcctctcaattaaagaataattttcttgataacaaaatatgatcttattgtggatttcctttttgtgtttccaccacaagagttttgagaattgacatctggatttttgttttgctttttttttttttcacctagcatccacttgtcattcttctgataacagtatctggattttccatgaaragtacccctctttcatcctctgttggtaggattagccaaagatctcccatgcctgatacaggactgctcagttgatatgctccacccctaaacagacacttccttaggaataaacatgtgacctgaatctatccaatgacagttaattctgagtcttttgctggaaaaagatt

SEQ ID NO: 261061 - DNA, 379 bp, Homo sapiens
acactcatgaacagcaacacacactcagcaccccttgaaggaaaagaaaaacaaatttccacatactgcatcacacctggctatgcaggtatttcctagtcagatgaggraccaggacaaaattgccagcttacggcttgtttcagtacttctaggaccaccacaaagacacacatagatacatacacatctatgtgtatgtagagaaagacccatttacaaatacaaacgtacaaatacacatatgcatatcaaaatcacttcagaattaggcacgatacaaatcataaataaatttgtatacacagtaacctacaagctggttttgccctagcatactcacaaatgtacacaaacacatacgcaaagataatactta

SEQ ID NO: 261062 - DNA, 379 bp, Homo sapiens
acactcatgaacagcaacacacactcagcaccccttgaaggaaaagaaaaacaaatttccacatactgcatcacacctggctatgcaggtatttcctagtcagatgaggaaccaggacaaaattgccagcttacggcttgtttcagtacttctaggamcaccacaaagacacacatagatacatacacatctatgtgtatgtagagaaagacccatttacaaatacaaacgtacaaatacacatatgcatatcaaaatcacttcagaattaggcacgatacaaatcataaataaatttgtatacacagtaacctacaagctggttttgccctagcatactcacaaatgtacacaaacacatacgcaaagataatactta

SEQ ID NO: 261063 - DNA, 640 bp, Homo sapiens
aatagtggcagggtaatggtgaaaggagtgttttctatagtcacacccaattttsaatcctagctctgccttttactagttgtcttacctttggcaagttacataacctctttatgtatcagtcttgtctcctgtaaaatggggataggatagtacttttataatagaacataatagtattttttttgagaattatgaggtagggtatatgatgttgttagcatagtatctagcattcagtaaacactcaataaatgctaatgattatttttaatgagttgttgcagttggggctgagatggggcatcctgagggaaggcagaagagaaggctcaggaagaaaggaatatctgtttgcagttatctatcaacatataagatgcattttttctgtaccccagcagtttcattcctagttcttattatctacttggagaaataccacatgttttcataaagttgtaggtacactgtaattattgcagcactgattgcagtgggaaaattagaaaaagtataagtgttcatcaataggggatggctagaaaacaatgggacatccataacataaaatgctctgcagtggttaaaagaatgaagtagaactgtatgcttcaacaggtaaggcttcccaagacat

SEQ ID NO: 261064 - DNA, 566 bp, Homo sapiens
cctgggctgactatgccactaattagctgtgtgtgtgtgtgtccatgggcaagtgcaatcctctctctggcctccagtttctatgtctgttcaagctgaagttcccttttgctctaattctctgtratgaaaggagacaaggaagggctgggtagtcccaaacattcaggaattaaatgtttacatttggcttaggagaccacgcactgagttcaagttctacccttgctacttattagctgtgtgtccttaggaaaataacctaattttctgatcctcagctttctcatctgtaaactggagataaactttcccactttatgggggttgttatcaagcctaaattaggtgatagatacagaagtgctctgttcactgcctggtatgtagtagcatataataagttcttcaagaataagttgcttttcttgttattatactaatagcagtttcccaaagccactttgagtgacaagaaaagaggcttgaatgggagagtcgtccaaaagttttggtaggtggaatccagagggaaaagaagctgaagggaggggaatctttgagca

SEQ ID NO: 261065 - DNA, 566 bp, Homo sapiens
cctgggctgactatgccactaattagctgtgtgtgtgtgtgtccatgggcaagtgcaatcctctctctggcctccagtttctatgtctgttcaagctgaagttcccttttgctctaattctctgtaatgaaaggagacaaggaagggctgggtagtcccaaacattcaggaattaaatgtttacatttggcttaggagaycacgcactgagttcaagttctacccttgctacttattagctgtgtgtccttaggaaaataacctaattttctgatcctcagctttctcatctgtaaactggagataaactttcccactttatgggggttgttatcaagcctaaattaggtgatagatacagaagtgctctgttcactgcctggtatgtagtagcatataataagttcttcaagaataagttgcttttcttgttattatactaatagcagtttcccaaagccactttgagtgacaagaaaagaggcttgaatgggagagtcgtccaaaagttttggtaggtggaatccagagggaaaagaagctgaagggaggggaatctttgagca

SEQ ID NO: 261066 - DNA, 590 bp, Homo sapiens
cttggtaatgtgtaaagaacagaaatttattttcacacacttgtaaaggctgtgaagtctaagatcaaggggctggcaggttctgttgtctgatgagggtctggtttctgctgccaagatggcaccttgaatggtgcatcttccagtggggaggaacactgtgtcctcacatggcaaaaaagtggaggggcaaaaaggggccaaactctgtcaagctttttcattttatttttaaatcatttttcaagccccaaatcaaatgcatttttaaaatgaaacatatacaaaatactagttttaatgttgacaataaaatgatataattaatcctccaccttaaggcatctctttgtcaagaccacaagtctccactccatcaagcccttttataatgacattagtctattaatgagggctctgcctttcaatactattgcattggggattaagttttcagtacatgaattttggaggacacatkcagacgatagcattccatcctcggcccccaaaattcatgcccttctcacatgcaaaatacatttatttcatcccaatagctcctcaaagtcttaacttgttctagcatc

SEQ ID NO: 261067 - DNA, 526 bp, Homo sapiens
gatatccatttatatattataaattggttcactytttccattaatttttcttgagaaactgtatggaatcagacactgaactcagtactatgaggaatatggagaagaaatggacaggaatcatgtcttcaagaaggtttcagtttaggaagaagctaatacatgccactttctactttgctttgtaaatatttataatgagtcacagataaaaggctaacagagggattctgggaggacttcagggaggagatgatattggccttaagagatggacaggaggtggatatgtagggtgggcaatggggaaagagagcctgcaaatggcatcaactctacttgtagaaattcaggagtaggtcagatttgcccaagtaaaggtagagaggcatgtgaagaataaataggaatggtaagtagaatcatttagcgcaataaaatggtgcaatagaggatgtgatctcatagttctcagttgtcagaattttcttcattaaggagggagagatttgttaacacctaagag

SEQ ID NO: 261068 - DNA, 526 bp, Homo sapiens
gatatccatttatatattataaattggttcacttkttccattaatttttcttgagaaactgtatggaatcagacactgaactcagtactatgaggaatatggagaagaaatggacaggaatcatgtcttcaagaaggtttcagtttaggaagaagctaatacatgccactttctactttgctttgtaaatatttataatgagtcacagataaaaggctaacagagggattctgggaggacttcagggaggagatgatattggccttaagagatggacaggaggtggatatgtagggtgggcaatggggaaagagagcctgcaaatggcatcaactctacttgtagaaattcaggagtaggtcagatttgcccaagtaaaggtagagaggcatgtgaagaataaataggaatggtaagtagaatcatttagcgcaataaaatggtgcaatagaggatgtgatctcatagttctcagttgtcagaattttcttcattaaggagggagagatttgttaacacctaagag

SEQ ID NO: 261069 - DNA, 526 bp, Homo sapiens
gatatccatttatatattataaattggttcactttttccattawtttttcttgagaaactgtatggaatcagacactgaactcagtactatgaggaatatggagaagaaatggacaggaatcatgtcttcaagaaggtttcagtttaggaagaagctaatacatgccactttctactttgctttgtaaatatttataatgagtcacagataaaaggctaacagagggattctgggaggacttcagggaggagatgatattggccttaagagatggacaggaggtggatatgtagggtgggcaatggggaaagagagcctgcaaatggcatcaactctacttgtagaaattcaggagtaggtcagatttgcccaagtaaaggtagagaggcatgtgaagaataaataggaatggtaagtagaatcatttagcgcaataaaatggtgcaatagaggatgtgatctcatagttctcagttgtcagaattttcttcattaaggagggagagatttgttaacacctaagag

SEQ ID NO: 261070 - DNA, 598 bp, Homo sapiens
acatgagatggttacgttagcactaaggacaataaatagcacatttcctaaatgtgtggtacagaagcaaagcagcatgttaggattaaacatttcaggaaggctgcacgaaggggagatgggatttgctagaagaaagggaaggatggtgaggctgacagcagaggcaaaggcacagagatggggaaggggcagctgcatgtgagccaggatgaacactaaggcagggtgaccgaaagtaaagygcgtgtctgcctgctggcacttccaccgggattctgggtagcatatagacttggtattaaatgatgtagaattgtgttgtgagaaaagttattttcttttcaattctcttttaattcatctgattatgtcagggagaaagactcatgtgtgcgctaatatattttttaaagcctcaatattcctctcaacctttttttttaagcaaaaaatgcaagtttttggttcagagacatcatcaagtaacagtgtctcttaaatttaataactttggcttgttcttgtatttattttgaggtttccttctatttatggcaagtgatataatttttccatttgtatagtaatgtgaggt

SEQ ID NO: 261071 - DNA, 598 bp, Homo sapiens
acatgagatggttacgttagcactaaggacaataaatagcacatttcctaaatgtgtggtacagaagcaaagcagcatgttaggattaaacatttcaggaaggctgcacgaaggggagatgggatttgctagaagaaagggaaggatggtgaggctgacagcagaggcaaaggcacagagatggggaaggggcagctgcatgtgagccaggatgaacactaaggcagggtgaccgaaagtaaagcgcgtgtctgcctgctggcacttccaccrggattctgggtagcatatagacttggtattaaatgatgtagaattgtgttgtgagaaaagttattttcttttcaattctcttttaattcatctgattatgtcagggagaaagactcatgtgtgcgctaatatattttttaaagcctcaatattcctctcaacctttttttttaagcaaaaaatgcaagtttttggttcagagacatcatcaagtaacagtgtctcttaaatttaataactttggcttgttcttgtatttattttgaggtttccttctatttatggcaagtgatataatttttccatttgtatagtaatgtgaggt

SEQ ID NO: 261072 - DNA, 527 bp, Homo sapiens
caagtgatcctcctacttcagcctctcgagtagctgggactagaggagtgcgcaataatgcttggcttggttttgccatgttgcccaggctggtcccaaactcctgagctcaagtcacctgcccgcctcagcctcccaaagtgctagggttacaggcttgagccacctcacccgacctctctgccattttatatcaaggccttgagcatctgtggattggattttatatctgagggaggtcctagaaccaatcccctgtggttactgagggaaggctccattttgacagaactgacaagactggctgatggattaaatgtagattgataatgaggaatcaagaatgaattttagattttttwaatctaaacaattagacagatgatggtatcattatttaagatgaggaaaatggggggtgggctggcttttatttattcatttgtttgaaggtagatttaagatttctttgggggcatattcagggtcctttgaagtatttatttattttggattaaacacctaga

SEQ ID NO: 261073 - DNA, 605 bp, Homo sapiens
catgtttgctattattatctccatttgatggatgaagaaactgagaatcagacttgtctgatgctgccagagctggactagagcccggatctcctgatttccagctggctctggccgttccagcccgtggaatcagcatcattgcatctcccctcacagtaaggacagggccrctggggtgaagatacttttaagttggcagggaaaataagccttattattttatttttttttccaaatcaggatttacttcagggtcattaaaacgctgctatggtttgtaagatttgttggagtttctaagtatattttagttgctaaaccttgcttgaggctctagggcaaaggtgtttggggtcctttgttttaaacaagatgaataaacaaggaggagcatgataatcaatgaagaggttggactggctgggtgctgtggtcctttaagcacagacactttgagtcttactgctcatccgtcacttcccatcacaaacctggtgggaaattggctaagtacccaagccatacctctatgccttctagatttgtattcccctaaccttccaaggaagaaagtggatcttggggcaaggtggcaagatggc

SEQ ID NO: 261074 - DNA, 575 bp, Homo sapiens
acttttggggttacaaggaaaagaaatgcagcttgaactggtcaaaaaagaagaaaaattatttgccattaccatgaaaagataaagggctaaacttcaggmttggtgaaatctaggtgctccagtactgttatccatcatctgattcctgtgagtacaggatcttccttcctttgtgttggcttttctcagacaaattttcctgcaggggtagctaagttggaaatatttacttcaggttggtatgtgagcagctccaacagaaagtaagcacctgtttcccaatagttacaacattaagtccaggggtaggttctttttgacctggcctggattgcatgctcatccctaagccactctcaaaggtcagtgggtgaactatgtggatggctcaaggtctggctggtaagagggatcgcccctgtttaaaccatacgaatggaaaatagacgattcccaaggaaaatggagctgctgttgctggaagctataatacatgctggggaggcaagaatgacagacccaacaggggccccatgaattccaattcagaatctcatctgccaaacagataa

SEQ ID NO: 261075 - DNA, 561 bp, Homo sapiens
ccactctcaaaggtcagtgggtgaactatgtggatggctcaaggtctggctggtaagagggatcgcccctgtttaaaccatacgaatggaaaatagacgattcccaaggaaaatggagctgctgttgctggaagctataatacatgctggggaggcaagaatgacagacccaacaggggccccatgaattccaattcagaatctcatctgccaaacagataaacgctgcatctcccttcactcattgattccccagaggtggtcagaacggggacrtgtacagtctgacaatgcacagaaggcagaaacaatgctttccatattactacggcttcaaacctgggtaatatggacattaagccaggtacagaaacttctgaaaccaagagttgggtagtttggcttttcgtgcatgttgggggaagatggaggtaaatggcactgaggtggttttactcagctcttctccaaagcagacatttcttaaatcttccaaacgcttgtcagtttccttagaaagcattttatgacattatcatagattgtcagagctggaaggca

SEQ ID NO: 261076 - DNA, 520 bp, Homo sapiens
tgatatacactgaatgtatccatttcttgccatgcccagcacctccctggtcaaatctggcactatctcttggctagactgctacaacagtctccaggctagttaccctacagttactctagcctctttcaggccagtcagagggatttttttggggtaggtaatgatcctgtgtccagcccctactacccagtcttacasctgaatatctctttagtggtttctccttcattttaggattaaaacatgttcaaggacatggcctataagacctatcaggatctgggccctggctctccctgaggctcattttccattatgctgtctcttgtgttttctctgctcagacttactgatcatcttattgaacttcctgctcaccatgtttcaatcataggtgctttgttcatggtcgtatctctgcctggagtggtttttccatcccatcttctacctaaaccgcacctactcctcctgcagatcttagattaagccttccctgacctctacaactagttca

SEQ ID NO: 261077 - DNA, 536 bp, Homo sapiens
gattcattgggaaatggctctgagccttctgagaaccttaagaaacatattcttttttactcctggctggtcatgcataagacttagaaacgaatgataacagaatatattttctgtccctctttgacatcacctgagtttcagtaaaatgtaatcttctatgggtggaagagagtttatagagccggycaagtctgatcgccacctgtgtcttccaccaacccagatgtatgtccctacctgcttattaacttttgatgagaaacgttccgggaagaacctgcatccatatgtccccttgatttatgtcttcctctgcattctcactgctaccatcatgagacccttgccacctcaagcactggtcctgtttggagtattcataatattcggggtagagcatcagttctccctgagctgatttatttctcatctcaatattattagtcttccttattcagagaagctcaagggactacagtagttccctgttacctgcaacatcaacatgaggcttttctccagggtcttcaagt

SEQ ID NO: 261078 - DNA, 448 bp, Homo sapiens
tggttctgaaacttttctctgcctggtgccctgtgcctgaacccctgcctggattacctgcctctacctgaatttcccacagggctggtggtagccttttgcttactggttcctctatcttgtatcacactcaacacacagctctgcttgcggtarctcctaggcaaaggctggttcactgatcatgctgagagctccaagattaactttgcttctttgtcagtcttatcttctggtacatgggatttttaccaagcagctcaagttgactttgtagctttcactccccaggttgggcagcactgagtggatgctaggagtgctgactacttggctgggcaaaacaaaacctgctgtctccagctcaggcccactaatcaagaggtccgtgggcctcttgattgtccactgatgagaactagctttgagaatatgggattgaatcttc

SEQ ID NO: 261079 - DNA, 561 bp, Homo sapiens
ggatgtcacacagacacaaagaaccaaagggaaatgtttgtagaaatgaagcattggcaagcaacatgagttgctgcaagttgcaggcactgcactgcatggaggaaaaggatggcacagatgaaccagaggcagctgggtcagtttgtttttgcactccccaaattgttattgaatgttcccaggtgcccaagccctgtgccaatgcctggagtctgggcagagcagagagagatggcagtccctcctctcatcgtgattgtaaagtggagggagagacagatattaagcaaataatcgtggtaaaaaattatataaactttgataattgtgccaaaggaataggatgtgatcctgtgagaacaagtaatatggaaactccccaagactgtgtgcaatggggaaagtggaggggtaggggtgtgtgtgtgtgtgtraggagtgagcaacctttcctgagaacgtgagctaaaacctaaaggatgagctgaagctaactagatggatgaaggcctgaggaaaagcaagagttccaagtagagggaacagcatgttaaaaag

SEQ ID NO: 261080 - DNA, 561 bp, Homo sapiens
ggatgtcacacagacacaaagaaccaaagggaaatgtttgtagaaatgaagcattggcaagcaacatgagttgctgcaagttgcaggcactgcactgcatggaggaaaaggatggcacagatgaaccagaggcagctgggtcagtttgtttttgcactccccaaattgttattgaatgttcccaggtgcccaagccctgtgccaatgcctggagtctgggcagagcagagagagatggcagtccctcctctcatcgtgattgtaaagtggagggagagacagatattaagcaaataatcgtggtaaaaaattatataaactttgataattgtgccaaaggaataggatgtgatcctgtgagaacaagtaatatggaaactccccaagactgtgtgcaatggggaaagtggaggggtaggggtgtgtgtgtgtgtgtgaggagtgagcaacctttcctgagaacgtgagctaaaacctaaaggatgagctgaagctaactagatggatgaaggcmtgaggaaaagcaagagttccaagtagagggaacagcatgttaaaaag

SEQ ID NO: 261081 - DNA, 574 bp, Homo sapiens
tgaccttttggtgctttcttttttccctgcatataaggacaaaggccacagccatcctcagcaggtcacgaacttcaagaaggaagaattgtaatagcaattgtgaactkcttaggcttcctccaaaggaaagggtgaggtaaatggaaggcattgtacagttattatgtgatatcacatatattagtttttctctccaaatcattgcctagggctctgttttgaaattggtttttaccctccttgctcttattgcagccttcgatgttcccattccatatttaacttttctgcaattcagcacctgctctgttagcacacttcccttccaggcttttagcgtgaagcacctgcatttagatcagcctaagctgtgtgggatcagggtgtactcacagcccaaacttctagaacttcctctcattccaaggagggtgagggccaaggaacctggaccccagaaagactgcttctcctgccctatttagtgtagtgattgagagtatgaattctggtttgagccatagctctgccacttacctgctgtgtgacctcaggtaagtaccttaaactc

SEQ ID NO: 261082 - DNA, 448 bp, Homo sapiens
taacttttctgcaattcagcacctgctctgttagcacacttcccttccaggcttttagcgtgaagcacctgcatttagatcagcctaagctgtgtgggatcagggtgtactcacagcccaaacttctagaacttcctctcattccaaggagggtgagggccaaggaacctggaccccagaaagactgcttctcctgccctatttagtgtagtgattgagagtatgaattctggtttgagccatagctctgccacttacctgctgtgtgacctcaggtaagtaccttaaactctctgtaccttagttcccttatctgtaaaaygaaagccacagtagcacccacctcatagggctgtgagaagaactaaatgagttaatgcatgtaaaacacttagagcaatgtctggcatataataagtgccctgaaagtattagtaatgttgatttt

SEQ ID NO: 261083 - DNA, 607 bp, Homo sapiens
cctactatacatatccttttgcagtctcccttttgcattgaacattatttttgagatttattcacactggtatgtgtagatctagtatatattcattttatccgccatatagtgttttattcatctatctctgattgatgggtttttctttttctttttttctaccgtgagccctgcagcagtgagcattcttgtgcaaaccttggggagtatacgcaggagtggaatcacatcagggagaaggacaggcaaaacaaagtcatagcccaacaactttcccaccatgcagagctagcaggtgattaaacccaggaaatccctggcaggactgatcaaacagggtttagcagcttgtgaaatgggactttatttctttagctaatcccttgttggggagggggagggagatctgagatctgacttcagcatgatctggaggtaggcgagcccagactayttaaaatatttgctgatcacagagatgggccttttgagtgacaagagaatggcagagtgtacctttactcccctttctttgagtcatgccataaacagcatttactctgctttggaaaaatgcaggggtaagaaaaagcatagagtttgg

SEQ ID NO: 261084 - DNA, 514 bp, Homo sapiens
ttacatttattattttattttaccattattttacatatatgtgtatatctaaatgtataggcatatatgccatgaactcaggttacaagaacataactttattttcctaaaactgaatctactttccttcttgaagtctattccatcagaaggcataacatggattctcattactgccagaggaactcagtcatttcagttatttgggacttacaggcttaaactcagacaaattcaggatttccctstttccttcctttcccctggagttgatgtggcaagatggcggcatcctcagacaggcatatttgccacgacctgggctttgtcgtcagtacccgtggtgcttggctggtgggaccatgctgggctgtcacttggtcctgtctttcactgcatgtggctttctcatttctgctgccctcagaatggcatagaggttgatatgaggggttttctgtcctcccagaactccagagaaattgggagacgagaagggtggtaaggaaagggg

SEQ ID NO: 261085 - DNA, 584 bp, Homo sapiens
cgttcaatgcatgtcaataaattcattacatttattattttattttaccattattttacatatatgtgtatatctaaatgtataggcatatatgccatgaactcaggttacaagaacataactttattttcctaaaactgaatctactttccttcttgaagtctattccatcagaaggcataacatggattctcattactgccagaggaactcagtcatttcagttatttgggacttacaggcttaaactcagacaaattcaggatttccctctttccttcctttcccctggagttgatgtggcaagatggcggcatcctcagacaggcatatttgccacgacctgggctttgtcgtcartacccgtggtgcttggctggtgggaccatgctgggctgtcacttggtcctgtctttcactgcatgtggctttctcatttctgctgccctcagaatggcatagaggttgatatgaggggttttctgtcctcccagaactccagagaaattgggagacgagaagggtggtaaggaaaggggcatagggcccgttataagtgtctgaagtctttccttttctttcaa

SEQ ID NO: 261086 - DNA, 584 bp, Homo sapiens
cgttcaatgcatgtcaataaattcattacatttattattttattttaccattattttacatatatgtgtatatctaaatgtataggcatatatgccatgaactcaggttacaagaacataactttattttcctaaaactgaatctactttccttcttgaagtctattccatcagaaggcataacatggattctcattactgccagaggaactcagtcatttcagttatttgggacttacaggcttaaactcagacaaattcaggatttccctctttccttcctttcccctggagttgatgtggcaagatggcggcatcctcagacaggcatatttgccacgacctgggctttgtcgtcagtacccrtggtgcttggctggtgggaccatgctgggctgtcacttggtcctgtctttcactgcatgtggctttctcatttctgctgccctcagaatggcatagaggttgatatgaggggttttctgtcctcccagaactccagagaaattgggagacgagaagggtggtaaggaaaggggcatagggcccgttataagtgtctgaagtctttccttttctttcaa

SEQ ID NO: 261087 - DNA, 469 bp, Homo sapiens
gggaagcagcatgatggaggcagtgaagagcactggctctggagtcaggcagcmtgggtttgagtcttgtctgcattacttaccagctttgtgatgataggtaacctaaattctctgtgcttcaatttcctcctcagttaacatgaacgtaataatagtcgtctgttaggtatgatgtgaggaggactcacacagtgcctggcacacttgttgccggataaatgtttgcaatgatgagaatgatgctgccctgcactgccaatgatgggctctctgaatactagtgtgcctttgatacccataaacccagcaaaactatgctgcttgcatctttccttccagctcctgcctcaatttctattcaaggtgggcatctcattgcatcacagaacatcacagcagttaagcaaggaggtttctctcatctaatactttatctgttctttcaactactgatcagaaggaatct

SEQ ID NO: 261088 - DNA, 534 bp, Homo sapiens
gggtgcgttggctccaccctttatgcaagtccctgtttgtcagtatattctagcttagtggttctcatatttgaatgtgcctcagaataacttggagcacttgttaaacacacatagctgagctccactcctggagtttctggttcttgggcgagaaggtgagaatgtgcgtctctactaaattcccatggcatggcctgggactatacttggagcgacacttccttcgccacatgaccttccctttgttgttcgaatgtcagtcttgtttctacctcaaggcatttgcattgaggcacttagcgggtgtgtaccctctgtctgatcttggcctggctgccacttgtcatcatgtttttagggaggcctcccctgagcatccttatttatgttgctcccgtcttcccaggcactcaatgtcactgcacttggttttgttcccttcttgggcctttgccactctttgaaattatctctataggattgtctcaggggtggctgtgrttgaagagatactaacagacccaggcaaag

SEQ ID NO: 261089 - DNA, 545 bp, Homo sapiens
tacttacacctagctggctgcaggccatcacgttgctggctgggcctttcgggcatcgagtgtacaagcccttgccttcaacatatgcatggaatggttttccattttgattggagcctagagaacatgcagcagagtagtgggaaagaaaactggacaggcattggaactttattttgtagacacaaggaagccactgagggacctggcactcttaactaacgttttagtgccctgtcctagagcagctgcctcctgttcatttcagtgttctctccttttgctatgttttctctttgtcatctctgctcccagtgkggagtgttttcaaaagactaggcagatgtttacatctcctttttaatgaaggcactgtggctcttccctccctctgaggacatcttgtaacttgctctcctgttgtaagaagagaacccttgtttcttccgagggtctacctccctgggtggaaaggagggcaaacagaccaggaagagttttctacactattagctagttgattctttaggacacaggaaggagaa

SEQ ID NO: 261090 - DNA, 611 bp, Homo sapiens
atttttttgtcagctttattgagacataatttaatgtggtaaaatcaattttaagtatacagttcaacgagtttagacaaatgtataaagtcttataaccactaccccaatcataatatagaacattccaacacctccaaaagatccctcttttattttcagtgaattccttacctcttccccgacccctagcaaccagcaacctgctttttaatcactataatttgcattttctagaatttcatataaattaaatcacacagtaagtagtttttttgtatctggcrtctttcacttaccatgatgcttttgagattcattcacgctgctgcatgtgtgggtagttttttcatttttatggctcagtaattatctgttgtatgaagatgctataatatgtttactcatttacctgttgaaggacaggaatttatgactaaagctgctatgagcattgacatataaatatttgtgtagatatgcgtttttatttctcttaggtaaatacctaggagtgggatttctaagtcatatggtaagtatatgtttaactttatcagaaactgccaaactgttttgtaaagtgcctgaaaaattgcatcctcatctgc

SEQ ID NO: 261091 - DNA, 594 bp, Homo sapiens
ctttaattaactctcctgaccaggttagaccttcccaaagaactttattatttggttctgctccatcccccattaatttattcatgcattcatgtattcacgtatgcaagcaacccaatgtttgagcatttactatgtgccaggtacatgctaggtactggggatatagtcattaataggatagacagctctcagcaccttgaaagtggttatagtcccgtgtcccagagaaaaagtctggggagtaggatcacctgctgatatggtttggatttatgtcgctgcccaaatctcgtcgaattgtaactaccagtgttggaggaggggtttgatgggaggtggttgatcatgggggtagatttcccccttgcttttctcatgatagtaagttctcatgagatctggctatttaaargtgtgtagcacctcccccttcaccttcttcctccttctccaaccatgtaagacgtgcctgcttcccctccactttctgccatgattgtaagtttccagaggcctccgtagccatgcttctcatacagcctatggaactgtgagtcagttgaacctcttttctttataaattacccagtc

SEQ ID NO: 261092 - DNA, 576 bp, Homo sapiens
ccagtcctattcagttaggacctcatccttatggtttcatttaacttcagttacctcttaaagaccctatcacctaatagtcattttgggggttaggacttcaacatgtggattttggggagacacgactcagtccatagcattgtccatgatgtctgtrcatgcctcagggcaaccatatacatagctgggctgctccagtacacctagctcagggctctgcccccagtgggcactctttaggtttgttgacacatgcgcttcttagattagaactgctccttgccctgtgtcttgagataagctgagggcatcccaatggcctccatccctagcattccatttgaattagtggaaatttcagctaccactttgtgaatggttccaggtgtgcaggcatggggagaccaagatagctggaaagccaagcttaaatgttaaatcaagcttggggtggagggcagttatcatcacctaaggatctaggaatagggaatagtaccatcatgggatgactcaggcctgttaaaaacagggggataggcctatgtcttgatgaatcaagtggcatgccaa

SEQ ID NO: 261093 - DNA, 576 bp, Homo sapiens
ccagtcctattcagttaggacctcatccttatggtttcatttaacttcagttacctcttaaagaccctatcacctaatagtcattttgggggttaggacttcaacatgtggattttggggagacacgactcagtccatagcattgtccatgatgtctgtgcatgcctcagggcaaccatatacatagctgggctgctccagtrcacctagctcagggctctgcccccagtgggcactctttaggtttgttgacacatgcgcttcttagattagaactgctccttgccctgtgtcttgagataagctgagggcatcccaatggcctccatccctagcattccatttgaattagtggaaatttcagctaccactttgtgaatggttccaggtgtgcaggcatggggagaccaagatagctggaaagccaagcttaaatgttaaatcaagcttggggtggagggcagttatcatcacctaaggatctaggaatagggaatagtaccatcatgggatgactcaggcctgttaaaaacagggggataggcctatgtcttgatgaatcaagtggcatgccaa

SEQ ID NO: 261094 - DNA, 572 bp, Homo sapiens
aaaggtagatttttttttttcagttctgtaagtaattacagttttgaagttgaataagaaagtagggaacttgtctaaatagagttatattaacaatgggaataagaaaggaagcctagaatttgtacccatcrtacattttctttaaatttttctttatttgtattcctttcttcagaacaacttccagtaaaagaaggcactgaggtttaagtgctacgtgggagcagttgccgatttttgcaatgggaggctgcatagattcaaggtatcacttgtttattttatatcctgaattaactttccaccttcccagtccaaagttctaacaaaagatttcacttggactagagagcaaatgattttgtgactctcatccaaaatcccacagctttttctctgaagacctgtaagttcctaagacactctaaaaggaatataaaaataataattgtaattcttaaggagtgccaattacatactggattccagagagtaataactttgcttaaggtttacgtgaagctttccctctgtgtgttaccagaacttggctaacattatatgctggc

SEQ ID NO: 261095 - DNA, 492 bp, Homo sapiens
taatgtgtggtaagatgtgagaaatggttacagtgtttgccacattcttcatatttgtagggctagtttccattatgaattatcttatgttcagtaaggtttgaggacgttaaaagctttgcaacattcttcacgtttgtagggtttctcttcagtataaattgtttattaagaattgaagaattaggctgggcacggtggctcacgcctttaatcccagcactttgggaggccgaggygggcagatcaccagaggtcgggagttcgagaccagcttgaccaacatggagaaaccccgtctctactaaaaatacaaaattaggtgggcgtggtggcacatgcctatagtccctgctactcgggaggctgaggcaggagaatcgcttgaaaacccaggaggcggaggttgcagtgagccgagattgtgccactgcactccagagcctgggcaactagggcgaaactctgtttcaaaaaaaaaaaaaaaaaaaa

SEQ ID NO: 261096 - DNA, 492 bp, Homo sapiens
taatgtgtggtaagatgtgagaaatggttacagtgtttgccacattcttcatatttgtagggctagtttccattatgaattatcttatgttcagtaaggtttgaggacgttaaaagctttgcaacattcttcacgtttgtagggtttctcttcagtataaattgtttattaagaattgaagaattaggctgggcacggtggctcacgcctttaatcccagcactttgggaggccgaggcgggcagatcaccagaggtcgggagttcgagaccagcttgaccaacatggagaaaccccgtctctactaaaaatacaaaattaggtgggcgtggtggcacatgcctatagtccctgctactcgggaggctgaggcaggagaatcgcttgaaaacccaggaggcrgaggttgcagtgagccgagattgtgccactgcactccagagcctgggcaactagggcgaaactctgtttcaaaaaaaaaaaaaaaaaaaa

SEQ ID NO: 261097 - DNA, 492 bp, Homo sapiens
taatgtgtggtaagatgtgagaaatggttacagtgtttgccacattcttcatatttgtagggctagtttccattatgaattatcttatgttcagtaaggtttgaggacgttaaaagctttgcaacattcttcacgtttgtagggtttctcttcagtataaattgtttattaagaattgaagaattaggctgggcacggtggctcacgcctttaatcccagcactttgggaggccgaggcgggcagatcaccagaggtcgggagttcgagaccagcttgaccaacatggagaaaccccgtctctactaaaaatacaaaattaggtgggcgtggtggcacatgcctatagtccctgctactcgggaggctgaggcaggagaatcgcttgaaaacccaggaggcggaggttgcagtgagccgagattstgccactgcactccagagcctgggcaactagggcgaaactctgtttcaaaaaaaaaaaaaaaaaaaa

SEQ ID NO: 261098 - DNA, 565 bp, Homo sapiens
ggaatctgaaatcatttaggaagttatatcacctaaaatctgccattgacttggtgctgcatacagaggtgtgtcttggggacacctttaaacagaatgagcaagaagtggctataatcaggtgtttctgattcaaatctgtggacctcaatctgcaccctgctaaataaaagaaggcacaatggtaaggaagacagaaatttttcaggattccaacaatattctgtgataaatagaccattcctcctatccctggaggccactctgccagttcctagtgattgacattcgtcttgagagccagaagatcctgcagaaaacacgaggtgtagattgcattaatgacataactgaaaaacagtattctaccgaaaaatgttgaaagttttgttttgctgagagactttctagggttgaatgtataacatttaaatagcacttacaatataggaatcgtgcctatcatgtggtatgtatggtaccttctttgatttttstaactgtatgatggattcactggcataattttccttgtagagacaagaagaacttagatacagagagg

SEQ ID NO: 261099 - DNA, 408 bp, Homo sapiens
ggtgtttcattgccactttaattttaatcattatgggattgattgctgtcacagctactgccacggtagctggagttactttgcattccacagtacaaagagcagactacgtaaataattggcagaaaaattctactttgcagtggaattcccaaactaacacagaytgaaaactagctaatcaaatcaatgatctccgataaactgtaatgcggctaggagatcaagtagttagtctagaatatagaatgcagatacaatgtgattggaatacttctgatttttgcattactcctcatctgtataatgaaacagagcatgagtaggaaagagttaagagacatttaaagggtcatactggaaatttatctttagatattacaaaactgaaggaacaagtattccaag

SEQ ID NO: 261100 - DNA, 408 bp, Homo sapiens
ggtgtttcattgccactttaattttaatcattatgggattgattgctgtcacagctactgccacggtagctggagttactttgcattccacagtacaaagagcagactacgtaaataattggcagaaaaattctactttgcagtggaattcccaaactaacacagacygaaaactagctaatcaaatcaatgatctccgataaactgtaatgcggctaggagatcaagtagttagtctagaatatagaatgcagatacaatgtgattggaatacttctgatttttgcattactcctcatctgtataatgaaacagagcatgagtaggaaagagttaagagacatttaaagggtcatactggaaatttatctttagatattacaaaactgaaggaacaagtattccaag

SEQ ID NO: 261101 - DNA, 353 bp, Homo sapiens
gcttgttcaaaatgcagattctcaggcctcacttctgacctgtggtgccagaatctgcattttaacaagactcccaggtgatttacctgtgcgttatagtttgcaaactcttgtctttttwaaaaaaattctctgttgttattgttttttggtagagtcagggtctcactatgttgtccaggctggtctctaaactcctgagctcaagtgatccttccacctcggcttcccaaagtgctgggattacaggtgggagccactgcacctggactcaaactactatcttaaacctcacgggggccgggcacagtggcacaaacctgtaatctcaacactttgggaggccaagttga

SEQ ID NO: 261102 - DNA, 603 bp, Homo sapiens
tttggaggtacctggtatcttagttaagtaaatgatagaatgacagctgaagaaagggacaaattccctactggtcagcaagccatccccagtatggatccccactgggacttcaattcagatcatggggactggagtcataaacatctgttgacctatgttctagaaggactaaggataattaggaagaagcccatgaattattcactgatgtccaccataactcagggaaaggaagaaaatccttctgccttcctcgagtggctacagaaggccttaagaaaatatactcccctgtcacccaaatcactcaagggtcaattgatcctaaaagataagtttattatccaatcagccacagatatcaggagaaagctccaaaagtgagccctgygccctgaacaaaatctagaggcattattaaacctggcaacctcactgttctataacagggaccaagaggaacaggcccaaaaggaaaagtgagatcagagaaaggccgcagacttagtcatggccctcagacaaacaaaccttggtggttcagagaggacagaaaatggagcaggccaatcatccagtatggcttgttagcagtgtggt

SEQ ID NO: 261103 - DNA, 572 bp, Homo sapiens
ttgattggttgggctttggtcatgtgtccatctttgggccaattgcagggtctgcagctrgggtactgtgattggctcagccagaatcacatgattacctctgtggcccagaggccagcatatgccaggagaatccctcatccagggttatgtgagttgggtggagggtgtccccaagagatgtcaggctgctgttctgggcagaccaaattcaccattcaaggtcttggtttctggcttggtgccttctccctgacctctgcttcttgactcttcaatgagcagaaagaactaagggaactggctgggcatggtggctcacacgtgtaatcccagcactttgagaggccaaggagggaggattgcttgagctcagtaatctgagaccagcctgggtaacagtgagaccccatctctatgaacaaaacaaaacaaaaacaaaaaaccaaggggtctgatatttcccccacttcccagagtgctgttgctcttctgtatatatgatgatcctttatctttcttgttgggtattagagatgtgcagtttgccagaaacaaagcagatgaggtct

SEQ ID NO: 261104 - DNA, 468 bp, Homo sapiens
aagtcccagtggtccctggtcacaacaggccattcccttggctctaggtcgaggcaaaagaaaaatgtcatgcaatccagaagctgtcacaccacttgctcatgattcaaagaagtagttctgcccaggtgtggtggctcatgcctgtaattccagcactttgggaggctgaagcgggcagatcattcaaggtcaggattttgagaccggcctggccaacatggagaaaccccatctctactgaaaatacaaaattagcctggcatggggtggcacatgccagctactcaggaggctgaggtgagaggaccacttgagcctgggagattgaggtggcagtgagttgtgatcacaccactgcactccagcctgagcaacagagcaagaccctatcagaaaaaaaaaaaaaacttayatttttaagcctctaaacatggaaggtttttgttacacagcaaaaggtaactg

SEQ ID NO: 261105 - DNA, 560 bp, Homo sapiens
aagcatgtgtggatatttctcagcaaagatcgcgacttctagggaacctctctagaaggcacagtgtgttttaggggagacaccaaccccaagaatrtctctgccagtgccacctggttttgcccacaattcaaagctttcctgggagccggatgaggggcaatggaaccagcagatgcaggggtaaaatctattccttcattgataattctcagagcaattctattccagggtcctaaatcagatgaggtgcccaggctgggcatggtggctcatgcctgtaatcccagcactttgggaggcagaggtgggcggatcacctgagctcaggagttccagatgagcagcccagagagagggaagacagggaggagcctcctgcatgccttggtggctctggaatccaccagggactatagactgtgcatggtcctccaggcagtggtagccagcatggttcatgctccagttctagttctgctgggaacatgccatgccatacctagcctccagcgtggacagactgggctgctttgtagcaaatatcaagtgaacaagga

SEQ ID NO: 261106 - DNA, 503 bp, Homo sapiens
gggagcctcgagccataccgagttgtcaggacgggagccctgtgctcccaggcgcagctgcagccacctagtcgtggctccagacagggcatccctgcactcttggggacctgggaagcacccttttcccacaggcccagaagtgcctgctcccactccctggcctctccccactctcagcacctgctccayggcagagcaaagttgtggacatgtcaagatagccaaacctgggcgctatcacaacccagccaaatgtgtgtgccctcggggcagtgacgacatgccagccccccaccatctcgatttcctccagaaactgcttttgaggctgaaactttgggcaccaagaagcatgggaaggaggccgggtggtgggaggggggcggctgagagtggctcggggcaggcctgcgggcaaccttcagcatggacagcctgggcgtcatggacagcatgttgatggccatgaaaggcagacaggttcctacgtgggaaggggt

SEQ ID NO: 261107 - DNA, 503 bp, Homo sapiens
gggagcctcgagccataccgagttgtcaggacgggagccctgtgctcccaggcgcagctgcagccacctagtcgtggctccagacagggcatccctgcactcttggggacctgggaagcacccttttcccacaggcccagaagtgcctgctcccactccctggcctctccccactctcagcacctgctccacggcagagcaaagttgtggacatgtcaagatagccaaacctgggcgctatcacaacccagccaaatgtgtgtgccctcggggcagtgacgacatgccagccccccaccatctcgatttcctccagaaactgcttttgaggctgaaactttgggcaccaagaagcatgggaaggaggccgggtggkgggaggggggcggctgagagtggctcggggcaggcctgcgggcaaccttcagcatggacagcctgggcgtcatggacagcatgttgatggccatgaaaggcagacaggttcctacgtgggaaggggt

SEQ ID NO: 261108 - DNA, 511 bp, Homo sapiens
ttctggggtgctagttgagttggtctcccctgtgtgagacacccatgggaagccatgggcggcctctgaggagaaaagtctccttattgccttcatgtctttatgccccgagagcataactcttcagcagcattccatgggttgctcagggagatcacactcccttgaagcagtggagcataatcaaacatcttggctcctcctgaaacccgcagccacccgtttcagttaagttaaagatcttaagtagtttagacacacgcctttgttcaaggaaattcacagaaacggccagtgctttacatcttatggaatgactcacgagttctcctttactgattaatccttttcctgatcscttcctccccctccaatcagccataagaacaaagagcttgtaaaccaataaactgggtggagcccaagagctctgggccgccaggaagcctccaatgctctggccacctggacccgccttttaaatgcgtattctgtctctttctaactcctt

SEQ ID NO: 261109 - DNA, 535 bp, Homo sapiens
tgggcattgccatagcatttgtaaacggccatggtgctggtgggagtgtcttttagcatgctaatacattataatgagcatataatgagcagtgaggcaatgagggtaactagagttcatattcttgccatcttagttttactgctttcagctggtttctttagtgcatcctgttttgaccagatcctgtttcatcatgagcagggtcatgaccagtgctcagaacacaagtcctgctgatctatgtcactatgaggatcactatgtcaatatgtttcttaattcatatgctaaggtgtactcaatttctttaatcacattgacatctatctcaaaggacgagcaacttagccaatgccattgtggtacacacatcagtsgctacaactttcaccattaaagcacaggttaaaaaggccatctgaataacaatataaacacggcatctgagctccaaaatttcatctccttacaagaaagtggttattattttccagtgactgcaggaatagtttcacactgggaactgggatta

SEQ ID NO: 261110 - DNA, 630 bp, Homo sapiens
aaacaatcatgtttaaaaccatggattattctaatatatcctgggatccattctatattttctataaagtttcttgaaattattagagaggtaaggaagcatggtggtaaaatgagcaggctctggagccagcaagcatyacaaaatatttcttcttttcttctctcctcttccttctcctcctccttcttcttcttcctcttcttcttccttcctccctcctcctcctcctcttccatttttctaggctgattccatgttgcttatattacaatattttagtatgtctacatatctgatgagacaaaatatttctctactacagcactttgttcatacttctaattattattggatgtttttctatataaattttaaaatctattatttcctgttagattggcagaaattaaagagtagacacatttagtgctgatgaaagttcagagtgacttctatacctctgttttctttatctgtttatgaggcacttatgttacattttatataaggagaaaaaatgattttttttactggaaaaacattactgatttcctcacttttacaaaattaaaagaaaatatacattaataatcaaagttttctgatcgacttacctgtaacttctgg

SEQ ID NO: 261111 - DNA, 464 bp, Homo sapiens
gatgggaacaataggcactggggattacaaaagtggggaggtaaggaggggacccaggcttggaaacyaactattgatggccgggtgcagtggctcatgcctgtaatcccagcactttgggaagctgaggtggactgatcatgaggtcaggagttcaagaccagcctggccaacatgatgaaatcccgtctctactaaaaattagccggacatggtggtgggcgcctgtaatcccagctactcaggaggctgaggcaggagaatcgcttgaacctgggaggcagaggttgcagtgagccaagatcgcaccactgcactccagtctgggcaatacaagactctgtctgaaaaaaaaaaaaaaagaaagaaaaagaaaaagaaaactgcctactgggcactatgttcattatttgggtaatggcttcaattgaatcccaaacctcaccatttatgcaacatactca

SEQ ID NO: 261112 - DNA, 464 bp, Homo sapiens
gatgggaacaataggcactggggattacaaaagtggggaggtaaggaggggacccaggcttggaaaccamctattgatggccgggtgcagtggctcatgcctgtaatcccagcactttgggaagctgaggtggactgatcatgaggtcaggagttcaagaccagcctggccaacatgatgaaatcccgtctctactaaaaattagccggacatggtggtgggcgcctgtaatcccagctactcaggaggctgaggcaggagaatcgcttgaacctgggaggcagaggttgcagtgagccaagatcgcaccactgcactccagtctgggcaatacaagactctgtctgaaaaaaaaaaaaaaagaaagaaaaagaaaaagaaaactgcctactgggcactatgttcattatttgggtaatggcttcaattgaatcccaaacctcaccatttatgcaacatactca

SEQ ID NO: 261113 - DNA, 464 bp, Homo sapiens
gatgggaacaataggcactggggattacaaaagtggggaggtaaggaggggacccaggcttggaaaccaactattgatggccgggtgcagtggctcatgcctgtaatcccagcactttgggaagctgaggtggactgatcatgaggtcaggagttcaagaccagcctggccaacatgatgaaatcccgtctctactaaaaattagccggacatggtggtgggcgcctgtaatcccagctactcrggaggctgaggcaggagaatcgcttgaacctgggaggcagaggttgcagtgagccaagatcgcaccactgcactccagtctgggcaatacaagactctgtctgaaaaaaaaaaaaaaagaaagaaaaagaaaaagaaaactgcctactgggcactatgttcattatttgggtaatggcttcaattgaatcccaaacctcaccatttatgcaacatactca

SEQ ID NO: 261114 - DNA, 581 bp, Homo sapiens
aaccacagtaattaaaacagtgcggcgctggcataaagacagccacatagaccaatggaatagaatacattgaaattttctaaaggacaattttttcaatttccaacttttatgtggtttaacattcgtaagcaagtttgtgttctttgaatcactgagagcttttgagcatgtagcaatatcctgcacaaattttgcatgagtgtgttaaagacgggtaagtattaaatgtctcatgcagccggatgcagtgactcacacctataaccccagcactttgggaggccaaggcaggtggatgagttgaggtcaggagttcgagaccagcctggccaacatggtgaaaccccgtctctgttaagaatacaaaaattagctggatgtggtggtgggggcctgtaatcccaggtacttgggagtctgaggcaggggaatcacttgaatccgggaggcagaggttgcagtgagccgagattgcaccaytgcactccagcttgggtgacagagcaagactccgactcaaaaaaaaaaaaaaaaggtctcatggaggaagtcagttctgtagaatgaccccactgcaa

SEQ ID NO: 261115 - DNA, 581 bp, Homo sapiens
aaccacagtaattaaaacagtgcggcgctggcataaagacagccacatagaccaatggaatagaatacattgaaattttctaaaggacaattttttcaatttccaacttttatgtggtttaacattcgtaagcaagtttgtgttctttgaatcactgagagcttttgagcatgtagcaatatcctgcacaaattttgcatgagtgtgttaaagacgggtaagtattaaatgtctcatgcagccggatgcagtgactcacacctataaccccagcactttgggaggccaaggcaggtggatgagttgaggtcaggagttcgagaccagcctggccaacatggtgaaaccccgtctctgttaagaatacaaaaattagctggatgtggtggtgggggcctgtaatcccaggtacttgggagtctgaggcaggggaatcacttgaatccgggaggcagaggttgcagtgagccgagattgcaccatygcactccagcttgggtgacagagcaagactccgactcaaaaaaaaaaaaaaaaggtctcatggaggaagtcagttctgtagaatgaccccactgcaa

SEQ ID NO: 261116 - DNA, 627 bp, Homo sapiens
tactaagtttcatttaggaataaagttttgttgtttaaaattttgtttacatttgtgtttaatttgaatttttgcgtatatcataagtatttgatttgttgtaaaattacagatgtttgtcataagaggttcttacatatttggaaaacccctccattttgtttttcttttcaaaattrtgatggttctcctttcacagggcacagtcattaaaaactcatatatttcttttgtgtttgaatggctgtggattcctagtcagagaggtctttgtgtcaccacatctgctaataagaattgggttttccggtccatgatgctctttgttatgtcttttagtaaagtttatttgcctgtttatagttcagtaatgttaagtatgttcacgttactgtgcaacatatctagaagtttttcatctcgcaaaactgaaactgtatacccagaatacactatatcccttctgacctcactatagcctctgtcaacccatctttctatgttgtttatatgcatttgactactttagtatcccacgtgagtggaatcacatagtatttgtccttttgtgactgtcttattttccctagtgtaatgtcctcaaggttcatccgtgttgtagcatat

SEQ ID NO: 261117 - DNA, 582 bp, Homo sapiens
cctcttgtggctttctgcaacttattgtcccatatttttatggccagtttatacaggcaccccgtaagccctttccccaacagttttctctatkttttttaatgtttataccattttttactagcttaaaatagaaaaatgttgatgaactaaatgttgatgaacagttgatacatttcattgttccatacatgctgaaatggacacaaacaaaaatggcgatttttaagaagttgttgaaaaactcacttgtggacaactgttatataagttaatttaatcgtgtgtatatgtatgtctacatgagtgcatggatgagcaagcccatggctcttatgaaacactcatcataatttaatcaataagttttatatttaacacttgaaattatctctacagtagtttccatggccttaaatttttcctacactgtcacactgagttaaacaatagtaagcatagtgctgtagtatgtgtttgcatgtgtgtatacataatgtgtgcatatataatcaatatataataccctttcatgaagttccatgttgttatccttgaactcatttcacgttttcccaggca

SEQ ID NO: 261118 - DNA, 638 bp, Homo sapiens
atgtgaaattaaccaaattgatatacaacattaatacatttcctatcaaggtgttttgtggatactaacaagattatccaaaaaattatgtagaaaggcaaaaaaagatagaatgcctaaaacatctgggaaaaaaaataaaaaggttggaatcatttcatgtgatttcaagtcttctaatatagtataagtatttccttctttttttcatatttacaataaacctagtttatacctgccgtgatcttatgtgcatactcatgcatattttttttctccaaataacagcttcatttatgtgccccctaaacttttcactatagtaacaaagggaagaaatgcatgaaacatagaatgtagactgcaacatatggaaaaggaaactttttaaaattgtgtacaaaaacaaaaaataattttattacaattaaagaaccagagaacattttgcttaataccataatcaaaaatgacatttcygtagcttttggaaaaatgctcttctagtagagtcctatttattatatataacaattagataatgataaattatattatgtaaataaacacttcacaataattttcactgaactgatatgaaaaatatcttaggcaattttactaaacagtatttcaca

SEQ ID NO: 261119 - DNA, 580 bp, Homo sapiens
ccaggcatggtggcaggcacctgtaatcctagctacttgggagggagaattgcttaaacccaggaggcagaggtagtagtgaactgcaatcacaccattgcactccagcctgggtgacartgtgagactccatctcaataaaaacaaagtatgctgataatttcaatgtctgagtgaagtgatgcagaatcttgttttctgtcagactttaaacatgccagaatcgggattaagttctaaaattttcttgcttttctagagaagagttctaaattgggaagcagtgcaggaaacaagtcacttaaaaatcaacatggattaactcttcagttacatctgactgaatggcagccatttcaagctgtaaggaatatttatggatgtaagcatgttgagaaatctatcagtgacaattcttcagtttcaccagttcaaataagttttttcagtgtcaaaacccatatttttaataactacagaaatgattttcttttttctacattactcccacaagaacagaaagtacacattagggaaaagccttatggatgtaatgagcatgggaaagtcttcagagtgt

SEQ ID NO: 261120 - DNA, 580 bp, Homo sapiens
ccaggcatggtggcaggcacctgtaatcctagctacttgggagggagaattgcttaaacccaggaggcagaggtagtagtgaactgcaatcacaccattgcactccagcctgggtgacaatgtgagactccatctcaataaaaacaaagtatgctgataatttcaatgtctgagtgaagtgatgcagaatcttgttttctgtcagwctttaaacatgccagaatcgggattaagttctaaaattttcttgcttttctagagaagagttctaaattgggaagcagtgcaggaaacaagtcacttaaaaatcaacatggattaactcttcagttacatctgactgaatggcagccatttcaagctgtaaggaatatttatggatgtaagcatgttgagaaatctatcagtgacaattcttcagtttcaccagttcaaataagttttttcagtgtcaaaacccatatttttaataactacagaaatgattttcttttttctacattactcccacaagaacagaaagtacacattagggaaaagccttatggatgtaatgagcatgggaaagtcttcagagtgt

SEQ ID NO: 261121 - DNA, 580 bp, Homo sapiens
ccaggcatggtggcaggcacctgtaatcctagctacttgggagggagaattgcttaaacccaggaggcagaggtagtagtgaactgcaatcacaccattgcactccagcctgggtgacaatgtgagactccatctcaataaaaacaaagtatgctgataatttcaatgtctgagtgaagtgatgcagaatcttgttttctgtcagactttaaacatgccagaatcgggattaagttctaaaattttcttgcttttctagagaagagttctaaattgggaagcagtgcaggaaacaagtcacttaaaaatcaacatggattaactcttcagttacatctgactgaatggcagccatttcaagctgtaaggaatatttatggatgtaagcatgttgagaaatctatcagtgacaattcttcagtttcaccagttcaaataagtttttycagtgtcaaaacccatatttttaataactacagaaatgattttcttttttctacattactcccacaagaacagaaagtacacattagggaaaagccttatggatgtaatgagcatgggaaagtcttcagagtgt

SEQ ID NO: 261122 - DNA, 553 bp, Homo sapiens
acagcagaagaggctcttcaggggcctcatttggtgtcaactcagcaagaagtgaagtttaaagcccagagcactgcagggcattgtactggtgtaggaggggtacgtccagggctccaaggtgttttctgtgctgagctcatctctcatcccccagccaccacagtgctgggtcagagctgggctgttgttttcccatggcaggcccagccctgtctagctctcagttcctcygctctgcagccagggtcccttggcctgaaccctacacatagcagcactcactcgggctgtaggtattcttcagtacctgctatggcctggcatttagggaactctcaagcaacagcacaagtgaggcccctgctctcccgtgctttgggtccgttgtaacagcacaaaaagcttgtggagtatcttaggtgagtccactcttgcagctgggcaggcatcatagtgttcagctccctgttacagtgtcgtttcttggggacatagcagatggaaaattctggggtagttttgatttagcagttatcacatttgctgttca

SEQ ID NO: 261123 - DNA, 448 bp, Homo sapiens
ctcttcctggcttgcagatggctgctttcttgctatgtcctctcctggactttccttggtgcacgtgcagacaaagagagtgagcagacactctggtgtctctgctttttaaaaatckttttagacacagagtattgctctgttgccccggctggagcagcagattggtgcaatctgttgcaccaagattgtgatacaaccatagttcactgcagcctcaacctcctgggctcaagtgatcctcctgcctcaagctccagagtagctaggactacaggtgcatgccaccatgtccagttaattaattttttttcttcttttgtagagatgagatcttgctgtgctgcccagactggtctggaacttttggcctcaaaagatcctcctgccttggcctcccaaagtgcttggatttcaggcatgagccaccaagcccaacctggtgtca

SEQ ID NO: 261124 - DNA, 448 bp, Homo sapiens
ctcttcctggcttgcagatggctgctttcttgctatgtcctctcctggactttccttggtgcacgtgcagacaaagagagtgagcagacactctggtgtctctgctttttaaaaatctttttagacacagagtattgcyctgttgccccggctggagcagcagattggtgcaatctgttgcaccaagattgtgatacaaccatagttcactgcagcctcaacctcctgggctcaagtgatcctcctgcctcaagctccagagtagctaggactacaggtgcatgccaccatgtccagttaattaattttttttcttcttttgtagagatgagatcttgctgtgctgcccagactggtctggaacttttggcctcaaaagatcctcctgccttggcctcccaaagtgcttggatttcaggcatgagccaccaagcccaacctggtgtca

SEQ ID NO: 261125 - DNA, 521 bp, Homo sapiens
acctgctgtcactgccttagtccaagtcctcatcacctgtcaccattgggaccaaggttctatcactccagaatggtacccccacccttgggctcccctccaatctgttcatgaacctgagctagaggcatcttttggaaatgcccattggatcatgtcactcccccatcgtccttgtaccctccaagcccagcctccctaacatgtcctctgaggcgaatcatcaggtccaccatctgcccacctctcgtccccactctacgtcactctcctgcactctctaccctccagccctcctggccctcagttcctcaagcatgttagtctccctctggtaacagacatttctgccggtggtcccctatcctagaacagctgttttctaacatggttgcatattggaatcgccttgggagcttaaaaaaatcctaaygcccaggctttaccccagaccatttggatcagagtctttggaggggcagtgtgggcaacagtattttttttttttttgaaatggagtt

SEQ ID NO: 261126 - DNA, 592 bp, Homo sapiens
cctgcaggtctgattcaagtccttctcactgacacagcaggaatgagggtggggtggtaacaccactagggcaccgtaactagggcacctacgatcccagaactccccgggtactttccacacctgctccctccccctacttcagttctctcctgtctcttaggaggcgagactcacmctggtcatcaccaaccctcctcctcacactggtcaccaccaaccctcctcccgctgtgctccaaaatcagcttcccagagcccagactaagcttgcagctcccctgaagcaggtgctgaagcctctggaggctctctcctgctaaaaggggagagcctagactctccagtatcaactcagctctctcatggcctcgccaccttctactatgccactatgtcatccagatccactggtaattccccagagcctcgtgtctctgtgcctctgcctagactgctgatcatgtcatcctctgcccacccaagctttgcaagctcctacatagcctccagcctctcaggggcatcctgtctctgtggggcctccccactcctgccttcctccttggcacccgtgcccataaggagataa

SEQ ID NO: 261127 - DNA, 575 bp, Homo sapiens
ggaactgcccccatgatctaatcacctcacacaaggtatcttccccaacatatgaggattacaattcagattacaattcaacatgaggtttgggtggggacacagagctaggccatatcacaccttctcttgtaagtctttccttttctttagaggaggtccttctcaaggagccctgaagtccctctccatggactttcttcytgtgattacatagctgtgaatcctaggccaggcctagcttgggttcaagctaaacccaccattgtgttttctgattggctgagtttcaaatactgagacatttatcctttgaaaaacaaaacaaaattttaaaaaacagtttggatagaaatggagttcactcttcattagggctttaaatgatacctgaacgtgaatcaaactttctctaatgatccagggtcaaccttatgaacatgatagttggcactgttctatgacacagctatttcctgctcttgagctttgtaactgtttgctacaagtcctaaaatgctttacttctggggatcctctgtcttctattcacggttatagtgtcttgttatagt

SEQ ID NO: 261128 - DNA, 514 bp, Homo sapiens
aattatctgcacctgttccaccctcaacatatggggattatggggattaaaattcaagatgagatttgggtggggacacagagcctaaccatatcataagctaatcratacagaaacagaaaaacaaataccacatcttttcacttataagttggagctaaacagtggatactcatggacataaatatggaaacaatagacactggagaccgctaaaggggcaagggaagggggagggcaagggttgaaaagctattgggtactatgatcactgtctgggtgacagggtcaatcataccccaaacctcagcatcatacagtatacccaggaaacaaacctacacatttattccttgaatctaaaataaaagttgaaattattttttaaaaattgaattaattagatgattttttctttttcactaggctgaccctttgacccttccttggttttcttggggcttttttttcttttatcagtgtatgttggtattttgggttgcaggcttctcta

SEQ ID NO: 261129 - DNA, 526 bp, Homo sapiens
aaactttcacaactttatttatccagctgatagatgttttctttagaaaacaaaagtatgtgggagaatggcataagccagacaaagaacaaatattatatgattccatttgtacaaggtacctagaataggcaaattcatcagaagtagaacacaggttaccaagggcctggagggagggagaatggggagttattgtttaatggctaaagagtttttggtgggaataytaaaaatttggtgggtatacatagtggcgatgggtacactgcactctgaatctatttaatgccactgaattgcacatttacaaatgattaaaatgaccatattttcccacaataaaaattatttctgtaaaaagtatatgtgggaaaaaagtgtgttcatgtgtgtatgtattgatataggtaagacacactgatcatagcaaattctaaaatgctaaaatatgagaaaccattttatgagaaacataatgtgagaagtctccttcctaaccccaagcacttcatttccctcccta

SEQ ID NO: 261130 - DNA, 591 bp, Homo sapiens
aaaaagagcattgctatgaatttttattcccttcctcttcaacaatacatatgatgattcctcttgtttccatgtcgaaagtgtatttaataatatctctataaaagaatcaaattcttcaagggatggtatcaatttcaaaacatagttataataagtgccataataatgaattaatccaagttggaatttcttttcttgttcaaagtaatgttgccacttttaaaaacaagttttgtagctacttaggaggctgaggcaggcagatggcttgagctcccaggaggcagaggttgcagtgagctgtgattgcaccactgcactgtagcctgggtgacrgagcaaggccatgtctcaagaaaagtaaataaataaaaacaaaataaaattaaaacaactttgataattaaaggaataaatttttcaagtcattctctaaggcatttaataatttccttaaacaactacttcaaaaatgttcttcttttaatttgcataatcctcttgctaaagtaattgcaaaatatgaaaaagaaataagtagcctttacttaataaactttttaagtactcaacaagaatttggggggg

SEQ ID NO: 261131 - DNA, 544 bp, Homo sapiens
tttctcatcattagctctgaatgtgagaagataatggagtaatatctttgaaatcctggaagacaattttgagactaaaattttttgaaaagctagatgagcacaaattcaattatttaagtacaattaaaacatctttagtcatgcaggtattcaaagctttgccacccacagatttttttttctgaaagtattactcaagaatataatccagtaagacagaaaatgaatctaagagagaaaatatttagcttacagaagcaataattagctaagaaattgctaaagcatatagttatgtctaaataatcactcatgcataatgtaaaaaaaaactaatatcaatctggaaataaaatcaaagaccatttcaactagatgataaatatgaaggattcagaagtaagtgaaaacatgctaaaatgtttgttctgtgtagctcgacaaaaaaatacagattatatctagacacagatagktaaacagaattttttaggtgaattgcaacttttagggtaaccaaaaaaaaaaatggatgtaggac

SEQ ID NO: 261132 - DNA, 558 bp, Homo sapiens
gaggattatggtcctagatttgtttttcttctctaaaagaatcgaatcctaagggattttagtgggaactcttttctggttcctgatcagctgcacattctgaatccttgtggtttatgaccaaacaactggttgaccaagtgagctaatatactgttgagactttggtgaagccctttatctattctagagtaaacagtgatggtttccatgaagattaagtaraaagctagaaaaacaagctctttagaatttcattcaagtagccaagtctagacaacagtaaaaaaggagcagatagggtattattaaaacaaagatgttttaggcatgtgtaatatgacacagtaaaaacagcattgtccttgaagtaagctttcttgagtaaatcaactttttctgggcctcagtttttttcatatagggtttatattggaatctaacatttattcatttattcatacatacatatatttatttctttattttattcaacaaatatttattaaacatattcttagctccagacacattgttaatcactggagaaatagaggt

SEQ ID NO: 261133 - DNA, 578 bp, Homo sapiens
ttgctgtgatcattcttgtatgtgtctgtggcagacatatgtatgtgtatctgctgtgtatacctgtgagcagaattatgaggttatatgataggcatatgtttaggtttggaaggtattgtcaaacagttttccaaagtggctatattcatatacactcccatcaaagtatatgagagttctagtcattcaaaaatcataccaacacttgatgttgtttgtccttttcattttagccattttgttgcatgttaataataccacattgtggttttaacttgtgtttccttgaaaacaagtcaagcaccttttcacttctttattggttgttgtatatcctattttgtgaagtgcctattcatgtyttttgcccatttttctattgggttttctacttatttctcattgatttgtggaaattcttcatatattcaggatacaatttagaggagtttttctgttgtagttgaatatattggtaatattttcttcactctgtcttggcttttaactctcctgacgacttttaatgaacagaaaccctagttttaatgtagtatgattgatcgatttttttc

SEQ ID NO: 261134 - DNA, 534 bp, Homo sapiens
cccacagccccaccattccattctctgattctatagaattgattattttagatacttcattgatgtaaatccaggaagcactttttttaatttataggaaaatcacctgtgggccagtggctcttgtgtatcttctcaaactctaatgtgatatgaaccaccagtggaatcttatttaagtgcggattttgatccggtgggccaggagcagatcctaaaattctgtgtttctaataagctcccaggtttgkcctacaatacagtcccatgggccatagttgggtagtatagtgggatttttaatgtaacagtaagctcaaaagctttagttacattaaatatctattttattgcattaaatggcaacatttataataatacaactaggccagaggtgggcagatatatcatttctggaagaggacctctggaatttctaaaaagaagaagatttggtggaagtttccaaggtaaagttatttgatttggaaaaatgtgaaatatatggggaaagattccaaatgtgtttccagt

SEQ ID NO: 261135 - DNA, 546 bp, Homo sapiens
acccactggataaaataggaatccataggtccatacagacagaaacaaataggtgaataaatacacagaaggctgggtgcagtggctcatgcctgtaatcccaacactttgggaggctgaggtgggtggatcacctgaggtcaggagttcagggccagcctggccaacgtggtgaaaccccgtttctaccaaaaaaatacaaaaattagccagatgtggtggcacgtgcctgtggtcccagctactcagaaggctgaggcacaagaatcacttgaacccaggaggcagaggttgcaatgagcygagaatgcaccattgcactccagcctgggcgacagaacgagattctgtctcaaaataaatacatgcatacatacttatgtacacatatacatgcacacatgcagacaagagaaagcttttacttacagtaggatgtcaactaataaatgtagaaggaatgatggaaatgggaaattaccatttggccaccatcatagcaatactttatccaaccaagaaatactgatgggtgtgaatgtttaa

SEQ ID NO: 261136 - DNA, 517 bp, Homo sapiens
aagcttttacttacagtaggatgtcaactaataaatgtagaaggaatgatggaaatgggaaattaccatttggccaccatcatagcaatactttatccaaccaagaaatactgatgggtgtgaatgtttaatgaggaacaagatacttgcaaaggcttaaagtccctccctacaaaacactaattaattacacaggggcaaaagcattatctacgtcaatcacctgatyaaagttaacctcaccagcaaaggacaaaatcatgcatctgccaggacgcagtgagaagagcacagcgtcacatccgggatgttcctgccaaaggtccagagtctgcattggatcatgaggaatcctcaggcaagcccaacttgagggatattctacaaaagatctggcctatagtcttaaaaaattccccaggaattgttctagattgaagaagacaaaagacacgtgacaactaaatgcaacgtgtgattctgaactggatccttttgttaaaaaggatgtagttag

SEQ ID NO: 261137 - DNA, 628 bp, Homo sapiens
ctctccatcaatttctctaactgcaggcagagatgacatgaagtggtatatgcaaaatgcctgaaaaatagcagaytgcaaaaaacaaatagtaaatggggaaggatagatttcctcttttgacacagacctcctgctcttgattcttaaaaagctaacctgttctccatttctactattttttttttaaagtacacaattcaacagagtattgagatggttttaaaaaatcccaattttcccacaaatccaaacatggtaatttaccacaggtagaccttaatttttttcacattttagaaagtatttgaggcattttcgtttgtgagagaaccctaaagtcttgccttctagtttgtggatatttaggtgtgcctatgcttttatgtgctgcggatacattaagatacgttaagatcagccaatctgaacagctgaaaagcttttatcaccaaggagcttaacagctctggagatacattcatttcctgtacaactggtctgacctatagcttggggtatgaaatctagtcatatctctgttttattctaattaatcactgagtcctctctccccctcacacactgttattataaagtttaatatcttgcttttgaattttccaat

SEQ ID NO: 261138 - DNA, 628 bp, Homo sapiens
ctctccatcaatttctctaactgcaggcagagatgacatgaagtggtatatgcaaaatgcctgaaaaatagcagattgcaaaaaacaaatagtaaatggggaaggatagatttcctcttttgacacagacctcctgctcttgattcttaaaaagctaacctgttctccatttctactattttttttttaaagtacacaattcaacagagtattgagatggttttaaaaaatcccaattttcccacaaatccaaacatggtaatttaccacaggtagaccttaatttttttcacattttagaaagtatttgaggcattttcrtttgtgagagaaccctaaagtcttgccttctagtttgtggatatttaggtgtgcctatgcttttatgtgctgcggatacattaagatacgttaagatcagccaatctgaacagctgaaaagcttttatcaccaaggagcttaacagctctggagatacattcatttcctgtacaactggtctgacctatagcttggggtatgaaatctagtcatatctctgttttattctaattaatcactgagtcctctctccccctcacacactgttattataaagtttaatatcttgcttttgaattttccaat

SEQ ID NO: 261139 - DNA, 628 bp, Homo sapiens
ctctccatcaatttctctaactgcaggcagagatgacatgaagtggtatatgcaaaatgcctgaaaaatagcagattgcaaaaaacaaatagtaaatggggaaggatagatttcctcttttgacacagacctcctgctcttgattcttaaaaagctaacctgttctccatttctactattttttttttaaagtacacaattcaacagagtattgagatggttttaaaaaatcccaattttcccacaaatccaaacatggtaatttaccacaggtagaccttaatttttttcacattttagaaagtatttgaggcattttcgtttgtgagagaaccctaaagtcttgccttctagtttgtggatatttaggtgtgcctatgcttttatgtgctgcggatacattaagatacgttaagatcagccaatctgaacagctgaaaagcttttatcaccaaggagcttaacagctctgsagatacattcatttcctgtacaactggtctgacctatagcttggggtatgaaatctagtcatatctctgttttattctaattaatcactgagtcctctctccccctcacacactgttattataaagtttaatatcttgcttttgaattttccaat

SEQ ID NO: 261140 - DNA, 603 bp, Homo sapiens
atgaagggccaactttattaaaatggaaaatccaggatttgtagttctcacattttaatgggcctaagcctcatctgaaggtgcctgctaaaaggcagatttctgggtgctggttccagaggttctgtgtggggccagagaatccgcattttaaatagcaccctcaggcattccacggcatgcagtttccagcaatccctctgagagcccagctctagattgcaataggggaccaccactcataattgggaattttttccttaaatatccagatttctagttctttcagagaatctgaagtgttggcaatcctgggcctgctttcctgcttgacagcaaagaacaagagctgagttgtacctactccctttagatgaggctgctgtctccaggagcctatttatttaaagtcctggcctaaactctagtgttgtttgagtttgtgacccctggcaggtcaagtcctctaacmccacagattaggaaactaaaatctggaggcgaagtggcttaggtgtggagagctagctgtggatggccaggtcagaggcggcctctgaagagctgcccaagcagaaagctgcagcttggtaaacaagggtg

SEQ ID NO: 261141 - DNA, 603 bp, Homo sapiens
atgaagggccaactttattaaaatggaaaatccaggatttgtagttctcacattttaatgggcctaagcctcatctgaaggtgcctgctaaaaggcagatttctgggtgctggttccagaggttctgtgtggggccagagaatccgcattttaaatagcaccctcaggcattccacggcatgcagtttccagcaatccctctgagagcccagctctagattgcaataggggaccaccactcataattgggaattttttccttaaatatccagatttctagttctttcagagaatctgaagtgttggcaatcctgggcctgctttcctgcttgacagcaaagaacaagagctgagttgtacctactccctttagatgaggctgctgtctccaggagcctatttatttaaagtcctggcctaaactctagtgttgtttgagtttgtgacccctggcaggtcaagtcctctaacaccacagattaggaaactaaaatctggaggcgaagtggcttaggtgtggagagctagctgtggatggccaggtcagaggcggcctctgaagagctgcccaarcagaaagctgcagcttggtaaacaagggtg

SEQ ID NO: 261142 - DNA, 598 bp, Homo sapiens
ctccttggcctatagatgtctgtcgtctgtccgtcatcttcacatggtctttcctctgtgtgtgttctgtgtcctagtatccttataagaacaccagttatagttggattaggacccatttctaatgaccgcattttaatcttaattacctcttgaaagaccctatctccaaatacagtcacattctaagggaatggggatcaggacttcaacatgtgaatttgtggggacacaattcagtccataaaacctaacatcaaaggaggctgagaaattagttagtagtgaatggtcacttagctagataaaacttccattccattgctaaaaggaggaagagaaaagtaaatattggggaatatttagcagcatcagtcacattactatagaattaataagcccaagaccaagtttatatcaggtaaaaactcatcaaccaaaaaaaaaaaaawgggaagcatatgtaattgataacaaaactcaaaagcaatgaaaggggattgaacaaaagagaatggcagagaaaatccccaggtcagggctttggaggaagaaatttctttctgggccccaggaaagaaatccagcttcaatacaa

SEQ ID NO: 261143 - DNA, 575 bp, Homo sapiens
cagaacagacttggacttcccgcaataaactttggaagctagaagacaatgaaataccttttaaaattctacaaaacatgyacaatctggttttaaatcccagccaatctttcaatcagatgtgagtgtgaaaataaagacattttaagagaggcaatgcttcaagaaatatatctctagcttaccttttctcccaaagctctttcaatatatgctgcactaaaataatctagaaagatgatatagtatggtgcactatctcacaatattgcccactctcctttcttagcaacagaataactgaaataaagacaaatttcctatcacgctccttgaaggtaggcatggccatttgaataagttccacttatggaatttgagtggaggtagtgagtttgatttgcttttcttctttcttttctgtagtgtacacataatggctgaagctccatcagccatcgtgtatcacaacctagtgtcccagaaaataaaaagcaagcatggcaaagcaatgcaatctgagggtccttatttcctaacaacatagtttccattccacttcaggaccattcttt

SEQ ID NO: 261144 - DNA, 482 bp, Homo sapiens
aagtcaaaactaatactggaagtgacagcagaaagtattaatagaggaggtaataagtgacataagtctggaaggatcagtagatgctcacatgggagaccagggaaggggaggtcagtgcatatggaggaagcaatacaaactgagacatatatattagcttgatatagtcagggtattgcaagtagtttattaagcttgtaaagttgtgagggttacatgaagtaatccatgtaaatcattttggacagttcttcctggtcaatagcaaatrcctcacaaatttaagctatattatataataataggccaaggtgggaaaagaatatagcagaagataaagccagcaaggtatgcaagtgaattatctccaattatctattacaaactcccataaatactttttcttttctgtagataatagaaagagaaataagaattataatttgagtgggtcaggaaaaactatgactattagaagg

SEQ ID NO: 261145 - DNA, 501 bp, Homo sapiens
ataaccttgtcagcatctgttatttttttacttttaatagccattccgatttgcgtgagatgatatctcattgtggatttgatgtgcattttctgaatgatagtggtatcaagtaatttttcataagtgtataggytgtgtgtatgtcttttaaaaaatttctgttcgtgtcctttgtccactttttaatggaattattttctggttgatttggttaagttcctcatacattttagatattagacctttgtcagatacatagtttgcaaatattttcttccattctgtttactctgttgataatttgttttgctgtgcagaagctctttagtttacttaggtcccatttgtcaatttttgtttttgtcacaattgcttttgacatcttcgtcatgaaatctttgacagggtctatgtcatggatgatatttactaggttaccttctagagtttttatggttttagattttacatgtaagtctttaatccatcttgagttga

SEQ ID NO: 261146 - DNA, 501 bp, Homo sapiens
ataaccttgtcagcatctgttatttttttacttttaatagccattccgatttgcgtgagatgatatctcattgtggatttgatgtgcattttctgaatgatagtggtatcaagtaatttttcataagtgtataggttgtgtgtatgtcttttaaaaaatttctgttcgtgtcctttgtccactttttaatggaattattttctggttgatttggttaagttcctcatacattttagatattagacctttgtcagatacatagtttgcaaatattttcttccattctgtttactctgttgataatttgttttgctgtgcwgaagctctttagtttacttaggtcccatttgtcaatttttgtttttgtcacaattgcttttgacatcttcgtcatgaaatctttgacagggtctatgtcatggatgatatttactaggttaccttctagagtttttatggttttagattttacatgtaagtctttaatccatcttgagttga

SEQ ID NO: 261147 - DNA, 553 bp, Homo sapiens
tttgttaaccaacacaaatcaaagaaatgttaaatgtaagaggtgatgggtatgcttaaataccatgatttgatttgtatacaatgtatacatgcactgaaatgtcacactgtaccctataaatatgtacagttttatgtattgataaaatgcccataatccaaattaacatgtgttcaaagggaaggccaaaagggaatgtaaaatattttattttaatgaattgaaaaaccaaaacaccaaaattaatggaatrtgataaaaataacaattagatggaaatttatagcattaaatgtttttattacaaaagaaaattgtcctcaaataaataaattttccaactttaaaaagtggtggaaagacacattttacatattacatattatattaaattagattatatattatatgaattatatgtcctgtgtcagatgtctttgttagatatctgatttgcaaatattttagcccaatatgtctatttcttgatatatgttcaattataggcaaacaaaacaaaaaataatatatagccagaatatttgaacac

SEQ ID NO: 261148 - DNA, 553 bp, Homo sapiens
tttgttaaccaacacaaatcaaagaaatgttaaatgtaagaggtgatgggtatgcttaaataccatgatttgatttgtatacaatgtatacatgcactgaaatgtcacactgtaccctataaatatgtacagttttatgtattgataaaatgcccataatccaaattaacatgtgttcaaagggaaggccaaaagggaatgtaaaatattttattttaatgaattgaaaaaccaaaacaccaaaattaatggaatgtgataaaaatawcaattagatggaaatttatagcattaaatgtttttattacaaaagaaaattgtcctcaaataaataaattttccaactttaaaaagtggtggaaagacacattttacatattacatattatattaaattagattatatattatatgaattatatgtcctgtgtcagatgtctttgttagatatctgatttgcaaatattttagcccaatatgtctatttcttgatatatgttcaattataggcaaacaaaacaaaaaataatatatagccagaatatttgaacac

SEQ ID NO: 261149 - DNA, 553 bp, Homo sapiens
tttgttaaccaacacaaatcaaagaaatgttaaatgtaagaggtgatgggtatgcttaaataccatgatttgatttgtatacaatgtatacatgcactgaaatgtcacactgtaccctataaatatgtacagttttatgtattgataaaatgcccataatccaaattaacatgtgttcaaagggaaggccaaaagggaatgtaaaatattttattttaatgaattgaaaaaccaaaacaccaaaattaatggaatgtgataaaaataacaattagatggaaatttatagcattaaatgtttttattacaaaagaaaattgtcctcaaataaataaattttccaactttaaaaagtggtggaaagrcacattttacatattacatattatattaaattagattatatattatatgaattatatgtcctgtgtcagatgtctttgttagatatctgatttgcaaatattttagcccaatatgtctatttcttgatatatgttcaattataggcaaacaaaacaaaaaataatatatagccagaatatttgaacac

SEQ ID NO: 261150 - DNA, 437 bp, Homo sapiens
ctttgtgctttccccaaattcatatgttgcagccctcaacttccagtttcattatatttacagatggagtctttgggaggtaattaagtcatgaggktggagcccttatgagtgagattagtatccataggcaaatagacataaggggataatgtctcaatctctctctctctcaccctgtctctctctctctctctctctctccatgtgtgtgtgtctctttctctttccctcttccctctttccctctgccctatgaggatatggtaagaagaaaaccttttgaaagccataaacagaactcaccaggaacaaatcagctggcattttggtctccagacatcagaattgtaaaaaataaatgtcttttaaaccactcagtttaggacattctgttatagcagacggagcagactgggacagacaatttaaatata

SEQ ID NO: 261151 - DNA, 437 bp, Homo sapiens
ctttgtgctttccccaaattcatatgttgcagccctcaacttccagtttcattatatttacagatggagtctttgggaggtaattaagtcatgaggttggagcccttatgagtgagattagtatccataggcaaatagacataaggggataatgtctcaatctctctctctctcaccctgtctctctctctctctctctctctccatgtgtgtgtgtctctttctctttccctcttccctctttccctctgccctatgaggatatggtaagaagaaaaccttttgmaagccataaacagaactcaccaggaacaaatcagctggcattttggtctccagacatcagaattgtaaaaaataaatgtcttttaaaccactcagtttaggacattctgttatagcagacggagcagactgggacagacaatttaaatata

SEQ ID NO: 261152 - DNA, 595 bp, Homo sapiens
gaagattgttgataatccatgatagccaggtaaaaaactttcgcaattaaaatataacattatatgtcatgttaggaatttcaaaagctttacaagtattaccacgagatgatgtcctcatgctttaaggatgctttttatgtaatctctcttaaattttttacaatagaagagaatataataaccaaagcaagcacacaaatttgctttttgaatctctaatctttccagcattttaagagattcatgttgaatcaaatatgtgccctttctaatcctcctttsaagggcacagtgaatgattatacctagtttcaatttctgatttatttgctcttcagaggagaagataattgtaaaaaattggctcacaaatttaagaaaatgtctacaagtatttttacttatatttttcattctttgatagtaaagaaacaatatgtaaaaaaaaaaaaaaaaattgtaagccaccaatacaagctttcaacatttctcccagaaaagggagtttagctttttctaaagcattttgcttattctgacacatctgcaaatcccaggatttttttttcctaaaatgtctgattttaagcat

SEQ ID NO: 261153 - DNA, 544 bp, Homo sapiens
tctttcactacatgaactaatcaagatgcatccatccattgactaataagagatcaaatggagagtggcttcagacatcctgcctttttagctgagaatccagatgtatgagttagatgagttaacccattctaggtaaatctgtcacagcttggccaaatcagataagaatgccgtgctaaaacacagaataatgacagacaataaacagctttttggaaggggagaggacactacattttgtgctggtttattacaagtgagatatacataccyatcattcttcattccattttacacaactttattctgagccagtcaggtgggaagtggtccctggagagacttcaaccagcctgcccactgaggtagagccttgggaagttcacgacatttgcagcagggaggagcctggctcttcttcttcttttatggaaccagggatttaaatggcaaggcgggaagcactccagctgggatcctggcctagcgagagtccctgtttcccctttttcttctttctcacccaataaaaccctgtctt

SEQ ID NO: 261154 - DNA, 593 bp, Homo sapiens
tttatttgctggcaacttttcccatgggccaaatccagcctagcagctgttttataaataaggttttgttggaacatggccgctcttcattcttatgccttgcttgtagctacttttgcactacagtggcaaagatgagtagttgtagcagatatcaaatagcctataaagtctaaatatcgattatctggttgtttacagaaaarccttggcaatctctgatcataatgataataatttgtaatataatatttgtatcatctgattctttactcagttcctatctccttttgcattgatatgattgatagatagatgatagatacatgccataagagtattgcagacttctcctgcttaaagtgaatgtattcattctcccttgaagttacttcttttcctatgaacaacatcagtattgactacattaccaataatatgtgacccataccttaacccacagatttgttttgcatgtgtgtggggggatggggcatggggagtaaggtcaggatgtaatgaatcagaagcaggtagtttctagacccttaggcttctcatgtccatttttgtcattttatattgattctatt

SEQ ID NO: 261155 - DNA, 571 bp, Homo sapiens
taggacaccaaaaaatgaaacatattcaatctttacatattggaagaatcaatatagttaaaatgttcatactacccaaagcaatttacaaattcagtgcaatccctatcaaaataccaatgacattgttcacagaaatagaaaagaaaaacaatcctaaaatatatgtagaaaaacaaaagtctgagaatagccaaaactatcctaggaaaataacaaaactgaagtaatcacattacctgactttaaactatactacagagctaaagtaaccaaaatagcaaagtactggcactaaaactgacacatagaccaatggaacagaatagagaacccagaaacaaatccatacacccaccgtgagctcattttcaacaaaagtgccaagaacatatattcaggaaaagacagtctcgtcaataaatggtgctggaaaaattggacatccatatgcagactaatgaaactagacccctatctccaccatatacaaaaatcaagtcaagtggattaaagacttaaatctaagacctcaaactatgcaastgttacaagacaacactggggaaac

SEQ ID NO: 261156 - DNA, 476 bp, Homo sapiens
ttgtgatgagaacacttcaaatctgctckcttggtaatttacgagttcaattcattgttattaactatagtcgccatattgttaaatagatctctttaacttattttttctatctaactgaaattttgttttatttgatcaagatctcgcaagcccatccctgtcccccaactttggtaactaccattctgttctatacttctatgagttcaactttttagattccacacataaataagaccatgaagcagatgtgttttctggattaaaaacaaacaaacaaacaaacaaaaacaaacaaacaaaaacttttgcttgtatttatttcttgcttttgataaaattatcaaccaaaattaaatatatgtcctaaagaaagatgcatgactgaagataaggaaccaggttttcttgggttgcttataatacatctaagaaaacatagttcacccccttttcttttgtttaagtgagat

SEQ ID NO: 261157 - DNA, 558 bp, Homo sapiens
tggtgtatatttgcacaatggaaaattattcagtctttaaaatgaaggaaatcttgccctttgcaacaacatgaatgaagctcgaggacattacacgaagtgaaatagccaagcacagaaagacagctactgccaaaataatccacttatacgtggattttttttagttgaatttagtagagagataaaaatagtaatcaccaggggctggcaaccatgtgaggtgatggataggttaattattatggttatcaattcacgctgtatacatatgtcaaaaaaagcatgttttatggtctaaatatatgcaacttttatttgtcactcatacatctatgaagctagaaaaataaarttaatatttttaaagagatactctgtaaaatgaaacagaatttttgttgttcttgttttttttttttttatccatgtctctcatttctacctgaacccttgccaatggtgtcttttatatttatattttcaccaatggtctgctcaagtaaacgagtttgattttgtttctatgatggtagacaaaattattccattctctac

SEQ ID NO: 261158 - DNA, 558 bp, Homo sapiens
tggtgtatatttgcacaatggaaaattattcagtctttaaaatgaaggaaatcttgccctttgcaacaacatgaatgaagctcgaggacattacacgaagtgaaatagccaagcacagaaagacagctactgccaaaataatccacttatacgtggattttttttagttgaatttagtagagagataaaaatagtaatcaccaggggctggcaaccatgtgaggtgatggataggttaattattatggttatcaattcacgctgtatacatatgtcaaaaaaagcatgttttatggtctaaatatatgcaacttttatttgtcactcatacatctatgaagctagaaaaataaaattaatatttttaaagagatactctgtaaaatgaaacagaatttttgttgttcttgttttttttttttttawccatgtctctcatttctacctgaacccttgccaatggtgtcttttatatttatattttcaccaatggtctgctcaagtaaacgagtttgattttgtttctatgatggtagacaaaattattccattctctac

SEQ ID NO: 261159 - DNA, 455 bp, Homo sapiens
tttataggtgaatcaagtgtagacctttaggattttggagaaaaatcctctcatttaacagataatgattcaagaaacagctttaggcttgctactggagcttagtagaaacaaaacactcaattatgggcccccagttaccatgtgtgcctccttagtacagacatttcaattytgagatttatttaatagaatagaatgagttttaaaagctcatgaaaatatatgatagaaagttttaatatttcttctttgaaaaaaaaattaagaccccaaatcagcaattatgtgttcttgagctacaaaaaaaaaaaaaaaacaaatttaagaacaacataatgtttcagccaattatttaatctaaatataagctcaaattagcagtttagcaagctcttgattatttccagttttatattctgtatgtccacatttagtagtttaatcagtagcct

SEQ ID NO: 261160 - DNA, 570 bp, Homo sapiens
tatttaattaattatggtattccttacttcttatttcctgtagttatttttttcctcatggataatatatgatcatggttttttctggatctctattgtgctttttctcttcccttatggcaatrctaattttctaaccatatttaaatatcttgacattttctcttatatttttccatattgctggcatatgaactatgtttggattatatttttgttgcccatggaacactgaatatagtaggcactcaatatttgtatacctttttttttaataaattaatgatggcaaagtgttacactaattcttttttttttttttttttttttttttgagatggagtttcgctcttgttgcccaggctggagtgcaatggcgcgatctctgctcactgcaacctcacctcccaggttcaagcgattctcctgcctcagcctccagagtagctgggattacaggcatgtgccaccatacctggctaattttttgtatttttagtagagacggggtttctccatgttggtcaggctggtcttgaactcccaaccgtaggtgatgctcctgccttg

SEQ ID NO: 261161 - DNA, 570 bp, Homo sapiens
tatttaattaattatggtattccttacttcttatttcctgtagttatttttttcctcatggataatatatgatcatggttttttctggatctctattgtgctttttctcttcccttatggcaatgctaattttctaaccatatttaaatatcttgacattttctcttatatttttccatattgctggcatatgaactatgtttggattatatttttgttgcccatggaacactgaatatagtaggcactcaatatttgtatacctttttttttaataaattaatsatggcaaagtgttacactaattcttttttttttttttttttttttttttgagatggagtttcgctcttgttgcccaggctggagtgcaatggcgcgatctctgctcactgcaacctcacctcccaggttcaagcgattctcctgcctcagcctccagagtagctgggattacaggcatgtgccaccatacctggctaattttttgtatttttagtagagacggggtttctccatgttggtcaggctggtcttgaactcccaaccgtaggtgatgctcctgccttg

SEQ ID NO: 261162 - DNA, 581 bp, Homo sapiens
ccaccgtttttgtaggagcagtgagtcactgaaatgcaattcttggttgtgccttgccccactatcctgtcaccccagctagccagaccaaacattccatattaactgtgtttttgattgtctaaaagatttctgtctgatttagattgttcatcatggtattttatagtcttcttctactccaagaagtgtagcatattcttctcttcttataatgtmttttgccttttcgcaaatgcttttgaaaaataagcatccagaatatatataaactctatagatgaagtctaataagatagattcttatttatccatgccactggttcttgtgtcttttattctatttttttgacatgtagattcagagcttttaggaaaaacgatgccatttcattaaattcaaagcattagatgaaagtaataccgtctcttcaacttgcttagagattcgtgtggacttaaaaataaaccaatcattgtgtactccatgaaacagtaaagtcatgtccaggacactaaatgacagttggagtctgcaatgctgtatacattaagtctagttattaaacatccctctaaga

SEQ ID NO: 261163 - DNA, 306 bp, Homo sapiens
ttacacagacaactggagggtaagcaaggcagagaagtgctttattgagtgacagaacagctctcagcagaggggagacctgaagggagtagctcctatgcacaggcaggtagtcctgacatgtggctgagtctggggtttttatgcgctcagaatcgaggaagtgcatgctgattggtccatgggygggcccaggaagagcactatctgactagctgaaaggcatcaaggaagttatcacactgggccatgaaatccacccagaattggcagcccagcccccagggttcaggccatctctggctt

SEQ ID NO: 261164 - DNA, 509 bp, Homo sapiens
aggggaccagtgaaattttggctcaggtctattgcagtgtgcccagtggatccctgaattgatcttgtggttatttccgaagttctggaatgaataataggaaaacattactccacagttggtagagtccttatattacttccctgactcatgaagtgagggccattattatagaaaaggtcaagtgcaggccaccaggactgcctgtatctccagaaatagtaagccaaagagaaatactgctttcctgaaagattgtagagattagtacccaccaaatctctattgaacttaactagctgacatrtccagaatacagatggatcttaataatgacagagaatatataattaccctaaaattaatcagacaatgactccaattgtagcaaagaaaattgccattaggtaacccagaattatcaaaatttagatatcacctggttgaccactggctctagctccctctcaagactccattctcaaatgactaaaagttcttatcttctc

SEQ ID NO: 261165 - DNA, 583 bp, Homo sapiens
gctgtgctgtaagttccagccagccaccaggtccaaaattgtccccattsatatgtaaatgagaatagcaattgccatgaagacttgggatacatttggattttacaagtggacattagaactcccatatatagacttgggccagatagctcattaaccttacaataatataatcccacattttatggagttaaaatttttgaaaccatctattgtgttgtggcagagtttaacgataatactataattcaggaaaatttgtcatttataaaattaatccaaaattaatagttctatttttaacactaatagaaaaataatgagaatatacccttcacaattgcaactacaagagagaaaatatccagtaataaatttcttctatcagaagaaaactttataacacttttgtttacttcctcaatgaataaaagtgtttccaccacgaaatgcttcaaggatgctgagcgcttccttcatgaatttatttctcacatctttgataaagggcacattctgttgactctcctggaagacacaggaagggggtaggtggggaggacttgcaatatccttcacaata

SEQ ID NO: 261166 - DNA, 583 bp, Homo sapiens
gctgtgctgtaagttccagccagccaccaggtccaaaattgtccccattgatatgtaaatgagaatagcaattgccatgaagacttgggatacatttggattttacaagtggacattagaactcccatatatagacttgggccagatagctcattaaccttacaataatataatcccacattttatggagttaaaatttttgaaaccatctattgtgttgtggcagagtttaacgataatactataattcaggaaaatttgtcatttataaaattaatccaaaattaatagttctatttttaacactaatagaaaaataatgagaatatacccttcacaattgcaactacaagagagaaaatatccagtaataaatttcttctatcagaagaaaactttataacacttttgtttacttcctcaatgaataaaagtgtttccaccacgaaatgcttcaaggatgctgagcgcttccttcatgaatttattyctcacatctttgataaagggcacattctgttgactctcctggaagacacaggaagggggtaggtggggaggacttgcaatatccttcacaata

SEQ ID NO: 261167 - DNA, 562 bp, Homo sapiens
ctcagtactgaactgcagctgtgccttgctcctggggaccaaaccctgctacagtgtgtcttgctctgggagtgagyagccactgcacctctctgtcctggaagtttagccagtactataccacaatagcaagccatcctggggccctccagagcactcattctttcccagagctatgccagtgttgtgcccctccccaccaggctcagaaccacagctatatcacagccccttgggcccaagctcctggggtgtgcctcagagcagcagaccccaggttagtgggagaacagcattcactcatgctttggagagtaaactggcacctcaagtccctggcgctacattagttttataagacctcaagcccaggaaaccagctttgcagctgctctgaatatctatgccctggattctagtgccattgtcacttatatggctacaatagctgcctgtgacccatgtcagtcccaatactaagagagatcctcttatggctatgattccccactgtgagaaagataagaatatgaggatccctaaagcccttgccctaataacc

SEQ ID NO: 261168 - DNA, 447 bp, Homo sapiens
gtgacatattgacattcctgggttcttactgctgttgcacttgacctcacagagcctggactactgtcatgtcccatcatcctagggcccagagtcaccacagcatggtactttatcacccagagtccgagctgtcactatgctctcttggatcctcagtactgaactgcagctgtgccttgctcctggggaccaaaccctgctacagtgtgtcttgctctgggagtgagtagccactgcacctctctgtcctggaagtttagscagtactataccacaatagcaagccatcctggggccctccagagcactcattctttcccagagctatgccagtgttgtgcccctccccaccaggctcagaaccacagctatatcacagccccttgggcccaagctcctggggtgtgcctcagagcagcagaccccaggttagtgggagaacag

SEQ ID NO: 261169 - DNA, 554 bp, Homo sapiens
atggcaaatgattcttttaatgtattgttgaatttgatttgctagtattttgttgaagatttttgcatcaaaatttatagaaaatattaaatttatgtaatttcttttcttgtaatgttcttttctgctttagtatcagggtaatgctagcttcattaaaaagtctggaagtattccatcctctccaattttttctaagtgtttgagaaggattggtgctaattcttctttaatcatttggtagaattcagcagtgaagccataggtcctggtcttttctttgatggaagactttgtattactgattcaatcttcttacttattattggtakgttcagattttctatttctttatcattcatggtagggcatacatgtctatgaatttaaccattttttctaggttagataatctgtgtataattgttcataatcatcatttgtgaccctttgtatttctctggtataagttgcaatatctcctctttcatttatgattgtatttatttgagtctttttcttttttcttggtctagatgtaggtttttcaattt

SEQ ID NO: 261170 - DNA, 599 bp, Homo sapiens
aaaagagagtaactatgaataggtctaacagaaacttgtagatcagactcaggcacgcacagaggaccctcaaatatagatgagactttttcaaatctaacaaatgcagtgttaaaatatttggaagattcttaaaacaataatagaaagccctccttgtgcctaactactacatgcactttcatacaggaagccatataattataattaactaatgcagattctattcgccagaatatatctctaccttgagtgaagtattaccatcttaacattctagctgcaccacttaccccttgttttacaaagccctgatgcttaaaagtgtttaattatatatgggtggtatatcatcataaaacactgctaaaaatgtgtgtttcttgtttcaattgttaaagctcatttttttttcttttgagacagagtctcactctgtcacccaggctgcagtgcagtggtacgatctcggctcactgcaacctcttcctcctgggttcaagcgattctcctgcctcagcctcccaagtagctgggaytacaggcacgtgccaccacacctggctagtttttgtatttttagtagagacgggttttac

SEQ ID NO: 261171 - DNA, 562 bp, Homo sapiens
agcatctcagggcacaaagcagcaagagaaaagtagacagtgattaagggcattactaatggagacttagtctattttatgctgccatagctgaataacatggactgagtaatttttaaaaaatagaagtttatttggctgaagattatggaggctaggaagtcagagattaaggggtcacacctggtaaggacctccttgctgcctcataacatggtggatggcatcatatgttgaatagcatgcaagagaaagagaaagccaaacttgtttttataacaaacccattctcatgataacaacccacttctgcaataatgatatttatccattcaagagggtaaagtccycatgacctaatcatctcttaagggtcatgtctctcaacgctgttgcattggaggttaagtttttaacacatgaactttggggacacattcaaaccctttctcaaaagtagctgacatgtggcaaaccctggaatcagaaaagcagagtccaaaaacagtttggctgtgtatcttcaaaactgtacagtacatagggtgccatgatcattgac

SEQ ID NO: 261172 - DNA, 591 bp, Homo sapiens
agagaaagagaaagccaaacttgtttttataacaaacccattctcatgataacaacccacttctgcaataatgatatttatccattcaagagggtaaagtcctcatgacctaatcatctcttaagggtcatgtctctcaacgctgttgcattggaggttaagtttttaacacatgaactttggggacacattcaaaccctttctcaaaagtagctgacatgtggcaaaccctggaatcagaaaagcagagtccaaaaacagtttggctgtgtatcttcaaaactgtacagtacatagggtgccatgatcattgacttcaaatttcccttcactttggcatgtattacttccctrgtggagttgtatgatagcctattgtcacataacattaaaatcactaaataaaatttccttgttgtgatttcatgttcagcaaactgatcataatttggcttttcatacagtttttccgtagggaaataatgtactaactgttacagtaggtagtcaggcagacatgagcagggcaggagacacatcccacccaccaggaatgtcaggtgaccatcatgtggtggttaggcagctata

SEQ ID NO: 261173 - DNA, 593 bp, Homo sapiens
ataatggagaaacccacattatttaataataatggcaccctaacaaagaactgtaagtgctctttaagactttaactgcaccagaccatctattcagtattggaaaaataacttcatgcaagtgtcctctaagattaacagggtagaaaaaggttttctaacagagaaaatgctctaatytgaaagaaaaagtctgcatctctcccctattagcaaagagaagtgtttacttgaccaacaattgtacaaaataacattggtctatgtgaagtggaaacacacttaatggagaaagactcctcattgaaactcctcacagtctcaggtacttttgcatacattattttattcagtcctcaaaaacaaccctatcagataggtgtagttatctttggatgtccaggaaaattctgattacaagagattaaaggatttatagccaagctagaatttgaacccaggtcatgactccatggccaatgttctttccaataaattattctatcccatgagtctgtccaatcatctgtgaggcagaaatgctattcacaatcccttggtcaacaaataccatcagggactgtcacaaatgc

SEQ ID NO: 261174 - DNA, 572 bp, Homo sapiens
cagtgctccccccatattccttcggaaacttcccacagaaattcttacaatttcagtgtctagtgttctagactctatggcttgtaacaaagtatctcacaactcagtggcatgaaacaaacattcattatgcttatggattttgtaggtcragtttggaccgggaacagcatgggcagaatggccctagcctatgatttctggggtatcatccaggaggctgagagatggaatcattggaagactaactcgttcacatgtctgtggttgatactggctatgggcttagagaccttagttggagttgccagccacacatctccatgtggataaggcttcctcattacatggtacctgagttctaagggcaagaactgcctgagagagagtcagaatcagggagtaggacacctttttgagcctagccttggaattcatgcagtgtctcttctgctgcattgtattcattagaagtgatcactaagacatgcccatatttaagggacagagaattagatcaccttttgtgggaaaagcgttaaagaatttatagagatgttttaaaattacca

SEQ ID NO: 261175 - DNA, 653 bp, Homo sapiens
ttagagattggcttgtagtttttttttcttgtgatctctgtgtctgggttaggtatcaaggtgatgctggcctcataaaatgtgtttggaaatattccctccaattctatttttgtaagagttaaaaaagtattgttattcttctttgaacatttggtagaattcagctgtgaagccatctggtcctgggctattctttgttgggaagttttttattgtttcttcaatatctttatttgttatttttctctttaagctttgtagtccttacttatcttggtaagttgtattcttctaggaatttatccctttcctttaggttgtccaatttgttggcatataattgtacatgatagtcccttatgatcctttttatttctgagacatctgttgtcatttcttcacgttaatttttgattgtatttatttgtgtcttctctctttttccttagttagactagctaaaggtttaccaattttgtttacctttttaaamcaaccgttagttttattgattctttttgtggctttttgttttctatttgatttaattctgctccaatttttgttatttccttcattctgttaatattgggtcaaatttgttcttcttttttagatcctttaggcatattgttagactgtttatttga

SEQ ID NO: 261176 - DNA, 617 bp, Homo sapiens
acaatcataagtatttatgtwtttaaacatagaaaaggtacagtaaggcttggcacggtggctcactcctgtaatcccagcactttgggaggccaaggcagagagatcacttgaggtcaggagtttgagaccagcctggccaacatggtgaaatcctgtctctactgaaaatacaaaaagttagccaggtgctatgatgcatgcctgtaatcccagctacttgggaggctgaggcaggagtactgcttaaacccaagaggcagagttttcagtgagctgagatcacgccactgcactccagcctgggtgacaaagcaagaatccatctcaaaataaataaataaataaataaataaataaataaataaatagaaaaggtacagtaaaaacacaatacaaaagattttttaaagtggtacaacagtataactataaatgaaacttgcaggactggaagttgctttggctgagttagtgagtgagtggtgagtgaatataaaggcctaggacattactgtacactactgtagaatttaaaaacaatgtatgcttagtttactgtaaacttattataaaatagttttcttttttcatcaataaactaaccttaacttact

SEQ ID NO: 261177 - DNA, 586 bp, Homo sapiens
agaacccaccttggcctggtgctttctgttttggaaggttattaattattgaaacatttctttagtagatacaggcctagtcagattgcctatttcttcttgtgtgagttttggcaaatggtctctttcaaaaaattggtccatttcatttaggttttcaaatctgtaggcaaagagttgttcatagtattcctttatcattcttttaaaatctataagatctgtagtgatgttccttatttcacttctgatattagtaatttgtttcttctcttttttcgtagttagcctggttagaggttgatcaatattattggtstttgcaaagaagcagcttttagctttattgattttctctacatatgtcctattttcaatttgattaatttatgctctagtgtttaacttttttcttcagctaactttggatttgctcttctttctctagtttcctaaagtagaagtttagatgattgattttatatttattttttctaatagatgcattcaatgctataaattttcctctaaactgtgttttcactcttcccacaaactatgattagttgtgttttcaatttcattt

SEQ ID NO: 261178 - DNA, 605 bp, Homo sapiens
gtcacacaattctagccaatgaggcataaaaaaatctgggttcctaaggaagatgttgcttttctgactaaaataagacagcaatgattattactgtcacttctatcttcttcctgcctttaacaaaatgaaatgyctggagtcacagcaatcaatttgttaccatgaggtaaaagaattagggaatggcctagagaaaggcagaaaagctgaccctgaaatcttcaagttactgcaccaaaatcagcagctgcttaccattgtatttcttaatggggggaaaaataaacccattgacaactggaagttttgttatgtacatctatgaatgttcccaataaatatacctgttttgtagaagataaaaatgaggtgtagagttcttaacaacttgctcaagagcatgctgttaccaagtgataaagtcaggattccaaatcaagtttgattcaaagcttgggctcttctctggaccggataaactcacagctgaattctaccaaacataaagaagagttgttaccgatcctactgaaactattcaaaaaattgaggaggagggactcctccctaactcatcctatgaagccagtattgctttgata

SEQ ID NO: 261179 - DNA, 547 bp, Homo sapiens
tggggtgtggaggatggtggccctcttctcacagctccattagatggtgccccagtagggactctgtgtgagggatacaaccccacatttcccttccacactgccctaccagaggttctccatgagggccccaccccctcagcaaacttttgcctgggcatccaggtgtttccatataccttctgaaatctaggtggaagttcccaaaccccagttctttacttctgtgcacttgcaggctcaataccacatggaagctgccaaggcttgaggcttgcaccctytgaagccatggcccaagctctacattggaccccttcagacacagctgtagcagctgggacgtggggtaccaagtccctagtctgcacacagcatggggaccttgggcccagcccacaaaaccattttttcttcctaagtctctgagcctgtgatgggagtggctgctgcaaaggtctctgacatgccctagagacattttccccattatcttggtgattaacattcagctctttgttatttatgcaaatttctgtagctagct

SEQ ID NO: 261180 - DNA, 630 bp, Homo sapiens
acttactatggggaaggtactctgctaagtattagaagacaaacatgaatatgacttaaaaggcttatagtctaggagaggaaacagaaagtaattgcagtaagatgcagtgatagaggtttgcccagaagactaaaggccaagtttcatctcacacaaaagactcagtcaaagactaggtgtttctctgtaaggtattttatctacagagaatagtcaataaatatttatagatatgtgtgatattggagcaaagtactgattgaaatgggcgtggtggctcatgcctgtaatcccagcactttgggaggctgaggtgggcagatcacaaggtcaggagatcgagaccatcctggctaacacggtgaaaccccgtctctactaaaaatacaaaaaaattagctgggcgtggtggtgggcgcctgtagtcccagctacttgggaggctgaggcaggaaaatggcttgaaccccggaggcggagctggcagtgagccgagattgcgccactgcactccagcctgggcgacagagtgagactccrtctcaaaaaaaaaaaaagaaatctgttattctttttattattctttgtacttctaaccttaaaatacaaattgctttgggggttatg

SEQ ID NO: 261181 - DNA, 603 bp, Homo sapiens
aacagaatcggcaagagattacctgatatcttaaaataaaactttattgaaacataatttgattaccatacaattcacccatttaaagtcaacaatacaatggtatttactgtattcagagttgtacaaccatgcatgcatgttccactacaatgttttctaaacattggcgtcacccctgaaagaaagctcatactcattatcagcagcccccacttccccacaaatacccttattacccctgaagcaaccattaatctgtttctatctttatagattttgctattctggacatttcatatattctattctatttctattatatttcatatattctattctattctattctatttcatataaatagaatcttatgactgagtgacagccttctttaactctattgtgakttcttttttgacttactggttatttagaagtgtgttgtttaatttccacatatttgtgaatttctcaaatttctttgttattgttttctaatttcaccctttgtggctggagaacatactttgtatgatttcaattcttttcatccttttacatatattaagccttgtgttacagactagtgtatggcctatt

SEQ ID NO: 261182 - DNA, 376 bp, Homo sapiens
caagagaaaaattacaaagaatactaaaaggcaaaaaaaaaaaaaaaaaatcctacaatttgaagagacagggcaagcacaagaaccatacctggtagagatatttctaacagagatgttaaatcaactaagattaatatgctaaaggccctatggataaagtagacgtcgtgcaagaacagatgggtaattaagcagagagatggtaatcctaagaagaaagcaagaaaaaagtgctaatgatcaaaaccmctgtaagagaaatgaagaatatctttaatgagcttattactaggctggacatggcttgaggatgtaccgacagaaacttccaaaactgaaaagcaaaaaaaaaaaaaaaagaaaaaaacaacca

SEQ ID NO: 261183 - DNA, 555 bp, Homo sapiens
cgtggctattaaacactagaagtgtggctggtaggactgaaaaactgaattttaaattttgtttaactttaatttttttttttcattcgacaaatgtttattgagtacctgtcctgtgccaggttatcttttaggcactagggatacaccagagtaccaaacagatcaagagtttctgttctgtgtgtgtgacagtatatacagtggtgcaaacatggctccatgcatccttgatctcctgggctcaagcaatcctcccacatcaacccctctaagtagctaaggctataggcaygtggcaccacccccagctaacttttgtatttttagtagaaacagattttcaccatgttacccagtctgtctctaactcctgacctcaaggtatctgcctgccttggcctcccaaagtgctgggattacaggcctgagccaccacactcagcccagaccaagagttttaccttcatgaagctaatagtctactgacaaagataagaagagcatgttttaatatataataaatgatgtcattattttatatcatttattcaa

SEQ ID NO: 261184 - DNA, 581 bp, Homo sapiens
cccagcccagagacatggcacaaccagggctgtgcaactggacatgaggccagtcctgccctctttttgctttactcctgacttgccactctcagcaataggtcctgacccctcaagaactgttttggtgactttctattagggcccacagaatagagactcagcaaatgttgagtggagttgaccatttaactcttgttggtctcagatctatccttaggttcaatttccacagatctgacactgtgtccttttggctcttcatagctgctgactgattttcttttttaaactcccaccctacccttacccactacagtacgtttaggaaatgtattgtcttatggcaaagagaaataycgtcttcctgagttgtgaaacaactcagaaacattgtaggaggcattttgttttacagaccagagggaaacagacatggattaagtcttctcagaattaagttgaaatcaccaagctgataaataatgtctctccctctcctctgacctgtttatagaatttgtcctcccgttgttttctccctccttcccttccttgtttcaggccatggcctgtgcata

SEQ ID NO: 261185 - DNA, 683 bp, Homo sapiens
aatccagtacatcaggaaatttaccaccagggctttctaaaccatgtgttgctccctaattggggctcttacgctgagagtttgttttgaagataattaatgagaaacatttggaaccctggcctctgagcacctctctgtagtcctccaaatgggttcactaacaattagtgttcacacttttgtgcctacccacacacagccctgagctgtgactataaatcaatacggtggattccacaagtcataaaactcagtccattattttatagtacagtgtgtaaaggcaggtgatctaatgggcaaagctgttatatcaattaccattacctaataatttctggaaaccaaattataacattggaygatagaaaaactagtctgcttgccatttgagtttactgatacttttctgtcagtaaaaagactaagcttctaaaaatcagtgagattatgtaatagtattaataacaaaaacaataataacaaatgtcacaaaaatagccccctcttgggcaactattacgtgttagagtggatttctggatctggaaattacctgcttcatttgatacttgaggacactaaggcacagaaggaataaagattaaaataatttacccaaagtcatctaattaggtgagtggttttcagtcctaactgtacattaaaatcacctacag

SEQ ID NO: 261186 - DNA, 524 bp, Homo sapiens
gactcaaacataagaactaaaattataccatttctagaagaaaatacaagagaatgtcttagtaactttggattattaaatgggatataagtaggaactattaaagaaaaaatcaataaactggatttcaacagaataaaaaacttttgctctttaaaagatactgttatggctgggcacggtggctcatgtttgtaatctcagcactttggggggccaaggcgggtggattgcttgagcccaggaccaagctcagaccagcctgagcaacatgataaaaccctgtctatacaaaaattagctgagtgtggtgatacatgcctgtagtgccagctacttgggaggctgacacaggaggctcacttgaacctgggaggtggaggctgcagtgagctgagatcacgccactgcactccagcctggacaacagagtgagaccctgtctcaaaaaaaaaaaaaaaaggatactattakgaaaatgaaaaagacaagcaacagattgggaaaataatatgtgaaaaaca

SEQ ID NO: 261187 - DNA, 581 bp, Homo sapiens
aaacctcaaaggcagccagaaaacacacacatgcacacactatatatatgaacaaagctgaaaatttgactaacttctcattagaaacaatgaaagccmaaagaaaattaaatgacatctttaaagtgctgaaagaaaaaaaactattagtcgagaatttgtatcccaaaaaaatccctcaaaaataaagacaaaaattaaaaacattttaggcaaacaaaagctgagtgcattcattgccagcagacctgcactaaaagaaataaaagaggatatttttcaagctgaaagaaataatatcagatagaaatttggatctgcaaaaggaataaggaaaaacagaaatgataaatatgtgattaaatataaaatacttatttctaatttttaaacttattttaaaagacatttaattgttaataacagtgtatatgggccttacaacatatgcagaaataaactgtatgacgatgataatacagaagactggaagggagaagtagaaatatgctgctgtcaagtggtataatattatttgaaaataagttgtgataagttcaagattcatattgtaaactgta

SEQ ID NO: 261188 - DNA, 618 bp, Homo sapiens
caaaaggcaaagatgaggaaacagmaagttcatctcctgagttggaaaatttagcatcaggtttagccccaacattactgctcctcagtgatgataagaacaaaccggcagtggaggtatcttctacagctcagggagacttcccatcagaaaaacaagatgttgctttggcagagctgtctttggaacctgagaagaaagacaagccacaccaaccgttggaattaccaaatgctgggtcagaattttctagtgatttaggtagacaaagtggatccataggtacaaaacaagcaaagtctcccataactgaaacagaggattctgtttcagaaaaaggcccagctgagcttaggagcagagaaggaaaagaagaaaatagagagctttgtgcatcttctacgatgcctgcaatttcagagctttcatcattgcttagggaggaatctcagaatgaagaaattaaacctttctctcccaagatcatcagcctagagtcgaaagaaccacctgcctctgtagctgaaggaggcaacccagaagaatttcagccatttactttttctttaaaaggattatcagaggaggttagccatccagccgactttaaaaagggag

SEQ ID NO: 261189 - DNA, 618 bp, Homo sapiens
caaaaggcaaagatgaggaaacagcaagttcatctcctgagttggaaaatttagcatcaggtttagccccaacattactgctcctcagtgatgataagaacaaaccggcagtggaggtakcttctacagctcagggagacttcccatcagaaaaacaagatgttgctttggcagagctgtctttggaacctgagaagaaagacaagccacaccaaccgttggaattaccaaatgctgggtcagaattttctagtgatttaggtagacaaagtggatccataggtacaaaacaagcaaagtctcccataactgaaacagaggattctgtttcagaaaaaggcccagctgagcttaggagcagagaaggaaaagaagaaaatagagagctttgtgcatcttctacgatgcctgcaatttcagagctttcatcattgcttagggaggaatctcagaatgaagaaattaaacctttctctcccaagatcatcagcctagagtcgaaagaaccacctgcctctgtagctgaaggaggcaacccagaagaatttcagccatttactttttctttaaaaggattatcagaggaggttagccatccagccgactttaaaaagggag

SEQ ID NO: 261190 - DNA, 618 bp, Homo sapiens
caaaaggcaaagatgaggaaacagcaagttcatctcctgagttggaaaatttagcatcaggtttagccccaacattactgctcctcagtgatgataagaacaaaccggcagtggaggtatcttctacagctcagggagacttcccatcagaaaaacaagatgttgctttggcagagctgtctttggaacctgagaagaaagacaagccacaccaaccgttggaattaccaaatgctgggtcagaattttctagtgatttaggtagacaaagtggatccataggtacaaaacaagcaaagtctcccataactgaaacagaggattctgtttyagaaaaaggcccagctgagcttaggagcagagaaggaaaagaagaaaatagagagctttgtgcatcttctacgatgcctgcaatttcagagctttcatcattgcttagggaggaatctcagaatgaagaaattaaacctttctctcccaagatcatcagcctagagtcgaaagaaccacctgcctctgtagctgaaggaggcaacccagaagaatttcagccatttactttttctttaaaaggattatcagaggaggttagccatccagccgactttaaaaagggag

SEQ ID NO: 261191 - DNA, 618 bp, Homo sapiens
caaaaggcaaagatgaggaaacagcaagttcatctcctgagttggaaaatttagcatcaggtttagccccaacattactgctcctcagtgatgataagaacaaaccggcagtggaggtatcttctacagctcagggagacttcccatcagaaaaacaagatgttgctttggcagagctgtctttggaacctgagaagaaagacaagccacaccaaccgttggaattaccaaatgctgggtcagaattttctagtgatttaggtagacaaagtggatccataggtacaaaacaagcaaagtctcccataactgaaacagaggattctgtttcagaaaaaggcccagctgagcttaggagcagagaaggaaaagaagaaaatagagagctttgtgcatcttctacgatgcctgcaatttcagagctttcatcattgcttagggaggaatctcagaatgaagaaattaaacctttctctcccaagatcrtcagcctagagtcgaaagaaccacctgcctctgtagctgaaggaggcaacccagaagaatttcagccatttactttttctttaaaaggattatcagaggaggttagccatccagccgactttaaaaagggag

SEQ ID NO: 261192 - DNA, 454 bp, Homo sapiens
agattgaggtctgtagccaccgttgccttccatttcagcatttcaggtgattcatcttgtgaagagatgatgtaaacttaaggtattaataaatacagtacagtactgtaagtgtattttctcttccttatggttttctgaggaatttctcttttctttagcttatttgattttaagaatacagtatataatatgtatacaaaatatgtgttaatcaactcttgaggttattggtaaggcttccagtcaacagcagactattagtagctaagtttttggggagtcaaacagtacacatggattttcagttgtacagagagtcagtgccctaaaccccatcttgctcaagagtcagttgtggtttattttaccttgccactttttctccctcccttcatattacatctctaaaggcagtgcttgyatattaaatgctttttctcaacactaaaaa

SEQ ID NO: 261193 - DNA, 375 bp, Homo sapiens
caaggctgtattagtagcgtactctctgaggagctgacatttgaacagagatctaaattaagtcaaggaaggagctgagcaagtgtctgggagaacaragttccaacagcaagtgcagtgggtctgctgggaaaaccaagacatccatggaaatgaagcctttttgtcattgtttgtttaaatccacatttcatctggatacaaatacttagacttagcatcagttggcattccagctaatgagggtgttgagtccataaagctgttgatttagaaattgtggcttgtttagtcttttacgaatgataggctttatcctctcattgctctttccccagtacctagcacaatgcctgggacatagtaaataaacat

SEQ ID NO: 261194 - DNA, 375 bp, Homo sapiens
caaggctgtattagtagcgtactctctgaggagctgacatttgaacagagatctaaattaagtcaaggaaggagctgagcaagtgtctgggagaacaaagttccaacagcaagtgcagtgggtctgctgggaaaaccaagacatccatggaaatgaagcctttttgtcattgtttgtttaaatccacatttcatctggatacaaatacttagacttagcatcagttggcattccagctaatgagggtgttgagtccataaagctgttgatttaraaattgtggcttgtttagtcttttacgaatgataggctttatcctctcattgctctttccccagtacctagcacaatgcctgggacatagtaaataaacat

SEQ ID NO: 261195 - DNA, 572 bp, Homo sapiens
gactctttgtccagaagaatacacacaaaactagcaagagtggttacctcaggggraggggctaagtgtaggggtagacttgtttttcaacctatatcatttggtacttttgaatttttattataaagaaggtttaagcaatcagttgtaagttggaagctgcattgagagcagcaatgacctcctatctggataatctgctctccccaactacggaagatcagaaaactggggtgagatgtgtcctcagggtagagaaagagaaatctaaaaagagttctgataagacatttcccaggttaacatccatggctttccctgatcacatcctcctgtaaagacttgtcctcttcacatattagcacaaaggatgcaaaatgtaaagagagtacctaaaaagtaacaaacaaacctaccccaaaaaagcagtttaaaaaaaaaaaaacctattccaaaaaagaatcatttcagaaaagataaggaaattgtatattcttttactctatttataaagaaacagaacttaggttctttggagaaagtaaagaaaaaaaccatagaatcaaagatta

SEQ ID NO: 261196 - DNA, 572 bp, Homo sapiens
gactctttgtccagaagaatacacacaaaactagcaagagtggttacctcagggggaggggctaagtgtaggggtagacttgtttttcaacctatatcatttggtacttttgaatttttattataaagaaggtttaagcaatcagttgtaagttggaagctgcattgagagcagcaatgacctcctatctggataatctgctctccccaactrcggaagatcagaaaactggggtgagatgtgtcctcagggtagagaaagagaaatctaaaaagagttctgataagacatttcccaggttaacatccatggctttccctgatcacatcctcctgtaaagacttgtcctcttcacatattagcacaaaggatgcaaaatgtaaagagagtacctaaaaagtaacaaacaaacctaccccaaaaaagcagtttaaaaaaaaaaaaacctattccaaaaaagaatcatttcagaaaagataaggaaattgtatattcttttactctatttataaagaaacagaacttaggttctttggagaaagtaaagaaaaaaaccatagaatcaaagatta

SEQ ID NO: 261197 - DNA, 481 bp, Homo sapiens
ccattccactaacatctgctgactacctgtttatgtcaggctctgtggtaggtattagaaatagaacacaaataacatatgcttcctcctcagcttgggccacccactcccactgtgatagagtctcttcctcagacagggtgtgggacctacagcaagactgtgaccactaccagtttcctggggctctcctgccttctcctctgccttcctgtcccattcctcccactccccataaaaccttcccatccttcatggacagcaagaatctggggctcagtggttctgcctgaaatgatcctaaggacctcctggatggtggctggattcttctggggctcagcaatatgttacaatgggcacttgcatgaagaaaagtgagcagatggcttgkggaggtgtataagatatggcagctctctggaagtcccctgcaagaggcacaaagcagaatgaagttggtctgttggggagaagtaca

SEQ ID NO: 261198 - DNA, 593 bp, Homo sapiens
aaaatatctcaaagccttgaaaactgtaacgtattaaacggaaatttggtaggcattgcttcgcacaatcccatgatgccagcttgctagcatggatatgcccagggcaccctaccagatgctggacacaaaagctcaacayggtagttcttccctgcaagggttcacagcccagtggaggagatcgtcaggtgagtaaatcatcctaccgtacagccacgatgtgcagaggactcagaggagggagtgaaactgccactcccaggcccatgtctcagaccaacccttcccctccagccagttgtgtagactgcacctcttctctccctcctcagtgaatacaggctaaggaacgcaggcttctcttacccaggttccctgaactgctttttttagcccatctcatcttcttctggttttgttcaattttctgccagcttttttatccggctcacttatctccctttatccctcagaaccatctccagtaattccattgactggcaggacatttttccatcagagagtagagctgagctgcggcagtgccacggccacctcccagcaacaacccctccgaccccagcagaccc

SEQ ID NO: 261199 - DNA, 593 bp, Homo sapiens
aaaatatctcaaagccttgaaaactgtaacgtattaaacggaaatttggtaggcattgcttcgcacaatcccatgatgccagcttgctagcatggatatgcccagggcaccctaccagatgctggacacaaaagctcaacacggtagttcttccctgcaagggttcacagcccagtggaggagatcgtcaggtgagtaaatcatcctacygtacagccacgatgtgcagaggactcagaggagggagtgaaactgccactcccaggcccatgtctcagaccaacccttcccctccagccagttgtgtagactgcacctcttctctccctcctcagtgaatacaggctaaggaacgcaggcttctcttacccaggttccctgaactgctttttttagcccatctcatcttcttctggttttgttcaattttctgccagcttttttatccggctcacttatctccctttatccctcagaaccatctccagtaattccattgactggcaggacatttttccatcagagagtagagctgagctgcggcagtgccacggccacctcccagcaacaacccctccgaccccagcagaccc

SEQ ID NO: 261200 - DNA, 593 bp, Homo sapiens
aaaatatctcaaagccttgaaaactgtaacgtattaaacggaaatttggtaggcattgcttcgcacaatcccatgatgccagcttgctagcatggatatgcccagggcaccctaccagatgctggacacaaaagctcaacacggtagttcttccctgcaagggttcacagcccagtggaggagatcgtcaggtgagtaaatcatcctaccgtacagccacgatgtgcagaggactcagaggagggagtgaaactgccactcccaggcccatgtctcagaccaacccttcccctccagccagttgtgtagactgcacctcttctctccctcctcagtgaatacaggctaaggaacgcaggcttctcttacccaggttccctgaactgctttttttagcccatctcatcttcttctggttttgttcaattttctgccagcttttttatccggctcacttatctccctttatccctcagaaccatctccagtaattccattgactggcaggacatttttccatcagagagtagagctgagctgckgcagtgccacggccacctcccagcaacaacccctccgaccccagcagaccc

SEQ ID NO: 261201 - DNA, 542 bp, Homo sapiens
gcctcaatagtcaaataaacatcagaagatgagggtttttcccccttcctctgctgttacaaaatatrgcaacaaagtggggcaaagtagcatgaaacctgaagcagctcacacagaaggactcaagagaataggatcttccaaagggaagtttcagttagcttcagtgttctcagaattgcatctcctaaattttgattccaaaagggaaattccctatggcccagcaggcccatacaatcaattttccacattatttgtgtaaatatctgtcctgttgcatattctggaagaagtgacagtttcaaaatgagacttgccaacacacccccttgtcccaaacaataagaatcagcagaacatccctatcagccctctcaatttattcttcatcagaagccagtggaaaaggaattcagcaaagtgagatccccaactgcacaaagcactaacctaatcacacccaaaggaaaatgagagaagagtttgacctagagagtcttaaattagtgggcacactcagagactcaggggaattttag

SEQ ID NO: 261202 - DNA, 652 bp, Homo sapiens
tgatgaactcctgctggcctgaaagaagtagaaatgaccaggttgttaactgcctacaggggccaagtggcaagaagtatgggaggcctccaagaccgagctgacagccaacaaggaaatggaaatcttacccctataactgcaaggaactaaattcaaccaacaatctgaatgagcttcraagtggattctctccaaaaccccaagaaagaaacacagcttggctaacaccttgatttcagcctcatcagagcctgagcagaggactcagtcatgccatgcccagacttctaagctacagaagtgtaagttgataaatgggcattgttttaaaccactcgacatgggggtttattatgcagtagaaagaaactgatacaagtaccaaattcataaggttttgctgaggaaaaaatacacataaagcatttagcacggtttgtggctcagtgaatgttagcgattctcaacatccatgagtcaacaacaaggcactgaaagaaaagacaaagctttacagcatcaatgtcctaccttgaaaaaatcgcttaacctctctgaatctcagcttccccactagtaaaatgaaagagtgtagctcaataataatattggcatagagccttcacaaatggtagctcattcaattgct

SEQ ID NO: 261203 - DNA, 652 bp, Homo sapiens
tgatgaactcctgctggcctgaaagaagtagaaatgaccaggttgttaactgcctacaggggccaagtggcaagaagtatgggaggcctccaagaccgagctgacagccaacaaggaaatggaaatcttacccctataactgcaaggaactaaattcaaccaacaatctgaatgagcttcaaagtggattctctccaaaaccccaagaaagaaacacagcttggctaacaccttgatttcagcctcatcagagcctgagcagaggactcagtcatgccatgcccagacttctaagctacagaagtgtaagttgataaatgggcattgttttaaaccactcgacatgggggtttattatgcagtagaaagaaactgatacaagtaccaaattcataaggttttgctgaggaaaaaatacacataaagcatttagcacggtttgtggctcagtgaatgttagcgattctcaacatccatgagtcaacaacaaggcactgaaagaaaagacaaagctttacagcatcaatgtcctaccttgaaaaaatcrcttaacctctctgaatctcagcttccccactagtaaaatgaaagagtgtagctcaataataatattggcatagagccttcacaaatggtagctcattcaattgct

SEQ ID NO: 261204 - DNA, 576 bp, Homo sapiens
ctgtccagaggcacaaaggggaatctctgaaggacctgacagtatgcagacagtgctcaatatgagcctcccyaggtcctccctctatgggtcctgtctgcttaggaaccaagcacctttaccacacacactcagccactccaagggggctgtgtggggaaggtgaactcagttctgttgctgatctgcctgtcattatctaggcaactccccattatccagcagactcataagcttacatgcctttccaaaagaatttgtactggcccagtgaaattatgacctctctgcatggatacctctttccttctccctgcctatttttctccttttgcctattagtatctaacctgctaagtattttccttagttatcttgttgttttctcccactaaatgtgagctttgtgaggacaatgatttacctttatcacagctatgtcttcagcaatcaaaagagtgcctgtctcatagttggaactccataaatacctgttgcatgaacaaatgaggaatgaataatcggaaagccaatttttaaaacaaagggataagtcaccgacttacaaaatttgct

SEQ ID NO: 261205 - DNA, 535 bp, Homo sapiens
ggggacctgaatgccacaatgtgaatttgatgcagttgcaagataaaagaattgacttatcagggctactattctagggacacttgtgtcaacttaaatgaaaaaaatcttgaagaaatttatttgaaaaaamatcttggtaaacgtgagaaatatattacagaaatgtaatgtacacatttacctttgatgcaaaagatataaagtgttttgtgacttctttgcctaccactaactttaagatgtaaaaagaaagagacataaacacaaacaacacaaaaacaaagaacaggtatgatatattaaaagggttagaataccatataggtgcacacacatatacacacaaatgaagatggctacagaccagactagagtagaacaaaagttgattattatcagcaagaatttataggtacagaaatataaatatatgaatctatatagacatatgtatcattttaaattgtaaagaaagatttcttctataaaatgtccttccatttttgatacatatttttcaaaaattaaaatc

SEQ ID NO: 261206 - DNA, 428 bp, Homo sapiens
aatttaggagtgcatatatggacaatgattctttttgtacttcgtgtaggtaatcaggacaagtatagcatgcactgaagcttattttgcagctaggatggtcttgccgtgatttgtctttggtggcagtgggagactagagagagagtgtgtgtgtttcaaaagaaarctatagtattagattaacctttgatttctgggtggccacctggccacccatgatatggagctgcccataatgcccctcctcagcatgaagcagccagaaagatcaactatcagatttgctattattaagaaattaataaatataaagtaggggactgaaactgacccagttgtctcagaggattgatgtctatgggattcttttgaataagcatagaaactgactcacctagtcttaaaacttgagaatgttatgtttg

SEQ ID NO: 261207 - DNA, 523 bp, Homo sapiens
tatcctgaatgtcctttatttaacaagaagaaagtatagtaattgtaggctacatttaaagatatctatcaattttaagattaagtagttgtgagaccacattgtggaatagaataataaaatggtgatcaatgctgtgataaccgattaataacaataaatttagaaaatattattcctgcttttcaaattttcctttgttgctaaagtatcagtattcatttcctaaggggtttcataacaaattactacaaatcttggcttgtagatacatcactttgtctcttgtaaggatacttgtcattgaacttagggtccacctaaattatcctaggatgatgttctcttgagtcgcttattttaaatacatctggaaagactgtttttctaaataacattttctaaataaygtttctagttgtaggtgtgcatatctttgaggggacaatcattaaactcaatacagtatcaatggttatatttctccaaatatataaagaagttattagtatacaaattgaag

SEQ ID NO: 261208 - DNA, 634 bp, Homo sapiens
ctctgctcattgcaactgcaaccctccaggctctagtggtcctcccactagagtagctgggactgcaggtgctcaccaccaagcctggctaattttgcttattttttcttttttgtagagaccaggtcttactatgttgcccaggctggtctctaactcctgaactcaagtcatcctcttgccttggcctcccaaagtctgggattacaggcatgagacactgtgcccaacaaatatgtcatatttttaaatgttatgattartgagtttgtgtgttctttcaaggaatctgtttctactcaagattctattaataaaatttttgtgttactctttagaaattgtacagatgttacctttgggcctatgatccattaaaattcgtttgtttatatggtgttagagttgggattggtattctatgttttcattatatataatgagatgggctagggccatttgtttaacaaattagtcattttctattgaagtacattgcatctttgccatacatcagctgaccagatatacctctattttggacttttttaattcctttcgtttgtctgtatttacataaatgtcacactgagttcataacagtagcttttcagtaagtactgctacaactggg

SEQ ID NO: 261209 - DNA, 634 bp, Homo sapiens
ctctgctcattgcaactgcaaccctccaggctctagtggtcctcccactagagtagctgggactgcaggtgctcaccaccaagcctggctaattttgcttattttttcttttttgtagagaccaggtcttactatgttgcccaggctggtctctaactcctgaactcaagtcatcctcttgccttggcctcccaaagtctgggattacaggcatgagacactgtgcccaacaaatatgtcatatttttaaatgttatgattagtgagtttgtgtgttctttcaaggaatctgtttctactcaagattctattaataaaatttttgtgttactctttagaaattgtacagatgttacctttgggcctatgatccattaaaattcgtttgtttatatggtgttagagttgggattggtattctatgttttcattatatataatgagrtgggctagggccatttgtttaacaaattagtcattttctattgaagtacattgcatctttgccatacatcagctgaccagatatacctctattttggacttttttaattcctttcgtttgtctgtatttacataaatgtcacactgagttcataacagtagcttttcagtaagtactgctacaactggg

SEQ ID NO: 261210 - DNA, 583 bp, Homo sapiens
ataatgtgatatcctcccttgcctctagtaattttatttcctctaaagtcygctctgatatttatatagccacttctgcttttaaaagttatttttaaaaataattgaaagtgttttatcctttcactcggaatctacctatgttattgggtttacagttatttccttgtgaacaaaatatggtagtgttgtacttctatgttcactctgccaattttttttagcttatgtatttataccatttatatataaaataattattgatttgtagggcttaagaatgccaatttaatttgtcctcagatatttctctcacacttttttttttttttgcctctctgtcacacatttttgcctaccaatgggttattttaacatttcgtagtgttcactcttgtatttacttatatattcttttggatatcacttttaatagttttcttggtggtcactgtaaatattaaaatatacaagcagtttatatcagttatcagtattttgcctgtttgaataaatatttgaaccttacttttctttggttattctactcccttaatttttaaatataagtgaatcagtaata

SEQ ID NO: 261211 - DNA, 508 bp, Homo sapiens
aatctgctattgtaaaaactttgtctggaaaaaaggtaagaaaattggaagtatgataccaagataattgtggctgcttgctcagagatattttattggtggcattgctcttttgcatttattgttatctgggctatgacattggttttcctgccacagagacagactagccatcccaccacaagtagatttatctctcaaatgtttcatccctcctattacactaatttacmacatctgaaggataaatccagattcacaatttattaatgtgtagtgaataaataaattattctatggaaagaatacatgttatcttctggaaaatgtctgaatggaaattgccatgttttcattagtaactcatttatgccaattgtatacatgtgggcactttgctaagctgtcacacatgatatgttatttaatcctcacaacagccctgcaattgagggcttttactattgacattttagatataaagaaacttattcataaggtcaagtga

SEQ ID NO: 261212 - DNA, 475 bp, Homo sapiens
ctttgtctgactgttggctaatgtaagtgttctgaggacatttaggctaggctatgatgttaagtaggttaagtacattaaatgcatattcaacttmataatattttcaacttgtgatggatttatcaggacataaccacatcataagtctacaagcatttatactcaaataatgggaacttgtgctaatcaaaatacatgtcaataatttaaataacagctttatttattatactttctaacttaaagcagcacatatgtccatcaacaagaaaactgattaatacattgtaaattaatcgtaccacagaatactatataccaatgaaaatgaaccaactattgctataagcaatagcttggatgacttgctcaaataaaatgttgagtaaaagaaaccagatgcaaaagagtgtgtctgtatgatttttatacagaattcaaaaataagcaaaattaatttaggcatttaaag

SEQ ID NO: 261213 - DNA, 551 bp, Homo sapiens
atcacttacctagttctttctgatgttttgctttttacagaaacgactaccacattatctgtaagaaaaaaaaaagaaatccacatacttcagttcactcctttaaattcaatctaggcttataacgcagtctgcttttgaaaatgagttttgtccagtgttccctgagttcagccttaaagcagaaaaatactcacatattgtttttatacagattctgttttctcccaaatttcaaatggttctcaaaggaaagcaagtttataaaaatgctacctatatccaccaacacaggtcatatttttttcttttaaagtaaaaaagaagatctggaatgtctgccaagctattccaatgcatgtttattaaacattatagtatctttctagcttaggctctggatatacaaaaaataaagagcacagattctccttgacttctgatgggattcttgatcttgataaacacattgtaaattgaaaatatcttwagtccaacgtgggcattttgtatacgtgatgggaggtaaatgtacaaaacacaacttaaca

SEQ ID NO: 261214 - DNA, 583 bp, Homo sapiens
ataaaaaatgtatatagcattataaaatatatggatatctggaggttctaaaagcacatgatgatctaatttaatatgtaaattttgtttagattctgcttccaaataatgaaaccataaaaggttgggaacaattgtggagatttgaatatgggcaatgcatgagaygactttagaaaaatagggttactacatgtgacaaataaatgttatggaatatactgctcttatttttactatataaatgctgaaatgcttaggggtaaagtgtcacaagatctaaaacttattttcaaaatttttagcaaaaagaaaatatatccagatgaatagataaagactaaacagagcacaatgctaccaataaccaaattaagatagtagacatatgtgttcatttttaaatttacagtatttttgtttccaaaattttctaataacttgaaaaattcagctgaaaaaaattcagggattttctagaaattatagatgacattaataatgttataaatactaataatgaaatgaaagatatcctcttgataatatttacttttaaattgacaaactttatatactaatt

SEQ ID NO: 261215 - DNA, 538 bp, Homo sapiens
tttagataaggaaaacatggtacatatacactatggaatactatatagccattaaaaagaatgaaattattttctttgcaaaaacatggatgctactggtgaccattatcctaagtgaattaaggcacaaagagaaaaacaaatgctgcatgttctcatttacaagtggaagctaaatatgaggtaaacatggatataaagatgggaggaagagatggaatggggaagggctgaacagcaaactattgwgtattatgcttactatgtgggcgacaggctcagtcataccccaaacctcagcatcacataatatacttatgtaacaaacatgcacatgaaccaagaaaaataaaataacaacataagtaaaaaagaaaaacaaaacaaacaaacaaaaacattgtgtcccaagaaacaaagaggtcaatgtcactagacaattcaaaactagaataaacacagaaagataaattgagagaaatatggcttggggccagatgacatagtattataatatctaggtcacagtatagcgttt

SEQ ID NO: 261216 - DNA, 599 bp, Homo sapiens
caaataatttttaatgtagagctatccaaaatattgcatgggacatatttatacgaaaaaagaaatcattgtttatctgaagttcaaatttaactggacattctgtgtttctgtttgctaaatctgrgaactctaatcatataataattatagtaatgtgtcatattatgttttctcagtctcaatgcctcttgtacctgatggtaatagccatatgtcttttgtggaagtggcacggggaaattgagtatgacatttggaaggggactgataggtatttgaatctggactctatctttactagctaggtgaaatggggccagaaaattaaccttccacatgatttaccaccttctcccaataaaatgggtttactacacaagacttgcagattctgtaagattggccaacaataaattgactgtgcttgatacactgtagctgctaaagaagataaagttattttattgttctacttattctaataaaaataatttaactggaaaaataattctaagaatctaaaggtttctggacacaaatgaaataaagggaagataattcttcatctcttgagagtcatcatgaacccaaactaa

SEQ ID NO: 261217 - DNA, 599 bp, Homo sapiens
caaataatttttaatgtagagctatccaaaatattgcatgggacatatttatacgaaaaaagaaatcattgtttatctgaagttcaaatttaactggacattctgtgtttctgtttgctaaatctgagaactctaatcatataataattatagtaatgtgtcatattatgttttctcagtctcaatgcctcttgtacctgatggtaatagccatatgtcttttgtggaagtggcacggggaaattgagyatgacatttggaaggggactgataggtatttgaatctggactctatctttactagctaggtgaaatggggccagaaaattaaccttccacatgatttaccaccttctcccaataaaatgggtttactacacaagacttgcagattctgtaagattggccaacaataaattgactgtgcttgatacactgtagctgctaaagaagataaagttattttattgttctacttattctaataaaaataatttaactggaaaaataattctaagaatctaaaggtttctggacacaaatgaaataaagggaagataattcttcatctcttgagagtcatcatgaacccaaactaa

SEQ ID NO: 261218 - DNA, 599 bp, Homo sapiens
caaataatttttaatgtagagctatccaaaatattgcatgggacatatttatacgaaaaaagaaatcattgtttatctgaagttcaaatttaactggacattctgtgtttctgtttgctaaatctgagaactctaatcatataataattatagtaatgtgtcatattatgttttctcagtctcaatgcctcttgtacctgatggtaatagccatatgtcttttgtggaagtggcacggggaaattgagtatgacatttggaaggggactgataggtatttgaatctggactctatctttactagctaggtgaaatggggccagaaaattaaccttccacatgatttaccaccttcycccaataaaatgggtttactacacaagacttgcagattctgtaagattggccaacaataaattgactgtgcttgatacactgtagctgctaaagaagataaagttattttattgttctacttattctaataaaaataatttaactggaaaaataattctaagaatctaaaggtttctggacacaaatgaaataaagggaagataattcttcatctcttgagagtcatcatgaacccaaactaa

SEQ ID NO: 261219 - DNA, 610 bp, Homo sapiens
cagtcagcttcattgtctgtcattcctaattgacatcaaaaggttttcctgccattggcttctctgtaagaaaccactgrgcctcttagtccaacatggaaaacacagaagctttccacaccatctttatttgtctgtctcttatgtaaagacaccaccctatcctcactaagtttcctccacctaagccagcagtacccactctttggatcctgcatcaagcggagatgggtctagagcaacttctgcccagtgatcaacatagagaaccatgtcttcctaggatatggattctgggacttagactttcctcaggattctagttcacagtgacctattcaaatacagttcttgaaatgtgctattttgcgctggcttcctactggtccttagaggtgctgtttctgcactgatgctcagatgtattttatccccagcttattaggttataaactccctgaaaatggaactgtgcttacacttccgtggagcctcctggaatataacttttgtgatggatgcctggttgataatcattcatcatttgccaatggactagcccatggcagccacctatggggtttgatagtatcaagaaaagtgattgttc

SEQ ID NO: 261220 - DNA, 575 bp, Homo sapiens
caaaattttggcatgtcatcttaacacctgtgcttggtttatctaattccttagtaattattaactgtattgaaaattctcatatccagtacacctctggtttgaggcaaggtttttattacagaaattcatttccctgacccaccagtattactttgatgtgttctggtttgagagttagaaacctaaatgctatccgtgtttctaagcttaaaatttttggaacagccactatatccatttgaaaatgtggacattcaaattaatcggtttttgcctcagttgtttgaactcaaaatacattcaatagcaaagagaagtcacatcacatctgaagccctaggcaggtgggatttttagcccacattattctctagtgggaggaggatttctttataccaatatgcgtatgaaaaatgtgaaaaaaattcacattttctatcttttcttccttgtatgtttctcaacatcctttctcccctgtttctatgattcyttaattgtattacttacagaagctctgtaaagggcttagaggcatggtttataggaaagatgtcatgtaagatgatggt

SEQ ID NO: 261221 - DNA, 575 bp, Homo sapiens
caaaattttggcatgtcatcttaacacctgtgcttggtttatctaattccttagtaattattaactgtattgaaaattctcatatccagtacacctctggtttgaggcaaggtttttattacagaaattcatttccctgacccaccagtattactttgatgtgttctggtttgagagttagaaacctaaatgctatccgtgtttctaagcttaaaatttttggaacagccactatatccatttgaaaatgtggacattcaaattaatcggtttttgcctcagttgtttgaactcaaaatacattcaatagcaaagagaagtcacatcacatctgaagccctaggcaggtgggatttttagcccacattattctctagtgggaggaggatttctttataccaatatgcgtatgaaaaatgtgaaaaaaattcacattttctatcttttcttccttgtatgtttctcaacatcctttctcccctgtttctatgattctttaattgtattacttacagaagctctgtaaagkgcttagaggcatggtttataggaaagatgtcatgtaagatgatggt

SEQ ID NO: 261222 - DNA, 590 bp, Homo sapiens
agttatttaactcctctgagcctcagtttctttcttggtaaaatttgaatgataacattgtctgtttcatgggtttgcatgaggatgaaatgagatagtgcaatatgctcataatagagtacctgacatacacacatgttaaattgctcatctacatgggatcctaaaccagctgcttcttccacatctttaaggaaagaaattccacaatctgtcccagtgttcaatgtacccttgtgtcaaaacttcctcctgttaggaaatcctctttttttaaaagtttatataatttgagacggcccttagcgatttcgataacccaactcaccatacaggggaggagaaaaggctggaaagtttaagtgactagcccaaagtcatgcagttggttagtggcagagctaggactggctcctggttctcctgaaacccaagtccatgctctttctactaagtctgccggtattatttscttttgcaggcatctcatcttatgctcatcatggtagagactttttgtgccacgtgattctggactcctgggcagaacattccaagctctccatattccggccttgatctacctgggg

SEQ ID NO: 261223 - DNA, 543 bp, Homo sapiens
tcaagtggagtgaacttgttgacttaataatgaccmgcttcctgttctaacatgtatgattgattctatgaccagcactagagcctgtaacgctctgtacaagctagacacatctaagtctgctgatccttcagacactccttttattctgtaattgatgaaacagacccatttttaagcacttaccttcattgtttttattcctctgggaaatttctcccacctctagtaatcaatttcactacttagtggtgactcttcaactttaagaataaaaaatgtaaagaaaggagataaagttcctttgcaaaattgtcaagaaggctataagaaggctattttttttctgaaaagagaattatttctgttgatggaagttaaactctgctaagctttgtcaaaaaaaaaaaaaaaaaaaaaaaaaaccctgatcaatgagtcattgttactgggaagttactaccgtgtagaggaaagactctagtactcagaaaatgaaaagcttcagattcaagtctcactctatcactcaccagttctgca

SEQ ID NO: 261224 - DNA, 543 bp, Homo sapiens
tcaagtggagtgaacttgttgacttaataatgacccgcttcctgttctaacatgtatgattgattctatgaccagcactagagcctgtaacgctctgtacaagctagacacatctaagtctgctgatccttcagacactccttttattctgtaattgatgaaacagacccatttttaagcacttaccttcattgtttttattcctctgggaaatttctcccacctctagtaatcaatttcactacttagtggtgactcttcaactttaagaataaaaaatgtaaagaaaggagataaagttcctttgcaaaattgtcaagaaggctataagaaggctattttttttctgaaaagagaattatttctgttgatggaagttaaactctgctaagctttgtcaaaaaaaaaaaaaaaaaaaaaaaaamccctgatcaatgagtcattgttactgggaagttactaccgtgtagaggaaagactctagtactcagaaaatgaaaagcttcagattcaagtctcactctatcactcaccagttctgca

SEQ ID NO: 261225 - DNA, 519 bp, Homo sapiens
tagaatgtcaactccatgagggcagggacttttgtgttcgctctttattcctggcacctacaacagtttccgaccctgaataagcattccataagtatttgctgcctgattgactaaatggctgactgaataaatccctgtcctccttctagccctactgctgtgactgtatccagcctcccatcaacctgtgctgrcatctctcaacctgaattttctcttctaggtacaaagaccactagggaaaagaaatcagggggtcaagcatggggtcatctctccacatcagacccctgtcttggttgggaccaggctcaggttccagtcatccccagtctgaaggtctaaagagaatgtctcactccagagaaccctgggagttgggggtctgctgaaggagacagggcactggaacaaggtcacctttccaaagaaggtgtggaggaacaactggggaaaagccaaggtgatatttacccctaatatgaattctcaccatctcatgagcctggagcatga

SEQ ID NO: 261226 - DNA, 586 bp, Homo sapiens
aactatccatgcatgaaaatacttcacaagagctagagaaaccaggttagagaccactgtatctagttatagcataacaataagaaaagacacattgaagaaggtaggaaggatagttatacattacccatgtcaccccttccccagcaataggcagcacagcatggagagacacaccatacacttgagggaaagaaagagaaataagcaaaggagtttgctttgcactctaatwctgggctcaccacagtaaaacccagcactgggaagtcctacacagcccgatgacaggctgatacccacagacatagcccctagacctatccctacaccagatgggaacacatagcccctgcaagatggactcaagttctggcctgcatcactgctggccaactacagaggctttggactccacataatccctagtgacaggaaggcctcagaaggtgtgacttttgggcatgccccagtgctgtactagcttcagtggccatgggctttgattacacatcagcactgcagcagccttagcagccgtgagattctagcccgtgctgtgacagctttagcagccatgggactt

SEQ ID NO: 261227 - DNA, 602 bp, Homo sapiens
agaaaccaggttagagaccactgtatctagttatagcataacaataagaaaagacacattgaagaaggtaggaaggatagttatacattacccatgtcaccccttccccagcaataggcagcacagcatggagagacacaccatacacttgagggaaagaaagagaaataagcaaaggagtttgctttgcactctaattctgggctcaccacagtaaaacccagcactgggaagtcctacacagcccgatgacaggctgatacccacagacatagcccctagacctatccctacaccagatgggaacacatagcccctkcaagatggactcaagttctggcctgcatcactgctggccaactacagaggctttggactccacataatccctagtgacaggaaggcctcagaaggtgtgacttttgggcatgccccagtgctgtactagcttcagtggccatgggctttgattacacatcagcactgcagcagccttagcagccgtgagattctagcccgtgctgtgacagctttagcagccatgggacttcagtttggcactgtgctggctgtgacagacctgggcttagagggcccccacg

SEQ ID NO: 261228 - DNA, 602 bp, Homo sapiens
agaaaccaggttagagaccactgtatctagttatagcataacaataagaaaagacacattgaagaaggtaggaaggatagttatacattacccatgtcaccccttccccagcaataggcagcacagcatggagagacacaccatacacttgagggaaagaaagagaaataagcaaaggagtttgctttgcactctaattctgggctcaccacagtaaaacccagcactgggaagtcctacacagcccgatgacaggctgatacccacagacatagcccctagacctatccctacaccagatgggaacacatagcccctgcaagatggactcaagttctggcctgcatcactgctggccaactacagaggctttggactccacataatccctagtgacaggaaggcctcagaaggtgtgacttttgggcatgccccagtgctgtactagcttcagtggccatgggctttgattacacatcagcactgcagcagccttagcagccrtgagattctagcccgtgctgtgacagctttagcagccatgggacttcagtttggcactgtgctggctgtgacagacctgggcttagagggcccccacg

SEQ ID NO: 261229 - DNA, 602 bp, Homo sapiens
agaaaccaggttagagaccactgtatctagttatagcataacaataagaaaagacacattgaagaaggtaggaaggatagttatacattacccatgtcaccccttccccagcaataggcagcacagcatggagagacacaccatacacttgagggaaagaaagagaaataagcaaaggagtttgctttgcactctaattctgggctcaccacagtaaaacccagcactgggaagtcctacacagcccgatgacaggctgatacccacagacatagcccctagacctatccctacaccagatgggaacacatagcccctgcaagatggactcaagttctggcctgcatcactgctggccaactacagaggctttggactccacataatccctagtgacaggaaggcctcagaaggtgtgacttttgggcatgccccagtgctgtactagcttcagtggccatgggctttgattacacatcagcactgcagcagccttagcagccgtgagattctagcccrtgctgtgacagctttagcagccatgggacttcagtttggcactgtgctggctgtgacagacctgggcttagagggcccccacg

SEQ ID NO: 261230 - DNA, 591 bp, Homo sapiens
ggatagataaagactttcccagacaaacaaaagctgaggaaatttatcaccaccagacctgtcttacaagaaatgctaaagggagttcctcaggctgaaagaaaagggtgccaatgagtaataaaaaaaatctgaaagtataaaactgaatggtaaaagtaagtacacagtcaaattcagaayactctaatactgtaaggtggtgtataaatcacttacatccttagtattaaggttaaaagaccaactgtttaatgataactacaatcatttgttaagggatatgaaacataaaaatgtaaattgtgacatcaaacattcaaaatgtggaggggtagtgaagttaaagtgtagagatttttttttccaatcaaagttaagttgttattagcttaaaataatctgttataactataagatgttttctgtaagactcgtggtaaccacagagcaaaacctataatatacacactaaaaacaaaaggaaaggaatcaaaaatactaccagggaaaactacttaaccagaaagaaatatggtaagaaaagatggaaagatctcctagaaaacaattttaaaatggtggtaataa

SEQ ID NO: 261231 - DNA, 591 bp, Homo sapiens
ggatagataaagactttcccagacaaacaaaagctgaggaaatttatcaccaccagacctgtcttacaagaaatgctaaagggagttcctcaggctgaaagaaaagggtgccaatgagtaataaaaaaaatctgaaagtataaaactgaatggtaaaagtaagtacacagtcaaattcagaacactctaatactgtaaggtggtgtataaatcacttacatccttagtattaaggttaaaagaccaactgtttaatrataactacaatcatttgttaagggatatgaaacataaaaatgtaaattgtgacatcaaacattcaaaatgtggaggggtagtgaagttaaagtgtagagatttttttttccaatcaaagttaagttgttattagcttaaaataatctgttataactataagatgttttctgtaagactcgtggtaaccacagagcaaaacctataatatacacactaaaaacaaaaggaaaggaatcaaaaatactaccagggaaaactacttaaccagaaagaaatatggtaagaaaagatggaaagatctcctagaaaacaattttaaaatggtggtaataa

SEQ ID NO: 261232 - DNA, 526 bp, Homo sapiens
tcagcctggcatcaaactagggcagatgctgaacatgctcttttcaaagtagagaaacagtcttttgctttgttttgttgccttgtggaagtctgaagacaagtcaagatgtttatctctcctgcacttcatttctacacaagttagtgagaaacagagtcgtgggaattgctttcttggagtagaggccagagtgacctcaacagtctcccctaggcccttcctccaccattttttgggtgaagctgagtgctttgctgcaaaataccccctacttggtgtttgcctggttctttctggaatgtaaaacccctttgtctgctcaacaccgctggtggctttatgcgagcagtgaattcacatctatagaagagaaaatcaaggctggtcactgagcccrgtgagaaagctcaggcgactttcaggactcttgccttcttcacagattgccagaacaataaactttcatcttacaattggtatcatcattatagttttcatttatatagcattttggaatttataa

SEQ ID NO: 261233 - DNA, 672 bp, Homo sapiens
ggtaacagattgcctcaaagccctctccatgggttttcccttggagatagcccattcatggcactagaataatgctcatcaaagttgtgtggcccagagacatcactttcattcttttaattttcaatatgcttccccgagtgaaggagcraaggagagacaaacaggtcaaggctgggagtcatgcacaaacaaacctgagcacaccctacggggatcacctaccatataaatctgatatgaacaaaaaaagggtgagcatcttatttgtaatgtatcttctgcccctaggcaaactaagttcagtaccttccagatactatgtacccatgtacccaactctgaaagttcctagaagaaagagagcccatgctattcctcaatggtacaagtctttaaattctttattttgtctagacaaattcagttagatgtttttgagatcagtcttatctttcagtcatcactagggtaggtggctggttttgttggaatcctccttcctcctctcccttcaatttctccactattggtgatcactgttgaatattggtgttatcactgtgtagctctttgatgttgggaaagttgctttacctctctgattccatttcctcatccttaaaatgaggcagaaaatagtacctacttcatgggatggttgcaataatt

SEQ ID NO: 261234 - DNA, 465 bp, Homo sapiens
agtggtataatcaaactaaaataaagatgtaaggaaagtcaggaagcaaaaacaaaaggctggaagagaagggttagcttgtgggcaatacatcttgttggttgctggtagagatacatgcacctctagaggcattctgctgctgctagtgtgaggctgaatggctaaggggcagtggccagggatcaggggtcatcctggtctacttccccagtgccaccttgatctacctggaattcacaagagactggttagttcctcrcttatagctctcatccaagccctcttcccaaagcatggcaattgggggagatctctcatctgtatgttccttcctgtcccctttccagtccactgtactccatatcccagtgctgattcaggctgtctcatttatcagggaaatctttagctcacaaaagccgtggggcactagaagctaggtgctagggacctagcacactc

SEQ ID NO: 261235 - DNA, 567 bp, Homo sapiens
gggaactcttgtgctccatgcaccagtgtcaggggtaggtctgcacctctgagtgtcacgctgcttcacaaactgggctcagctgggttgtaaatggatctcacgacggattcttctggcccaagtgttgacttctggcagagagcaatccatgctgaaagcctctagcagtggttcctgtttagactcagttggaaatcccaggggagcacagatgccacagatcaagagccgctggagacagtggcagcaccaaagagttgacaacctactagagtcagtcaaygcagttatgttagagaaggtaaaggcgcaaaaccacttccaagtacctactctgtgtgggagcctgcacagtgtgacctgtttctgtcaccaactcaagctcacttcttacatcacaggggccatggatcagtactgttctgtggccttttagaaaccgggcaacacacagcaggagttgagtggtgggtgagtgagccaagcttcgtctgtatttacagtcagtccccattactagcattactgcctgagttccgcctcctgtcagatcagcagcattag

SEQ ID NO: 261236 - DNA, 567 bp, Homo sapiens
gggaactcttgtgctccatgcaccagtgtcaggggtaggtctgcacctctgagtgtcacgctgcttcacaaactgggctcagctgggttgtaaatggatctcacgacggattcttctggcccaagtgttgacttctggcagagagcaatccatgctgaaagcctctagcagtggttcctgtttagactcagttggaaatcccaggggagcacagatgccacagatcaagagccgctggagacagtggcagcaccaaagagttgacaacctactagagtcagtcaatgcagttatgttagagaaggtaaaggcgcaaaaccacttccaagtacctactctgtgtgggagcctgcacagtgtgacctgtttctgtcaccaactcaagctcacttcttacatcacaggggccatggatcagtactgttctgtggccttttagraaccgggcaacacacagcaggagttgagtggtgggtgagtgagccaagcttcgtctgtatttacagtcagtccccattactagcattactgcctgagttccgcctcctgtcagatcagcagcattag

SEQ ID NO: 261237 - DNA, 577 bp, Homo sapiens
aagactataccattaccaaaattgtgaatatatatttcttcattttcccacaacttaaaatggatcgttaagtacttataaaggggaaaaataataaaaaatttagttgaatatttgtcaactaaagcagtgatttatttcattctatctgagaacagctttttgaaacagagatatcattttagttgtgttgatcttgccctgctcttgttaatgccatttgggtagatccataagtagtgatctttgcattgtagttcaattttatttcctaatactctttatttgtctggtttagttttaatttggaaaaggcttatatttcatttmtttttctaattagaggaccactaatgccttaaagtttgcttttaaaaaaaatcttccacggagaattggggagttgaaagcatcattcttcaatgggtcagtctggacattgaaagccaagttttccatgaggccttggccttgaggccatgagatgggtagtttcctcgcatcaaattgcactgcgaaattcacttaggccaaactagtagtttgcttgcaaacagtatgactgtgcagctagaag

SEQ ID NO: 261238 - DNA, 621 bp, Homo sapiens
tactacataaacattattattaatctgtataataaccctagagagaggaattatatccttgttttatagatgattaaaccatgacccagaggggccaaataacatgctaaagttaaaatagckagtaagtagcagagctggtttcaaatttaggtatgcctgatgtcaacccacagctcttcatactatgccatgatgactccttataaaataaaatttggtattggtattcattttaataaagagatttaattatttatacataggtaacctaaacttcctgatatgtctctctatattttgtatttatttgagactatgaattctgaaatattaatgcaataatatgagtaaattttatagacataagttctaagccatcagtgggcccattgattctcctttcttttccatctgatattagagatactaataaaataaatgtagtgtacactattaattttcccttttaaaaacatttgtcactgtcaacatttccttccaacatactcatgtactctataatatttgacagatggcccactataattggtaaagagaaaagttgcttatctataaattagatggttctgttatatggagttaactgaatgttcaaaa

SEQ ID NO: 261239 - DNA, 621 bp, Homo sapiens
tactacataaacattattattaatctgtataataaccctagagagaggaattatatccttgttttatagatgattaaaccatgacccagaggggccaaataacatgctaaagttaaaatagctagtaagtagcagagctggtttcaaatttrggtatgcctgatgtcaacccacagctcttcatactatgccatgatgactccttataaaataaaatttggtattggtattcattttaataaagagatttaattatttatacataggtaacctaaacttcctgatatgtctctctatattttgtatttatttgagactatgaattctgaaatattaatgcaataatatgagtaaattttatagacataagttctaagccatcagtgggcccattgattctcctttcttttccatctgatattagagatactaataaaataaatgtagtgtacactattaattttcccttttaaaaacatttgtcactgtcaacatttccttccaacatactcatgtactctataatatttgacagatggcccactataattggtaaagagaaaagttgcttatctataaattagatggttctgttatatggagttaactgaatgttcaaaa

SEQ ID NO: 261240 - DNA, 578 bp, Homo sapiens
agtctggtttttcacttcttctggagcaacagatgaaacacataataccttctttagggctattacatacttttaaacacaaaagactttaaatgaggtagcgtgagaaagtaaaaggtagaatctgtgaatggaaacttctgttgggaattatttttaaactatcttctccactagtgcgtgagaacatcaatgagtctatttacattaaaggaaaagggaagaataccaagatcttagagaccacttagtatatcggtattgaaaatcatcactgagtgagccatgttcactctgtttttgttatattccattacacacgtataaggaatggttaccagcaagatcccaatacaattgttttttggtaaaataagacggtatgattataaataaagttaagaaaaaaacacatgtttttaccacaaggtaagctactgaagaaccaaactagagtgrctcatttttcactcgatctcacaaaaaaagatgtgactctagttatggatctagcataatcacatattgctgctacccaaaagtattatgttctggagcaagggccttgaaatcaccta

SEQ ID NO: 261241 - DNA, 578 bp, Homo sapiens
agtctggtttttcacttcttctggagcaacagatgaaacacataataccttctttagggctattacatacttttaaacacaaaagactttaaatgaggtagcgtgagaaagtaaaaggtagaatctgtgaatggaaacttctgttgggaattatttttaaactatcttctccactagtgcgtgagaacatcaatgagtctatttacattaaaggaaaagggaagaataccaagatcttagagaccacttagtatatcggtattgaaaatcatcactgagtgagccatgttcactctgtttttgttatattccattacacacgtataaggaatggttaccagcaagatcccaatacaattgttttttggtaaaataagacggtatgattataaataaagttaagaaaaaaacacatgtttttaccacaaggtaagctactgaagaaccaaactagagtgactcatttttcactcgatctcacaaaaaaagatgtgactctagttatggatctagcataatcacatattgctgctaccyaaaagtattatgttctggagcaagggccttgaaatcaccta

SEQ ID NO: 261242 - DNA, 573 bp, Homo sapiens
gtgttagtgctgtttttccaacagcatgtgcttacttcttgtctctgttcacgttttgggattctcacaatatttcacttttttctttgtttttgatggagtcacaccctgttgcccaggttggagtccagtggtgcagtctcagctcactgcaacctccacctcctgggttcaagcaatctcctgtctcagcctcctaagtagctgggattacaggcacataccaccacacccmgctaatttttttttgtatttttagtagacatgggttcaccgtgtgggccaggctgatcttgatctcctggcctcaaatgatctgcctacctcggccttctgaagttctgggattacagatgtgagctaccacacccggacaactttttcattgttattgtgtctgttatggtgatctgtgatcagtgatttccttttttatgaaatagagacagggtcttgccatgttgcccaggcaagtctgtcagtgcaatttttccaacagaatgtgctcccttcatgtctctatgtcacatttttgtaattctcacagtatttcagacttttccattattttta

SEQ ID NO: 261243 - DNA, 619 bp, Homo sapiens
ccataatctttttttttactttttttatttttttattttttgagatgaagtctctttctgttgcccgggctggagtacagtgttgcagtctcagctcactgcaatctccacctcccgggctcaagtgattctcccgcctcagcctcccgagtagctgggattacaggtgcctgccaccawgcctggctaatttttgtgtttttagtagagatggggtttcaccatcttagccaggctggtcttgaactcctgacctcaagtaatctgcccacctcggccttctgaagtgctggaattacaggcgtgagccaccacacccagcctacactgtaatctattaagtgttcaatagcattatgtctaaaataactgtacataactaaaaaatacgttcttgcttaaaaatgacaacaatcatctgtgccttcagtgagtcataatctttgtactggtagagtgtcatgactcactgtggatggctgctgactgatcagagtgattggtggttgctaaatactgggatggctgtgaaaaattcttgaaataagacaacagtgaagtccactgcattgatggattctttctttcacaaaagatttctctgtagaatgcaatattg

SEQ ID NO: 261244 - DNA, 619 bp, Homo sapiens
ccataatctttttttttactttttttatttttttattttttgagatgaagtctctttctgttgcccgggctggagtacagtgttgcagtctcagctcactgcaatctccacctcccgggctcaagtgattctcccgcctcagcctcccgagtagctgggattacaggtgcctgccaccatgcctggctaatttttgtgtttttagtagagatggggtttcaccatsttagccaggctggtcttgaactcctgacctcaagtaatctgcccacctcggccttctgaagtgctggaattacaggcgtgagccaccacacccagcctacactgtaatctattaagtgttcaatagcattatgtctaaaataactgtacataactaaaaaatacgttcttgcttaaaaatgacaacaatcatctgtgccttcagtgagtcataatctttgtactggtagagtgtcatgactcactgtggatggctgctgactgatcagagtgattggtggttgctaaatactgggatggctgtgaaaaattcttgaaataagacaacagtgaagtccactgcattgatggattctttctttcacaaaagatttctctgtagaatgcaatattg

SEQ ID NO: 261245 - DNA, 619 bp, Homo sapiens
ccataatctttttttttactttttttatttttttattttttgagatgaagtctctttctgttgcccgggctggagtacagtgttgcagtctcagctcactgcaatctccacctcccgggctcaagtgattctcccgcctcagcctcccgagtagctgggattacaggtgcctgccaccatgcctggctaatttttgtgtttttagtagagatggggtttcaccatcttagccaggctggtctygaactcctgacctcaagtaatctgcccacctcggccttctgaagtgctggaattacaggcgtgagccaccacacccagcctacactgtaatctattaagtgttcaatagcattatgtctaaaataactgtacataactaaaaaatacgttcttgcttaaaaatgacaacaatcatctgtgccttcagtgagtcataatctttgtactggtagagtgtcatgactcactgtggatggctgctgactgatcagagtgattggtggttgctaaatactgggatggctgtgaaaaattcttgaaataagacaacagtgaagtccactgcattgatggattctttctttcacaaaagatttctctgtagaatgcaatattg

SEQ ID NO: 261246 - DNA, 561 bp, Homo sapiens
aattgttgagtgctttaaatataaagctaagaagtttagactttattctatagaaagtggtgggtaaaaaataatttaacatgtttgcattgtgtaaattataatcgtaacacatgtacatttaaaaaattcaaacaatacacaagtgtagaaagaatgaggcaaagctttcccctcctatcttggtataattttattcctcagatgcagtcagttaatagtttgggtacaattttccaacyttttttttttttttgagacaggagtctcactctgtcacccaagctagagtggaagtggctcattgcaggctctctgcagcctctgcctccaggctcaagcaatcctcccacctcagcctcctgagtagctgtaaccacaggtgtgcacccacaccaggctaattttttgtatttttggtagatatggggtttcaccatgttggccaggctggtctcgaactcctgagctcaagtgatcttcctgccttggcctcccaaactgctggaattacaagcatgagccaccacacctagccccagccttttaaaatttataaaa

SEQ ID NO: 261247 - DNA, 552 bp, Homo sapiens
tgaaaattattagtttgatcatttgcctcagttgatccaggacagtcttagttttayatttgctgtccctgtgtaattattatttattgttattattattttgagataggatctcactctatcacccaggctggagtgcagtggcacgatctcagctcattgcaacctctgtcttctgggctcaagtgatcctcccacctcagcctcccaagtagttgggactacaggcacccaccctatacccagctaatttttgcatttttttgaagatatgtggtttcactatgttgcccaggctggtcttgaactcctggattcaagcggtctgctcaccttggcctccaaaagagctgggattacaggcatgagtcactgagccccacccctgtgtaattattaataatgtctttgttcactctcaaagtatcctactttggatgatagactatatggtcaccttagaaataatggaaatagtggaagcatagtacatattattggtgcctttactacgattggtccagtagtacactagtcccagtaactcaggaa

SEQ ID NO: 261248 - DNA, 581 bp, Homo sapiens
ctatatttccgtctcctatcaactcagcctcagcatatgttatctctagttatctctatttttcccttccaacaaaagctgctttggggaaacaatctgatgaattaggtataaatgactaataaggattaaaatattacttttcccaggattatggttttgtgctagagaaaaaaactacttaaagggataaaactctaatggcagaatttcaggtgagttggagggtttttgattataggtacttttctagcctagatggtagtctgtcagattggtcctgagtgtgagtataaattttaaaaaggctaggaccagggcaagtcttagcctaaagcagtggcttgatcagttaagtttagagaggagggttaggtttactcgaatctatgrcatcacatttaaaggggtctcgaatcaacctgagattagaagcaacactggaatcccagaatctagctggttttccactagtatgggagatattccatcctgggatgctttaggagagtgaccctttcagttcagagctatgccactgagttctgatcaggcgcaaaacggtttttgaaaacggagca

SEQ ID NO: 261249 - DNA, 581 bp, Homo sapiens
ctatatttccgtctcctatcaactcagcctcagcatatgttatctctagttatctctatttttcccttccaacaaaagctgctttggggaaacaatctgatgaattaggtataaatgactaataaggattaaaatattacttttcccaggattatggttttgtgctagagaaaaaaactacttaaagggataaaactctaatggcagaatttcaggtgagttggagggtttttgattataggtacttttctagcctagatggtagtctgtcagattggtcctgagtgtgagtataaattttaaaaaggctaggaccagggcaagtcttagcctaaagcagtggcttgatcagttaagtttagagaggagggttaggtttactcgaatctatggcatcacatttaaaggggtctcgaatcmacctgagattagaagcaacactggaatcccagaatctagctggttttccactagtatgggagatattccatcctgggatgctttaggagagtgaccctttcagttcagagctatgccactgagttctgatcaggcgcaaaacggtttttgaaaacggagca

SEQ ID NO: 261250 - DNA, 599 bp, Homo sapiens
ccagactttgtggactctctgtagtatatctatggtgctttttcccccagattaatagaatatactgcttcaaattcagcaccagtgaacgggtctgaaagttggggggaaaaaaaaagctaatgattctttatgtgaaaatataacagatataaaaataagagtatcctgtgttttctgacttttcaggtataccgttcaattatacttagggccatctgtctggcagtcatcccacagaacatragtcctaatgtctgaattgtatttacattctattgggaaaatcacacaagcagaaaatctataaatgcagattcaaacttgcaaagtaaatccacgatgacatgttgtccaaaacttgcgacagttccaagagaaagacaagaaaattaacatcataaggcacttaacagcatacatgtgtcaaacacaaatgaatcagtcatgatacaacctccaattaaatttcagcaaaacatcatttgttatatgaatttggtattaatgaaaatttaaataaatgttatagtttatatacaattaacttgtgctgttataactgtaaccacagtctaaaaacaaggactttatacata

SEQ ID NO: 261251 - DNA, 573 bp, Homo sapiens
cttctcatgctgctaataaagacatacccaaggctactgggtagtttataaaggaaaaaagtttaattgactcatagtttggcatggctggggaggcctcaggaaacttacaatcattgtggaaaagtaagcaaacacatccttcttcacatggtggcaggaaggagaagaatgagagcaaaaggggaaaagccccttataaaaccttcatatctcatgagaactcactgactatcatgagaacagcatggaggtaagcacccccatgattcaattacctcccaccaggtctctcccatgacatgtggggattatgggaactataatttgagatgagattttggtggggacacagccaaactgtatcaatctctctgacctcaagatacttacatgttattagaaagacaggaaaaacctggaacacaygaactattagagaacatcaagaactaagctaggtggtacagaagacaagtaagctagagaaaaaagatttgtagagccaatttagtaaaaactaaacaaaacctcaaaaataaaaaattcatggaaaaggctgttaagacaggc

SEQ ID NO: 261252 - DNA, 587 bp, Homo sapiens
aaacttaaatcaaattaactgcacaagcccaaggcgtgaaaactattatttagcagactttgaagaaagacctgggcttttcacctttgttgttgytcctgatgactttattcaatagcaatctcaatgtgcagctgacaacaaagctaacaaaatcctggaatgcattaggagaagcaaggtattcagggtagaggcagcaggagtctcactaagttgtgtactgatagaacacaaccaatcaatatatatttgttggtggatgttacaacttcagagcaaaaaggacaaatagttcacaagaaaaagatgagaatgctttagacggaaaaagaatggcatatgaaataatccaaaatgtcaagcctgaaaaacaaaagactggttagtgagataaagtgtaaagacaagataactaacagttttaaaaaataaaggaacaccatatagaagaaggattaaaaactgctctttacagactttggaataaaatcaggtagaggtatagagggtttagggagacaaacagctgcttgttcatcagattaaagaacttcctaatagtctgacacaaaaatgaaatggtc

SEQ ID NO: 261253 - DNA, 587 bp, Homo sapiens
aaacttaaatcaaattaactgcacaagcccaaggcgtgaaaactattatttagcagactttgaagaaagacctgggcttttcacctttgttgttgctcctgatgactttattcaatagcaatctcaatgtgcagctgacaacaaagctaacaaaatcctggaatgcattaggagaagcaaggtattcagggtagaggcagcaggagtctcactaagttgtgtactgatagaacacaaccaatcaatatatatttgttggtggatgttacaacttcagagcaaaaaggacaaatagttcacaagaaaaagatgagaatgctttagacggaaaaasaatggcatatgaaataatccaaaatgtcaagcctgaaaaacaaaagactggttagtgagataaagtgtaaagacaagataactaacagttttaaaaaataaaggaacaccatatagaagaaggattaaaaactgctctttacagactttggaataaaatcaggtagaggtatagagggtttagggagacaaacagctgcttgttcatcagattaaagaacttcctaatagtctgacacaaaaatgaaatggtc

SEQ ID NO: 261254 - DNA, 587 bp, Homo sapiens
aaacttaaatcaaattaactgcacaagcccaaggcgtgaaaactattatttagcagactttgaagaaagacctgggcttttcacctttgttgttgctcctgatgactttattcaatagcaatctcaatgtgcagctgacaacaaagctaacaaaatcctggaatgcattaggagaagcaaggtattcagggtagaggcagcaggagtctcactaagttgtgtactgatagaacacaaccaatcaatatatatttgttggtggatgttacaacttcagagcaaaaaggacaaatagttcacaagaaaaagatgagaatgctttagacggaaaaagaatggcatatgaaataatccaaaatgtcaagcctgaaaaacaaaagactggttagtgagataaagtgtaaagacaagataactaacagttttaaaaaataaaggaacaccatatagaagaaggattaaaaactgytctttacagactttggaataaaatcaggtagaggtatagagggtttagggagacaaacagctgcttgttcatcagattaaagaacttcctaatagtctgacacaaaaatgaaatggtc

SEQ ID NO: 261255 - DNA, 549 bp, Homo sapiens
aaagacctgggcttttcacctttgttgttgctcctgatgactttattcaatagcaatctcaatgtgcagctgacaacaaagctaacaaaatcctggaatgcattaggagaagcaaggtattcagggtagaggcagcaggagtctcactaagttgtgtactgatagaacacaaccaatcaatatatatttgttggtggatgttacaacttcagagcaaaaaggacaaatagttcacaagaaaaagatgagaatgctttagacggaaaaagaatggcatatgaaataatccaaaatgtcaagcctgaaaaacaaaagactggttagtgagataaagtgtaaagacaagataactaacagttttaaaaaataaaggaacaccatatagaagaaggattaaaaactgctctttacagactttggaataaaatcaggtagaggtatagagggtttagggagacaaacagctgcttgttcatcrgattaaagaacttcctaatagtctgacacaaaaatgaaatggtctatttcgtgaattaatagttccccatc

SEQ ID NO: 261256 - DNA, 549 bp, Homo sapiens
aaagacctgggcttttcacctttgttgttgctcctgatgactttattcaatagcaatctcaatgtgcagctgacaacaaagctaacaaaatcctggaatgcattaggagaagcaaggtattcagggtagaggcagcaggagtctcactaagttgtgtactgatagaacacaaccaatcaatatatatttgttggtggatgttacaacttcagagcaaaaaggacaaatagttcacaagaaaaagatgagaatgctttagacggaaaaagaatggcatatgaaataatccaaaatgtcaagcctgaaaaacaaaagactggttagtgagataaagtgtaaagacaagataactaacagttttaaaaaataaaggaacaccatatagaagaaggattaaaaactgctctttacagactttggaataaaatcaggtagaggtatagagggtttagggagacaaacagctgcttgttcatcagattaaagaacttcytaatagtctgacacaaaaatgaaatggtctatttcgtgaattaatagttccccatc

SEQ ID NO: 261257 - DNA, 614 bp, Homo sapiens
cagtgaacctgctttacattcttcaatatcctctaaatgaaatactgattagaaagtaatttgacaaaaacaaaaacctgataaaatcaaacaagccagttcttgattttataatatccacaatgccttctctcttaccttgtctatcctatctggacggttagtagctgccaaaatggtcacatcctttagctgttcaatcccatccatttctgttaagagctgagccaaaacacgatcggctacattcccagcacctaaagaactgattttgaaagtayggtttaaaaaatatctttacttatcttcaaatactattatctattaatttttaaaggttctatagtctataacaagagaaatcatgtctattttcaaatatgaagtatgcatttgagactttatttactgcattatcatatctcaaaacaaactgtattcaaatcatttattttcctctatcatcaaccatgttcattttcattccaaaacaaaaatatttaaataaatgtcagaaataaaagcactggaaaacaagatataagattatttaaaatagttcatcaaatacatagagaattgttcaatcaatgtttatattctacatggtaaat

SEQ ID NO: 261258 - DNA, 625 bp, Homo sapiens
gcttcttggttttcttacctgaaaaattaagcatttgatcatgaataaactatgaattcccttctaatactagaagtttttattaaggggtttttcctctcttactgtctgcttttttgttgttactgttaattgtttgcttcttcgttactatttttatatagctttacatakggaaagctggtaagttgaaaccatattctgaaatgagttcaccaacagaaatgatggtagatggagatagtccccaagctatccttatttaatccagctgtatggtattgcatttcagctattttatgagtttgatggtttgtcctagttcttccttttgggggtagagtgtggaggggcattcgtggattaaattgagaacctacccacaattagtaatatatgtctttgagtaaatgtgcttaaagacaaaaattgggacacatgaagcatgcaacccaacttcacaatccccagacatacctgcagtgagattagaaatcaggtaaattacatttttctcttgaaacaagcagaaaatgctggctaaccagtcaaaaggaaaatcctcatccaaaaagccttactaggaacctagtccaaagaaagataatttttaatctccaataac

SEQ ID NO: 261259 - DNA, 625 bp, Homo sapiens
gcttcttggttttcttacctgaaaaattaagcatttgatcatgaataaactatgaattcccttctaatactagaagtttttattaaggggtttttcctctcttactgtctgcttttttgttgttactgttaattgtttgcttcttcgttactatttttatatagctttacatatggaaagctggtaagttgaaaccatattctgaaatgagttcaccaacagaaatgatggtagatggagatagtccccaagctatccttatttaatccagctgtatggtattgcatttcagctattttatgagtttgatggtttgtcctagttcttccttttgggggtagagtgtggaggggcattcgtggattaaattgagaacctacccacaattagtaatatatgtctttgagtaaatgkgcttaaagacaaaaattgggacacatgaagcatgcaacccaacttcacaatccccagacatacctgcagtgagattagaaatcaggtaaattacatttttctcttgaaacaagcagaaaatgctggctaaccagtcaaaaggaaaatcctcatccaaaaagccttactaggaacctagtccaaagaaagataatttttaatctccaataac

SEQ ID NO: 261260 - DNA, 558 bp, Homo sapiens
gggacacatgaagcatgcaacccaacttcacaatccccagacatacctgcagtgagattagaaatcaggtaaattacatttttctcttgaaacaagcagaaaatgctggctaaccagtcaaaaggaaaatcctcatccaaaaagccttactaggaacctagtccaaagaaagataatttttaatctccaataactattccccayctctggcatggctgctattcgtgggcaacctggcaagtatgtgtacctttggaaaattaggactgtcctattgcccatcaccactgcagactgccactgaccaactgcatgaacttccctgcacataattaggacagtccagctgctgccaagtctctttagagtctgaaacaccagttagaaatcacaattgtgccttaaaatttgagtttctaggaaagaagaggtggtggtagatgaaatgatggtatatttggagttaataaacctattcatgtattttcattgcacttgtaaccatagacagagaggctgaattgtacaagactggacaaacaaaaatcatcttgagtt

SEQ ID NO: 261261 - DNA, 550 bp, Homo sapiens
ctgaaattactgaaaagtaccactgtctattgtgggaaatgcattagtatgattaagctctactttagatgccattatgtaatattttgtcaatgtgaaatgtctcattaattaattctttttgggttttcaaacaggtgctaagggatgccatcagcaggagaaaggaaaacaacttaacccaagtaaaatggggataattcccacccctgccagtttcacaaagcttgaaatgagaatgtggacatgctaaaagcattggcacatttaaattgaaaaaaaaaaatcttgtggtgtatattttgcaggtaaaaagtgtgacaaaattgcatttctggcaaagcaggagaargaatgatggcttaatcttattaatcttgtttttctcaaagtttaggcctttttccccattatggtaaggttgccatgacaatccaagacaattgagtctccccaggacagaatgattcattaaggtgaggacagagaatgaaggtaattatcacatctaaatcactgccccagggccttaccaagtaggagatgtgac

SEQ ID NO: 261262 - DNA, 580 bp, Homo sapiens
agggaagaacagagatagtggagaagtcatctctgccttttagtcacatgggccccaaagtgacaaatgacatttctgcccacacttcattgacgagaatagctgtatggcttcactttcatgcaagggaagttagtaaatgtagtccttggctactcagctgctcccaggaattggaacaatggaagaaactacacaaatctggtagccatgtctactacaggatcacagagtctcactgcagagayccatgcttagtataactcagcttcctagggccacatatctgagctggatgtgtgtaccctggagaattaaagaaacaactctctgaggatgcatacaaaccatgaatcaaaccatgcagccctgagctttaccaggaaatatgtgtagttgacagaaacacaaagcttccggctagaactccagttttgtgaatatgatgaacaagatactaggatggttctgcctactgcccaaagaattctccacatgactcatgcataatgcctgtggctccgccactgttcattatttcctacagcttaggacatggtgcaaacactcctggaaaaga

SEQ ID NO: 261263 - DNA, 622 bp, Homo sapiens
ccccatgtcctatcctgcttcttcactccccttctcccaagagccctccttcagtatgtcacatgcatctgaatccctggctgtgcttctacaaaccctgacttaagatacaggggctagttttgaaggaaggagaatagaaaggtacactcatgggaacgggagacatgactgacttacagagctgccaaacagcctgtgctaaccagaggactatagaaaggtactgaaagggtggaccttgaaagatggtatagaagaggacaagaacaaaatgctgcctgctttkctctccagggttcggcacacactgattcataggaagaaccatgttgtaacaaaagacatcaacagccaagaaggtgcagagctatagatgctgagaggctttgcaaatgctttcagggcagcaaggcagtgatgcacagtccaagcaagaccaagtgaatgtctttgtcttttcatacaaagcccaacacattttatttctattggatttcgaggctttctccccaaactcataattctgtctcccagggaaattgcttagtggccttcacctccctaacaaactcttttttgatgaattggcccctctgggagcatagttactgtagagaaa

SEQ ID NO: 261264 - DNA, 465 bp, Homo sapiens
actgcttccatgagaaaattggagcagaggtattctaacttggttcatgttgactggattttttttatttcacctcccagccacactatctttcttcagttcagatatcactgagtgtctctggtacttaaaaatcttccagtggctccctagtgctcacagaccaatgatcagtagcaggaagacagttcccaaatcttgtttcctctctaaatccctacttccccaagccttacttatctaattccccagacactaaagagcaccaatgtcgagcccctccttaaatgtctcctttcyataccttctaaaccttttctaaccactccattgcttatacccagtggtactgttataccagctgacagacagccttgcgaagactttctcctgcacaccagcctcttctagactgcaagcgccttgaagagtaaattgatttttgaaaacttgcacctatcacag

SEQ ID NO: 261265 - DNA, 629 bp, Homo sapiens
tgaatccataccttaccaatgagagagcaaagccacaaaaataaaaactaggaaatcttacattttggaaagctatgtatttgaggaaagaagaatgagagtaaggagggaaacaaaggcaggcttcccagtattccctttgactgactcttgaaagctgctggtattcacctcactcaatatgaggtatacacaatctactatggacatccacccagaggctgctgtgtttctgggagatgctcaatgttggctgcaaaaaattctgaacagcaatcatgttcttgtttgagaatctgcgaaaagcaatgtgctccactaagcactgacaatacagtagtaaatacggtaggcaaagtccctattcccaagtcacctgcattccaaaggggttaggccagtagttgttcagattgtccaggttgtgtggtcctctaggtaattcaatttggagaaacttctttcaaataagaacaccaraagttatgaatataaaattaggcacaaacgtgaatatttaaaataaaaaaattttcaacaaataaatttgaaacccaacaaataccataaataccaaactgcagaaaaataacataacattttaattaattacctgcttaacccagcag

SEQ ID NO: 261266 - DNA, 629 bp, Homo sapiens
tgaatccataccttaccaatgagagagcaaagccacaaaaataaaaactaggaaatcttacattttggaaagctatgtatttgaggaaagaagaatgagagtaaggagggaaacaaaggcaggcttcccagtattccctttgactgactcttgaaagctgctggtattcacctcactcaatatgaggtatacacaatctactatggacatccacccagaggctgctgtgtttctgggagatgctcaatgttggctgcaaaaaattctgaacagcaatcatgttcttgtttgagaatctgcgaaaagcaatgtgctccactaagcactgacaatacagtagtaaatacggtaggcaaagtccctattcccaagtcacctgcattccaaaggggttaggccagtagttgttcagattgtccaggttgtgtggtcctctaggtaattcaatttggagaaacttctttcaaataagaacaccagaagttatgaatataaaattaggcacaaacgtgaatatttaaaataaaaaaattttcaacaaataaatttgaaacccracaaataccataaataccaaactgcagaaaaataacataacattttaattaattacctgcttaacccagcag

SEQ ID NO: 261267 - DNA, 404 bp, Homo sapiens
ttttttaaatcacctggagagctgcaaaaaaattactgaaatttggatctcactcccagagattctgatgtaattgccaccatcaaggcagatgattccaatatgcagcaaaatctgggaaatattttctactrtcttatcatagagtgtggaaggcattgaggagctaaaatagcaattgcaaagaaaactgtacagataaaccagggcatgagaaggaagagagaaaagatggagaatttagaagcattttgcatttctgggatcgcagaagtaagaaagttgagccaggaatagtgggatgctaagtaaggttataggtctggctagagtgtgcttagtgcattctgtgttacgctggtaatagggctcttaccctgtgataatgatgataatgtgcaatc

SEQ ID NO: 261268 - DNA, 352 bp, Homo sapiens
tccaaacttgtttcaagaggacaacattatcctgataccaaagccaggcaaagacagcaaaagaaacaaaaattgcaggctgatattcctaatgaatatagatacaaaagttatttacaaaatactagcgaagtgagctcaacaacaccttaaaaagatcatttaaaatkatcaagtgaaattcattcctgggatgcaaggacaagttcaacatatgcaaatcaataaatgtgatacaccacattaacaaaattaaggacaaaaccatgtaatcatctcacagaggcagaaaaggcatttgacaaaacacaagatctttcatgctaaaaactcttaagaaattaggtatgga

SEQ ID NO: 261269 - DNA, 587 bp, Homo sapiens
aggttattaaggcaacaacttgttattcttcaagttagtaaataaaaggaacaaatcaagtattcattggcatttcctaaaagtatgtatttcagggaaaccaaatagttggggaaaagaagtctttttagagaagaatcgcatttcgtataggagaagggaatagcagaatttaaatatcactcgttgcagcctccattgaaagaaaagaacagaagtagagaagttaattcagaggacatagaagagccagacagaatcaaataaaagccaaacgggtaaagtttctacctgatgttgtggaagaacagrtgtaggaattttggacttctggttctagctaatatgtggtaagcacaccttatcccatctcttcgtctctctctcactagcaacaactaataaccctggactaaaatgcataaagcaactatcagaagacatcaaaagttgggaaaatatgggtctactgagtaaggacctgtaggcctcaagtatgacccagcagtgaattccttgacttttttgtctttttgcctaccatttatttctgtctggatgctagaacggtaatatggtttggctct

SEQ ID NO: 261270 - DNA, 565 bp, Homo sapiens
atgcataaagcaactatcagaagacatcaaaagttgggaaaatatgggtctactgagtaaggacctgtaggcctcaagtatgacccagcagtgaattccttgacttttttgtctttttgcctaccatttatttctgtctggatgctagaayggtaatatggtttggctctgtccccacccacatgtcatcttgaattcccatgtgttgtgggagggactcagtgggaggtaattgaatcataggggcaggtctttcctgtgctgttctcgtgatagtgaataagtctcacaagatctgatggttatataagggggagtttctctgcacaagctctctttttgcctgctgccatccatgtaagacgtgacttgcttctccttgccttttgccatgattgattatgaggcctccccagtcacgtggaactgtaagtccattaaacctctttcttttgtaaattgctcagtctccaatatgtctttattagtagcctgaaaacagaccaatacaaacagcctgaaaaaagaactgccaataaataaggcattaagagccccagaagag

SEQ ID NO: 261271 - DNA, 554 bp, Homo sapiens
agggaatagcagaatttaaatatcactcgttgcagcctccattgaaagaaaagaacagaagtagagaagttaattcagaggacatagaagagccagacagaatcaaataaaagccaaacgggtaaagtttctacctgatgttgtggaagaacaggtgtaggaattttggacttctggttctagctaatatgtggtaagcacaccttatcccatctcttcgtctctctctcactagcaacaactaataaccctggactaaaatgcataaagcaactatcagaagacatcaaaagttgggaaaatatgggtctactgagtaaggacctgtaggcctcaagtatgacccagcagtgaattccttgacttttttgtctttttgcctaccatttatttctgtctggatgctagaacggtaatatggtttggctctgtccccacccacatstcatcttgaattcccatgtgttgtgggagggactcagtgggaggtaattgaatcataggggcaggtctttcctgtgctgttctcgtgatagtgaataagtctcacaaga

SEQ ID NO: 261272 - DNA, 554 bp, Homo sapiens
agggaatagcagaatttaaatatcactcgttgcagcctccattgaaagaaaagaacagaagtagagaagttaattcagaggacatagaagagccagacagaatcaaataaaagccaaacgggtaaagtttctacctgatgttgtggaagaacaggtgtaggaattttggacttctggttctagctaatatgtggtaagcacaccttatcccatctcttcgtctctctctcactagcaacaactaataaccctggactaaaatgcataaagcaactatcagaagacatcaaaagttgggaaaatatgggtctactgagtaaggacctgtaggcctcaagtatgacccagcagtgaattccttgacttttttgtctttttgcctaccatttatttctgtctggatgctagaacggtaatatggtttggctctgtccccacccacatgtcatcttgaattcccatgtgttgtgggagggacycagtgggaggtaattgaatcataggggcaggtctttcctgtgctgttctcgtgatagtgaataagtctcacaaga

SEQ ID NO: 261273 - DNA, 619 bp, Homo sapiens
ggcatcattttcttctgtttatcaggacagaacctgaaaacaagcagaattgtgctgggaaattttctttcacacacaaacatttggaagatgtctggggagaggatataaacatgggctttttcagtaactccattggggatggtatctggtagttttccatggggagaaaagcctgagaaattgacctcacccagcatgctcctgggcctgaacatacaacatwtttattgcaagggttttatttatttatttatttttaaagaaaaaccctcagccacacagcatgagctctataataccagttctgctagtggcacacagagtggctctggaaagtaaatttcttactcttctaataattgtaaaccatccgctaaggtgatctttggagaacacctaattatgactttatatgtcacagtgtaaaaagtggcacatagtctggacaaaacacacgtagtgaggaataatgcaaacctgctgacagtagttggttttgaatattgaagtgggaaattttcttttttatactttctaaattatttagtattatttatatcatagtcaagattaaaatagcacataatttttaaaaaactaaaatgcctcataagca

SEQ ID NO: 261274 - DNA, 539 bp, Homo sapiens
acctgctgacaaactaggctgcttgcgttggatggggcagcctgttctcttacttgaaaacactcttggagggcggaagaacctggagatgagctattcatgagccttggatgagtgartgtggggattggggacaggtaagaaggggctaagacagagggaagaatacagtgagggagatttccaggcaaagtaaaaggggctttgaaaatgactctgttgttaatttcagcctacattcctctattttataaggtattataactacccaatgggttcttcttgcctgctgcacagataagaccaattcactgagaccatggcattataataaagaatgagtttaattggcatgaggtggctatgccttgtagacaaatcaatctcaaataaacctccccaaaattcagaggctatggttttttaagtgtagtttggtgttggggttccatcaggctggtgggaaaaatactaaagatagttatagtaatagtcaaaaactctcttggaaggcctgagagtttgcatagcttcagatt

SEQ ID NO: 261275 - DNA, 531 bp, Homo sapiens
taatagtttttttaataaacttttataccctgataagccaaaagggagaataaatatagaattcaattgccttaatttctaattcyctgattgataatgtctgatgttcttttcatttatttgctggccatttgtaattctttctctatgcatttttgcatattgtccttatttttcatatgtaggaacccttgatttgtcagtactgttggtcttcttttgtagtacgtattgcatatattttactcattctaattttagtcttttaactttgtttatggtgtctttttctataggcaagcatttaatctttatataatccaatcattcagctattttcattttatctttttggtgttcagtcatgcttaggaaggactttcacaccctaagattataaatttgtcttcccatatcttcttttagagtgtttataatttcatataattttcttacaattatatatttaatccatttgcaattaatattgaaatatgtcattatatagtcattgttttttttccagatgaa

SEQ ID NO: 261276 - DNA, 557 bp, Homo sapiens
tatatatttgtccaatgtcatcacggtctatcacaggacaatgagttcagtacccaaaactatattatgacctgaagaagagctcctactaaaggattttratcaagagagttctataataccataagttatagtttttcctcctccaaaatttacaattagtagcagggacaggtcttgacacagttaacacaaggaagactagattaaatgcaaaatatatccaaaaacaatccactttggaagatgttaaaccagccatgtgctatcttgttccttaattggcaatatgtgcttctcaatcttgccagaatgtaggtttctcagtcctgctcctcttctatctttagaatcagtgctacatacacccctaggaactcaataaagacacacacgtcagtggattcgcactccaatcaaggagctagatgcatggtccagtgcaataagaggagcctagcttctccttgacccttggatagatcacccccaccttagaacaggatggtggagactgcaaaaatgttctccaaggtcctggtgagaaagcctctaca

SEQ ID NO: 261277 - DNA, 614 bp, Homo sapiens
tgtgggccttgctgcatctgtctggacagacgtgatgcccttgactgtgggtttttgctcctgcaagtctcttcatccttcactgcatcaatatctgttagacatcttacttcctgtcgcctgttcacactccacctgtaacacgggagcatgtctagacctctccctagcatgggtcccacaataactggtctattccacctggtaatcaggcagagcataagagtcctataaagcataaagaactgtgacatcctgtttacctcaatagatcaacaattcttgagrtcaggatctattcggctcagtgttatgtacacagtaattgctcaagaaattagtctggggagtaggaagaaaaagcaagcttcagccccacagccatctgtctcctttattcttgaatctcatctgacttgtccactgtggtatcctcagagcacagggcagctcttggtacatggtggatgcttgtcaaatgtttgtggaatgaaggaaagaagaaatctaattatccagaaagaatacaaacaaggtacttgagccctgtttttgagtatgcagggtcagggtccccccagtctgggtccagccttggtcctgcctctcgttat

SEQ ID NO: 261278 - DNA, 535 bp, Homo sapiens
agccattatttttcatcttgatttatccctctccttgtctctgtctctctcacacaggtacatatgcccatggagataaacaaggttgcaggattttgatgccatttctgacccttagagctacctgcttagtgatagacactcacagaaattaagagctgggaaacagtcaggtattacacrtaaaatctccggagaacttttttctggaaccagctctgagaccccagctgacagttccctctgcttgttccttcacaaaagcgcagacctggtttgctggttaacaattatacattttaaacagttctgtgctctggctgcatcctcaaatgcctctgaaaaataagcacattttaaaaacacaaaaaagaataaacaacaagacagttcagcaagagaaagaaaaacataagccactgcttcattacagagccatgggcaggcctctcaaaggcagcagcttttataaatgatttcttggaaaagcttttatgtcttcaaagtgtttctgctaaaagaagctaagtgttta

SEQ ID NO: 261279 - DNA, 638 bp, Homo sapiens
agtatgcaaagggacccatctgtgactctctacatgttcagctattctgcattacaaatgtaattgatacgtaaaccctgataaaaaattaacacatacagaatcataacattgttgtcctctgagtggatagaaaggtttgagaagtgaatttggatgacaagtatttaaattttacacccaggccgggcaytggggctcacgcctgtaatcccagcactttgggaggctgaggcaggcggatcacctgaggtcaggagttcgagaccagcctggccaacatggcgaaaccctgtctgtactaaaaatacaaaaattagctgggcatggtggtgaatgcctgtaatcccagctacttgggaggctgaggcaggatagtctcttgaacccgggaggtggagtttgcagtgagccaagattgcgccactgcactcccacctgggggacaaagcgagattccgcctcaaaacaaaacaaaacaaaacaaaatttacacccatgccacaacacccaagtgccactcatcgtttcttgctgaacaattgtattatttactgactggcctcacattttatgtcttttcttctccaatccatttacacatagtaactgctgtgattgtcgaagaacagtaacct

SEQ ID NO: 261280 - DNA, 638 bp, Homo sapiens
agtatgcaaagggacccatctgtgactctctacatgttcagctattctgcattacaaatgtaattgatacgtaaaccctgataaaaaattaacacatacagaatcataacattgttgtcctctgagtggatagaaaggtttgagaagtgaatttggatgacaagtatttaaattttacacccaggccgggcattggggctcacgcctgtaatcccagcactttgggaggctgaggcaggcggatcacctgaggtcaggagttcgagaccagcctggccaacatggcgaaaccctgtctgtactaaaaatacaaaaattagctgggcatggtggtgaatgcctgtaatcccagctacttgggaggctgaggcaggatagtctcttgaacccgggaggtggagtttgcagtgagccaagattgcgccactgcactcccacctgggggacaaagcgagattcygcctcaaaacaaaacaaaacaaaacaaaatttacacccatgccacaacacccaagtgccactcatcgtttcttgctgaacaattgtattatttactgactggcctcacattttatgtcttttcttctccaatccatttacacatagtaactgctgtgattgtcgaagaacagtaacct

SEQ ID NO: 261281 - DNA, 448 bp, Homo sapiens
cttaaaacaacagaagctcattgccttgcttttctgcatgctaaaagcccaaattcaacacgttaacagagctgtgctcctttcccaacctccaggaggattcctgtccttgcctcttctcacctctagtagctcagctgctctttggcttgtgatagttgtggcagtatcgcgccaaactctgcctccattttctctcagtgcctctgtctgaattgtctttttcttataaaaacaccagttctattggattaaggatccattctattccagaatgacctcatcttagctactcccatctgcaacaaccccagtcccagataatgtcacattctgaggtactggtagttagaattccaacagaccttttttggaaaacaaaattcaatctataacatgatcctarctacaactttggtgtcttttctccaatttcaaggcaaattca

SEQ ID NO: 261282 - DNA, 407 bp, Homo sapiens
tgggtttgattcccaaccctgtgaacttcatcacggtatcctagtgccccctgggtgcagatggagcgcagattcctattttattattcagaaacttcaaygagctgagctaagcctcttctcagccttcccttccccaagctgatattttacaaatcgcaaccataatcaaacaattgttcttttgaatgcattgcgctgattgttctgaaaggaaagtcataggctgatgtgttcctggatggagcagaatctatcatttttctactcaggaagaggctggctctgaaaacacagtggaacaaattcatcacccgggaatggcgctaactgcgtttccacagaggccctgcagctctggtggctgacactgggggcaggtctggatctctgcagtgaaattgtcc

SEQ ID NO: 261283 - DNA, 407 bp, Homo sapiens
tgggtttgattcccaaccctgtgaacttcatcacggtatcctagtgccccctgggtgcagatggagcgcagattcctattttattattcagaaacttcaacgagctgagctaagcctcttctcagccttcccttccccaagctgatattttacaaatcgcaaccataatcaaacaattgttcttttgaatgcattgcgctgattgttctgaarggaaagtcataggctgatgtgttcctggatggagcagaatctatcatttttctactcaggaagaggctggctctgaaaacacagtggaacaaattcatcacccgggaatggcgctaactgcgtttccacagaggccctgcagctctggtggctgacactgggggcaggtctggatctctgcagtgaaattgtcc

SEQ ID NO: 261284 - DNA, 523 bp, Homo sapiens
tatagagagtccactcagttggaattgaagaaatttaacagaggctacttacaaaggtgggggtgccagasaaggtccagtcagagaaagaaactacatgagtaactgaagcaggggaagctgatacaaagaattgttaactagaaagagtgactttcttcacaaagaagtaaaataagtctcaagggttctgaaagaaaatgcagaaagcagctgccacctgttgcctgagagaaagtgaacaaagaggcagcttaaagagggcctgtgatatagactgaattgtgtccctcaaaattcatatattgaagcttcaacccccaatgtgactgtatttgaagacaaggccattatggaggtaattaaggtaaattaagggcatgagagtggggccctgatctgatgggattagtgtccttgtaagaagatgcactggcactcatcctcccaccatgcacctgcactgagaaaaggccatgtgagcacagagagaaggcagccgtctgtgaccccaagggagagc

SEQ ID NO: 261285 - DNA, 541 bp, Homo sapiens
atataagatataatattgcatatgtgtactacatattgtttatatatacctacatacatatgtagatacatataaacacacatgtattatgtggtaataatgaaatattattagcttttaacaagttagctagaactgaaacactggtgaacaataacataaagtatggtgggaataggccagagataaagttttctaaattttttaaccatttaagttgaagatgaaaatacttattaattttagactccatcatcaagtatgcatgattaatgttctttaaagaagcaaatagaagttttatttatatttttaacatggaatagggcttgttattttattttaaatttaaaaagaagtacatatttatcatctgcaattgttgttttgaagtatgtatacrttatgaaatggctaaatcaagctaattaacatatacattacctcacatactgatcattccttctgttgtgagagcacttaaaatctatttcttagcaattttcaagaatatagtaagtttttactaactaaaatcacc

SEQ ID NO: 261286 - DNA, 565 bp, Homo sapiens
acacacgcctacacaacacacacacacacacacacacacacagaggaacttcaaaaaattagtgaaaaattaaattaaaggataaaaattaaaaatataaactttgtttctcaatgtaagctccatcaagttcaattaactttgtaattgatgacatcagccattaagtcaatttctaaagaactgaaggtcctggaaatttaatcatgtcagtgcagtctttttcacattattgacagaaaataagtgggttctctttacagatctttttaacattaagaagcaaacagaagtcagaaggagccaaatcagcactttcagatggatgtgtaatgattttccatcaaaactccccccacagtgttcttgccaatgagagaaatgagcaggagcattgttgtggtggagaaggattctggtgaagttttctttggcatttttctgctaaagctttggttaacttttttgaaacactctcataacaagcagatattattgctctttagtcctccagcaactcarcaagcaaaatgccttgaggataccaggaaactgttgccatgac

SEQ ID NO: 261287 - DNA, 640 bp, Homo sapiens
tatttctcagctgtttattcagtctcactggtttatgtgtctgtttttaatgccattaccatgctatttagattactataggtatgtartatattttgaaatcaggtaatgtgaagcctctggcttgttctttttgcccaagatttctttgttcatttggatcttttgtgatttcacatgaattttagaatggtcttttccatttgataaactcttaagcataattactaaaaattttcatggaacacatagtttcctcttgataaaaaaatagaataagtaaaattataatgacatttgtataccatttactgattctttttgttctcattgtttgtgtaaaccttgaaaagtaaggaattaaaaagaacgttttttctttaagcataatttatttaaatcatatttcggattttgctgatttggtaggtgctagctggggttaatggaggccacaaggaggtttccttaggtattttgcacttctttccagcaagacaaagaaagtaatatgactgaaaaaaaataaagataaatgtaacaaagtatctgaggaaagcaacccgaactttttatgttatctatttcccctaaatgaaatatgaagcactgttgaccttttaccctgaatgagccaaac

SEQ ID NO: 261288 - DNA, 640 bp, Homo sapiens
tatttctcagctgtttattcagtctcactggtttatgtgtctgtttttaatgccattaccatgctatttagattactataggtatgtagtatattttgaaatcaggtaatgtgaagcytctggcttgttctttttgcccaagatttctttgttcatttggatcttttgtgatttcacatgaattttagaatggtcttttccatttgataaactcttaagcataattactaaaaattttcatggaacacatagtttcctcttgataaaaaaatagaataagtaaaattataatgacatttgtataccatttactgattctttttgttctcattgtttgtgtaaaccttgaaaagtaaggaattaaaaagaacgttttttctttaagcataatttatttaaatcatatttcggattttgctgatttggtaggtgctagctggggttaatggaggccacaaggaggtttccttaggtattttgcacttctttccagcaagacaaagaaagtaatatgactgaaaaaaaataaagataaatgtaacaaagtatctgaggaaagcaacccgaactttttatgttatctatttcccctaaatgaaatatgaagcactgttgaccttttaccctgaatgagccaaac

SEQ ID NO: 261289 - DNA, 369 bp, Homo sapiens
ttttttttgattggcaataggttgaaaaggttaacctatgcctgaaaagcttgaagccwgccttaatactcaaaggaatgtaaattgtcctaccataaagacacatgcatgtgtatgttcatcacagcactgctcacagtagtaaagacatagaatcaacccagaagcccatcagtagtgactggacatatacattaagaaatactatacagtcataaaaaaagaacaagatcatgtcttttgcagcaacatgaatagaactggaggccattatcttaagtgaattaatagagaaacagaaaaccatatatcacatgttctcacttaaaagtgggagctaaacattaagtacacatgaacacaaagaag

SEQ ID NO: 261290 - DNA, 602 bp, Homo sapiens
ggctgcctctctcgacccagcctagctgtcccactaactgcagctgacaattcccagaggcaggctgatggaggtgtgtgcaagggatccaagagggcccagagagagtgactgaaaacaagggaaatgcagatttgtcacagctgttggcatctgagaagagaaccttatggctttggttggagaatatgtattttccagtttgattgagctcagttttctagggttgtagcccccagttctgtttcattctgatatgctgctgcctcatacccagagaggagcaaacaagcctggagaaaatcatgtttgtcttttactagtcttacagcttcactaaaagatagcaatgctgaggtcacagggggagcggcactgtaatggagtctctaccatgcctgacccgtggctactccagtctcaaagcatatctgttaggttttgaatgcaatgttgagagctggtgtgaaatgacacatctgtcctaaaatgggttgaaaactatgcatgttkgttggaggaggaagatggtactggcaagaccagaaatgtggtgatttttaatgtagttaaacagttttagtaggaatggcagcttgatc

SEQ ID NO: 261291 - DNA, 580 bp, Homo sapiens
agggagggaaaggggcccacaaggatgatgttccagcatgggctccagtggtcagaaatgtgctactctgtgctaactgatggtgagaacaatttgatatctattctctctctaagcaatactaaaataaggactcagctgggggctttgggagaccagggccacagcctagatggtttggactctgataacaaggtccacacagatggagaaatatctattttccatgtttgcctgaaacacagcattactctggtagaaagggactaaaaggagcccaggaatttttgtgggacattgggaagcagagctctgggcaaggaagcatgttctcatgaaggctgagatgagctcctcaggtagctgctgggaggttgcattcagcctggagactggactgagaatgtgtgcatcccagaaccttccagacataataggcagacctgtggcagagaggctgaggagkggtggtggtgacacagtggactatcacagtgggtgacagtccatttttatgtaagcttgcataaaatgtttcagagagaaatcattcatctcttttcctctccaagttgtgaac

SEQ ID NO: 261292 - DNA, 588 bp, Homo sapiens
ggaggtttttactgagccaaatataagtgaccattgcccaggatacagcatcaagctgttctgagaacatgtggccaaggtgattgggttayaccttggtttactacgttacagggagacagaagttacaagcaaagacatgaatcaatccatgtgatatatacattggttcaaccaggaaggtgggacatcttctagcagggtgtggtggggagtggtttacaggtggattcaaatattttctaattgacaattggttgaaaaatttaaactttgcctagagagttgaagttagctaaaataaatgcttgagttaaggggaagataaaagcaaggctcttgttatgtagataaagcctctaactagcagacttcagagaaaatagatggtaagtgtttctttttttaatgaaccttaaaaggtgtcaaactcttagttgcatctcctcctggatcaggaaaacacacataaagggaaggagattctctacagaatgcaaatttttccacaagtgacaactttgcagggcaatttcaaaatacatcaaatacatatgtttcaggataaaatgctttgatttcttttag

SEQ ID NO: 261293 - DNA, 588 bp, Homo sapiens
ggaggtttttactgagccaaatataagtgaccattgcccaggatacagcatcaagctgttctgagaacatgtggccaaggtgattgggttataccttggtttactacgttacagggagacagaagttacaagcaaagacatgaatcaatccatgtgatatatacattggttcaaccaggaaggtgggacatcttctagcagggtgtggtggggagtggtttacaggtggattcaaatattttctaattgacaattggttgaaaaakttaaactttgcctagagagttgaagttagctaaaataaatgcttgagttaaggggaagataaaagcaaggctcttgttatgtagataaagcctctaactagcagacttcagagaaaatagatggtaagtgtttctttttttaatgaaccttaaaaggtgtcaaactcttagttgcatctcctcctggatcaggaaaacacacataaagggaaggagattctctacagaatgcaaatttttccacaagtgacaactttgcagggcaatttcaaaatacatcaaatacatatgtttcaggataaaatgctttgatttcttttag

SEQ ID NO: 261294 - DNA, 595 bp, Homo sapiens
ccatgtgatatatacattggttcaaccaggaaggtgggacatcttctagcagggtgtggtggggagtggtttacaggtggattcaaatattttctaattgacaattggttgaaaaatttaaactttgcctagagagttgaagttagctaaaataaatgcttgagttaaggggaagataaaarcaaggctcttgttatgtagataaagcctctaactagcagacttcagagaaaatagatggtaagtgtttctttttttaatgaaccttaaaaggtgtcaaactcttagttgcatctcctcctggatcaggaaaacacacataaagggaaggagattctctacagaatgcaaatttttccacaagtgacaactttgcagggcaatttcaaaatacatcaaatacatatgtttcaggataaaatgctttgatttcttttaggacctgttatctgtcatgtgatgctataccagagccagttgaaacttgctgtcctattgctacaaagagtctgttttgtcagtgttaagatttctgttttaatgttaatgctggtcagttggaactaaactccaaagagaggtggtacaatgaggc

SEQ ID NO: 261295 - DNA, 588 bp, Homo sapiens
ggaggtttttactgagccaaatataagtgaccattgcccaggatacagcatcaagctgttctgagaacatgtggccaaggtgattgggttataccttggtttactacgttacagggagacagaagttacaagcaaagacatgaatcaatccatgtgatatatacattggttcaaccaggaaggtgggacatcttctagcagggtgtggtggggagtggtttacaggtggattcaaatattttctaattgacaattggttgaaaaatttaaactttgcctagagagttgaagttagctaaaataaatgcttgagttaaggggaagataaaagcaaggctcttgttatgtagataaagcctctaactarcagacttcagagaaaatagatggtaagtgtttctttttttaatgaaccttaaaaggtgtcaaactcttagttgcatctcctcctggatcaggaaaacacacataaagggaaggagattctctacagaatgcaaatttttccacaagtgacaactttgcagggcaatttcaaaatacatcaaatacatatgtttcaggataaaatgctttgatttcttttag

SEQ ID NO: 261296 - DNA, 595 bp, Homo sapiens
ccatgtgatatatacattggttcaaccaggaaggtgggacatcttctagcagggtgtggtggggagtggtttacaggtggattcaaatattttctaattgacaattggttgaaaaatttaaactttgcctagagagttgaagttagctaaaataaatgcttgagttaaggggaagataaaagcaaggctcttgttatgtagataaagcctctaactagcagacttcagagaaaatagatggtaagtgtttctttttttaatgaaccttaaaaggtgtcaaactcttagtkgcatctcctcctggatcaggaaaacacacataaagggaaggagattctctacagaatgcaaatttttccacaagtgacaactttgcagggcaatttcaaaatacatcaaatacatatgtttcaggataaaatgctttgatttcttttaggacctgttatctgtcatgtgatgctataccagagccagttgaaacttgctgtcctattgctacaaagagtctgttttgtcagtgttaagatttctgttttaatgttaatgctggtcagttggaactaaactccaaagagaggtggtacaatgaggc

SEQ ID NO: 261297 - DNA, 576 bp, Homo sapiens
cagctttaggttgaatttattatcaagtctgcagtaaaagctacttaagcccttcagaactcaataatggtggtgagggcagttcttgctcagaaaagtttcagtctcagctctgagctcaaaataatgtgatgaaacttkattaagccatcaaactggtgtatttatgtgggacaaatcggcatagtcagcttatttgtgacaaaaagttagagaactgatgatagttgagtccatgagagggattgtcattcactgttgacactatgggcttaatcacacacaacagattttctgcaaaagacctgctgatacaaggaatagcatgaaacaccttacatttttacaagtttgtaagtttgtaatttgttttttttttgtcccatacatttttatcaccatcatttgcaacagcttagcagattccactttggattctactaaattcgtgttttctcaacatctttgaaaatattctcaccggtagttgttctgcacagactatctaaagagcctaacccttcattcacttcagccttgatgtgaactcctcaaataaacaactgagccatatca

SEQ ID NO: 261298 - DNA, 576 bp, Homo sapiens
cagctttaggttgaatttattatcaagtctgcagtaaaagctacttaagcccttcagaactcaataatggtggtgagggcagttcttgctcagaaaagtttcagtctcagctctgagctcaaaataatgtgatgaaactttattaagccatcaaactggtgtrtttatgtgggacaaatcggcatagtcagcttatttgtgacaaaaagttagagaactgatgatagttgagtccatgagagggattgtcattcactgttgacactatgggcttaatcacacacaacagattttctgcaaaagacctgctgatacaaggaatagcatgaaacaccttacatttttacaagtttgtaagtttgtaatttgttttttttttgtcccatacatttttatcaccatcatttgcaacagcttagcagattccactttggattctactaaattcgtgttttctcaacatctttgaaaatattctcaccggtagttgttctgcacagactatctaaagagcctaacccttcattcacttcagccttgatgtgaactcctcaaataaacaactgagccatatca

SEQ ID NO: 261299 - DNA, 601 bp, Homo sapiens
gtctggcatcttgtaggcaggagaaattagaatacagagaaaagatgatctacatacatacaaccagaggctagaaggctaaaaaatgctccaggtcttttcttgcttgtgcacaaagattaatatggcttccctcgccctttcccacttctctttggtacagtgactctgtagaaagcagaaatcaatttgccctaattgagggactaaatctttccaaaagagactttcttgggcaacaagacaagaaagcaagaggcatgatcacactccaaatatgctgctgtttggtcaggaacactatgttcgaaaaaagaaaaaaatccatagtcattgtttgtgaccaccgcttcttcttggctgggttcaactgataggtcattacaacgagaatgagataatctcctgtaccacacaccactactcccatcagagggataaatatcaccctggccrgctctaatcattgaggcccctgcttgggcaaagccccatcgctaaatcaccccgaatgcagatggccacagtcattacagagtgaccaattaaggccttctgacagcttgtggtaaagtcagagcaattatttaggggcaattat

SEQ ID NO: 261300 - DNA, 491 bp, Homo sapiens
tcttttggtgaatctatgtttaaagaattataaatttaaaatttgaaaaaaattcaaatgttctggaagtgcataaagtaaaacgagaacatttccccacttcctatcctattcctagggacaccttctattgacaatttggtgtgaaacagatactttttctatgcatgcaaatacatctatatgcatgttttaaaaaataagtcatttaataaygtttggcaatttccttttaataatatatggtatatcttgggcatctttccatgtcagtatatttggacttagtcttcttaaacgttacctagtatttcattgcagtaagttgttcaacctcctaatgttgagcatttaggttgtttccaatttttcatgattataaacaatgctgcaaatattcctattcatacatatttttagacagttttgagggtatttctttgggacacacttctagaaattgccaggtatgttaggccattcttgtgttg

SEQ ID NO: 261301 - DNA, 491 bp, Homo sapiens
tcttttggtgaatctatgtttaaagaattataaatttaaaatttgaaaaaaattcaaatgttctggaagtgcataaagtaaaacgagaacatttccccacttcctatcctattcctagggacaccttctattgacaatttggtgtgaaacagatactttttctatgcatgcaaatacatctatatgcatgttttaaaaaataagtcatttaataacgtttggcaatttccttttaataatatatggtatatcttgggcatctttccatgtcagtatatttggacttagtcttcttaaacgttacctagtatttcattgcagtaagttgttcaacctcctaatgttgagcatttaggttgyttccaatttttcatgattataaacaatgctgcaaatattcctattcatacatatttttagacagttttgagggtatttctttgggacacacttctagaaattgccaggtatgttaggccattcttgtgttg

SEQ ID NO: 261302 - DNA, 585 bp, Homo sapiens
ttttgcacgacttttcaagtaatgaagatttttcctgtcatatatataaatctgcctcaatcttttggatagttgcataatagtcccttgaaaagatgagtcatgttttatttaaatggtttcctgctaataagacattggaagcatttcaagttttttgatactaaaaatgatatttttaatggaaataagtctttatgcatacatgcaaatagttttataggataaattactagaagtagaattgctgaacaagtgtatgtgcatttttcattttgatagctattgccaactatccctccaaatagatttcactagattacacatttccacatacccttacacactttacaaactatcaaacttttagctttgcaaactacaggataaaaattatatctattatttttatttgcatttattcaattatcagtgcagctgagtatttttcatatgtttataagtaatttgtgtatctttttctctgagctgtctgttcatatcctttkcccagttttgaattgaattattggcctttttcttattgacttttgcatttacacagtgacattagctcttggtttg

SEQ ID NO: 261303 - DNA, 475 bp, Homo sapiens
caggctgttgctgctcctggaacacatgatcttgtagcccaccagggcaatgtactatggcctttgtcgtaagtttccccaggaccgagcagagtgacaggcacataataggctctcaaaacatatttgtctaattagtttagtgtcatttataaaatcataactttttaggcccagaagggaacttagtaatcacttgatyccatttctcttttacttagagaaaaaaaaaatgaagcctggaaagatgaagtggcttgccaaggtcaccaatctagtcagcattagatcctgtttgtagcaagtaaacaatctctagataccttgaatccagacaaattctgcacccatgatactttatcatagtcccagttgatagctgccactgagaaaatgtccctggcccatgcccatgtaacctcccaacaaagctttagtgtctatataaaaagtgaaataagaaaatacttctttt

SEQ ID NO: 261304 - DNA, 647 bp, Homo sapiens
acaagtttgataattaatatggaaaaataaaacaaaaagatgtaaaaatgcatgtcaatttagtcctaattgagggtcactgatagtagaaataatctttccaattgtgttagatcttttctctaaagattgccaacagttctacagaagtgaacaagttttcatatacaaaaatatttccatagcatagagaaataaagttaattcaataagcaaatatgaatgcttataggtaatggaataaaggtggtcacataacacagactttttttattatactttaagttttagggtacatgtgcacagatttttaaagaaaattccaacataatgattaaaaattacatagctgattatatatacatgtgtagctaaatctattttttacatgaattttgcttcaataaaataatttgttaagcataccactgaatgtgactcataggtcagaaaatgatttgtcctyagactttatgtactaatttttagttctgaaaaatgtagtcatcatatgtaaaagaaaaaatatattagcttttgaattagactgtccttaaggtagactggcccaaaattgacttcaagtggaccagattggtacaatgcagggctatatctgcagaatgtggcagaactcagatggtgaa

SEQ ID NO: 261305 - DNA, 551 bp, Homo sapiens
ttctctccacatacacatagcccttctcagtaccctatctccccaacagagtcatatcacaattctactagagacatattcagtatttacattctgatgacatcttagacattagtcagaaatgagtcagaggcgatactagtatttatattccctttcctgtacagctttgtggggttttttaaagttaataattactaattttatttttaaacatactttctattgtgtcaatcacaaagtctctgtggatcatcttaattcctcttaaggtgtttagaagcgtcaggtattcataaaatcaaagccctgaagaattttctcttggagacctctgacctcttgacctctgatctgaacyggcatttgggggtctttcttttcttctttttctttttcttttttttttttttttcaagacagggtcccactctgttgcccaggcaggagtgcagtggcacaatcacaattcactgcagcctcgatatcctgggctcaagtgatcctcccacttcagcctcctgagtagccgaggccacatgtgcatacca

SEQ ID NO: 261306 - DNA, 466 bp, Homo sapiens
agtgacagtatgtgctcagtgtcaggacaatgattccaagctgccagctggtgaagcatctgccccattcccacaaccarttgcaccttaggctgtgatccaagtacggcgggcacctggaacccagggtcctccagcaactccataggcccaagaccacatggcacagagacgcactctgctgccaaactgaaggagctgtccaggctgcagagcacctctttggctgtgtttgaggtgtggctaggaagctgggagtgccgcgaatcagtgtagggaacggtgctcattgctaatggtgacagcacatagtcaggaatactctgcttagggttcccttcaggggatcgaatgagcctaggaggttgaggctgcagagagcagtgatcaggccactacacaccagcctgggcaacagagccagatcctccaaggagttcatgattgcaggtgaccagctacaagt

SEQ ID NO: 261307 - DNA, 466 bp, Homo sapiens
agtgacagtatgtgctcagtgtcaggacaatgattccaagctgccagctggtgaagcatctgccccattcccacaaccaattgcaccttaggctgtgatccaagtacggcgggcacctggaacccagggtcctccagcaactccataggcccaagaccacatggcacagagaygcactctgctgccaaactgaaggagctgtccaggctgcagagcacctctttggctgtgtttgaggtgtggctaggaagctgggagtgccgcgaatcagtgtagggaacggtgctcattgctaatggtgacagcacatagtcaggaatactctgcttagggttcccttcaggggatcgaatgagcctaggaggttgaggctgcagagagcagtgatcaggccactacacaccagcctgggcaacagagccagatcctccaaggagttcatgattgcaggtgaccagctacaagt

SEQ ID NO: 261308 - DNA, 466 bp, Homo sapiens
agtgacagtatgtgctcagtgtcaggacaatgattccaagctgccagctggtgaagcatctgccccattcccacaaccaattgcaccttaggctgtgatccaagtacggcgggcacctggaacccagggtcctccagcaactccataggcccaagaccacatggcacagagacgcactctgctgccaaactgaaggagctgtccaggctgcagagcacctctttggctgtgtttgaggtgtggctaggaagctgggagtgcygcgaatcagtgtagggaacggtgctcattgctaatggtgacagcacatagtcaggaatactctgcttagggttcccttcaggggatcgaatgagcctaggaggttgaggctgcagagagcagtgatcaggccactacacaccagcctgggcaacagagccagatcctccaaggagttcatgattgcaggtgaccagctacaagt

SEQ ID NO: 261309 - DNA, 577 bp, Homo sapiens
tttaaataatatggattttcacatcatctgaattcagatttgcaatggaagaacatacaatacaggcttttcaatacacaagttgtgaaagctaatcataattgtcaaagaggatgccatagattctaaaggttatgtttgaattaaagttccactactaatttttaaattcatttgtttatttacctatttcttcattccaaaaataattattaactataccttattatctggtcaatgatttactaaatgcctacaatttgtgagttaccattatacataatggagttaaggtggttaaaaatttcagacagggycggtcatggtggctcaagcttgtaatcccagcattttgggaggccaagacagttggatcacctgaggttaggagttcaaggccagcctggccaacatggcaaaaccccttctctactaaaaatacaaaaattagccaggcacagtggtgggtgtctgtaatcccagctgctcaggaggctgaggcagaagaatcacttgagcctgaaagatggaagttgcagtgagctgagattgtgccactgcactgcagtttgggtga

SEQ ID NO: 261310 - DNA, 613 bp, Homo sapiens
ttggaatgtcttttctttataatactaaaaaaaagtccctaatctctactgtttttaagttttctgctgagaagtccacattagccwgataggatttcctttgtacatatctgaccattttctctagctgcctgtaaaattttttatttggtgttaaccttggacaatttggtgagtatatatgcctttgtgatgatgttttgcatagtatcatgtagatgtactctggatttattgtacctgatgtctacctctctagcaagataaggggaattttcttgaatcatttattcaaatatgtttccatgttaattactttttctctttttctttcaagaatgccagtaattcaaagatttgtttacagaatcccatacttcttaaagactttgtacatttttattaacttttttttttttttggctgactgggtttgtttgaaagacagatcttcaggctctgaaattctttcttcatcatgggctagtctattgataaagctttcaattgtattttgaaattccttaagtgagcttttcaattccagaagctctgactaatatttttaaagatattcatctcttcttttcatttcctgaatcgatttagaaat

SEQ ID NO: 261311 - DNA, 613 bp, Homo sapiens
ttggaatgtcttttctttataatactaaaaaaaagtccctaatctctactgtttttaagttttctgctgagaagtccacattagccagataggatttcctttgtacatatctgaccattttctctagctgcctgtaaaattttttatttggtgttaaccttggacaatttggtgagtatatatgcctttgtgatgatgttttgcakagtatcatgtagatgtactctggatttattgtacctgatgtctacctctctagcaagataaggggaattttcttgaatcatttattcaaatatgtttccatgttaattactttttctctttttctttcaagaatgccagtaattcaaagatttgtttacagaatcccatacttcttaaagactttgtacatttttattaacttttttttttttttggctgactgggtttgtttgaaagacagatcttcaggctctgaaattctttcttcatcatgggctagtctattgataaagctttcaattgtattttgaaattccttaagtgagcttttcaattccagaagctctgactaatatttttaaagatattcatctcttcttttcatttcctgaatcgatttagaaat

SEQ ID NO: 261312 - DNA, 613 bp, Homo sapiens
ttggaatgtcttttctttataatactaaaaaaaagtccctaatctctactgtttttaagttttctgctgagaagtccacattagccagataggatttcctttgtacatatctgaccattttctctagctgcctgtaaaattttttatttggtgttaaccttggacaatttggtgagtatatatgcctttgtgatgatgttttgcatagtatcatgtagatgtactctggatttattgtacctgatgtcyacctctctagcaagataaggggaattttcttgaatcatttattcaaatatgtttccatgttaattactttttctctttttctttcaagaatgccagtaattcaaagatttgtttacagaatcccatacttcttaaagactttgtacatttttattaacttttttttttttttggctgactgggtttgtttgaaagacagatcttcaggctctgaaattctttcttcatcatgggctagtctattgataaagctttcaattgtattttgaaattccttaagtgagcttttcaattccagaagctctgactaatatttttaaagatattcatctcttcttttcatttcctgaatcgatttagaaat

SEQ ID NO: 261313 - DNA, 613 bp, Homo sapiens
ttggaatgtcttttctttataatactaaaaaaaagtccctaatctctactgtttttaagttttctgctgagaagtccacattagccagataggatttcctttgtacatatctgaccattttctctagctgcctgtaaaattttttatttggtgttaaccttggacaatttggtgagtatatatgcctttgtgatgatgttttgcatagtatcatgtagatgtactctggatttattgtacctgatgtctacctctctagcaagataaggggaattttcttgaatcatttattcaaatatgtttccatgttaattactttttctctttttctttcaagaatgccagtaattcaaagatttgtttacagaatcccatacttcttaaagactktgtacatttttattaacttttttttttttttggctgactgggtttgtttgaaagacagatcttcaggctctgaaattctttcttcatcatgggctagtctattgataaagctttcaattgtattttgaaattccttaagtgagcttttcaattccagaagctctgactaatatttttaaagatattcatctcttcttttcatttcctgaatcgatttagaaat

SEQ ID NO: 261314 - DNA, 555 bp, Homo sapiens
tttttcttaactatatcactgtactctaaataacaccgtatttctcctttttatattcctttcttaattgtcatcattagactatgatttttaattgatgcactagatattaaattctctgaatctcgaaatcactcttaatgtggttaagtcaagtgcacaaaaagaatatggattggtaagtttcattagcctttctctttatgatttatagtcttgtctcttgaataatgcagtttgagacaatatgtaaggtccttcacagtgaaggtgcctttcctctcttgccacatataaagtatcacttattccatttatgaatattaaaacactggcttaaattataacagcatctttcaggggttatcgttagtacttcaagaacaaattgaatatctttcatggtagatgatcacaataaatgagacagtaacttaaaaattcaagtgaaaattctcggtaacatctgtgacktttgaccctaaatcaattcttttactctaaagggtgaaagccaatacacagattgatgttaaaaatttatatttaaggtca

SEQ ID NO: 261315 - DNA, 570 bp, Homo sapiens
catctggctgcttgttagtgtttaaatgtgtttgtagacatattattttgtttacttggtaattattgttgacatacttgtctaccttttggccagcatttacatagtaacattctttaggagactacaaatagtacctttttctattgtatatgattacctttaaataaataattaacaacacaccaaatctgtcttttttatgtctagtgtttagggacaagaataattacttttttctgatattggtgattgtgagctatgttctcttgtgaatattgcattttttagaaagaaatgagtgtcaattaaaagcagttgcctgagatatacttgccacatatgtgagtatytacttcctttttagaatcaagggtagagatacatgtagtaaagtgactgaaaatgtaactaaatatacatgtatagcataataatgtttgcatgttgtatgccccatgtatacccaaatcatgaggtagaacaatcccagcatccaataagacactttcttgcccctagagctaactactatcctgaattatctcatcatctatcagccttgattat

SEQ ID NO: 261316 - DNA, 607 bp, Homo sapiens
ctttctgtgttttcctttcaaggctttagactgttttttcttttcacagttgtgtcagtttcattgaatgttgtaaaataggtgtcaggtttcctttttattcattatggatatcaaactgcttgattcaatatctcttactgactgcttgcttcaacatcatttacrtagtttaattccattgacatcttttatacaaatcaagtgaacaaataaataaagcaagcaatatatattttatataaaatgtttctgataagagcacatggaaagtgatttaggaaattaaatgaggtaacatttatcataactataaaattaagaattctaaaatgaaaatatcaataaatactgattctatcatcttaagtgaaataataggtgaatttaatgcctagataataggtggttaaatttgtacccaccactaataagaaaatagcaacctaaaagcagacttgatgctacatgaactgagaagaatctatggataaaaatccaacttccgcttctgattaaaaaaggatgcaaagcacacaaatgtgcacatacacatgccttgctctaacaaaaaaatgataactcaagtgtgtaaaataatactatt

SEQ ID NO: 261317 - DNA, 607 bp, Homo sapiens
ctttctgtgttttcctttcaaggctttagactgttttttcttttcacagttgtgtcagtttcattgaatgttgtaaaataggtgtcaggtttcctttttattcattatggatatcaaactgcttgattcaatatctcttactgactgcttgcttcaacatcatttacgtagtttaattccattgacatcttttatacaaatcragtgaacaaataaataaagcaagcaatatatattttatataaaatgtttctgataagagcacatggaaagtgatttaggaaattaaatgaggtaacatttatcataactataaaattaagaattctaaaatgaaaatatcaataaatactgattctatcatcttaagtgaaataataggtgaatttaatgcctagataataggtggttaaatttgtacccaccactaataagaaaatagcaacctaaaagcagacttgatgctacatgaactgagaagaatctatggataaaaatccaacttccgcttctgattaaaaaaggatgcaaagcacacaaatgtgcacatacacatgccttgctctaacaaaaaaatgataactcaagtgtgtaaaataatactatt

SEQ ID NO: 261318 - DNA, 607 bp, Homo sapiens
ctttctgtgttttcctttcaaggctttagactgttttttcttttcacagttgtgtcagtttcattgaatgttgtaaaataggtgtcaggtttcctttttattcattatggatatcaaactgcttgattcaatatctcttactgactgcttgcttcaacatcatttacgtagtttaattccattgacatcttttatacaaatcaagtgaacaaataaataaagcaagcaatatatattttatataaaatgtttctgataakagcacatggaaagtgatttaggaaattaaatgaggtaacatttatcataactataaaattaagaattctaaaatgaaaatatcaataaatactgattctatcatcttaagtgaaataataggtgaatttaatgcctagataataggtggttaaatttgtacccaccactaataagaaaatagcaacctaaaagcagacttgatgctacatgaactgagaagaatctatggataaaaatccaacttccgcttctgattaaaaaaggatgcaaagcacacaaatgtgcacatacacatgccttgctctaacaaaaaaatgataactcaagtgtgtaaaataatactatt

SEQ ID NO: 261319 - DNA, 565 bp, Homo sapiens
tgaaatagtttgagtaacaaatactcttttaaaggcaggattatatgcaaattaaaatctattcgttattacggtgtatgtacagcactgcatttgaaataaatgtagaatctatttcattttgtaaattgaaaactttttgtaaattgaaaactatcagccacttaaaatcactgtcaaaatactacagatagaacaataagaatgctctgtgtcttttaaaacaatttttaaacaaattttctttgacaactcatactcaagatttactctggggtcaaacttaagactttttaaatcatttttttaggctctataagcacaggcacatgttttagttaactttctgttatactgatggggtatgtaatgaaagattgattattagtgaataggagcaatcttaagttgacataaagttgatgtttcatttcagaagaatgccatggaaaatctgaaatatttgtccaccaaagcttgccaggtactctatttcaaaatgacaaaatcatctgggttttgttgtatrttttacaaacattgaaaaacgtataggctagttaaa

SEQ ID NO: 261320 - DNA, 565 bp, Homo sapiens
gagcaatgatttttttggatttgattccagaagctcaggcaataaaggcacaaattgacaagtgggatttcaacaaactaaaatgctctgcagagcaaaaataaataaataaataaataaataaaagaaaaacaaataaaaaggtaatcaacagagtaaaaagacaacctattgaatgggagaaaatatttgcaagccataaatgtcataaggagtaatatccaaaaatataawgaactcaaacactcatatagcaagattaacaagtaattcagttaaaatggggcaaagaatctgaatagacatctcttaaaagaagacatacataagggctgacagatataggaaaaaatacaaaactgatatcagagaaatgcaaattcaaaaaacaatgagctctcacctacctctgtagagtggctattatcaaaaagatgaaagataaaaagtgtcttgaggatttggacaaaagagaccccttgtacattgttggtgggaatgtgaattagtacagctattagtgaatagactgataacgggctctcaaattgaggcaataattaat

SEQ ID NO: 261321 - DNA, 625 bp, Homo sapiens
aattctgagcaaaaagaataaagccataagcattacgttacctgacttcaaactatactatraggctacaataatcaaaacagcttggtactggtacaaaaacagacacatagaacaatggaatataacagccaaaaaataaagctgacacctacaaccatttaatctctaacaaaattgacaaaataagcaacagggaaaggactccctattcaataaagagtgctggaatagctggttaaccgtatgcagaagaataaaactcgacacctaccttttatctatacagacattaattcaaaattgattaaaaatttgaatgtaagacctcaaactataaaaatgccagaagaaaaccttggaaatcattggccttggcaaaaaatttttggcaattgcaagaaaaccaaaaaccgacaagtgagacctaattaaactaaaggacttctatacagcaaaaagaactatcaacagagaatgcagaccatcttcacaagagaagaaaatattcacaaattctgcacctgacaaaggtctaataaccaaaatctgtaaggaattaagtaacagaacaaacaaaaagcaaataaccccataaaaattgggcaaaatacatgaacagata

SEQ ID NO: 261322 - DNA, 527 bp, Homo sapiens
tctcccagaatgctgcacaccatctatgttgctagccatcggctctctagatttctgcttgttggcaaattgtgcttactgagaagacccaaaatgtttcatatccaaacttccatatctgagtggtaacatgaaagcttctcagatgcccaattagctgcatccagactcagaacatccgtgtcataattgtgtaattccatggtgayaatccaggcaaatgtgaaccaaaagatatccacaaaacagtggcaatgtgaattgaacatggagcagacaaacagcaagaatattagaaagtaaaatcaaaagaattttgactggataggaatgatgaggtaaaaggttgactttcaaaaattgtgtatgtatttattattttagcctcagtgacaaggtataaattggtattattatcaaataaatggaaagcaagaggcagaataggcatttcttaggccagagagatgcaactgtgcttagttctgaaccaaatcatatatacatggcagtgataagcaaattag

SEQ ID NO: 261323 - DNA, 631 bp, Homo sapiens
tggtgacaatccaggcaaatgtgaaccaaaagatatccacaaaacagtggcaatgtgaattgaayatggagcagacaaacagcaagaatattagaaagtaaaatcaaaagaattttgactggataggaatgatgaggtaaaaggttgactttcaaaaattgtgtatgtatttattattttagcctcagtgacaaggtataaattggtattattatcaaataaatggaaagcaagaggcagaataggcatttcttaggccagagagatgcaactgtgcttagttctgaaccaaatcatatatacatggcagtgataagcaaattagactatttctatctccatacagtattgaaataacggattagaattataaattaaagcatagatgtctggaaattgttttaatgtagctgaaacagattaattgacttagtagtggtgaggtcaggagtcacatataaacacatacattatgacattttattaggtagagtaacttagatgtagtagaatgggcctctatacattcctggtgctctctcggcctttacactattgatgtaataagaatgagattagcagctttaaaagatctgctttctatgaatatacgaaatcaatagaccaaggc

SEQ ID NO: 261324 - DNA, 631 bp, Homo sapiens
tggtgacaatccaggcaaatgtgaaccaaaagatatccacaaaacagtggcaatgtgaattgaacatggagcagacaaacagcaagaatattagaaagtaaaatcaaaagaattttgactggataggaatgatgaggtaaaaggttgactttcaaaaattgtgtatgtatttattattttagcctcagtgacaaggtataaattggtattattatcaaataaatggaaagcaagaggcagaataggcatttcttaggccagagagatgcaactgtgcttagttctgaaccaaatcatatatacatggcagtgataagcaaattagactayttctatctccatacagtattgaaataacggattagaattataaattaaagcatagatgtctggaaattgttttaatgtagctgaaacagattaattgacttagtagtggtgaggtcaggagtcacatataaacacatacattatgacattttattaggtagagtaacttagatgtagtagaatgggcctctatacattcctggtgctctctcggcctttacactattgatgtaataagaatgagattagcagctttaaaagatctgctttctatgaatatacgaaatcaatagaccaaggc

SEQ ID NO: 261325 - DNA, 579 bp, Homo sapiens
ggtgtccttttcctgtgcttctctttgtctgtatgcattgctatcataactcttaccattctgtacttcaactgttcattgatttgtcttactggacaatgagattctctaagacgagaacatgaggcacactttatctgctacacaaatcccctcacctgatacacatctggcactctataaatattcattaaagcaatagctaaatagccagtgccgttcacgttttgtgatctctaccatcatcttccctcggttccttccctgaatcatcttyttgatgtgtgtatgctaggttcttttctctccatctttgcttttcctatttccccatttcacactttacttttcaggttttctaaacaggttattacctcaacatagccattatagaactctctcactcttctttctctgagttctgattttcacttatatttttcagtgaacccaaagttcactaattataggttcttagctcttcaaagcattagtacctcagtagcaaaacaagttctacctggagatttcattcatctcaaagttcatcacatctccctcaagaagttactaatttaa

SEQ ID NO: 261326 - DNA, 579 bp, Homo sapiens
tgaaatttatactttttagtaattgatgcttataactactgtctgagataagtacggttgtactcagtctaaaggcatgagacttatccaagttagtaagtaatcaaactgggttttgaacagacctaggtgctcaacaattttgtacgcaaccttcctgcaatcaagttgggggtaagaaggaacagcaatactattgtttcattttaactaaaacagagaactgggagcccttctcaactactctgggaaaaactgggccatgttactgcagtcagtctctcagtcagaagaacccaagaaaattgccttgtgggagtaactacaaaggaaaatgaaacaatgcctgctactccagtttatttttaacaaaatgaattcattttcataaacggtagcattatgtgtagcactatatgattagaggagactgaacttgtagccagactgttccgagattgaatyctcacttcactaccaggtaacttacataaatcacttaacatttctaaagctcattgtccttattagaaagtgtgaacaaaaataatttgaaatctatgtcatagggtgttggtg

SEQ ID NO: 261327 - DNA, 439 bp, Homo sapiens
tctcttctgttatcccagataacccactttctagcttgtcccatggaattccagtgtcccaatgcagtctgggtttgacatgagaaggaaaacccagagggaaggggatgtgaacaccagatgtggggtgagggatcacaagagtttcataaattccaggatattcaggtatgtgacccttgccaggcccaccaggccctcctgtccccattctccttctggatccactttgtgcctcctgacycctactggtgcaacatttttactatctatgccctttcttttctttgttgttttgttggtagttttctggagcatatacagcaaaatttgtgctctgtagggtataatagagcaaccacagaagcagacattctgttcttctatgaggaggcaggaaaagatgctgtgctttctccatcacctttgggattgctga

SEQ ID NO: 261328 - DNA, 675 bp, Homo sapiens
tactatgtactagataggaactcggcttcctaaaagcccacctctggattaatcccagaggatcacagttatctgagaagaactagttaataaatatccactttaactgaatccattttaaatgggtactgaattttattaaaagtgrtgaaatgttatataatgaggaaatttttttcagaaattcatacaaatattataaaaataaatgtacttggtatgtgataaaattagattataattgcttctgtgggctatttcttcacaagttatggatggattaaatcttggcattttggatgcagtatttccaaaaacactttatggtagcatgatattaaatccccgatttatgactttagcaacaaaattattaaaagaatcttatttattccaaaagaccaaaagtcctttaatgataaaataagtagaaatatatatcacaacatcatagttgtcagtcttctcttctgtccatgacaagcggtttaactatgccattttgctattgtaatcatttttgtgattttcgcatttctttaatctcactgcatgaaacaaatttcctctcgtgaaatgtatggtaacatgttaaaatcaatttgcattaatattgcatattattccaaaacgaacaaattcaagtacaacatctattgataataatgaacaggc

SEQ ID NO: 261329 - DNA, 560 bp, Homo sapiens
ctcctcctggaaattctaggcttctggtctcagagtttgttaaaggtattatatttgcatggaccaatacaaaagttaagtatctttaatatatgtttatctggatttttgtgtgggaggggaatgtagccacatgttcctgagagggaggggatggagtgtggggtgggaggggtgttactgtgttgaaagtgagggattcacccaaggatagcagtctctgccgtcttgagaaaagataagtggtgatgtgtgtgctaatgtcagagcctgggttagaagtaccccaggaggcaacaggacttttgatgagtgggccaatgtgtttgctgaggaagtgaaacttcgtgcaccacagacttgagctctgcagcaaagkatgacagcaccctacctcgcagagaggcagtggagccacctgcctttgaatggatcatgtcgcctcatacagtgaccatctcatttgcaacctggatggactaaaggccaaaggatatttctaagtatctgacagtgtttacattgccaaacagagaaatgagtctcaattagtggttcat

SEQ ID NO: 261330 - DNA, 675 bp, Homo sapiens
tactatgtactagataggaactcggcttcctaaaagcccacctctggattaatcccagaggatcacagttatctgagaagaactagttaataaatatccactttaactgaatccattttaaatgggtactgaattttattaaaagtggtgaaatgttatataatgaggaaatttttttcagaaattcatacaaatattataaaaataaatgtacttggtatgtgataaaattagattataattgcttctgtgggctatttcttcacaagttatggatggattaaatcttggcattttggatgcagtatttccaaaaacactttatggtagcatgatattaaatccccgatttatgactttagcaacaaaattattaaaagaatcttatttattccaaaagaccaaaagtcctttaatgataaaataagtagaaatatatatcacaacatcatagttgtcagtcttctcttctgtccatgacaagcggtttaactatgccattttgctattgtaatcatttttgtgattttcgcatttctttaatctcactgcatgaaacaaatttcctctcgtgaaatgtatggtaacatgttaaaatcaatttgcattaatattgcatrttattccaaaacgaacaaattcaagtacaacatctattgataataatgaacaggc

SEQ ID NO: 261331 - DNA, 583 bp, Homo sapiens
aactgtttaatgggtacaggtttttatttgggggtgatgaagctattttggaaaaaggcagaggtggtcatataacactgtgaaggtactaaatgccactaatttgttcaccttaaaatgatcaattttgtcatgtgaatttaacctctgtaacacagggtacttcaaaaaatagaccttcaataaatgtttgtagaatgaatgaacaataaacaaaggaatgtatgtggtcttggcaaacggctcatactgaaaggtggtctatgaaamgagactttgtaagtggagatggtgttgaccagcagagtctaaaatgattcttagtggccttggctcggttttattattctgttcatggagaacaggaatcagagcctagggttctatccaggaggaaaaaaatcttcctgtcttggaattttcagaacctagtgtcttcctacatagcaaaagacatttctggctgccaggagggagtaaagccagtgggagttagtcccatctgcctgcagagagtcagaaacattatctgtctaaattcttcttcatcagaaagtcttatggctgggggcgcttcccagct

SEQ ID NO: 261332 - DNA, 431 bp, Homo sapiens
ttaacctctgtaacacagggtacttcaaaaaatagaccttcaataaatgtttgtagaatgaatgaacaataaacaaaggaatgtatgtggtcttggcaaacggctcatactgaaaggtggtctatgaaacgagactttgtaagtggagatggtgttgaccagcagagtctaaaatgattcttagtggccttggctcggttttattattctgttcatggagaacaggaatcagagcctagggttctatccaggaggaaaaaaatcttcctgtcttggaattttcagaacctagtgtcttcctacatagcaaaagacatttctggctgccaggagggagtaaagccagtgggagttagtcccatctgcctgcagagagkcagaaacattatctgtctaaattcttcttcatcagaaagtcttatggctggggg

SEQ ID NO: 261333 - DNA, 490 bp, Homo sapiens
gaaggcggaggcaggagaatcgcttgaatccaggagatggaggttgcagtgaacttaggtcacaccactgcatcccagtctgggtgacagagcgagacttcatctcaaaaaaaaaaaaaaaaaaattacaataggaggcgagccagattggggctgtgggatggagttggccagtccctgatctaggggcattattcctggtttcatcttaattttgcttcatatttattgaattcctgctctgtaacaggcatgattctggattctgggaatatcacagtgagtgagactgacaatatctttggccacatgaagcttactataaatgaatgaatatttgactagagacagacaataaagaagtaaatgaataatatcatttcacacatgatgwtgtgttccatgaaaaataattaaactgggtgctggaatgctgaatgactgagttgaagcctaggggctgctcttttaaatagaatggtcaggttaa

SEQ ID NO: 261334 - DNA, 525 bp, Homo sapiens
ccagaacagaaaaggagcattcgtggaaaaactagaaaaataaggtccggagttttgtataaaaaaaaacacataaaaaataaagttgagtagatgctatttttaaaaagtacaaggtgcaatgtgtctgctaaaaattcaaataataaaagttaattgacttttattattattttatatttattgtgtttttaatcaaaaaatgagctttgtactatatgcacattaaggctgggcgcagtggctcacacctgtaatcccarcactttgggaggccaaggcacgcagatcacttgagatcaggagctcaagatcagcctggacaacatgacaaaaccctgtctctactaaaaatacaaaaattagctgggcgtggtggcgtggtggcatggtggtggtggtgcactgcagcctgggtaacagagcaagactgtctcacgacaaaaaaggaccagttaaacaatacaggaagatacagagacaaacttaacccttcccctgcccaccattattctccagccagtc

SEQ ID NO: 261335 - DNA, 525 bp, Homo sapiens
ccagaacagaaaaggagcattcgtggaaaaactagaaaaataaggtccggagttttgtataaaaaaaaacacataaaaaataaagttgagtagatgctatttttaaaaagtacaaggtgcaatgtgtctgctaaaaattcaaataataaaagttaattgacttttattattattttatatttattgtgtttttaatcaaaaaatgagctttgtactatatgcacattaaggctgggcgcagtggctcacacctgtaatcccaacactttgggaggccaaggcacgcagatcacttgagatcaggagctcaagatcagcctggacaacatgacaaaaccctgtctctactaaaaatacaaaaattagctgggcgtggtggcrtggtggcatggtggtggtggtgcactgcagcctgggtaacagagcaagactgtctcacgacaaaaaaggaccagttaaacaatacaggaagatacagagacaaacttaacccttcccctgcccaccattattctccagccagtc

SEQ ID NO: 261336 - DNA, 644 bp, Homo sapiens
  misc_feature (1)...(644): n = A,T,C or G
acaatggtatttaagaaccaagatttgtcacacctgtaaccccagcactttgggaggccaaggcaggcagatcacgaggtcaagagatcaagatcatcctggccaacatggcgaaacmccgtctctactaaaaatacaaaaattagctgggcatggtggtgnggcaccntgtagtcccagctaaattctgggagggctagaggcaagtangaatcacttgaaaccagaaggcagaggttgcagtgagccgagatcacaccactgcactccagcctggcaacagagtgaaactccacctcaaaaaaacaaaaaaagagccaagatctgagcattaggcgtgcccattcctactggtatgccatgcaccaaggaaacaaatgcacttataacaaacagggcctgggaagtcaggtccaggcaactgtgacatcaacaggattcaatattgaaattaagtcttattctccaagtggagaagacatttgttggttttagttgcccagcatcgaatcattcttctggtaacagcaccccttttttccttttggagaattacctctcccttctgtgaagagacatggcgaactgtaaattaaggtatcctgaccctctccccatatccaaaagggaggcactatttttct

SEQ ID NO: 261337 - DNA, 644 bp, Homo sapiens
  misc_feature (1)...(644): n = A,T,C or G
acaatggtatttaagaaccaagatttgtcacacctgtaaccccagcactttgggaggccaaggcaggcagatcacgaggtcaagagatcaagatcatcctggccaacatggcgaaacaccgtctctactaaaaatacaaaaattagctgggcatggtggtgnggcaccntgtagtcccagctaaattctgggagggctagaggcaagtangaatcacttgaaaccagaaggcagaggttgcagtgagccgagatcacaccactgcactccagcctggcaacagagtgaaactccacctcaaaaaaacaaaaaaagagccaagatctgagcattaggygtgcccattcctactggtatgccatgcaccaaggaaacaaatgcacttataacaaacagggcctgggaagtcaggtccaggcaactgtgacatcaacaggattcaatattgaaattaagtcttattctccaagtggagaagacatttgttggttttagttgcccagcatcgaatcattcttctggtaacagcaccccttttttccttttggagaattacctctcccttctgtgaagagacatggcgaactgtaaattaaggtatcctgaccctctccccatatccaaaagggaggcactatttttct

SEQ ID NO: 261338 - DNA, 644 bp, Homo sapiens
  misc_feature (1)...(644): n = A,T,C or G
acaatggtatttaagaaccaagatttgtcacacctgtaaccccagcactttgggaggccaaggcaggcagatcacgaggtcaagagatcaagatcatcctggccaacatggcgaaacaccgtctctactaaaaatacaaaaattagctgggcatggtggtgnggcaccntgtagtcccagctaaattctgggagggctagaggcaagtangaatcacttgaaaccagaaggcagaggttgcagtgagccgagatcacaccactgcactccagcctggcaacagagtgaaactccacctcaaaaaaacaaaaaaagagccaagatctgagcattaggcgtgcccattcctactggtatgccatgcaccaaggaaacaaatgcactyataacaaacagggcctgggaagtcaggtccaggcaactgtgacatcaacaggattcaatattgaaattaagtcttattctccaagtggagaagacatttgttggttttagttgcccagcatcgaatcattcttctggtaacagcaccccttttttccttttggagaattacctctcccttctgtgaagagacatggcgaactgtaaattaaggtatcctgaccctctccccatatccaaaagggaggcactatttttct

SEQ ID NO: 261339 - DNA, 561 bp, Homo sapiens
aatgcctgggttttctgagtcatccaacactctgccattggacttgtttatatcaaaaggagttaatcgtcatgtaatgccattgttctgggggagaggaagacacagagaggcaaaaatgatgaatgccacttgtctctctaaatgagtaacaggggatttgaactcaatatgagctttgggaataaacgtggtaaacgtggttatttcagggttacaggagagaccaacaagcaaagtctaagggcttctttgcctgccctgcccttataaatctgaacttataggacaagatgggtggaagttgagtctcaggtgatgagttcagctatgtatggaaagaaataaagcagcatagggaggagatgttctgtaaaagttatrattggtttttctgaagtttggagcaatagatgtacaatcaagggccttgcttaatttcccactcactaaaggcacttttagctcatcaaacatttactgagggtcagtgctatctgggaaggcaaaaataatgcagctctcaagtttttgctcataaacaagcaagggaaatggcaa

SEQ ID NO: 261340 - DNA, 543 bp, Homo sapiens
aaagtaaaaaaaaaaaaatacagcgaaaacccttccttctttctctgtcttttttggcctacagtgctccgtccccagaagtaatcactgacgtcatgatcatttttatgtacctgttcagggtttctttgtatatatcagcaaatactaattttgactcatttcacacagttttgagccgtgggtcttttgcttttgtttcttattttccaatatatcctggagattrttccaaatcagcacatagagagctccctcattctttatttccagccccatactacctgttgtaggttgtaccatactttatttaaccaatctgctatagagggacattggattttttccaactatttcttaggccaaacacattgtaaggaataaacttgtacttgcatgaggcacgtgcatatacttttacatatatttaggataaatttctagaaatggaatttctgggtcacttttcatgcatatgtaattctgatagatgttgccaaattatcctccatggtgatagtagccttttgcgattccactagc

SEQ ID NO: 261341 - DNA, 558 bp, Homo sapiens
aaatagtcacacatttacatacattatctttgtccttgtaactcatttttatgttaaggatatatattccttattctatctctttcacttatttttgttccaacctaccattccctgtaagaatttaatccttgtgcttgggaatgaagtgtacaattctccttgcctagaatgctctaatctgcctgctgctatgcttggcaagctcttagtcctcaaccagctattacctttgcgaagtatttctcaagatcaccarcctcgatggccctttcttctttgattctgtgaggctctttttaatgtttcttttatagcatttttcatactgggctctcattctttgtgtacatatccgtctttccctttatactgggaaaactttgagtcaagagtagcatctctccctctcttccttcatcaaacatgtattaagcgtcagaccctgtgataggatctgtggatacagaaatgaattagacacagcccctggtctggaagggagatctcaagacaatgtgggagcaattaaagaacgaggcactgaggtaaaacctt

SEQ ID NO: 261342 - DNA, 565 bp, Homo sapiens
gaccaagttgcccacttaaggaggcacytcacaacaataaacaaagagcctgctctttggtctcagacctgggtttgagttctaactctgctactccttgactgtgagatcctggccatgtgacttaccttctctgagcttctattttctcatctgtgaaatggggacaataattcttacatcagtgcattaagtgagagaatctagacagcacagtacctaacacaacacaatgactcaatttattattgttgttgttgcttcattcttatttgtaaacactcaactgtcttcacaaacttcaggagctcttcaatgagacactgtgtccattaacagtctcatccaatgggtaatcttgaagatagatgattctatggtaggttctgaaacatctcctcttttactctatcatggtgtcaaagaccaggatggtacagaggtccaggagtctggcctatgcagtcagagaaactgatttgaactctacctcttccacttattaaccaaggggctttgggaaaattgtgagcatcaccaggctcatggtgaagatggggttaat

SEQ ID NO: 261343 - DNA, 565 bp, Homo sapiens
gaccaagttgcccacttaaggaggcacttcacaacaataaacaaagagcctgctctttggtctcasacctgggtttgagttctaactctgctactccttgactgtgagatcctggccatgtgacttaccttctctgagcttctattttctcatctgtgaaatggggacaataattcttacatcagtgcattaagtgagagaatctagacagcacagtacctaacacaacacaatgactcaatttattattgttgttgttgcttcattcttatttgtaaacactcaactgtcttcacaaacttcaggagctcttcaatgagacactgtgtccattaacagtctcatccaatgggtaatcttgaagatagatgattctatggtaggttctgaaacatctcctcttttactctatcatggtgtcaaagaccaggatggtacagaggtccaggagtctggcctatgcagtcagagaaactgatttgaactctacctcttccacttattaaccaaggggctttgggaaaattgtgagcatcaccaggctcatggtgaagatggggttaat

SEQ ID NO: 261344 - DNA, 565 bp, Homo sapiens
gaccaagttgcccacttaaggaggcacttcacaacaataaacaaagagcctgctctttggtctcagacctgggtttgagttctaactctgctactccttgactgtgagatcctggccatgtgacttaccttctctgagcttctattttctcatctgtgaaatggggacaataattcttacatcagtgcattaagtgagagaatctagacagcacagtacctaacacaacacaatgactcaatttattattgttgttgttgcttcattcttatttgtaaacactcaactgtcttcacaaasttcaggagctcttcaatgagacactgtgtccattaacagtctcatccaatgggtaatcttgaagatagatgattctatggtaggttctgaaacatctcctcttttactctatcatggtgtcaaagaccaggatggtacagaggtccaggagtctggcctatgcagtcagagaaactgatttgaactctacctcttccacttattaaccaaggggctttgggaaaattgtgagcatcaccaggctcatggtgaagatggggttaat

SEQ ID NO: 261345 - DNA, 565 bp, Homo sapiens
gaccaagttgcccacttaaggaggcacttcacaacaataaacaaagagcctgctctttggtctcagacctgggtttgagttctaactctgctactccttgactgtgagatcctggccatgtgacttaccttctctgagcttctattttctcatctgtgaaatggggacaataattcttacatcagtgcattaagtgagagaatctagacagcacagtacctaacacaacacaatgactcaatttattattgttgttgttgcttcattcttatttgtaaacactcaactgtcttcacaaacttcaggagctcttcaatgagacactgtgtccattaacagtctcatccmatgggtaatcttgaagatagatgattctatggtaggttctgaaacatctcctcttttactctatcatggtgtcaaagaccaggatggtacagaggtccaggagtctggcctatgcagtcagagaaactgatttgaactctacctcttccacttattaaccaaggggctttgggaaaattgtgagcatcaccaggctcatggtgaagatggggttaat

SEQ ID NO: 261346 - DNA, 624 bp, Homo sapiens
tatgaatttactctttcaatggtaaattttatgaaatctaactatatagtaagtatttccaatgaaaatttagcatctgtatggagatgtgttgcaaatgtaaaatgcacactagattttaagaaaagaatgtaactatctcaaaaataattttaaattcttgatactatgtcgaaayaacattttgaatacattgacttaaaatattataaattaatgctgtatgtatctttttgctttttaaaattacagctccattgagatattcacgtaacattgaaaatgtacaatttgatcatttttagtatattcaaagagttgtgtgattatctctgcaatcaattttagaatatttttatcatctcccaaaaaagccccatactcttctcagttctaattattctccaacccttccagccttaagcaaacactaatctttgtcttcttggatttgcctattctgaacacttcacagaaatggaatcatatactgtaatatttggttttttacatttgtcttctctcacttagcataatgtgttcaaggttcatctctgttgtagcatatataggtactttgttctttttgactgctgaataatgttctattatatgctacatttt

SEQ ID NO: 261347 - DNA, 624 bp, Homo sapiens
tatgaatttactctttcaatggtaaattttatgaaatctaactatatagtaagtatttccaatgaaaatttagcatctgtatggagatgtgttgcaaatgtaaaatgcacactagattttaagaaaagaatgtaactatctcaaaaataattttaaattcttgatactatgtcgaaacaacrttttgaatacattgacttaaaatattataaattaatgctgtatgtatctttttgctttttaaaattacagctccattgagatattcacgtaacattgaaaatgtacaatttgatcatttttagtatattcaaagagttgtgtgattatctctgcaatcaattttagaatatttttatcatctcccaaaaaagccccatactcttctcagttctaattattctccaacccttccagccttaagcaaacactaatctttgtcttcttggatttgcctattctgaacacttcacagaaatggaatcatatactgtaatatttggttttttacatttgtcttctctcacttagcataatgtgttcaaggttcatctctgttgtagcatatataggtactttgttctttttgactgctgaataatgttctattatatgctacatttt

SEQ ID NO: 261348 - DNA, 624 bp, Homo sapiens
tatgaatttactctttcaatggtaaattttatgaaatctaactatatagtaagtatttccaatgaaaatttagcatctgtatggagatgtgttgcaaatgtaaaatgcacactagattttaagaaaagaatgtaactatctcaaaaataattttaaattcttgatactatgtcgaaacaacattttgaatacattgacttaaaatattataaattaatgctgtatgtatctttttgctttttaaaattacagctccattgagatattcacgtaacattgaaaatgtacaatttgatcatttttagtatattcaaagagttgtgtgattatctctgcaatcaattttagaayatttttatcatctcccaaaaaagccccatactcttctcagttctaattattctccaacccttccagccttaagcaaacactaatctttgtcttcttggatttgcctattctgaacacttcacagaaatggaatcatatactgtaatatttggttttttacatttgtcttctctcacttagcataatgtgttcaaggttcatctctgttgtagcatatataggtactttgttctttttgactgctgaataatgttctattatatgctacatttt

SEQ ID NO: 261349 - DNA, 624 bp, Homo sapiens
tatgaatttactctttcaatggtaaattttatgaaatctaactatatagtaagtatttccaatgaaaatttagcatctgtatggagatgtgttgcaaatgtaaaatgcacactagattttaagaaaagaatgtaactatctcaaaaataattttaaattcttgatactatgtcgaaacaacattttgaatacattgacttaaaatattataaattaatgctgtatgtatctttttgctttttaaaattacagctccattgagatattcacgtaacattgaaaatgtacaatttgatcatttttagtatattcaaagagttgtgtgattatctctgcaatcaattttagaatatttttatcatctcccaaaaaagccccatactcttctcagttctaattattctccaacccttccagccttaagcaaacactaatctttgtcttcttggatttgcctattctgaacacttcacagaaatggaatcatatactgtaatatttggttttttacatttgtcttctctcacttagcataatgygttcaaggttcatctctgttgtagcatatataggtactttgttctttttgactgctgaataatgttctattatatgctacatttt

SEQ ID NO: 261350 - DNA, 601 bp, Homo sapiens
  misc_feature (1)...(601): n = A,T,C or G
tatataaaaattcaaaacacagatatgccaattaaaatttaaaaaatcacccataagctgaccatctagaaaaaactgtacatttctctattccgcatccttcyagattatttttcttatcagtttatacttatgcaaagtggtattatacttcatcttctgttttgttactgactttattcatttagttattaaaactccttaaatatgtgttgattacattgtttacttaatttttttctttttattttttttagacaaggtcttgctctgttgcccaggctggagtgcggtggtgcaatctcgctgactgcaacctccgcctctcaggttcaagtgatcttcctgtttcagcctcctgagtagctgagaccataggcatgtaccaccatgcccgctaactttttgtatttttagtagagacagagttttgccatgttggccaggctggtctcgaactcctaggcacaagtgatccacgtgcctcagcctcccatgttgctgggattataggcgtgagccattgcgcctggccaattacactttttaatagcttcaaagcattccnnnnnnnnnnnnnnnnnnnnnnnnnnnnnnnnnn

SEQ ID NO: 261351 - DNA, 601 bp, Homo sapiens
  misc_feature (1)...(601): n = A,T,C or G
tatataaaaattcaaaacacagatatgccaattaaaatttaaaaaatcacccataagctgaccatctagaaaaaactgtacatttctctattccgcatccttctagattatttttcttatcagtttatacttatgcaaagtggtattatacttcatcttctgttttgttactgactttattcatttagttattaaaactccttaaatatgtgttgattacattgtttacttaatttttttctttttattttttttagacaaggtcttgctctgttgcccaggctggagtgcggtggtgcaatctcgctgactgcaacctccgcctctcaggttcaagtgatcttccygtttcagcctcctgagtagctgagaccataggcatgtaccaccatgcccgctaactttttgtatttttagtagagacagagttttgccatgttggccaggctggtctcgaactcctaggcacaagtgatccacgtgcctcagcctcccatgttgctgggattataggcgtgagccattgcgcctggccaattacactttttaatagcttcaaagcattccnnnnnnnnnnnnnnnnnnnnnnnnnnnnnnnnnn

SEQ ID NO: 261352 - DNA, 601 bp, Homo sapiens
  misc_feature (1)...(601): n = A,T,C or G
tatataaaaattcaaaacacagatatgccaattaaaatttaaaaaatcacccataagctgaccatctagaaaaaactgtacatttctctattccgcatccttctagattatttttcttatcagtttatacttatgcaaagtggtattatacttcatcttctgttttgttactgactttattcatttagttattaaaactccttaaatatgtgttgattacattgtttacttaatttttttctttttattttttttagacaaggtcttgctctgttgcccaggctggagtgcggtggtgcaatctcgctgactgcaacctccgcctctcaggttcaagtgatcttcctgtttcagyctcctgagtagctgagaccataggcatgtaccaccatgcccgctaactttttgtatttttagtagagacagagttttgccatgttggccaggctggtctcgaactcctaggcacaagtgatccacgtgcctcagcctcccatgttgctgggattataggcgtgagccattgcgcctggccaattacactttttaatagcttcaaagcattccnnnnnnnnnnnnnnnnnnnnnnnnnnnnnnnnnn

SEQ ID NO: 261353 - DNA, 601 bp, Homo sapiens
  misc_feature (1)...(601): n = A,T,C or G
tatataaaaattcaaaacacagatatgccaattaaaatttaaaaaatcacccataagctgaccatctagaaaaaactgtacatttctctattccgcatccttctagattatttttcttatcagtttatacttatgcaaagtggtattatacttcatcttctgttttgttactgactttattcatttagttattaaaactccttaaatatgtgttgattacattgtttacttaatttttttctttttattttttttagacaaggtcttgctctgttgcccaggctggagtgcggtggtgcaatctcgctgactgcaacctccgcctctcaggttcaagtgatcttcctgtttcagcctcctgagtagctgagaccataggcatgtaccaccatgcccgctaactttttgtatttttagtagagacagagttttgccatgttggccaggctggtctcgaactcctaggcacaagtgatccacgtgcctcagcctcccaygttgctgggattataggcgtgagccattgcgcctggccaattacactttttaatagcttcaaagcattccnnnnnnnnnnnnnnnnnnnnnnnnnnnnnnnnnn

SEQ ID NO: 261354 - DNA, 322 bp, Homo sapiens
tttttaatccacttagagtttaatttttatataaggtgtttgttgaggtttagttctttatttttttttgcaaatagttatccaattcatcaccatttttgaaaagacaatcctttctctactaaattgcctcacacatttgtttttgttttgagacagagtcttgctctgtcacccaggctggagtgcagtggcattgtttcagttcactgcaacctccgcctcccaggttcaagcaatcctcccacctcagcctcccaaatagctgggactacaggtgcmtaccaccacatctggctgatttttgtatttttagtagaga

SEQ ID NO: 261355 - DNA, 322 bp, Homo sapiens
tttttaatccacttagagtttaatttttatataaggtgtttgttgaggtttagttctttatttttttttgcaaatagttatccaattcatcaccatttttgaaaagacaatcctttctctactaaattgcctcacacatttgtttttgttttgagacagagtcttgctctgtcacccaggctggagtgcagtggcattgtttcagttcactgcaacctccgcctcccaggttcaagcaatcctcccacctcagcctcccaaatagctgggactacaggtgcctaccaccacatytggctgatttttgtatttttagtagaga

SEQ ID NO: 261356 - DNA, 577 bp, Homo sapiens
cttggaactttcatccccactcccatcctctgagaaggatggagagaggctggaaattgacttaataatcaatcatacctatgtgataaagcctccataaaaatcaaggggtttgaggagcttctaggtttctgaacacatggagggtgtcttacccatasaggatgtattagttcatttttacactgctaataaagacatacccaaaactgggtaatttataaaggaaagaggtttagttgattcacaattccacatggctggggaggcatcacactcatggcggaaggcaaaggaagagcaaaggcacattcttacatggcggcaagcaagaaagcaggtgcgggggaactgtcttttacaaaaccatcagatctcatgagacttattccctatcacaaaaacagcatgggaaaaacctgcccccatggttcaattacctcccaccaggtccttcccacaacacgtggggattacgggagctacaattcatgatgagatttgggtggggacacaaccacactatatcagaagacatggaatctccacagcccctctccccataccttgccctgtg

SEQ ID NO: 261357 - DNA, 577 bp, Homo sapiens
cttggaactttcatccccactcccatcctctgagaaggatggagagaggctggaaattgacttaataatcaatcatacctatgtgataaagcctccataaaaatcaaggggtttgaggagcttctaggtttctgaacacatggagggtgtcttacccatagaggatgtattagttcatttttacactgctaataaagacatacccaaaactgggtaatttataaaggaaagaggtttagttgattcacaattccacatggctggggaggcatcacactcatgrcggaaggcaaaggaagagcaaaggcacattcttacatggcggcaagcaagaaagcaggtgcgggggaactgtcttttacaaaaccatcagatctcatgagacttattccctatcacaaaaacagcatgggaaaaacctgcccccatggttcaattacctcccaccaggtccttcccacaacacgtggggattacgggagctacaattcatgatgagatttgggtggggacacaaccacactatatcagaagacatggaatctccacagcccctctccccataccttgccctgtg

SEQ ID NO: 261358 - DNA, 577 bp, Homo sapiens
cttggaactttcatccccactcccatcctctgagaaggatggagagaggctggaaattgacttaataatcaatcatacctatgtgataaagcctccataaaaatcaaggggtttgaggagcttctaggtttctgaacacatggagggtgtcttacccatagaggatgtattagttcatttttacactgctaataaagacatacccaaaactgggtaatttataaaggaaagaggtttagttgattcacaattccacatggctggggaggcatcacactcatggcggaaggcaaaggaagagcaaaggcacattcttacatggcggcargcaagaaagcaggtgcgggggaactgtcttttacaaaaccatcagatctcatgagacttattccctatcacaaaaacagcatgggaaaaacctgcccccatggttcaattacctcccaccaggtccttcccacaacacgtggggattacgggagctacaattcatgatgagatttgggtggggacacaaccacactatatcagaagacatggaatctccacagcccctctccccataccttgccctgtg

SEQ ID NO: 261359 - DNA, 404 bp, Homo sapiens
actatatcagaagacatggaatctccacagcccctctccccataccttgccctgtgcctcatctttttcatctggctgttcatctgtatcctttgtaatatcccttataataaatgggtaaacattaagtatggtgatttcctgagttctgtgagccactctagcaaatcattagggagagggtggtgggaacccctaatttatagccagttggtcagttccagaggcccagacttgctattggcatctgaggtggaagcagacttgtgggactgagtccttatcttgtgggatctgactccaagtatrtaatgtcagaattgaactgaattagaggatacccagttggtacccatgggagtactgacatgtaaggaaaaccccacccatatggtcacagaagt

SEQ ID NO: 261360 - DNA, 464 bp, Homo sapiens
tattttaaagaaaatgccgttcaattagtatatgttagtatatgtgtacaaacagccacaccagttattttaaatcaacttcacatatatcaaacatgaaaaatattatattttcttatattttcttttggcaatatcgatgatatcctttcaatgaagtttcagtttcaggggataaaaatagctagaaatgtaaatacacttaaaaagtaaagttttaaaaataatttttaaatgtaagtcatacactcacataattatgaaattaggcattagtattgcactgtataaawtgtaaaagatcagtcttatgtgctctgcctccaccccatattccagtctcagctttctatgttgtttcttctgatggcatactctccacttttcaccctaatattacataacacttcaatgtcctccattggcttcaattccttttcacagcttctcagtgttaaaaagct

SEQ ID NO: 261361 - DNA, 557 bp, Homo sapiens
gggttcagcacacaacatggcacatgtatacctatgtaactaacctgcacattgtgcacatgtaccctaaaacttaaagtataataaaaaaatttgaaattcatgaagtcaaaaagatttgttaaacattgtatattattatacaatgtttttatgcttacattattattcatgaaatatatatcacattttatatttatatcctgtttcaatggatactagtcaawatattttcatagagttaatcatattatttttaaacttaaggaaagctcttatttggatcatatattatactcccaggcacaaacacattttgtaatagaaatggcagcttgagaatatataatatatgtaaaaattaaaagctactaagtattctattgaaaatttaaagaggaaatatttaaagagcaattaattcattacgatataagaacattatggaaatctctttaattaatttttataatctaaggcaattgagtaaattaaaatgtatcaacatattaaatttgttatgtcttaatcttattcacctacataaaaaatgtaca

SEQ ID NO: 261362 - DNA, 557 bp, Homo sapiens
gggttcagcacacaacatggcacatgtatacctatgtaactaacctgcacattgtgcacatgtaccctaaaacttaaagtataataaaaaaatttgaaattcatgaagtcaaaaagatttgttaaacattgtatattattatacaatgtttttatgcttacattattattcatgaaatatatatcacattttatatttatatcctgtttcaatggatactagtcaatatattttcatagagttaatcatattatttttaaacttaaggaaagctcttatttggatcatatattatactcccaggcacaaacacatkttgtaatagaaatggcagcttgagaatatataatatatgtaaaaattaaaagctactaagtattctattgaaaatttaaagaggaaatatttaaagagcaattaattcattacgatataagaacattatggaaatctctttaattaatttttataatctaaggcaattgagtaaattaaaatgtatcaacatattaaatttgttatgtcttaatcttattcacctacataaaaaatgtaca

SEQ ID NO: 261363 - DNA, 550 bp, Homo sapiens
taatgaatacaggtgctcaatatcatcttttaactagtggaaaaatttaaatctataaatataaactgaaatcatgttgagatttaccatcatacaaytctgatttaccatcacacatctcacagctctgtcatataaaatcaagatttaaaaaagtaaatgctatttttgtaacataaaatacaaattgacttttaaaccaaaagtattcataatatttgatgaagattaattatttttaatttttaaaaagttttataatagattattttaaaagtaataataaataagagaaaagatagaatttttgccttacctaaaattttccctagatttctaacatgtaggcagatgagaaggtgtaaaggaattagacatctctggatacagatataatatgaaagaaagaatgtcatgcctttactctaacacttgatttataatggttaaaccagaaaatgtacagaatacacaaaatttcattgtacaacccaaagatattttctatatgtggtaaatgtaaaacaaaaacaaaacaaacaaaaaactg

SEQ ID NO: 261364 - DNA, 550 bp, Homo sapiens
taatgaatacaggtgctcaatatcatcttttaactagtggaaaaatttaaatctataaatataaactgaaatcatgttgagatttaccatcatacaattctgatttaccatcacacatctcacagctctgtcatataaaatcaagatttaaaaaagtaaatgctatttttgtaacataaaatacaaattgacttttaaaccaaaagtattcataatatttgatgaarattaattatttttaatttttaaaaagttttataatagattattttaaaagtaataataaataagagaaaagatagaatttttgccttacctaaaattttccctagatttctaacatgtaggcagatgagaaggtgtaaaggaattagacatctctggatacagatataatatgaaagaaagaatgtcatgcctttactctaacacttgatttataatggttaaaccagaaaatgtacagaatacacaaaatttcattgtacaacccaaagatattttctatatgtggtaaatgtaaaacaaaaacaaaacaaacaaaaaactg

SEQ ID NO: 261365 - DNA, 573 bp, Homo sapiens
aaagatattttctatatgtggtaaatgtaaaacaaaaacaaaacaaacaaaaaactgtcatccattacaaatgggaagcctgaatactacattatgactttattttatackcacaactttctctaatggtttaggaaagttttagaggaaaagatattatgctcataaagaatctgtttcacttgctgagcagattcaatcttccccttacacgggacaaccaagtttaaatgtttcatcagcaattcaatctaattcaacaaaaacgaaactcatcattttcttcccaatagtcctgatccatctccatgcttcctgtttggtttaatagtatcatcattcacccaatcaacaatttcaagatcttggatccttcattaatttttcttctctttcatcatgtcagcaaatcctattggtttcaatttgacaaagtatttaactttctttttctttccattaaaacagcaacatcaaggccaatgttaaaacatgtttgtactgtcaccgtatttttgtacaggctaacttacttttaaaaatctctttttctggtatactctaagcattgct

SEQ ID NO: 261366 - DNA, 573 bp, Homo sapiens
aaagatattttctatatgtggtaaatgtaaaacaaaaacaaaacaaacaaaaaactgtcatccattacaaatgggaagcctgaatactacattatgactttattttatacgcacaactttctctaatggtttaggaaagttttagaggaaaagatattatgctcataaagaatctgtttcacttgctgagcagattcaatcttccccttacacgggacaaccaagtttaaatgtttcatcagcaattcaatctaattcaacaaaaacgaaactcatcattttcttcccaatagtcctgatccatctccatgcttcctgtttggtttaatrgtatcatcattcacccaatcaacaatttcaagatcttggatccttcattaatttttcttctctttcatcatgtcagcaaatcctattggtttcaatttgacaaagtatttaactttctttttctttccattaaaacagcaacatcaaggccaatgttaaaacatgtttgtactgtcaccgtatttttgtacaggctaacttacttttaaaaatctctttttctggtatactctaagcattgct

SEQ ID NO: 261367 - DNA, 573 bp, Homo sapiens
aaagatattttctatatgtggtaaatgtaaaacaaaaacaaaacaaacaaaaaactgtcatccattacaaatgggaagcctgaatactacattatgactttattttatacgcacaactttctctaatggtttaggaaagttttagaggaaaagatattatgctcataaagaatctgtttcacttgctgagcagattcaatcttccccttacacgggacaaccaagtttaaatgtttcatcagcaattcaatctaattcaacaaaaacgaaactcatcattttcttcccaatagtcctgatccatctccatgcttcctgtttggtttaatagtatcatcattcrcccaatcaacaatttcaagatcttggatccttcattaatttttcttctctttcatcatgtcagcaaatcctattggtttcaatttgacaaagtatttaactttctttttctttccattaaaacagcaacatcaaggccaatgttaaaacatgtttgtactgtcaccgtatttttgtacaggctaacttacttttaaaaatctctttttctggtatactctaagcattgct

SEQ ID NO: 261368 - DNA, 603 bp, Homo sapiens
aagtactgagcacatcattttacaacctatctcattagcttaatcttagtaatatataagcatacctagattcacagacaactgggtagttgtaccaacttttgacagccattcctgcccaccattactgacaatttctctatcagacatattttgttgttgttgttgttgttcgtttgttttcaagatggaatctcaccctgtcacccaggctggagtacartggtgagatttctgctcactccaacctccacctcctgggttcaagtgatcctcctgcctcagcctcctgagtagttaggattacaggcgtgtgccaccacacctggctttttgctttttttttttttttttttattcttagtaaagacagggtttcaccatgttggccaagctggtcttgaactcctggtctcaagcaatccacctgccttgacctccccaagtgctgggattacaggcatgagccacagccacagcgcctggcctctaacagacatcttcgatcatgctggtaagtttttcttactgctgagctgcactctgaagcccttccttccctccctttctcatttcctaaatgtcatactgaatcccagttga

SEQ ID NO: 261369 - DNA, 603 bp, Homo sapiens
aagtactgagcacatcattttacaacctatctcattagcttaatcttagtaatatataagcatacctagattcacagacaactgggtagttgtaccaacttttgacagccattcctgcccaccattactgacaatttctctatcagacatattttgttgttgttgttgttgttcgtttgttttcaagatggaatctcaccctgtcacccaggctggagtacagtggtgagatttctgctcactccaacctccacctcctgggttcaagtgatcctcctgcctcagcctcctgagtagttrggattacaggcgtgtgccaccacacctggctttttgctttttttttttttttttttattcttagtaaagacagggtttcaccatgttggccaagctggtcttgaactcctggtctcaagcaatccacctgccttgacctccccaagtgctgggattacaggcatgagccacagccacagcgcctggcctctaacagacatcttcgatcatgctggtaagtttttcttactgctgagctgcactctgaagcccttccttccctccctttctcatttcctaaatgtcatactgaatcccagttga

SEQ ID NO: 261370 - DNA, 603 bp, Homo sapiens
aagtactgagcacatcattttacaacctatctcattagcttaatcttagtaatatataagcatacctagattcacagacaactgggtagttgtaccaacttttgacagccattcctgcccaccattactgacaatttctctatcagacatattttgttgttgttgttgttgttcgtttgttttcaagatggaatctcaccctgtcacccaggctggagtacagtggtgagatttctgctcactccaacctccacctcctgggttcaagtgatcctcctgcctcagcctcctgagtagttaggattacaggcgtgtgccaccacacctggctttttgctttttttttttttttttttattcttagtaaagacagggtttcaccatgttggccaagctggtcttgaactcctggyctcaagcaatccacctgccttgacctccccaagtgctgggattacaggcatgagccacagccacagcgcctggcctctaacagacatcttcgatcatgctggtaagtttttcttactgctgagctgcactctgaagcccttccttccctccctttctcatttcctaaatgtcatactgaatcccagttga

SEQ ID NO: 261371 - DNA, 616 bp, Homo sapiens
tgttacaatgtggctttgtacaactattgactgagacaaatrtgtagcactgaactcatctgcacaagtcttaatatgaaccccctatctctaaaacagttaccctcatggaaccttagaatagagagttaaccctcacctaagttacaagttcttggaaagtactgtcagtttatggaacactcttcttggacctggtacataccttgaacaacaacaacaacaacaacaaaaagcctaacatatagaaccatttattgtagctacaatacatgcctttgggagtcaaaggagttgaggaagtatagaatgttttctatcagaatcaccctcagatatccatttttgacatcttgttcattttccccaatgttacattagtctgggttaagatttctggttcccttgaaccaaaaatgagaaacatttctgctagggaacatgataggatgttctattaaattggaagttgtgtctacaaattagggactttgattacctcatgtcaattgtcctacaggccaaaaaggagttatattggctagggcaaacaatacaaagagtatgactgtaatttggagattattgaaacacacatatggtagtgactacccaa

SEQ ID NO: 261372 - DNA, 616 bp, Homo sapiens
tgttacaatgtggctttgtacaactattgactgagacaaatgtgtagcactgaactcatctgcacaagtcttaatatgaaccccctatctctaaaacagttaccctcatggaaccttagaatagagagttaaccctcacctaagttacaagttcttggaaagtactgtcagtttatggaacactcttcttggacctggtacataccttgaacaacaacaacaacaacaacaaaaagcctaacatatagaaccatttattgtagctacaatacatgcctttgggagtcaaaggagttgaggaagtatagaatgttttctatcagaatcaccctcagatatccatttttgacatcttgttcattttccccaatgttacattagtctgggttaagatttctggttcccttgaaccaraaatgagaaacatttctgctagggaacatgataggatgttctattaaattggaagttgtgtctacaaattagggactttgattacctcatgtcaattgtcctacaggccaaaaaggagttatattggctagggcaaacaatacaaagagtatgactgtaatttggagattattgaaacacacatatggtagtgactacccaa

SEQ ID NO: 261373 - DNA, 616 bp, Homo sapiens
tgttacaatgtggctttgtacaactattgactgagacaaatgtgtagcactgaactcatctgcacaagtcttaatatgaaccccctatctctaaaacagttaccctcatggaaccttagaatagagagttaaccctcacctaagttacaagttcttggaaagtactgtcagtttatggaacactcttcttggacctggtacataccttgaacaacaacaacaacaacaacaaaaagcctaacatatagaaccatttattgtagctacaatacatgcctttgggagtcaaaggagttgaggaagtatagaatgttttctatcagaatcaccctcagatatccatttttgacatcttgttcattttccccaatgttacattagtctgggttaagatttctggttcccttgaaccaaaaatgagaaacatttctgctagggaacatrataggatgttctattaaattggaagttgtgtctacaaattagggactttgattacctcatgtcaattgtcctacaggccaaaaaggagttatattggctagggcaaacaatacaaagagtatgactgtaatttggagattattgaaacacacatatggtagtgactacccaa

SEQ ID NO: 261374 - DNA, 616 bp, Homo sapiens
tgttacaatgtggctttgtacaactattgactgagacaaatgtgtagcactgaactcatctgcacaagtcttaatatgaaccccctatctctaaaacagttaccctcatggaaccttagaatagagagttaaccctcacctaagttacaagttcttggaaagtactgtcagtttatggaacactcttcttggacctggtacataccttgaacaacaacaacaacaacaacaaaaagcctaacatatagaaccatttattgtagctacaatacatgcctttgggagtcaaaggagttgaggaagtatagaatgttttctatcagaatcaccctcagatatccatttttgacatcttgttcattttccccaatgttacattagtctgggttaagatttctggttcccttgaaccaaaaatgagaaacatttctgctagggaacatgataggatgttctattaaattggaagttgtgtctacaaattagggactttgattacctcatgycaattgtcctacaggccaaaaaggagttatattggctagggcaaacaatacaaagagtatgactgtaatttggagattattgaaacacacatatggtagtgactacccaa

SEQ ID NO: 261375 - DNA, 513 bp, Homo sapiens
actttattaacacaaggaaaatataggtagtatacaactaagataaaatgagaggtcataaaggcatccaaatggcacaagaagtagattgaattgggcaaagttgtgtgtgtctgtgtagcttccattcttctgaatgccttcytctttaattttttgttggggccccactctgatacagtcttctctccagtcttggccttgaatgacatactaccctattgggcaaccaataggacttcttgatcagagagacagtgcaaccattaagtctggtgttgctgcatccttgaacactcaatggtgattaatcagaaataagaaaaaggaggaagttgagcatatagttttatcctcagttctctattctgtggacaattctgagatgaactagtctctcatgcccaaccgagcagacgtctactaagtaatttgctagatttttaaaatggattattgctataaacatttccttgcctcatttattattttttccacacatctttaccaccc

SEQ ID NO: 261376 - DNA, 607 bp, Homo sapiens
tttctcatctttttgggcttatctaccttcaatctttgaggttgctgaagtttagattttctttgcttttatcccattttatgaccttgaagatttgattgtgatatgaggtggattcagaagactggcttcatttatgggaggttttagcggggcagcactcagctcccaactcctaggctgtgtgctctaaatctgaaggacatgtactgggttccaattttgttctctggcttctcaaggtttggagtccactgtgctaggagttgtaagggtgaggtgcagcagctgtagcagagtgctagcaartgcaagggcgcatgcctgcctatgggcattcaccacaatggcagaaataaggcatctgggggggaacagtggctcctgctatagtctgtgtgcactgttgcactggaggtggtgtgggctttgatcaaggtgctggccagcacaggtctagatgtcttctctatgccccacaagcaggaatgattgctcagggtgtgagaggatcccctgtcctttgtgcagccttagcttaagggcagggtgctggtgggggcagggcttgctggcactttgcctgccaaagctccctctgcaatgg

SEQ ID NO: 261377 - DNA, 628 bp, Homo sapiens
ctactactttgttttctatttgaatacttgctccttttttcacttcttattttcacatctttattttcttgaggaatttctcttttgaaaacttactgagaattttgaccatattggatttgaccctttctcattcctaaccttcttgtcatattgttatgttctgtatgtcctctgtaatttttaggattccatctttcatattgatatctcttcatttattcagatcagttgctcttcaattatttagcattttattgaaagctttttaatataacactatttatttcttctgtactagaaaagttgatccatatgataattttaatatcaattaatatgattggaaatgtgccagtgtctcatttgataatgttattttattcccagcttttattttaggttcaagtgtgcatgtacatgtttgttatgtggataaattacatatttcaggggtttggcactgagattattttatcacccaggtagtgagagtgtacttgatacactyatttgtcaatcctcaccctcctctcaccctccatcctcaagtaggccccagtatctattgttatcttatttacttccatgcgtactcaacttttagctcctatgtataaatgaaaat

SEQ ID NO: 261378 - DNA, 549 bp, Homo sapiens
tttagctaagttaaattttatgtttaatgtacttattgtaattgtaattttaacatttatatttccactatccaaaaactgtattggatctttgcaaacaggtaaagactttcatagatttttgccattcratttaaaattatttaaaataatttctctgtattttggaacagataattcaaaaaatcattggatttattgatggacaggatatgtatattagttcctactttttttctgctgacttttccttacattgacttctttttatatacagtagttcatttttgatactgagatcatttttctttttttttttcaatttaatctgctgaaatcctgagggcttgaacacagaacaatttcctttaaaatgggtttcaattgcacctgctaagttacaagcaacattgctaacttgggaaactatcttaaactttacttttgttcatcattatatgatttctatcgttaaatatctactactaatttgaacttcagatcccagtggaatctataattttaaatactcaggatttgttattatta

SEQ ID NO: 261379 - DNA, 549 bp, Homo sapiens
tttagctaagttaaattttatgtttaatgtacttattgtaattgtaattttaacatttatatttccactatccaaaaactgtattggatctttgcaaacaggtaaagactttcatagatttttgccattcaatttaaaattatttaaaataatttctctgtattttggaacagataattcaaaaaatcattggatttrttgatggacaggatatgtatattagttcctactttttttctgctgacttttccttacattgacttctttttatatacagtagttcatttttgatactgagatcatttttctttttttttttcaatttaatctgctgaaatcctgagggcttgaacacagaacaatttcctttaaaatgggtttcaattgcacctgctaagttacaagcaacattgctaacttgggaaactatcttaaactttacttttgttcatcattatatgatttctatcgttaaatatctactactaatttgaacttcagatcccagtggaatctataattttaaatactcaggatttgttattatta

SEQ ID NO: 261380 - DNA, 567 bp, Homo sapiens
ctgttgcaagagctataccttaatgtctttatctttgttactttttatgacaagatattttaaacttattttgggcttgcaaactttgtttctatttcttttctatttatacagtcatgatttaaaactaaatttttaaaattatcttattttaatttttctttttttgtgggggaggggacggagcttcactcttgttgcccaggctggagtgcagtggcatgatctcagctcactgtaacctctgcctccgggctcaagcgattctcctgcctcagcctcccacgtagctgggattacaggtgctcgccaccatgccgagctaatttttgtattcttagtagagacagggttttgccatgttggccaggctggtctcaaactcctgacctcaggcgatctgcccgcctcggcctcccaaaatgctgggattacaggagtgagccacygccactggccttaaaaattgttatttaagaaggtcttcctcactttaagatatttttaagttatatatgaacacacacacatacccctaatatacgtatgtgtgtgtatgtatgaaat

SEQ ID NO: 261381 - DNA, 641 bp, Homo sapiens
gctggcttccttccaactcagcttgcagatggcctatcatgggactttaccttgttttcgtgtgagtcaattctccttaataaaccccctttcacatatacatatatcctattatttctgtccctctggagaaccctaatacacttggtttctattctgttrgtcagcattgttttaggaagttatctatattatcttgtcaagccatattatttacttttactcagtgccatatttcattttatgattctgttattattaatttttcttcttcactgataataaacagtgagttgtttccagtttcagactataataatgctttatgaacattatcatacatgtgtatgtgtgtgcaaataagtgtgcccatacatgcattatgttaagtatatatctaggagagatgtttctagctatacctagaaaatgtgtgttttcagctttaatagattaaaaaacaaaaaaaacatttttcaaagtagtcgttccagtttgtacttctaccagcaatgccagcaacgtttggtgattccagttgatccaaatcctccccaatatttgtgttttttaaattttattattattatactttaagttttagggtacaacgtgcaggtttgttacatatgtatacatgt

SEQ ID NO: 261382 - DNA, 641 bp, Homo sapiens
gctggcttccttccaactcagcttgcagatggcctatcatgggactttaccttgttttcgtgtgagtcaattctccttaataaaccccctttcacatatacatatatcctattatttctgtccctctggagaaccctaatacacttggtttctattctgttagtcagcattgttttaggaagttatctatattatyttgtcaagccatattatttacttttactcagtgccatatttcattttatgattctgttattattaatttttcttcttcactgataataaacagtgagttgtttccagtttcagactataataatgctttatgaacattatcatacatgtgtatgtgtgtgcaaataagtgtgcccatacatgcattatgttaagtatatatctaggagagatgtttctagctatacctagaaaatgtgtgttttcagctttaatagattaaaaaacaaaaaaaacatttttcaaagtagtcgttccagtttgtacttctaccagcaatgccagcaacgtttggtgattccagttgatccaaatcctccccaatatttgtgttttttaaattttattattattatactttaagttttagggtacaacgtgcaggtttgttacatatgtatacatgt

SEQ ID NO: 261383 - DNA, 641 bp, Homo sapiens
gctggcttccttccaactcagcttgcagatggcctatcatgggactttaccttgttttcgtgtgagtcaattctccttaataaaccccctttcacatatacatatatcctattatttctgtccctctggagaaccctaatacacttggtttctattctgttagtcagcattgttttaggaagttatctatattatcttgtcaagccatattatttacttttactcagtgccatatttcattttatgattctgttattattaatttttcttcttcactgataataaacagtgagttgtttccagtttcagactataataatgctttatgaacattatcatacatgtgtatgtgtgtgcaaatragtgtgcccatacatgcattatgttaagtatatatctaggagagatgtttctagctatacctagaaaatgtgtgttttcagctttaatagattaaaaaacaaaaaaaacatttttcaaagtagtcgttccagtttgtacttctaccagcaatgccagcaacgtttggtgattccagttgatccaaatcctccccaatatttgtgttttttaaattttattattattatactttaagttttagggtacaacgtgcaggtttgttacatatgtatacatgt

SEQ ID NO: 261384 - DNA, 508 bp, Homo sapiens
aaaagcctttgaacaataaatgtcattagaactcagctttgaaataaaaattaaatccagtgtataactttaacccttgttaagacctctggccaaaatcaaatggtgcctaataaatcattttatttccaaaaaataaaaaawaaaaaataacaaattagcataagcctgcccctttttgtttcacatctggataaacatatggtaatttctgaccttttttcaattctgtgagtataaaaatgaatgccattatagttttgattgtcctttccatagttgccagtaaaggtgaccattcatttgtaaattaatggaccatttgtttttcatttttggtgaaatttatgtaagtacctttagtcctttttttttctttcttaatgatatataacatttttgtttacatccagtttacttgtgtattgtcagatcatgtgggttaaaataacttctatattctattacatgttccttttcaactcttattatggtgccctattctgga

SEQ ID NO: 261385 - DNA, 508 bp, Homo sapiens
aaaagcctttgaacaataaatgtcattagaactcagctttgaaataaaaattaaatccagtgtataactttaacccttgttaagacctctggccaaaatcaaatggtgcctaataaatcattttatttccaaaaaataaaaaataaaaaataacaaattagcataagcctgccccttttygtttcacatctggataaacatatggtaatttctgaccttttttcaattctgtgagtataaaaatgaatgccattatagttttgattgtcctttccatagttgccagtaaaggtgaccattcatttgtaaattaatggaccatttgtttttcatttttggtgaaatttatgtaagtacctttagtcctttttttttctttcttaatgatatataacatttttgtttacatccagtttacttgtgtattgtcagatcatgtgggttaaaataacttctatattctattacatgttccttttcaactcttattatggtgccctattctgga

SEQ ID NO: 261386 - DNA, 413 bp, Homo sapiens
tgagtcacctttagctgtttttgttgtcttatgttctatctctctggcaggagcacttggtcccttaccttattttcttgcaatcttagmaatatatcaaccgttacattgattgcattttatcttgtctctagttgtattatagactgcatcccttcagaaactgacttaattatactttataataaaaacaatatttttcaaaaggtatgtttttaccacttataactattttaagtttaatacaaatataatgaaatgatggagaaaatacaacataatttttcaaagaaaaatatatctatatatgcttgaaatttcttacagtcttataatcatgaagactatatatggagtctctgactcctggccccactcactaggtagtactggtatgttatattttcaggaat

SEQ ID NO: 261387 - DNA, 608 bp, Homo sapiens
tggttactgccaatacagttcatagaactcatggctgtcctctccacgatagtaagaatcagtgtaatcaaccttttaccaagaaactgaccactaatgaaagaccatggtgtcttggattatagttttaggctttggtgttggarggttggacaataaatagctttggtggatctgcttttgtgaagggaagtccaccacataaaactatgcatagtccatccttccatcacagaagttttgtacatagacccattgagcaaacattagtgtgacttggaagagaagtttactgaaattcaaaagacaaattttcttatacatggattgatagtattctctgccgtgaatatcttgtgaaggtcattaatgcatgctacagacatcacgttctgtatccttcctgatagactcattcacatatctctctgacagactgtcttgcttcaaccttctaatcacaacattccaaagtttttgatcatttgaccaatgcattagccattacccatgaattaacttacaattcaggttatgtcaacatttacacaaaacagagaatcctaagcattacccaagttattccagttaggaagacttctcttcac

SEQ ID NO: 261388 - DNA, 608 bp, Homo sapiens
tggttactgccaatacagttcatagaactcatggctgtcctctccacgatagtaagaatcagtgtaatcaaccttttaccaagaaactgaccactaatgaaagaccatggtgtcttggattatagttttaggctttggtgttggagggttggacaataaatagctttggtggatctgcttttgtgaagggaagtccaccacataaaactatgcatagtccatccttccrtcacagaagttttgtacatagacccattgagcaaacattagtgtgacttggaagagaagtttactgaaattcaaaagacaaattttcttatacatggattgatagtattctctgccgtgaatatcttgtgaaggtcattaatgcatgctacagacatcacgttctgtatccttcctgatagactcattcacatatctctctgacagactgtcttgcttcaaccttctaatcacaacattccaaagtttttgatcatttgaccaatgcattagccattacccatgaattaacttacaattcaggttatgtcaacatttacacaaaacagagaatcctaagcattacccaagttattccagttaggaagacttctcttcac

SEQ ID NO: 261389 - DNA, 608 bp, Homo sapiens
tggttactgccaatacagttcatagaactcatggctgtcctctccacgatagtaagaatcagtgtaatcaaccttttaccaagaaactgaccactaatgaaagaccatggtgtcttggattatagttttaggctttggtgttggagggttggacaataaatagctttggtggatctgcttttgtgaagggaagtccaccacataaaactatgcatagtccatccttccatcacagaagttttgtacatagacccattgagcaaacattagtgtgacttggaagagaagtttactgaaattcaaaagacaaattttcttatacatggattgatagtattctctgccgtgaatatcttgtgaaggtcattaatgcatgctacagacatcacgttctgtrtccttcctgatagactcattcacatatctctctgacagactgtcttgcttcaaccttctaatcacaacattccaaagtttttgatcatttgaccaatgcattagccattacccatgaattaacttacaattcaggttatgtcaacatttacacaaaacagagaatcctaagcattacccaagttattccagttaggaagacttctcttcac

SEQ ID NO: 261390 - DNA, 608 bp, Homo sapiens
tggttactgccaatacagttcatagaactcatggctgtcctctccacgatagtaagaatcagtgtaatcaaccttttaccaagaaactgaccactaatgaaagaccatggtgtcttggattatagttttaggctttggtgttggagggttggacaataaatagctttggtggatctgcttttgtgaagggaagtccaccacataaaactatgcatagtccatccttccatcacagaagttttgtacatagacccattgagcaaacattagtgtgacttggaagagaagtttactgaaattcaaaagacaaattttcttatacatggattgatagtattctctgccgtgaatatcttgtgaaggtcattaatgcatgctacagacatcacgttctgtayccttcctgatagactcattcacatatctctctgacagactgtcttgcttcaaccttctaatcacaacattccaaagtttttgatcatttgaccaatgcattagccattacccatgaattaacttacaattcaggttatgtcaacatttacacaaaacagagaatcctaagcattacccaagttattccagttaggaagacttctcttcac

SEQ ID NO: 261391 - DNA, 594 bp, Homo sapiens
tggcattcaattaaagtttcagagatatgcagaagtgagaaccagtaatcaaatactctcaggtgatctgtgawtctccttttcctcaatgcatagtgctggaaaaatggctgtagagtttttctggaaaaggcttgaaggaagcttttgaatatatttttaaccaaactacagggtcgtttctcagaaggaattgttctcaatcatgaagataatagatttaaaagttggcttatatctaaaaactgagtaaaagactatgaatctccatggtgcatttaatcagattcccctcaccatcatttttctgcatatagaggtctagaagcccccctggtaggggtgctgtgatcaattagacatttccctagagtcctgtgaaccggaacacattatccctccatttcgttgttcataatagaaatagtgttcactttttctcagaggaagaccatgacctgatgatgtataacacttagttctctctttaagacaatctgcaacagcataggaaaggtgactttgtgtttttatctgtcacactttccattcattgagacattcatactgaggccacacttcctccagaatact

SEQ ID NO: 261392 - DNA, 594 bp, Homo sapiens
tggcattcaattaaagtttcagagatatgcagaagtgagaaccagtaatcaaatactctcaggtgatctgtgaatctccttttcctcaatgcatagtgctggaaaaatggctgtagagtttttctggaaaaggcttgaaggaagcttttgartatatttttaaccaaactacagggtcgtttctcagaaggaattgttctcaatcatgaagataatagatttaaaagttggcttatatctaaaaactgagtaaaagactatgaatctccatggtgcatttaatcagattcccctcaccatcatttttctgcatatagaggtctagaagcccccctggtaggggtgctgtgatcaattagacatttccctagagtcctgtgaaccggaacacattatccctccatttcgttgttcataatagaaatagtgttcactttttctcagaggaagaccatgacctgatgatgtataacacttagttctctctttaagacaatctgcaacagcataggaaaggtgactttgtgtttttatctgtcacactttccattcattgagacattcatactgaggccacacttcctccagaatact

SEQ ID NO: 261393 - DNA, 561 bp, Homo sapiens
catgctctccacctttttgacttcaggacttacactagcagcattgggcctcagtcttagagttacaccttcaactcctctggttcttatgccttcaggcttggactgaaccatgctactgacatcacagggcctccagctttcagatggtctgttgtgggacttcaaagctgccatagttgcatgagccaaatctcttaatatatcccctcttgtgtttctatctatctatctatctatctatctatctatctatctatctatctatctatctatcatstatctatctatgtatctatcgatctatctatctatctatctatctatctatctatctatcacctatctatcattcatctacccattctgttggttctttttctctgaagaattctgaccaataaatcattttttttgtatggtcactctaatgggtatgcagtagcttttctttctatatctatctcgcatttccccaatggctaatgtgttgagcatattttaacatgattatttgtcatctgaatatctcatatggtgaaatgaatcgtctgttcatat

SEQ ID NO: 261394 - DNA, 561 bp, Homo sapiens
catgctctccacctttttgacttcaggacttacactagcagcattgggcctcagtcttagagttacaccttcaactcctctggttcttatgccttcaggcttggactgaaccatgctactgacatcacagggcctccagctttcagatggtctgttgtgggacttcaaagctgccatagttgcatgagccaaatctcttaatatatcccctcttgtgtttctatctatctatctatctatctatctatctatctatctatctatctatctatctatcatgtatctatctatgtatctatcgatctatctatctatctatctatctatctatctatctatcacctatctatcattcatctacccattctrttggttctttttctctgaagaattctgaccaataaatcattttttttgtatggtcactctaatgggtatgcagtagcttttctttctatatctatctcgcatttccccaatggctaatgtgttgagcatattttaacatgattatttgtcatctgaatatctcatatggtgaaatgaatcgtctgttcatat

SEQ ID NO: 261395 - DNA, 603 bp, Homo sapiens
tgctggggtttatatttgtactgcatggaatttatagatgcaattgggaacatcttaaaaatatggagtcttcctatctacaagtatgccatgtctctccatttacttagatttgcattgatattttaccttaatgttttgtagttctcaatatacagattatgcmcaaatgtttgtagatttgtatctaaatattctatttttgaagtactataataaatatattgttttgcattttatttttaattaaatcttaatagacaaataattacacatatttattgtgtaatacatatttcaaaatatgtatacattgtgaaataactagagttaattaacacattccttacttcaaacattttttaatggtgaaaattcttaaaatctactctattggtaatttttgagaatgcaatacattgttattagttgtagtcgccatgttgtaaatagatcttttcaacttattactctaagtaaaatctcgtattctttaaccaaaatctcaccactcctccctttgtcccagctcccagtaaccaccattttactttctatgtctgtaagttcaccttttgatattccacatatacataagaccat

SEQ ID NO: 261396 - DNA, 603 bp, Homo sapiens
tgctggggtttatatttgtactgcatggaatttatagatgcaattgggaacatcttaaaaatatggagtcttcctatctacaagtatgccatgtctctccatttacttagatttgcattgatattttaccttaatgttttgtagttctcaatatacagattatgcccaaatgtttgtagatttgtatctaaatattctatttttgaagtactataataaatatattgttttgcattttatttttaattaaatcttaatagacaaataattacacatatttattgtgtaatacatatttcaaaatatgtatacattgtgaaataactagagttaattaacacattccttacttcaaacattttttaatggtgaaaatwcttaaaatctactctattggtaatttttgagaatgcaatacattgttattagttgtagtcgccatgttgtaaatagatcttttcaacttattactctaagtaaaatctcgtattctttaaccaaaatctcaccactcctccctttgtcccagctcccagtaaccaccattttactttctatgtctgtaagttcaccttttgatattccacatatacataagaccat

SEQ ID NO: 261397 - DNA, 625 bp, Homo sapiens
atttcacacctgttagaatggctatcatccaaaacatgaaagaaaacatgtcttggtgaggatgtggaggaaagagaaagcttgagcactattcatgggaatgtaaattaatacagccattatgaaaaatagtatgggtgttcctcaaaaacttaaaaaygtagctaccatataatccaggaattctactattggatatgaatccagaggaaataaaatgagtatgctgaaaagataatctgcatttccatgttcactgcaccattattcacaatagccaagatatgggatccacctaagtgtccatgcatacatgaatggatacataaaatggtgtatacacacagatccacacacacacatgcacacacacacaagtatgtttgtgggttatattatatatattttatatattgtatatattattaagttatatatattttatatattgtatatattgttatatatattttatataatacctttatttttagagtattttatgtttacaccaaaattatgcaaaaatacagaaagttatcatatacttcttgcctccacacatgtacagcctcccccactgtcaatatcctgcacctgagtagtacatttttatagtcagtga

SEQ ID NO: 261398 - DNA, 625 bp, Homo sapiens
atttcacacctgttagaatggctatcatccaaaacatgaaagaaaacatgtcttggtgaggatgtggaggaaagagaaagcttgagcactattcatgggaatgtaaattaatacagccattatgaaaaatagtatgggtgttcctcaaaaacttaaaaatgtagctaccatataatccaggaattctactattggatatgaatccagaggaaataaaatgagtatgctgaaaagataatctgcatttccatgttcactgcaccattattcacaatagccaagatatgggatccacctaagtgtccatgcatacatgaatggatacataaaatggtgtatacacacagatccacacacacacatgcacacacacacaagtatgtttgtgggttatattatatatattttatatattgtatatattattaagttatatatattttatatattgtatatattgttatatatattwtatataatacctttatttttagagtattttatgtttacaccaaaattatgcaaaaatacagaaagttatcatatacttcttgcctccacacatgtacagcctcccccactgtcaatatcctgcacctgagtagtacatttttatagtcagtga

SEQ ID NO: 261399 - DNA, 529 bp, Homo sapiens
gttcccttgactataagggctgatgagagttattatttgttattttgttaatttctccaaagtggttaaagcagagtattgggagacatgaaaaccacttatttcctcagagaagccctagtttaatttgagcttatcaacctgtttccttttcagtttcttgcagtttatttcaaaatgccctggtttcttgcaggagaaaactcccagggccagtggacctaattttcttattggcctggaagtttcaagaggtcagctgttgcaattgtaacagctgtcttttgcttcataacttcagcagtcttttgcttttcctttcataccattatacaggacaacwggtcagctaagtagtccaggtcactagttttggtcatagctcacttagtcatatgacgtttgacaagaatgcctaatttatcacagaaaccattttgaaaatttgaatttaataatgtgtgatttttgtttttttaatagttatctgctgacattctgcaatattgtcctagtgttttagcaaagt

SEQ ID NO: 261400 - DNA, 529 bp, Homo sapiens
gttcccttgactataagggctgatgagagttattatttgttattttgttaatttctccaaagtggttaaagcagagtattgggagacatgaaaaccacttatttcctcagagaagccctagtttaatttgagcttatcaacctgtttccttttcagtttcttgcagtttatttcaaaatgccctggtttcttgcaggagaaaactcccagggccagtggacctaattttcttattggcctggaagtttcaagaggtcagctgttgcaattgtaacagctgtcttttgcttcataacttcagcagtcttttgcttttcctttcataccattatacaggacaactggtcagctaagtagtccaggtcactagttttggtcatagctcacttagtcatatgacgtttgacaagaatgcctaatttatcacagaaaccattttgraaatttgaatttaataatgtgtgatttttgtttttttaatagttatctgctgacattctgcaatattgtcctagtgttttagcaaagt

SEQ ID NO: 261401 - DNA, 589 bp, Homo sapiens
tgtctctctttattggaagccaacaaatttccatggggtattcatggcaatcaaattttgagatctaaaccaaagattgggagatggagaccttagcaagcagaagcccttgatccgtggtaggttatayagcgtaatcaaatgaagaaagtctctcagttggtactgagcactgagcagagatttactgtgtttcaggaaagctagaccccactcaggggtctcatctgggatgacaataatgtcaatccaaatgagaaaccatagtaggtatctaaatcaagtgaaatttattatgctgagcttgaggacacatatctggaaagctcatgatattcctgggtgcacatcctcaagcttggcataataacccctttgattaagactcctgctttcgtctgtcactttggtcaacaaggtttaattatattatcttttaaaaatatgcactatatgatttgcattattttaagcttgctaaggtttgtgttgcagccagaagatgatctttctttataaatgctgcatgtgcacaggagaagaatgtatattcatttgttgttgggtaaaatgttctgcaaatgtcaat

SEQ ID NO: 261402 - DNA, 589 bp, Homo sapiens
tgtctctctttattggaagccaacaaatttccatggggtattcatggcaatcaaattttgagatctaaaccaaagattgggagatggagaccttagcaagcagaagcccttgatccgtggtaggttatacagcgtaatcaaatgaagaaagtctctcagttggtactgagcactgagcagagatttactgtgtttcaggaaagctagaccccactcaggggtctcatctgggatgacaataatgtcaatccaaatgagaaaccatagtaggtatctaaatcaagtgaaatttattatgctgagcttgaggacacatatctggaaagctcatgwtattcctgggtgcacatcctcaagcttggcataataacccctttgattaagactcctgctttcgtctgtcactttggtcaacaaggtttaattatattatcttttaaaaatatgcactatatgatttgcattattttaagcttgctaaggtttgtgttgcagccagaagatgatctttctttataaatgctgcatgtgcacaggagaagaatgtatattcatttgttgttgggtaaaatgttctgcaaatgtcaat

SEQ ID NO: 261403 - DNA, 501 bp, Homo sapiens
gtttattattatataaactctgacttgaatacaaaatttactaccaaacattggatgttgctattacaaaatgttcaaaagaycaattaactgctaaaaaagcctgagaatatttttttttcagtttagtttcagaaatatcagattaagaaagctgctctgccatgaaggtgatactctctccagtatactctttgattgggccaagaaaaattgggagaagaaaaggacataacagcactcataaaaaaattctaagatcagtaggccaggaagctatgcaagggaggcagactaagggcaaactttcagtataaggaaaacacgtgatatttggccagtaggatttcagaatttctatggccctgtgactgctgggcacttccctttctttcccctttgcaatccaaactgttactggggtttattctgttccagttttatatgttctctatggctttgtgtttggtgggtgtcatggtgggatactcactgttttag

SEQ ID NO: 261404 - DNA, 501 bp, Homo sapiens
gtttattattatataaactctgacttgaatacaaaatttactaccaaacattggatgttgctattacaaaatgttcaaaagaccaattaactgctaaaaaagcctgagaatatttttttttcagtttagtttcagaaatatcagattaagaaagctgctctgccatgaaggtgatactctctccagtatactctttgattgggccaagaaaaattgggagaagaaaaggacataacagcactcataaaaaaattctaagatcagtaggccaggaagctatgcaagggaggcagactaagggcaaactttcagtataaggaaaacacgtgatatttggccagtaggatttcagaatttctatggccctgtgactgctgggcacttccctttctttcccctttgcaatccaaactgttactggggtttattctgttccagttttatatgttctctatggctttgtgtktggtgggtgtcatggtgggatactcactgttttag

SEQ ID NO: 261405 - DNA, 583 bp, Homo sapiens
tattccgcagccttaaaataagggtacaaatagcactatgctcakgaactatttgtaaagacgaaaagagtgaacgattttctgaagagcctcagctacattgcaagcacatagagaaaaagttggctctcacaaatgaggaaagaaagcacaggagtatgtaatatcatgcacacaattattccactagcaacgttggaaataaaaagcaggtgatctgattccagaaattcttttattgacagcttttcatcaccacgtaattgtactgtgtctttgttcaaatgttatatctgttgcattggggatgattattttttgtatttagctcaaagttggcaggataatgaggagaagcacctgatctgtctcaaggaccagaggaggaaaaatgacacctggaaataatgccactttgtaactgggatacaatatgtgttgtggcagtacattatcttccactgagactgagtaaatgcatttgttggatcatgttaggtggaggcaaatttaaatttgagtcaagagaaaaatattttctaggcaaagaatgaaatttggtagaaagatttggaagtgtcta

SEQ ID NO: 261406 - DNA, 460 bp, Homo sapiens
atacttcttcaaaactgccatttttctgtaatgcaggttccttccattcattctctamacctcagaaagggtgatctttcttaaatgcaaatctgataaaatgttcaataacttttcttaaaaggcccctaattgctttcaattaccctctggataaactctaaccttctgtagtcgtgaccattatattccatgcttcaaggagaacaattcctgatctattgtatgttcttcatagtgaatttttgaataaattttgagtttattcaatttttaaataatttaatttttaataaaaggtgaaataacttagactgatgggggccagggaaggttgggttctggggaaggttatgagccatatgtcaaagtcttttatgagtggagagcagtggcaaaacattactctagacccttgaagaaaatagcagagaagtgttcttgagatgagaaagaggag

SEQ ID NO: 261407 - DNA, 540 bp, Homo sapiens
tggacttcatacagtcaggtttcaatacagtccagggagttgagaaaacattcaattacaagataaagatacatcaaaaggtttctattgttgttcttaaagccgcatgcccatcaagttctacagtctacttcatatgtcttcctggatatctgataagctttaaaatgacttaaatgtgactcarcacttcctctccctgtgttcctcgtttccgttaatgtcattacttagcatctctattatttaggccagtaaccagactcattccagaatcttgacctttttactaggattttaagtccttaacatttctcagttttgttattctgtttccatccatagtaggtatgcctaaattcaagttgttattatttctctcaattattaccataatttcccacttaattcctagcttcatggagaaagtctggcagagagtttagagcaaaagctatttgtgaaagcagaagaaacctagaaatgagttttgtttgtgctaataaccttgggcaagttaattatatacagtctcttata

SEQ ID NO: 261408 - DNA, 556 bp, Homo sapiens
tgttgtggtttatacgctttagctaattttagtgatggcaggttctgtagcccagtaaatcatagatggggaaataccctcaggcaaggcaatcagaactatacaaagaagggatggaaaaaacagagaattaaaactcagaattaatcaaatattaattattcatgacttggacaactttcaattttttggtttcttcagttgtacaacattgtgccaagtccctaatatatgcttactctatttgttcattccctctttctactctatctgctgtccccacatagatggagtgaagattgttataaatatatttatctcacagaggcctcatgcgactcagaatttgaatgacttaaaagtgttttataaagtctaaactgttatagaaatataacttattatgcatttatatacttaatwatataattatcaaatatttatgtttccaataatttttacaagtttaatggacaatgattagtcaactaagaaatgtggctgtatatattagatatatactagtatccattcatacaatattgctaaattgaag

SEQ ID NO: 261409 - DNA, 586 bp, Homo sapiens
tctgccttccaactgtgcctgcttttcacatatttaaactactagaccctaaaaactgcaaatggtttgttggatctgttctttaatgaagagcaaccttgagctcagtggtcagcttgcaaaacagacactgaattaaaagctacctatgcatgttagattggtctccttataaagtcctatggtaaatttctatgattttgtgttaccttgacatctatttttaatcctcctccgatacacccaaatgccttcctgaaaaaatcctaaattctctgtctctctctctcttcttggagatgtaaatttgctmccctgtttctctaaaactcagtaaagttttcagccatgttttttgttttttgtttttttttttcatttacacaggcacagttgaaatccacctatccttttaaactaatgagttttacccgacttgcggctaaaattttgaaactaaaactataagctctttacttatatctgtctttatttttgtgtatacatgtgcatgcatgtttgcttttatattttctagggccccaaactggcttataataaaaagactactaataaattaaataac

SEQ ID NO: 261410 - DNA, 509 bp, Homo sapiens
atttttcttcctaaaacatattacccagtgattgaagaaattcttttttttataaatgaatgcttcttttcagaggttctgtgaattttgtagagaagttggattttagctgttaattttttaacttcagaaatgtttttttccatattttgttataatatgaatctttattaattatcatttcatggctgttttgaaatgattgcactggataacactgctttataataaccattaactaawgaccttagttattgtgtttagaggttgtaagttcatcaagtttaccaaacccacgaaatattaagccaaattttcattggtttgagctagatcagatatggctgcttttccattattcatgtggagaagctttacacgtataaaatagccaagtagccaacctgatgatgtaattctctggaaccaaaggcaatgagtcttcaaacttaagatcttcataaagataaatttgacacaaagcccctgcttcttctgaaatttggaag

SEQ ID NO: 261411 - DNA, 509 bp, Homo sapiens
atttttcttcctaaaacatattacccagtgattgaagaaattcttttttttataaatgaatgcttcttttcagaggttctgtgaattttgtagagaagttggattttagctgttaattttttaacttcagaaatgtttttttccatattttgttataatatgaatctttattaattatcatttcatggctgttttgaaatgattgcactggataacactgctttataataaccattaactaaagaccttagttattgtgtttagaggttgtaagttcatcaagtttaccaaacccacgaaatattaagccaaattttcattggyttgagctagatcagatatggctgcttttccattattcatgtggagaagctttacacgtataaaatagccaagtagccaacctgatgatgtaattctctggaaccaaaggcaatgagtcttcaaacttaagatcttcataaagataaatttgacacaaagcccctgcttcttctgaaatttggaag

SEQ ID NO: 261412 - DNA, 585 bp, Homo sapiens
cacagcatttgcctgaagaaagcaaatgatggaatcttttttctcccagagaatgcctgtctctcttcaggtttaggattagttgtcagccttataatgtcagttttctcatgtcttcaagagaaaaggtaatttataayttgcaataagaagcacctttcttaataaacctgacagtaacactcatgagagctttaaacctttcctctgaatcctgaagtccaataatttcattttgtaagaaaatacatagataaataggaaaaagggtcacttcatttcaaaggcagcagtatctgtagactcacatactgagcctttgtatatttcccaatattgtaaaattgtcctgtaattttataatcagtaaaatagaatattagatataacagaattttacaactgaattctgaacatagtatagtgaatattcaaaaaaggatttagaatggaaatatgtgggggaaaatagcatatttgagaaaaaacaaaagtataattatgtcaaaacatataggtatatatatgaacatatatacttatttatagcaccttctatttcaagaacattattcatataaacac

SEQ ID NO: 261413 - DNA, 606 bp, Homo sapiens
aataagaagcacctttcttaataaacctgacagtaacactcatgagagctttaaacctttcctctgaatcctgaagtccaataatttcattttgtaagaaaatacatagataaataggaaaaagggtcacttcatttcaaaggcagcagtatctgtagactcacakactgagcctttgtatatttcccaatattgtaaaattgtcctgtaattttataatcagtaaaatagaatattagatataacagaattttacaactgaattctgaacatagtatagtgaatattcaaaaaaggatttagaatggaaatatgtgggggaaaatagcatatttgagaaaaaacaaaagtataattatgtcaaaacatataggtatatatatgaacatatatacttatttatagcaccttctatttcaagaacattattcatataaacacaaaatgaacacacgttgataaacaaaatctgttttttgtttattcccagcagaagagcaagagaaatttgaacttcattgacagcttatttggattctgttcgtgttattatctcacactttcatcttatacttgtggatatgggccacaaaagaccttgaaatc

SEQ ID NO: 261414 - DNA, 659 bp, Homo sapiens
taaaattgtcctgtaattttataatcagtaaaatagaatattagatataacagaattttacaactgaattctgaacatagtatagtgaatattcaaaaaaggatttagaatggaaatatgtgggggaaaatagcatatttgagaaaaaacaaaagtataattatgtcaaaacatataggtatatatatgaacatatatacttatttatagcaccttctatttcaagaacattattcatataaacacaaaatgaacacacgttgataaacaaaatctgttttttgtttattcccagcagaagagcaagagaaatttgaacttcattgacagcttatttggattctgttcgtgttattatctcacactttcatcttatacttgtggatatgggycacaaaagaccttgaaatccctcttgattttgccagtgacttcttggagtgacctaggggaaaaattatttagctgccccttcaattttctttttttatctgaaaaaggggaataacaataactttttgtgtcttctaagtctgtttggatgattgatgatctggcattctaaattccttggaagaaaagtgatagataaaagtacatgtgtaatagagagagtaagattataagtttagaaacataaagaaaattggaaaagtgaa

SEQ ID NO: 261415 - DNA, 593 bp, Homo sapiens
attacccagtcccaggtatttctttgtcgcagttcaagaacaaactaatacagaggcrtctcacgtgatgggcacaggagtaggagagagagagaggggaagtgctacacagttttatacaaccagatctgtcaagctctcagtcactcactgtcatgagactggaaccaacaggatggtgctaaaccattcatgaaggatccaacctcatgatccaatcacctcccaccaggccccacctccaacactggggattataatttgacatgagatgtgggtggggcacagatcaaataccaatctgactttgtctagcttttattatcagtctttttgcaatcagagccatgaggaaaaagggaaaaatgggtaagaaagtacatgtttggctttcatcaagtgtcactcttacttccaaaggttgtcattgcatcatgtctaggcttccgcagatagtcagtctaaacatatggctaaagccacattttctataatccttattcgtgtattatttattggatcttattttatgccaggaactgggaaggcaaagacaaaaagagaagttccctttttacaaactgatttcaacg

SEQ ID NO: 261416 - DNA, 593 bp, Homo sapiens
attacccagtcccaggtatttctttgtcgcagttcaagaacaaactaatacagaggcgtctcacgtgatgggcacaggagtaggagagagagagaggggaagtgctacacagttttatacaaccagatctgtcaagctctcagtcactcactgtcatgagactggaaccaacaggatggtgctaaaccattcatgaaggatccaacctyatgatccaatcacctcccaccaggccccacctccaacactggggattataatttgacatgagatgtgggtggggcacagatcaaataccaatctgactttgtctagcttttattatcagtctttttgcaatcagagccatgaggaaaaagggaaaaatgggtaagaaagtacatgtttggctttcatcaagtgtcactcttacttccaaaggttgtcattgcatcatgtctaggcttccgcagatagtcagtctaaacatatggctaaagccacattttctataatccttattcgtgtattatttattggatcttattttatgccaggaactgggaaggcaaagacaaaaagagaagttccctttttacaaactgatttcaacg

SEQ ID NO: 261417 - DNA, 593 bp, Homo sapiens
attacccagtcccaggtatttctttgtcgcagttcaagaacaaactaatacagaggcgtctcacgtgatgggcacaggagtaggagagagagagaggggaagtgctacacagttttatacaaccagatctgtcaagctctcagtcactcactgtcatgagactggaaccaacaggatggtgctaaaccattcatgaaggatccaacctcatgatccaatcacctcccaccaggccccacctccaacactggggattataatttgacatgagatgtgggtggggcacagatcaaataccaatctgactttgtctagcttttattatcagtctttttgcaatcagagccatgaggaaaaagggaaaaatgggtaagaaagtacatgtttggctttcatcaagtgtcactcttacttccaaaggttgtcattgcatcatgtctaggcttccgcagatagtcagtctaaacatatggctaaagccacattttctataatccttattygtgtattatttattggatcttattttatgccaggaactgggaaggcaaagacaaaaagagaagttccctttttacaaactgatttcaacg

SEQ ID NO: 261418 - DNA, 511 bp, Homo sapiens
cttgggcggtcaggaagctcggaacagacgttaataatcaattgcaatgattcattaattgcttgtgccttgaacaacaaatctcacgtcctacctggttttgtgtcttactttaaattttctttcttctcatctttttccttcttctctgttcctcctcctcctcctttttcttcacctcctcttgttttcttctgtttttatattgtcagctaactgcaagaagggaccagttgtcagtgtcattgtaggcactgtgggcttttctgtgtcttttatgggagctgagcagagctccttaaagtaggcttcaagcactgctttctaatgaaatgcactctgcctccaggatatagagaagggagccctggcttcttctagtggttcccaggcaactgctatcrctcagggactcaagtcagggacactctgtcacctgtgcttccagatagtttccaaagtggttgtgacaaaacctccctttaattggtgctctcatctgaataggttt

SEQ ID NO: 261419 - DNA, 602 bp, Homo sapiens
ttacccattctaacaggtataaggtgatatctcactctggttttaatttgcatttccctagtgattagaggtgttgagcacttttttcatatatctgwtggctgttcgtatctcttcttttgagaaatgtctgttcagattctttcgacagcaagtgggtttgtttgtttttttgttgttgttgttttgagatggagtcttgctctgtcacccaggctggagtacagtggtgtgatcttggctcactgcaacagctacctcctgggttcaagtgattgtcctgcctcagcctcctgagaagttaggattataggcacccgccaccacgcccagctaatttttacatttttagtagagatggggtttcaccatgttgtgcaggctggtctcgaactcttgacctcaggtgatccacctgcctcagcctctaaaagttctgggattacaggtgtgagccaccgtgcccagacacatatagattttgacttttatttttccttttatataaatggaatcacacaatatatattctttcatatctgtcttctttcaggtttctgagaacaatcaggctctaatacatttaaaatttttaatttaat

SEQ ID NO: 261420 - DNA, 602 bp, Homo sapiens
ttacccattctaacaggtataaggtgatatctcactctggttttaatttgcatttccctagtgattagaggtgttgagcacttttttcatatatctgttggctgttcgtatctcttcttttgagaaatgtctgttcagattctttygacagcaagtgggtttgtttgtttttttgttgttgttgttttgagatggagtcttgctctgtcacccaggctggagtacagtggtgtgatcttggctcactgcaacagctacctcctgggttcaagtgattgtcctgcctcagcctcctgagaagttaggattataggcacccgccaccacgcccagctaatttttacatttttagtagagatggggtttcaccatgttgtgcaggctggtctcgaactcttgacctcaggtgatccacctgcctcagcctctaaaagttctgggattacaggtgtgagccaccgtgcccagacacatatagattttgacttttatttttccttttatataaatggaatcacacaatatatattctttcatatctgtcttctttcaggtttctgagaacaatcaggctctaatacatttaaaatttttaatttaat

SEQ ID NO: 261421 - DNA, 602 bp, Homo sapiens
ttacccattctaacaggtataaggtgatatctcactctggttttaatttgcatttccctagtgattagaggtgttgagcacttttttcatatatctgttggctgttcgtatctcttcttttgagaaatgtctgttcagattctttcgacagcaagtgggtttgtttgtttttttgttgttgttgttttgagatggagtcttgctctgtcacccaggctggagtacagtggtgtgatcttggctcactgcaacagctacctcctgggttcaagtgattgtcctgcctcagcctcctgagaagttaggattataggcacccgccaccacgcccagctaatttttacatttttagtagagatggggtttcaccatgttgtgcaggctggtctcgaactcttgacctcaggtgatccacctgcctcagcctctaaaagttctgggattacaggtgtgagccacygtgcccagacacatatagattttgacttttatttttccttttatataaatggaatcacacaatatatattctttcatatctgtcttctttcaggtttctgagaacaatcaggctctaatacatttaaaatttttaatttaat

SEQ ID NO: 261422 - DNA, 573 bp, Homo sapiens
tttttgaaagtcagggtgtaagccagcctacacgtctcccataaacacgcttggttcttcaagttcccagcaaaagcaacacagccataacacaggtgaggtacattgcttatcaatatatacagattaattgaagtaagaactgtgctgttaaagagaagtacccaaacacatgttcttataagtttatgcaaataaattctctaacaattttatattggaataaaatatatatggcaaaatatacaaacattcatattcccactgaatctctgtggctgtctagccacttggcagaagatcaaaactctgccagtttatgaagcagattctgcattaaattaaggtactgtcctgggcaatagggcaagtgcccatctgtagtaaaaayacaaaaattagccaggcacagtggtgcttccctatgatcccagctactcaggaggctgaggtggtaggattgcttgagcctgggaggtcaaggctgcagtgaaccgaattcacaccactgcaccccagcgtgggtgacacagcaagaccctgtctcaaaaaataataataataaaataaggt

SEQ ID NO: 261423 - DNA, 564 bp, Homo sapiens
agggaaacttgctgctcttgacatttctctaaaacaatatttgtaacggtaggagactggtatatatattattagattgtacatgatttctttttcctaaagccttgttttctctcaggtggaagaactcagtaaaatactccaacgtgggagaaatgaagataataaaaagtctgatgtagaagtacaaacagagaaccatgctccttggtcaatctcaggtatttagctyatagtgaggatatgctaacactgttacattcaaatcatgctaatgttgcgttttcttttaatttaaaataaacaaagatcaaggtaaatgagaattgttaatactgttgacgtctctccatatgataatggtattttcggataatcaatttgttcttctggaggaaaaagtagaaatgtattgtcattcctgtgatttctataatgttgctaatgttttcagtggcacactcactgagtaatttttggcaggcagttagccatctacttccatatctgccttccttgtgaccaggggcatttgttttcttgttgatgtgttctaattagaat

SEQ ID NO: 261424 - DNA, 564 bp, Homo sapiens
agggaaacttgctgctcttgacatttctctaaaacaatatttgtaacggtaggagactggtatatatattattagattgtacatgatttctttttcctaaagccttgttttctctcaggtggaagaactcagtaaaatactccaacgtgggagaaatgaagataataaaaagtctgatgtagaagtacaaacagagaaccatgctccttggtcaatctcaggtatttagcttatagtgaggatatgctaacactgttacattcaaatcatgctaatrttgcgttttcttttaatttaaaataaacaaagatcaaggtaaatgagaattgttaatactgttgacgtctctccatatgataatggtattttcggataatcaatttgttcttctggaggaaaaagtagaaatgtattgtcattcctgtgatttctataatgttgctaatgttttcagtggcacactcactgagtaatttttggcaggcagttagccatctacttccatatctgccttccttgtgaccaggggcatttgttttcttgttgatgtgttctaattagaat

SEQ ID NO: 261425 - DNA, 571 bp, Homo sapiens
aggaatcctgggacaacctgtaatcaggtatttctcccacctccttgcttgcaactgggagactttkttcttttcacatccctttcttgttatgcctgaaattcccacactcacccttattagggagggaaatattagccaaagctagagctattatctacatgaatatggggaacaagttacccatttgttgtcccctacttgaggaaggaatcaaccctgaaatgtgggtattggaaggacaatttggaagggcaaaaaatgcctgcccagtccaaatcaggctaaaagtccccaccacttttccttatcaaaggcaatatcccttaaggcctgaagctcataaaggattacaggatattgttaaacatttaaaagctcaaggcttagtaaggaaatgcagcagtccctgcaacaccccaattctaggagtacaaaaactgaacagtcagtggagactagcgcgagatcttagactcatcaatgaggcaataattcttctatatccagttgtacccaacccctataccctgctctctcaaataccagaggaagcagaattgttcactgt

SEQ ID NO: 261426 - DNA, 423 bp, Homo sapiens
ttgtctatgctttttggccacttccctccaacattataacaatggagaaatggccagtgcagtaggaatgagggagaaagaagatctgggtaaaggacaagtaaggcaaggggatttcttccagagtaagaatactgtcagcaggagagaggcagagcaagatggcagaatagaaagctccactgatcatccccacagcaaggrcaccaagttaacaactatctatgtgaaaaatcaccttcataagaaccaaaaatcaggtgagccctcctagtacctggttttaagttcacatcattgaaagaggcactgaaatggtagaaaaaacagtcctaaatcactgataccactccctcctcgctcccactcagcagtgacagggtggttcagagaacatctctggacattaatggagggggagca

SEQ ID NO: 261427 - DNA, 588 bp, Homo sapiens
ctgaactgggaatcaggagaactgcattgtggttctggtttttgactaaatttactaaatattactaaatatttactaaatatttgatatttattgatttatcaaaaagttatttgtcaagggactgcaaatctctttcaaatattccctcaaagatgcctatcaaattctccctaaagagactcttttggatcccaacatatttaaaaatgtgttgccttacctggtgatttgttgtcatacaaaatagatcatcattgtggagaaaaaggcaggaactttgtggaataggttattaggccatattatctgaatataattttatcatttgccagtatattaacttgtttaattgcaagctctaggaagaataaaccacatagtcaaagagaatatttttaaatgttagggcttgtcctgatttgcctggaatagtcttaatttacayctatggttcctaaattatttaaagtgaaaagtaaacctttttactcttagaagtatcctggtttagacaatagttattctgtttcagttagttaaatgttgggctaatggttagctctatgaaaagctatttgagaacac

SEQ ID NO: 261428 - DNA, 596 bp, Homo sapiens
ttagcaagccttcatttagtagagcatttcagagctggcagatagtaccattcagtcctctcattaaactgaggaatctgaggctcagataaatgagatctgagatttgttctcagagcagtattgggtaaggattaagaaaatggctttggggccagaaataccttggwttgagtaccaactcttctaccacttgttggctatgtgacctcagtcttctcatcagttgagtgcggggattgtacagtatttcacagataagcctcctggggggacattttcttatagggtttgttgtaaaaataaactgagataagacaagtgaaatgcttagtgcaatactgagtatgtggccacagcaaatatgaatatatgttagctaatattgttattgccatatatatgatatttacatgcatggaaataatatagtatgaatttgcatccatagaagattttttttttaatgtcaaggggattagtgcaaatggaatgtaataaacactaaaaaaggcacacaggccacaatgtttagtctaaaccttgcttaagtatatgaccagctgtagtcatcctattcaaagattgttacccat

SEQ ID NO: 261429 - DNA, 648 bp, Homo sapiens
taatcctaagtactttagttagggtcttacagagaaacagaatcaataggataatttctctctctctttctctctctctctctccctcaatctatctatctatgagtatatttattatggtaattggctcatatgcttatgtagactgagaagttccatcatctgccgtctgcaggctggagaatcaggaaaggtggtggtgtaattcagtctgagtctgaagacctgagaaccaagagggagagagaacacagttgtaagttttagagtcttaaggcctgagaaccagctctgatgtccaaggataggagatggtggatgttactcagtggactggatgatgcctacccacattggtgagggggaatcttctttacttaggctactgagccaaatgttagtctcttccakaaacacctttacaggcacacccagaaacaatgttctaccagctatctgagcatcccttacccagtccaagttgacatacaaaattaacaatcacaccaagatactcaaaacagatacatagaagggaataattcaggaactcagcaggcaaggttggaaggaaagcttggatttggaaggtataaagttatgagagataaagaagccatatgtttgggcaaacttatccatgaagaa

SEQ ID NO: 261430 - DNA, 580 bp, Homo sapiens
aaaattgtcacattaccctaactgtgtagtttttccacgattttgtgtgccaccatccctaatcccatgtaaaaaatcactttyaccagtttgattttggtgaccaaaggaacttggttattccatgagtcttcaaaatgacttggccattttggtaatcgttgtattgagaagatatttttacattttatgctaaatcttaatccttgttagaatttctgtatcttttcaattgttagtttttttaatgtaattttgatggaaggatttccatttgctttgattgggagagtgactcatgaggaaaacttctctttctttctaaagacctttgttacatgtctaacactactcacatatgccctttgtgcagtctctttaaaatttatgggaggtcaaagcatcttaaaacaaaggcaaataaaactatttgcctattttctcttctttatacaatctttttactagatgaagttttctaactctttaagttctcattctcaagataaagtagggaaagtggcattgaactaatccattcttgaaaacatcttaacattataagcagaacaaagtggta

SEQ ID NO: 261431 - DNA, 571 bp, Homo sapiens
aactaagtttatttttataacagttctgccaaaataatggccataaaggtcacaaagcagtatctcctaagaaataccttgaaaaggatttacaattcaatgctctttcgttaaaagaagcaccttgaagataagaaattaatgagatttagaataatttattaaggaacacctaatagactctcatgagattcaaatgtcaagacgtttaaaaaaacacaaaagaaatttagcaaatgcaaattatatttgggggaaaaaagacaaagagtatttgaaaaatcttataaatgtttatttttgcagcactgcaatttaatccttgtatttgaatacatacccgccagacatttcatatgtttttgattctaatgtttggaatctcagaaagaaccagtaatgatttcttggtgtcttataaggtgagagtttacttgyaggctgacagggaagtaaaagcccagataagacaagctcacagaactgaaaagctatggagaaaattcattgttctatttatttccactttgtgatgagttgagttgagagcaaaatgtatttataacaatgg

SEQ ID NO: 261432 - DNA, 582 bp, Homo sapiens
cggaaataagttagtaagtccagcccacattctgtgggaggggtttaagctccaccccctgcaggggggtatctacatgttttatttggagttcttctgtgctatatggaaagtcatttggatctcgaagagcattgtgtggaccaccagttccagccccagagaaaaatagcaacttcccatctcctccatcagtgacccaaagactggtttgtggggctgggtggggacaggtcacagcttttctaacatcttgacctctcctatgtcacctgctgtgcctcccagagactgataacaaatactttctcctgataggctcctttttaccatgcaaaccactcagagaaatagttttaagagtaggacaatgagggagaggtttttctagaagcacccacacaattttatctgaagcttgactaagtggggaccatcccacaaaaatgcaatgatgtaaaagtattttgtaaaccttaaagtactataatgttattattatcattattacttcctccatgctactgtgtgagctacatacaggaagttagaatgtmtcaccatggaattaaggtgatgaga

SEQ ID NO: 261433 - DNA, 536 bp, Homo sapiens
gcatatcaaaaaaatgttcaacatcactaatcattagagaaatgcaaatcaaaaccacaatgagacaccattgcacaccagtcagaatggctattctaaaaagtcaaaaaataacagatgctagtgaggcaatggagaaargggaatgcttatacactgctggtgggaatgtaaactagttcagccactgtggaaaacagttcagcaatttctcaaagaacttagggctgggtgcagtggctcacccctgtaatcctagcactttgggaggcagaggggggtggatcacttgaggtcaggagttcgagaccagcctgaccaacatggggaaaccccctctctactaaaaatacaaaattagttgggtgtggtggtgcacgcctgtaatccccgctacttgggagattgaggcaggacaatcacttgaacctgggaggtagaggttgcagtgagccaagatcgtgccattgcactccagcttgggcaacaagagcaaatctccgactcaaaaaaaaaaaaaaaaaaaaaaaaaagga

SEQ ID NO: 261434 - DNA, 614 bp, Homo sapiens
caagtggcttactatagattctgtctgatatttttcatttttaatatgaagactgggatttgtgatttaaattttatatagtaaaaatctgtctgcagaaaatgtaagctttattttccctattctttattgttatgcttcctcttttttattagagagttataataattagaatgcaaagaatctctttctccagaagacctttctgatgaataccagcaatttcattcttctktccttgttcatagtttccatgatcacaaattatcttttgttttctagctaacatatttatactttgtgcattttttccacctgtccgccccaaaaccaactctccatttagatcctcatggatgtggccttgattttgtttccttaatagtcagtgtgacagaattttctgaattcttggtctgcaaagaatcagagtatactagtgaggatggtaaaattaaaatttattagacataccatagtgcagtgaaatataatacagtatcaaggaagtagacgaaatcctcagatactctacatttctctagcttagagattccatttctccctaggcagaattgttaaaatcaattttattgtgaatataatggacatat

SEQ ID NO: 261435 - DNA, 580 bp, Homo sapiens
tggagacagacaagtgggtggccattgctgctgctactctttccattgttgcaagtgcttccccactcccccctgaacttctggttgaagtaaattccaggagatttaaaatactggtcccttttctattccccttccatctttctccttttttaccgtttgggatccatatgctaaacacggggacatttcaaaaccartggcacatttaaagaaaattagaaagtgaccatgcatgccagggaaaaattcaggctcagaaaagacctcagaaaaccttaaattttcaccttaaggtgattattcgcacagaggcaacctacaacaatctggaaaacaaacaaacgaaaaatgaaactcagcaaaccttgggaagaaagggaatctgatttccagagttaccacattaccactcatatgtccagtttttaacaaaaaattacagggcataaaaatacacaggaaaatatgacctattcaaagaaaaaaataaatcaacagaaactatccctgatgttctagtaggtctgatagcagatctaccagacaaagactttaaaacaacagtcttacatataca

SEQ ID NO: 261436 - DNA, 517 bp, Homo sapiens
aaagaccatatatagagaccatatatatagaccatgtctacacagacacacatacacacacacacacacacacacacacacacacacacamacacacacattttatatatataaagagagggagacagaatgtaaatagcatggcactagtgcaatgactgggtgtttgattactgaacaacacgacatctagtttgacatagtttcccaattgaaccctttccactattacctttttaattttcttctattttctgctactctgttcaagtaaaacacagaaattattttgccaatatatagttgaaaggtatttagaaagctcagaaacaaatgtcaccatcagaattccaacagtatattttatgttcacccagaaagaaaacaaaagcaaagaaaaaactatccaaattagaaacgctgcagaagtataatgagtactgagtataatccttcagaagtattatggagtttgagttatttttcttaagaagaatgaagcccacacatcattgag

SEQ ID NO: 261437 - DNA, 517 bp, Homo sapiens
aaagaccatatatagagaccatatatatagaccatgtctacacagacacacatacacacacacacacacacacacacacacacacacacacacacacacattttatatatataaagagagggagacagaatgtaaatagcatgscactagtgcaatgactgggtgtttgattactgaacaacacgacatctagtttgacatagtttcccaattgaaccctttccactattacctttttaattttcttctattttctgctactctgttcaagtaaaacacagaaattattttgccaatatatagttgaaaggtatttagaaagctcagaaacaaatgtcaccatcagaattccaacagtatattttatgttcacccagaaagaaaacaaaagcaaagaaaaaactatccaaattagaaacgctgcagaagtataatgagtactgagtataatccttcagaagtattatggagtttgagttatttttcttaagaagaatgaagcccacacatcattgag

SEQ ID NO: 261438 - DNA, 517 bp, Homo sapiens
aaagaccatatatagagaccatatatatagaccatgtctacacagacacacatacacacacacacacacacacacacacacacacacacacacacacacattttatatatataaagagagggagacagaatgtaaatagcatggcactagtgyaatgactgggtgtttgattactgaacaacacgacatctagtttgacatagtttcccaattgaaccctttccactattacctttttaattttcttctattttctgctactctgttcaagtaaaacacagaaattattttgccaatatatagttgaaaggtatttagaaagctcagaaacaaatgtcaccatcagaattccaacagtatattttatgttcacccagaaagaaaacaaaagcaaagaaaaaactatccaaattagaaacgctgcagaagtataatgagtactgagtataatccttcagaagtattatggagtttgagttatttttcttaagaagaatgaagcccacacatcattgag

SEQ ID NO: 261439 - DNA, 494 bp, Homo sapiens
tgctgttgtaactttaatgactatcaaaggacatcattrgttaatgaatgctagactaactagataccaaagcatgttctgtgaaaatccccgcataaccattgaagtttgcaacaccctaaaacccaacaccttgctcccagtatcagagagcctagttgcaacataactgtgtagaagtgttagactcagtttattctagcaggcccaacctccgagaccatctttgaacatcagtagactgtgagctgtacatggacaggagcagcttctccaatccttgcaaagcgactctaaagaagacgacaagccctgctctagtcacacctggaggctgactggtccacgtatggctgaagcatgagaaaactcatcgagggactcattttccttaaaatttggacttgtacagtaaggacttcaactgatctttctcagactgagggctgttcccagtgtatacatcaagtcactgaggtaggacaaaaggttgc

SEQ ID NO: 261440 - DNA, 494 bp, Homo sapiens
tgctgttgtaactttaatgactatcaaaggacatcattagttaatgaatgctagactaactagataccaaagcatgttctgtgaaaatccccgcataaccattgaagtttgcaacaccctaaaacccaacaccttgctcccagtatcagagagcctagttgcaacataactgtgtagaagtgttagactcagtttattctagcaggcccaacctccgagaccatctttgaacatcagtagactgtgagctgtacrtggacaggagcagcttctccaatccttgcaaagcgactctaaagaagacgacaagccctgctctagtcacacctggaggctgactggtccacgtatggctgaagcatgagaaaactcatcgagggactcattttccttaaaatttggacttgtacagtaaggacttcaactgatctttctcagactgagggctgttcccagtgtatacatcaagtcactgaggtaggacaaaaggttgc

SEQ ID NO: 261441 - DNA, 565 bp, Homo sapiens
gtgcttaccccgggcatcctcagtcctgtttttcgatcatctggttgggggcttctggcccagagaagctttgctctctggggcagtgtgccttccagtgactgcctcggcaaagcggacatggatgagggggtggcttgtttctcattggacaatgttttctaaggtgtccttgcaaaccacactggtaacaagccccatcaggtgattggcatgctccattttctgtcctctctgaactacaaaggtttgtttgtctgagggccatgactaaggctgcrgcctttctctgatctcacttttccttttggacctcttcctcttggtccttattatagaacactgaggttcccaggtttaataatgcctccagattttgttcagggtccagggctcacttttggagctttcttctgatatgtgtggctgattgggtaatgaacttatcttttaggatcaattggccctctaatgagttgggtgacagggaaatatattttcttaaggcctcccatagctgcttgaggaaggagaaggattttcttcctttccctgagttatgatg

SEQ ID NO: 261442 - DNA, 521 bp, Homo sapiens
ccaattaacttaaataatggacctaaattataagcacacataaaagkttgcttcatacatattttgtttaggtaccataatatttgggatattttgttagaaaattaatattgttacaagtatattattaaataatatagaaagtactgatttgcttaatttcattttgcttatcacatcaccatttatgtttagtgacagacagtatattatatatattacttccagatgttttatatacgtataacaaaattcaagtacatactaaacataaattacacatgaatctatcttttcctcctacaactcattgccaaaagcttttttaaaaaacttctcgggccagtgcagtggcttatgcctgtaatcccagcactttgggagtttgaggtaggaagattacttgagcccgggagttctagaccagcctgggcaacatagtgagaccctgtctccacaaaaaaaatttaaaattagctgaatgatggggtgagaacctatagtcccagctactcaagagg

SEQ ID NO: 261443 - DNA, 647 bp, Homo sapiens
gtacaggtgtggcagacaattttctttattcttgttacttatagaataacatttcattttctgttttgtctttaaaaatatttcctttgctccttcgtagaagatatatatttattttccaagttatattttaagtttttagcaatatcttttcattatataaatggcaagaaatttattctcttattctaacctgatccttaatttcataaaatctagaattttaggtacagattagtaatacaatttttgtggtctgtatacatgtatttcagtatttttatatcataattacaggatattgatatgtgtgtacatgtaaatacattatatttaggcttctattttaaatagggctttttgtttgttcattttagtcactgtcaattcatttaaaaygtaaggccttctgcagtcagtattttagatggttaaatatatgaaatattttataggctcttccacctctgagaatttagtttttgctttttgtttaaaggactgtttcatagcatcatgtcattcttttgcctttatttaactgcagtattcctctaagtgttcttttaaactaatttttcatcttaagaatattgtatttcagtacatataggttaaattttctcctaactattgtatgatattta

SEQ ID NO: 261444 - DNA, 539 bp, Homo sapiens
aatttatttattttattttgatattactgccaaattgcctttcaatttggccataacattatactctatcagcagtaaatgactgcttgttttctaattctttgaatgwatactgtaatcagaatgttaaaatgttgcccatctaattgttggcaacatgatttgtttttataaattgttatttatataatattactgatgagaacatcatttctcacattaattagtcatttgggttttttttttcttgtagttggcctttggcttttattcttattttgatctagataaacacatcaatattattcttcataaatttttcacttttgtctgtttggaaagctttcttaaccttaggctacaaatatattattgttcctttctacttgtagtatgtttggtcttagttagtttttatttacaagatatttggaatttgtctttagcatttatttcattttgggagatatatacattttcacaaaagtttttatttataaggtatttggaatttgtctctagcatttatttccttttgg

SEQ ID NO: 261445 - DNA, 574 bp, Homo sapiens
tatcacatttacatttttgttatgttttcttcttatgaactcactatagaacacaacttcctaattaaaatctaaatttaatgtgatcactgccacattttattatgtttcctttaatctctagattttgtctttttttatcactccctattgcaataaagtccacccaaatgagagctggaagaagctgttttcagagattcagaggcaggcaggtgagtgtgaaggctttagggtgaaagaaagggaaggcttcagtcatgctctgaaagaagggtgtcatggggaggttgaaggagggcagactcaaaggagaacatcattttgtgactactcaagtgkcggtggggctcctgcctgtggtggggagttgcagggcttggggcttgactttctctggttggtcctaattgcaagtcagagagaaagaggagaaagtttttgatcaagtcctgacctttctgagccactgcttctgagtttgtggtttggttctggactggttgctacagtggttgtgggtcagggctctgttggcatgtgtagattggtcattgtccacttgtacaaccag

SEQ ID NO: 261446 - DNA, 574 bp, Homo sapiens
tatcacatttacatttttgttatgttttcttcttatgaactcactatagaacacaacttcctaattaaaatctaaatttaatgtgatcactgccacattttattatgtttcctttaatctctagattttgtctttttttatcactccctattgcaataaagtccacccaaatgagagctggaagaagctgttttcagagattcagaggcaggcaggtgagtgtgaaggctttagggtgaaagaaagggaaggcttcagtcatgctctgaaagaagggtgtcatggggaggttgaaggagggcagactcaaaggagaacatcattttgtgactactcaagtgtcggtggggctcctgcctgtggtggggagttgcagggcttggggcttgactttctctggttggtcctaattgcaagtcagagagaaagaggagaaagtttttgatcaagtcctgacctttctgagccactgcttcygagtttgtggtttggttctggactggttgctacagtggttgtgggtcagggctctgttggcatgtgtagattggtcattgtccacttgtacaaccag

SEQ ID NO: 261447 - DNA, 627 bp, Homo sapiens
tttgctcaacatgtagtgactcagaaatcccagctgtctccaagtatggctttacctctcaaaatgtcatccccattactactacaaaatgagaaaatgcacgtagataattcagaatctgctcttctatgctctggtctggaagagatacatgcccttttagtcatttatcaaaaacagtcaagtggtcctgactaactrcaaggaggatagctaaatatgggtgaacatttggctgcctaagaaatagcaaatagatttatctcaacagtttttaacaaggtcaatacaacaacaataatatattgcttagggctaacaaaatatgtgataaaattgaaaaacacaaagagagggtaaaaactaagaagaataactacattagggaaggagacaaaacgatggggatcagaaaggtgaagatcgtgtcagtaacgttttatttttgatttcgtgtcactggatcaggatatttattttgttgtaagtaattctaaaataacttacatttagatttcacactttcttttttatggataaaaagttttataataaagataaagaatagccataatgtgatcattttaatttttggaaagatgggctttcttttcttagaagaaatat

SEQ ID NO: 261448 - DNA, 692 bp, Homo sapiens
atttacactcaactgtcagcattgtggtcagaaaaatcttttcaaaataaattgtctatgtggtcatttccttcttttaaactgtttagtcatttgtcattttagtcagagtagaaaactacctccttataatggccaaaagcctctccatacccctttgacctctcttctgctgttttcccatttattaacttcgctctggtctctttttggtactgttttttcctgccttcctgtgttcacrctgaccattccttcttcctgtagctggtctccctagctagctcaagttcttgatcaattgatcaaatgctggtgttgatttgaggtctatcctatccactcttaaaactatagtatttccctagtccctcctttacattgcatttgttttctcctcaatgctacttacttgtttacaccgattactttttgtctccctcagacagaatgtaaaattcatgacagtatgtcattaattgtaaatttggtcactatgatgaccaaatacatagaatgatgtctatctgtctaggagctcaaaaacatttgttggaagaattaacaaatactttactattaaatttatcacatattatgctgaactttaggcaataaacatattatatgtatgcaatatttctgcctcctcctttagttagtgaactacttaaagttataggaggtgcctt

SEQ ID NO: 261449 - DNA, 546 bp, Homo sapiens
acgctagcctgggcaaagagtgagaccctatctcctaaaaacaaaacaacaacaacaaaactcaacaacagcaaactttttccataaggaaattaaataaattaaacaaaaaacacttcaggacatctgcccctgaccaatttccccaattttctttggggaaagaaacttgcagaaagaattggttacttctaaatgtgggatttctagaaagagggtctaaaccatgcagcatttcctgaaatatagacccttgatcgaaatataagagtcaggsaggccaaaaacccctgcacagcaaagggaaattacatgaccaacagtattcttgaatgcagtaaattttactgagtattttgtacatgccgggcaattttctagccacttggaatacatcagtaaataaattagatataggccctcactgtttgggaattgatattcaagagggagaaggcactgaaaaatactcataataaacaaatacattatacaacatgtataaaagggaattaaaggatagaataaggtaagagagatgtgaaa

SEQ ID NO: 261450 - DNA, 443 bp, Homo sapiens
ctaactaatcaaacagaaggaaaaagtatacttcataaatgtaattagggcagaaaacaaacaaggaaaaggcaaataaagataatttgttcaagcttattttttgctcattaaaaatgagattattttaaaagggtatataaagcagcacaatgtacaattctttattaaattagaggatttagataggaaaggattaaagattaacaagcacataatagaaaactggtagacagttggttaaaaaaaaattccagctgtggaattctcctgaatttggaacatgacatttacaactccacaggaagaacarcacagcaactccagccccagatttatctgaagaaacctcccacatgatgtgaaatatttagaagtatatctgagactcttgccatgatctctgcctctctccttttacaatcaaaaggattctaaatgag

SEQ ID NO: 261451 - DNA, 568 bp, Homo sapiens
aacattttgttaacaaggcatgtcctgcacagccctagatcccttacatgttcattcatacaacacatgtttttgtgagctccaggttgggtcaaagtggctgtggcaaagtggctggggcaaagctacaaattaacaacatcacagcaaagcaattgtttaaagtacaggtctttttcaaagtggagtctcttatgtctttcctttctacgtagacacagtaacagtctgatctctctttcttttccttacagaaaagtctaataacagcctaatttccataattttaaagtaacttaatatttttgcttagagtttccaataatttttttctttgtcttacagtgtrtaacttttactaaaatatgtttcaggattgatttttttaagtccaattttttccagggtaaatggtggaatacttcaacaggtttaattaaagttttaaaaattgtttttaaaagatttgttgcattagagctttatacattcattcagtttgtttttttttcttcttcttctttaaaatctccaattatatggatgatggactttcttagcttgtctt

SEQ ID NO: 261452 - DNA, 568 bp, Homo sapiens
aacattttgttaacaaggcatgtcctgcacagccctagatcccttacatgttcattcatacaacacatgtttttgtgagctccaggttgggtcaaagtggctgtggcaaagtggctggggcaaagctacaaattaacaacatcacagcaaagcaattgtttaaagtacaggtctttttcaaagtggagtctcttatgtctttcctttctacgtagacacagtaacagtctgatctctctttcttttccttacagaaaagtctaataacagcctaatttccataattttaaagtaacttaatatttttgcttagagtttccaataatttttttctttgtcttacagtgtataacttttactaaaatatgtttcaggattgatttttttaagtccaattttttccagggtaaatggtggaatacttcaacaggtttaattaaagttttaaaaattgtttttaaaagatttgttgcattagagctttatacattcattcagtttgtttktttttcttcttcttctttaaaatctccaattatatggatgatggactttcttagcttgtctt

SEQ ID NO: 261453 - DNA, 472 bp, Homo sapiens
tcagtgagctaatgagaaggcaaagatccctcttggtcaatttgcaaaggaacaaaaacacaaataatgtaattttcccaaactatcatctatgatttatgtatagtctcttgtcttctctcactccaaggcaatgattctccaatgttgaatcccattccttctattcctctgatgcgggctccccatatatttgtatgtactttttagaattcagtagttgccaaacccaggtscttcaattatactccttcttttgtgggttcagagtagagactgagaacaaatgtatgttccttattttgttaaaagcttgaatgctggttcaagacttcaaagttctatcattttatatctcagttcataccatctcaaatgtttgagaaaagtgggctttaattatagaaaaataatatgattaaaggaataagtagttaatacttgtttgacaaaagaagagaaacaagaagca

SEQ ID NO: 261454 - DNA, 469 bp, Homo sapiens
atcaatttttctttcatatttaatgattttggtgtcttttctaagaagtctttacctacctagggttacaaagtaatcttagttttctaaaactttttagattaatctttatgcttactctaattattcatttccatttaatttttatgaatcatttaaggtaggattatagagtcattttccctcagaaatatccagttgtttcagtagcatttattgggaaaataagcctgttcccaattaattattttttatcaaaattaattgcttatataggtttgtatctgtttctggactctttttctgtcccctttattgatttgtcttcccctacactctcaaaattactgtatatttatagtaatgaaagtgttaaatttcagtartataaatctgctctattggttctttgtattttcacaggtatattagaatcaacttgtcaatttatacagtaaaagtgtgatgg

SEQ ID NO: 261455 - DNA, 656 bp, Homo sapiens
gagaattactgtttgagatattgtgcacagtgccaattccaatatacgaagagcagagtggctgtaaattgtaggaaatctattctcgggcaccatggggaaaagttacaataaagctgatgaagattaaacagactgtatattttggttgaggctacaaaccaatatcaagatcaaaccaatagaaatgggtaatgtctccaattgaaaaaaaaaaagctagttttggatcattgtaaaaggtaaaatctttttgaaaaccagtaaagcctgtgagatcttattttctgttgcattatagtatctggcatacatgttattcagtgtatattatttaatgtttatctacctgtggctattttctatttctttaagaaaaataaaagctcttcaaaaaacacttgagcgcagtattttcttggtttccagcatctacaccattaacttgcacatagtaatcacaaaatatttctatggtgataaatggtgtttatggataaatatgattagtgagttcgataaaaggtcaacagggcagaaaaaaaaaactcagatattctgccaatggagaagaaacaagagcactttcaagaaaaatgcacwtgataggaagaagcttgctatgaagaagatatgtaggactgcaagtgtgaatt

SEQ ID NO: 261456 - DNA, 602 bp, Homo sapiens
gtaaaaatgtgtaacctggccggacacggtggctcacacctgttatctcaacactttgggagtctgaggtgggcggatcatgaggtcaggaatttgagaccagcctgaccaacatggtgaaaccccatctctactaaaaatacaaaaatcagccaggcttggtggcaggtgcctgtaatcccagctactcaggaggctgaagcaggagaattgcttgaacctgggaggcagagagcagtgagcccagatcatgccattgcactccagcctgggtgacagagcgaaactccatctcaaaagaaaaacaraaaaaggatgtgtaacctttccatagagtttcagctttccagtcttcttgatattctgttccccaaactgtaagcacatctttctgtgcgtttgaattgtttcttcgagtcaactgattgtatctttaagcccagatacttcctcaggaagatgtttattttaggtcttgatttctctaaaagatatctttgctgctttgatattctgttctgaattgaataactttttattttggaaactcacacctacagaaaaagttgaaagattagtataatgaataccccatatactcc

SEQ ID NO: 261457 - DNA, 653 bp, Homo sapiens
tggtggtccacacctgtagtcccagatactcgggaggctgaggaagaaggactgcttgagcccaggcattcaagagcagtctgggtaacttagtgagaccccattttaagtaaagactaagtgatatggtttgactgtctctccacccaaatctcatcttgaattgtagcccccataattcccacgtgttgttggcagggtgggtgggaggtaactgaatcatggaggaggttcccccatactcttcttgtggtaatgaatgcgtctcacgagatctgatggtttcataagaggtttcccctttcacttggctctctcattctcttctctygcctgctgccatgtaaaacgtgccttttgacttccaccatgattgtgaggcctagccacgtggaactgggagtccattcatcctctttttctttataaactacccagtcttggatatgtctttatcagcagtgggaaaacagactaatacattaagtaactatgtaaagaaaaacaaagaagcgtaaattcttagcctaaagtttatgattcatttttatatggtacagtgccagttttagatgcagattattaaaccaagaacagaggcttctgagtgaaggactccgcgcgaccgcacaggtcacatgcgcggaagccag

SEQ ID NO: 261458 - DNA, 653 bp, Homo sapiens
tggtggtccacacctgtagtcccagatactcgggaggctgaggaagaaggactgcttgagcccaggcattcaagagcagtctgggtaacttagtgagaccccattttaagtaaagactaagtgatatggtttgactgtctctccacccaaatctcatcttgaattgtagcccccataattcccacgtgttgttggcagggtgggtgggaggtaactgaatcatggaggaggttcccccatactcttcttgtggtaatgaatgcgtctcacgagatctgatggtttcataagaggtttcccctttcacttggctctctcattctcttctcttgcctgctgccatgtaaaacgtgccttttgacttccaccatgattgtgaggcctagccacgtggaactgggagtccattcatcctctttttctttataaactacccmgtcttggatatgtctttatcagcagtgggaaaacagactaatacattaagtaactatgtaaagaaaaacaaagaagcgtaaattcttagcctaaagtttatgattcatttttatatggtacagtgccagttttagatgcagattattaaaccaagaacagaggcttctgagtgaaggactccgcgcgaccgcacaggtcacatgcgcggaagccag

SEQ ID NO: 261459 - DNA, 653 bp, Homo sapiens
tggtggtccacacctgtagtcccagatactcgggaggctgaggaagaaggactgcttgagcccaggcattcaagagcagtctgggtaacttagtgagaccccattttaagtaaagactaagtgatatggtttgactgtctctccacccaaatctcatcttgaattgtagcccccataattcccacgtgttgttggcagggtgggtgggaggtaactgaatcatggaggaggttcccccatactcttcttgtggtaatgaatgcgtctcacgagatctgatggtttcataagaggtttcccctttcacttggctctctcattctcttctcttgcctgctgccatgtaaaacgtgccttttgacttccaccatgattgtgaggcctagccacgtggaactgggagtccattcatcctctttttctttataaactacccagtcttggatatgtctttatcagcagtgggaaaacagactaatacattaagtaactatgtaaagaaaaacaaagaagcgtaaattcttagcctaaagtttatgattcatttttatatggtacagtgccagttttagatgcagattattaaaccaagaacagaggcttctgagtgaaggactccgcrcgaccgcacaggtcacatgcgcggaagccag

SEQ ID NO: 261460 - DNA, 615 bp, Homo sapiens
caccctgccgtgtcactctaaaaatgacccagtttaaggaatagctttggatgacctctaaattggttcagaatgagggcctcttttgttactaaattatttttcctggccatagaaattttagacgttggcaaatcgcaataaatttctgatattaccatttcgctttttaagaaaaagtctttgaaatgacaacagagacttatctgaaatcttcaaacgtaaataattcagaattagtgcttgagctctgctcttaagctacaaggacacgtttctcgataatgggctttcagagcaaaggatatgtagctttgctattaagagtgactgaaaccctgccagggcaacatttacctaacttaattatcgccacttagccacatctctctcctcaatgcccggctaattcttgcaacctcaaatatcgtacattgaatttacacattctacatttcactattcttttaattgtggtaaaaagtatayaataaaatttacccccttagctattttgagcgtacagtacagtaatattatcagtatgcacactgttgtgcagtaactctttagaacattttcaatttgcaaaactgaaattttatgcccattgaa

SEQ ID NO: 261461 - DNA, 468 bp, Homo sapiens
cagtcaggcctggagcagccagacacctgcctctttctatcagctcggattcccaccctcaacagttcactccaggggaaattttctgacccagtggcctggagcccttttataccagctcacgggagctggtggttaactttttggaaattttgcaagctggttgttaaaccacagccactactaaaaaaaattaaaaaattaaattatataaatatgcaattagatggtattaagaacaaaggtcataagtatgtaaaattcatcacttcctagctattttgcatcttactattattcatgcttttgaggtgatttttcatcttctacaggtatatgcaaatacctgtagatatgctattgtgtttctctttccaacttgacgttttgtgacaccatattggtagctaaaaattgcccataggacaagcatttacacygtggaaatgggcaaacactaccaattag

SEQ ID NO: 261462 - DNA, 618 bp, Homo sapiens
  misc_feature (1)...(618): n = A,T,C or G
atattcattttgatttgcatttctctgattattaatgatgctgagcattttttcatgtttgctagccactcgtatgtcttcttttgaaaagtgtctcttcatgcctgttgtccaatttttaatgtgttantctgttttctttctgtattaagtttccgtatagagtctagagtgttagaccgtttgttgaagtgtagttagcaaatattgttctacaattcagtctgttgtctctttattatattgatagtctatcttgctgtgcagaagtcctttggtttaattaggtcccaaaaggctttttaactaaaaattaattctccttgctcattattagtctattcagattttctattttttcataattcgatctcagtgggtttatgtgtccagaaacttacccatttttttctaggctccaatttgytggtgtacagttgttcagaacagtctcctatagatcccttgtctttctgcgatattagttgtaaggtctcttttttatttctgattttatttatttgagttttttttcttattctagctacaaatttgtcaattttgtttatctttttaacataaattctttattacattgatattttgtacagtttttta

SEQ ID NO: 261463 - DNA, 356 bp, Homo sapiens
cagctgggcaattattgaactgacccttgcaattttcaaaggaataacacttcccttctaagatctgacctttgcctgcctctcctcagagcaatttccctactccagagaactyttgttgtggaatcggaatccaaggagcgccatgctcactacaggaaggaggatgccactgtgaattagagactcacgttaggcttccctgccttggctgcaggttctgtgcacgcagaagcgctccatgagacataaagaaatggaattgctcaatcgaggcactgtgctcagctcacccagggaaactgtcctgcattctgcaatgcaacaaaacgtgactctggcagacgtgcttattt

SEQ ID NO: 261464 - DNA, 607 bp, Homo sapiens
tgcgcaggtcagtttctagaagtttctcatccacatatcactaaggtgcctaggtccatgccctgcatatggtagtaatcaaatatatagaaatatgcactctttctataagaattcagtctttctacaagaaatacactgacctagatttagataggtaataactaaatggagttggaaaccaaaagttatctagattgttcttaccaccttatgccctaccaacaaaaagcctttttgttttacatatatggttattttgttggtttgaaagccatcaaaaatttgtcagcctgcaacgaacacaaaaatgtgtatggtagaatgtataggtgtattaattgaaaccagtttatccttctaagcattgcatctgcttctgtaatttaggtaaatgctatgattagtagctaactaggccaaatctaataaggatcatgaaatgtacctgcmtttgcaaaggagattcatggttgtgtgtgtgtgtgtgtgtgtgtgtgttttaagttactaatcctattttaaaacaaagtagcacagtctatttaagtttttttctgtcaatttttcttggtctttactaggtgacaaacatgttagtaataac

SEQ ID NO: 261465 - DNA, 538 bp, Homo sapiens
ttttttagttttcagtgtagaggtcttgcacatctcctgttaggtttcattctaaacattctgttggttttgataataatatacacaatttgtcttttatagttcacttttcatcactttggctaatctatagcatatatttgatttttgtaccttgaccttatattcagtgacctgataaatttacgtatattttaattgtttgcaaatcgttttagattttctacatacaaaaatatgtcatttgcaaattasaacagtttcatttgttcctctctaagtgtatcttttctttacttttcttgccatattgcatttctttccttccaatctttatatattttatttatatttctatgttaattacatggttgatcatatgatacatttaataaatgttctgcattcacttaaattgaacattcttatttatttatttattattatactttaagttttagggtacatgtgcacaatgtgcaggttagttacatatgtatacatgtgccatgctggtgcgctgcacccactaactcgt

SEQ ID NO: 261466 - DNA, 588 bp, Homo sapiens
attccctgttgatttcctcattttctcagccaaggctagactgacctctttaaaattctttataaacgtcagtaattgctgcatccaacttcaattcattactttcccaggcctcatgtattttgatgatatgaaagttgaccgcatttacatgcaaattgaagttttatattaataagggccggtgaaaggagatcgcatggtaatgctccattatgacttttaaatacatttgcccacgtctcgactggcatgagcatggtcagaccacgaggaaatcatgttggtctgattgcaattttgttttccaattgaaagtacaatttcatcaggtttccctgtcatttctaataatgacttaagtttgcttgctaaattggagaatttctccggtcttcggatgggctggcaaacaggtgaggcgacagctgcttctgcatgaagtgcttcattacaggcgtgggcaaccatccgccccaagaggctgctttgatgacaggrgcaaaattactgaaggcgtcactccactcagtggagattgatgatcttaagcacattaactttatcatacaacttggaaagcccaac

SEQ ID NO: 261467 - DNA, 526 bp, Homo sapiens
ataattttaggctactatatatgatacttctaaaacttttaatttctaaatatttatcatatatataaatgcaattgattttcatatattgactgctatcatttgaatgttccctccaaaacttatgttgaaatttaaatgccattgtactagtctaaagaggtgggatcattaagacctgattaggttgtgagtgctctgctctcatcgatggattaatgctattattgtgggaatgggttctttatcacaagggtggtttccttatgaaaggatgggtttggccccctttttttcctctctcttgccctctctttgcccttacaacatgaagtaatgcagtaagaacaccctgaaagatcaattttggactgcctagcttccagaataatgagccattaaatgtatgtttatgacaaattaccctgtccataattttctgttatagcgccataaaatggactgacattgaccatctcgcytatgaccttgataaactcacatattaattctagtagctttttgt

SEQ ID NO: 261468 - DNA, 466 bp, Homo sapiens
actgatgtttcctggacatggcaaagttgctggcagtcaggaaagagaacctgcgtgttggtgctcggaagcagttcctgaagatctcaatcttcggctgtccccagcacacctcctgacactgggagtctccacacacctgagccagctgctgccttccagaacccacctgttcaggaggcccaattccctttaaagaatagtcttccttacacatggtgcacaatagtctgccccagtacgtggtccatgggtcagaaattatgtttctccctccacagcagcctgtgctctcactcacccacagactcgcccagctggcaaccctccctcctcccggctggctggctgtggctgggggctgctccaaggtgccccagcactgttcctgctgtgctctaagccygcatgccctcccgcaggatgctctggtggagacaccacatcctggctccacgttaaaccg

SEQ ID NO: 261469 - DNA, 431 bp, Homo sapiens
atctgcatgagctatcatgttcatgaatatttctgtcaattttcgaggagccttcatatccaaaaatggtcaaagattatatcagtatggctcagggcaatatttttcaaactgcagattgcaacccattggcagtcatgaaagcaatttagtgggtcttacccagcattttaaaataatgacatagaatagaataaataaaaaatattagcagaaacccagtagtaaggataaatattgtttgtaagacttctgcttcgggtgtatgttttttctgtgttttattataaaatgcacttcttactgtgagctgtaatcacaaaarcagaaaagcactggtctggtaatatgaattctgatgtgtttggacaaagatggggagacaaagggctttggatctaaagtctgaaccggagaaactgcagaattat

SEQ ID NO: 261470 - DNA, 561 bp, Homo sapiens
atattctaaaccatgaatagtaggtaattacaaactagagctttaaccaatttccaagaaggtgttgataaaaatcatctaaaatggggtttttagcccaatcctgaaccaccccctacttgaggcctcacttcaktgctctgtacacatatggggcaattacatctggaagacaatgaagcagcaacttggagctctaattaaagacagaaatgggagcacaggattaaagccaaaattaaaggggtctattttcatttgagttgtacatttttccagtatcttctaccccagttctagcccaaccaatttactgaaaagtatgtaattcagaaacagatgaaaacttagtcattattttaaatactgttaagtactgggtgctattaactagtgggtagagctatggaaaattcaagttctgaccaacactgtcccatgctctgtataaatcataggcaatcagtgaccatagttagttactagactcttttttctagatgctaactaaacaattgcttagtggcctccagaaataccctgcactatccattccaactt

SEQ ID NO: 261471 - DNA, 591 bp, Homo sapiens
agcccaggctggattgcagtggcacaatcttggctcactgcaagctccgcctcccaggttcactccattctcctgcctcagcctcccgagtagctgggactacaggcgcccgccaccgcgcccggctaattttttgtatttttagtagagacggggtttcaccgtgttagccaagatggtcttgatctcctgaccttgtgatccgcccgcctcggcctcccaaagtgctgggattacaggcgtgagccaccgcgcccagcctattctatctacttttttcaaggctcaacaggtatagttaaaaagcatttgttcatctaatcttacagagacttccaaagttctggtgatcaataatatttactgagatcccacattttgcccaatacttctcagtgttctacagaataatygttgtgctcaaggtgtttacagactgaaaagaaaaatacgacatatgttgaatcacaaaatgtcagagttgaaaggacctgagaagctatctaatcaaacatattactctatggaggtatcttctctgcaatatactgatgaatagtgactccaacatacttataagtggtgagtcag

SEQ ID NO: 261472 - DNA, 552 bp, Homo sapiens
ttcctccctctacaacttttaggattaagggttctcttttaaaagggaagaggaaaatatgttaatggtgtttgaaccagagtgagtccatcttgaatagcggctgaataaaataaggctgagaactaccagcagcattcccagatagttaggcattctacaacacaggatgagacaggaggttggcacaagatataggtcataaagaccttgctgataaaacacgttgmagaaaagaagctggctaaaacccagcaaaagcaaggtggcgatgacagtgacctctggttgtcctcactgctgcactcccaccagcgccatgacagtttgcaaatgcgatgacaaggtcaggaagttaccctatatggtctaaaagggggaggaaccctcatttctgggaattgcccatgcttttccagaaaattcataaataatccatcccttatttagcatataatcaagaaataaccataaaaatgggcaaccagcagccccgagggaatagccattctttattcctttactttcttaaaaaacttgctttcactttac

SEQ ID NO: 261473 - DNA, 561 bp, Homo sapiens
gaactttgtactcttgactcctttacttacaaaggaatttagaaaatttagttcaatatctggctttagtgaacaaaattaggagctatcataaggatcacaaaaatggttatagaggcaaccctcattatttaccatggaaagatattatttacagacaatcggtttgtggaataatctaaaagaacctatgaagaaattactagaactaaaaatactagatgtatagacatagataaatatacaattgaattcctatataccagtgacagaaaataaataaaaaggattgctacaatagtgacaaatattattttatttgatttgatttttttcatagatagcctctctcttggttgcccaggctggagtgcagtggtgcaatcattgctcaatgaagccctaaactcgcrggctcaaaagatcctcctggctcagcctcgctgagcaggtgggactacaggcatgcgccatcacacccagctaattttttatttttattttgtagagatgaggttctcaatatgttgcccaagctggtctcaaatcctgacctcaaat

SEQ ID NO: 261474 - DNA, 599 bp, Homo sapiens
ctcctgcatcgttctctgactgcactrcattgtaaaccatggacagcaaagtctatgtcttactcatcttcatttccagaatccagaataccttacagcagttaaaggttctcactaagtatttgttgaatccaattcacagaaagcacttagaaataagtaagaatatacgctctttaaaaataccatcatttattgagcacatatcagggatcctaaactctgctaaatccatcgtgatcatgtgaaaatgctatcattattttcattttggagatgagaaaaattgaggtacagattgtaaatcccagtgctatctgatattgcttccattaagcactccttatttttattatttaatcacatataatcccttctgaaacaggttctgactttaggaatgcactctctttaggacagtcatttggtagtatcttaacccttagtgtcttttatgaataacaccaacattaagaagattgccaatatcgtcttatatgggggaatattgaaaaccccaccataatttcccactgtaaagttcttgtgaacagacatgactcttgggattgggcattgtttgttgctgtcattgacct

SEQ ID NO: 261475 - DNA, 599 bp, Homo sapiens
ctcctgcatcgttctctgactgcactgcattgtaaaccatggacagcaaagtctatgtcttactcatcttcatttccagaatccagaataccttacagcagttaaaggttctcactaagtatttgttgaatccaattcacagaaagcacttagaaataagtaagaatatacgctctttaaaaataccatcatttaytgagcacatatcagggatcctaaactctgctaaatccatcgtgatcatgtgaaaatgctatcattattttcattttggagatgagaaaaattgaggtacagattgtaaatcccagtgctatctgatattgcttccattaagcactccttatttttattatttaatcacatataatcccttctgaaacaggttctgactttaggaatgcactctctttaggacagtcatttggtagtatcttaacccttagtgtcttttatgaataacaccaacattaagaagattgccaatatcgtcttatatgggggaatattgaaaaccccaccataatttcccactgtaaagttcttgtgaacagacatgactcttgggattgggcattgtttgttgctgtcattgacct

SEQ ID NO: 261476 - DNA, 599 bp, Homo sapiens
ctcctgcatcgttctctgactgcactgcattgtaaaccatggacagcaaagtctatgtcttactcatcttcatttccagaatccagaataccttacagcagttaaaggttctcactaagtatttgttgaatccaattcacagaaagcacttagaaataagtaagaatatacgctctttaaaaataccatcatttattgagcacatatcagggatcctaaactctgctaaatccatcgtgatcatgtgaaaatgctatcattattttcattttggagatgagaaaaattgaggtacagattgtaaatcccagtgctatctgatattgcttccattaagcactccttatttttattatttaatcacatataatcccttctgaaacaggttctgactttaggaatgcactctctttaggacagtcatttggtagtatcttaacccttagtgtcttttatgaataacaccaacattaagaagattgccaatatcgtcttmtatgggggaatattgaaaaccccaccataatttcccactgtaaagttcttgtgaacagacatgactcttgggattgggcattgtttgttgctgtcattgacct

SEQ ID NO: 261477 - DNA, 580 bp, Homo sapiens
cattattgtcttcccgttgccctaaaggaatggttggctccatgttactcctcaaatacttgttgaataaaccactatgtgtactaaacattagcatcctcattttctgctaaggaagctgagactcagagctaaagtaacttcccaaggccttgtagctggtaaatgaagtcagaatctgtgttcaaatgtatcaaactccaaagcagtccctctttctttggtactgtgtggtctcccaagaggagggatttctatttccattttaattttgagaaaatggttagaatacaggacaaatcttcagagaawctcgattttagtcttagttccgtcagtaagtaatggtgaaatcttggggaagcaatttaagttttttgattctcaatgattgctttaatcattgaaggcaagaaaagtttctataatctcagtctttctttcagcaaccaaagtgtatgaccaatgagatctacatcatgtttaagtggatgatctgtagtatattcaactctgctttagttattaaggtcaaaaaatgtagagagatcttaggttcattttgttttcttttggctta

SEQ ID NO: 261478 - DNA, 630 bp, Homo sapiens
ttggtacctgggaatacatattaaaatcacattcagacacctctatcgaaacacttaaaaagactaaacttagagagggagagtatgagagagtctactaagaattgacaaggatatggagcaactgaaaatgtcatacactttttccagggaggtaaagtgataaactgctttgaaaaaaaaaaaaatttggcagtatatgttaaaggtgatcatgtgagtactctatgacccaggaattccacaccacgaaaggtgtacattcgttcaccaatagacacttgaccraaatattcgtaattgtcctattggtaatgataatatccagaaatagaccatatgtagataaaaatatcatggtatatatgctcaatagaacactatacatcaatgaagataaactatgatttcatgaaataacattatagctgtaatgttaagcaaatcattcatacttgcctgattttatctatacaaggttaaaatacaggcaaaagtactctatgtgttggaagtcaggatagtgagtatctttggtggggagctttggtgcctggaaagagagttttcggggtggtagaaatattctctatcttaatctttgtgatgattacagaggcctgttaactt

SEQ ID NO: 261479 - DNA, 320 bp, Homo sapiens
aatctttgaccacatatctgggcaccatggtccagccaagtcracacataaaattaaccatcacacatacatgatacatgtgtatatatgtaacataatcttttatatttaaacattgtcataagtgatatacattgcatgtatgtgtgtatttatctgggctgagagtttctagaacccagaaaaatcagaattaatacatctatgtttttcctataaatagcacatgtcccaatgtcccatgtttaacagatggtaatgtgttttgttttgtttttagagagagggtcttgctctgttgcccagactggagtgcagtg

SEQ ID NO: 261480 - DNA, 573 bp, Homo sapiens
tattttctatataagtaatatcaacactcacccagctacctaccttactttagtgcaaaatatttcctaacttagtgggaaatataaattgaagtatttaggagcaaagatgtgaaatgtctagaacttacttccagtgacttaaaataaacgtatagacagataaacagatggatacgtggaaaacaaaggaagagggtctcatggaaacagcgagtgaatctgggttaaagatttgtggtagttctttattctcttcctgaaacttttctctataaaattttgtcaaaacaaaattttattaaaaaattgaacctagtgtcagggcacrgtggctcacgcctgtcatcccagcactttgggaggccaaggcaggtgaatcacctgaaggcaggtggatcacctgaagtcaggagttcaagaccagcctggccaacatgatgaaaccccatctctactaaaaatacaaaatattcgctgggcatggtggtgcatgcctgtaattccagctactcaggaggctgaagcaggagaatcacttgaatcctggaggcagaggttgcagtgagccga

SEQ ID NO: 261481 - DNA, 455 bp, Homo sapiens
ggagaaaaacagaacgtagaaaaagagtaagtagaaagaaaaatatagaaatagacctgagttgatcaataatcaagttaatataagtgacatataatataagtaaattaatagaagtcatctatagcgcacatagtcatcagtgtgcatcttttcaaaaatcatccatgtattctttgtaagaatcacatccaaaaggcaaaacacacagttgtaaataagggatagaaaaatgtaaaccaagtgtcttattcccttttgtgctgctaggacaaaataccacagcctaggtagtttataattgayaggcatttatttgttacagtttggaggctgggaagtccaaggtcaaggccccaaaatatgttaagaaccttcctgatgtgtcatcacattgcagaaagcagaagggcaaaaagacaaacagggatcaaacttgccgttttataacggca

SEQ ID NO: 261482 - DNA, 455 bp, Homo sapiens
ggagaaaaacagaacgtagaaaaagagtaagtagaaagaaaaatatagaaatagacctgagttgatcaataatcaagttaatataagtgacatataatataagtaaattaatagaagtcatctatagcgcacatagtcatcagtgtgcatcttttcaaaaatcatccatgtattctttgtaagaatcacatccaaaaggcaaaacacacagttgtaaataagggatagaaaaatgtaaaccaagtgtcttattcccttttgtgctgctaggacaaaataccacagcctaggtagtttataattgacaggcatttatttgttacagtttkgaggctgggaagtccaaggtcaaggccccaaaatatgttaagaaccttcctgatgtgtcatcacattgcagaaagcagaagggcaaaaagacaaacagggatcaaacttgccgttttataacggca

SEQ ID NO: 261483 - DNA, 575 bp, Homo sapiens
tgccgttggctgtgagttcaatgttaatgaatcaacaatatataataaatayggtagatttaaacagaaacacataaaacaaagttatgtgttgactggttgataaaaatgaaggcccacaggaacctacctctgtacttcccctaggagcaatggttaagtattcactaattcagcatctgtggtgactttgtagactataactaccataaatagtgacaatagactacacttcttatagcaataaaattgctacattttaatgcagaaatattgtagcaacaacattaagaagatataccttctaataataaaggaatttcttgtattgaaataactctccagccaatagtagttatagactgtaaaaaatataataagcaatattttgaatgcacttgactgttactaaaaattagcataaactagaggagcttgaccctcgaaagaagaaaaccacagtgaaatctacatgcgtgcaacatttcctccagggacagtccgcgttcctttgtcacagtcagagagacccatgcaaaatccacactggtaccagctgagaagtcagcaggtgg

SEQ ID NO: 261484 - DNA, 575 bp, Homo sapiens
tgccgttggctgtgagttcaatgttaatgaatcaacaatatataataaatatggtagatttaaacagaaacacataaaacaaagttatgtgttgactggttgataaaaatgaaggcccacaggaacctacctctgtacttcccctaggagcaatggttaagtattcactaattcagcatctgtggtgactttgtagactataactaccataaatagtgacaatagactacacttcttatagcaataaaattgctacattttaatgcagaaatattgtagcaacaacattaagaagatataccttctaataataaaggaatttcttgtattgaaataactctccagccaatagtagttatagactgtaaaaaatataataagcaatattttgaatgcacttgwctgttactaaaaattagcataaactagaggagcttgaccctcgaaagaagaaaaccacagtgaaatctacatgcgtgcaacatttcctccagggacagtccgcgttcctttgtcacagtcagagagacccatgcaaaatccacactggtaccagctgagaagtcagcaggtgg

SEQ ID NO: 261485 - DNA, 643 bp, Homo sapiens
tgattcatttctcccaagccgcatgaaataggtaatattactagctcttttatatagacgagtaaactgagaattagtttacaaatcattggttacacatccacactatggatatacagctagcaagttagattccrtctcaaatcaagtgatcaaggctaaattctttaccattgtaattatctatcaagtattaaatggtttttttcttctggtctttctatctttgtacagatttatatttttagaacaaattgagattatactacctatactcagttggtctagttgtgttgctaataacattgtgagtatatctccatatcatagactaatcttcataaaatattgtgtttaatagctccatggcattctgctaagtgatatgtggtgaaatgtattagttatttattgctctgtcatcagtcattccaaaatctcagaagcttaaagctgcagatatgtataatctggcatggtttctgagagtcaggactctgggagcagctaggctgattggctcaggcttggattctcccacatggtcacagctgagatgttgagtgggaccatggtcatctcagggtttgactgaggcttgagctgcccacctccctcacggcactgctggctggagatgtca

SEQ ID NO: 261486 - DNA, 572 bp, Homo sapiens
aaatattacaattgagaatggtaggagctacatcctagccccctgtttagtctgtttggactgctacaacaaaatactttagactgggtcacttctaaacaacagaaatacattgtttacagttctggaggctgagaagtccaggatggaggtgtcagcagtttcaatgtctggtgagggtcctcttcttcatagatggtgccttctagttgcatcttcacacratggaaggggcaagcaagctcgctggggtctcttttataaaggcatcatcccaatcatgaaggctcttcactcatgtcctaagtgtcccccaaagactccatcttctaatactattaccttaaggcttaggatctcaacataggaattttgagggaacacaaacattcaggccatagcacctgggcttaaatctaggtgaaattttgtggcttccccaaccaatagggtatggcagaaatgacactatgtgacctctgagtaggtcttgatagatgttgtgcacttctgctttattttcttggaatatttgctcttagaatccagctgccatgctgtgaggaagccag

SEQ ID NO: 261487 - DNA, 639 bp, Homo sapiens
cacctgtcagggtgatctcagaggagaaggtaattagagtgagacatgccttctgagtgaataygacccaagtgccaaggcaaggcaagccccaaaagagttaaggatagcagaaatgaaaacacactgagagtaaaattggcaaaacttatttactgattggatacagggtgagatgaagagatgggttaagggtgagtgacagattgctactggggtggctaactgctggacagtcacagttcaggaattcaggagcaggagctgacttcagaaagatgaggagcttgactgtagacatttcaagctatgagaggagcccatgctttgtccaaatggagagaggtccatcagccaattggttaagtgaagcccagaatagagatctgagtcatggatgtagattgaacagtcatcagtggatgggtttgagttattatagaagtcaggaaaagcaaggagcgtcacccagagcgacttgctgagttagctaagaagggaaggtgaaacccaggaagatcccaacatttaaaattcacatggagtagaggtgctcaacaggaagccaaagttaaaagattgggaaacacaaagatgagcaaggaacatcatttcctagaagcaaaaggagcaaagaat

SEQ ID NO: 261488 - DNA, 639 bp, Homo sapiens
cacctgtcagggtgatctcagaggagaaggtaattagagtgagacatgccttctgagtgaatatgacccaagtgccaaggcaaggcaagccccaaaagagttarggatagcagaaatgaaaacacactgagagtaaaattggcaaaacttatttactgattggatacagggtgagatgaagagatgggttaagggtgagtgacagattgctactggggtggctaactgctggacagtcacagttcaggaattcaggagcaggagctgacttcagaaagatgaggagcttgactgtagacatttcaagctatgagaggagcccatgctttgtccaaatggagagaggtccatcagccaattggttaagtgaagcccagaatagagatctgagtcatggatgtagattgaacagtcatcagtggatgggtttgagttattatagaagtcaggaaaagcaaggagcgtcacccagagcgacttgctgagttagctaagaagggaaggtgaaacccaggaagatcccaacatttaaaattcacatggagtagaggtgctcaacaggaagccaaagttaaaagattgggaaacacaaagatgagcaaggaacatcatttcctagaagcaaaaggagcaaagaat

SEQ ID NO: 261489 - DNA, 632 bp, Homo sapiens
gtaactaggaagtaattaacttgcttttgattttacaggctcataggcagaaagaactagtcttgtctcaggtgaaactttggactgtggatttttgagttaatgctgaaatgagctaagactttgggggactattaggaaggcatgactgattttgaaatatgaggacgtgagatatgggaggggccggggtggaatgatatggtttggctgtgttcccacccaaatctcatattgaattcccatgtgttgtgggagggacctagttggaggtaattgaatcatggggcaggtctttcccgtgctgttctcrtgatagtgaatacatctcacaagacctgatggttttaaaaacaggagtttccgtgcacaaactctttcacttttggcatgctgccattcatgtgagacatgacttgctcctctttgccttcttccatgattgtgaggtctccccagccatgtggaaatgtaagtccattaaaccatttttttcttttcttttttttttgtaaattgcccagtcttgagtacgtctttatcagcaacataaaaatggactaatacaccaagtatccttttaaaccttgatctaaaaagtcaaggatctttggtaattgaatcttcctata

SEQ ID NO: 261490 - DNA, 485 bp, Homo sapiens
tgggaggtgaagagtttaagatatgratcttagggaaattcaagagctaacagacaccacaccagagcagttaacagaaggtgaatctccagctagtagctggagatgagtacttccaagccagtgccagatgatgaggaagaagatatcgaagaaacagtatcaggaaacaaattgacagtagacaatctggtagaagggttctggttatgtgatactgcttccgtcttatttcacaacatggccccttccatgatatgggcactgaaactaaagcaaacaatggaagaagggttggtaccatacagaaatatatttagagaaatgaaaaagcaaaaaaatccagactgatattttcataaagttacactgagtgtgcctgtctctcctgcttccctttctatctcctctacctctgtcactcatgagacagcaagaccaacccctcctctttcttctttcctcagcctttttaatgggataat

SEQ ID NO: 261491 - DNA, 512 bp, Homo sapiens
ttgggaggtgaagagtttaagatatggatcttagggaaattcaagagctaacagacaccacaccagagcagttaacagaaggtgaatctccagctagtagctggagatgagtacttccaagccagtgccagatgatgaggaagaagatatcgaagaaacagtatcaggaaacaaattgacagtagacaatctggtagaagggttctggttatgtgatactgcttccgtcttayttcacaacatggccccttccatgatatgggcactgaaactaaagcaaacaatggaagaagggttggtaccatacagaaatatatttagagaaatgaaaaagcaaaaaaatccagactgatattttcataaagttacactgagtgtgcctgtctctcctgcttccctttctatctcctctacctctgtcactcatgagacagcaagaccaacccctcctctttcttctttcctcagcctttttaatgggataatgatgaggatgaagaactttatgatga

SEQ ID NO: 261492 - DNA, 512 bp, Homo sapiens
ttgggaggtgaagagtttaagatatggatcttagggaaattcaagagctaacagacaccacaccagagcagttaacagaaggtgaatctccagctagtagctggagatgagtacttccaagccagtgccagatgatgaggaagaagatatcgaagaaacagtatcaggaaacaaattgacagtagacaatctggtagaagggttctggttatgtgatactgcttccgtcttatttcacaacatggccccttccatgatatgggcactgaaactaaagcaaacaatggaagaagggttggtaccatacagaaatatatttagagaaatgaaaaagcaaaaaaatccagaytgatattttcataaagttacactgagtgtgcctgtctctcctgcttccctttctatctcctctacctctgtcactcatgagacagcaagaccaacccctcctctttcttctttcctcagcctttttaatgggataatgatgaggatgaagaactttatgatga

SEQ ID NO: 261493 - DNA, 610 bp, Homo sapiens
ttgcagtcatatttactcattgtaaaaattttttaaaaagccaatttgcagcaccatataacatagacactacagatcaccagcaatcttatcctctcctcagccaaagaagacagtttggtgtatttttgtccagatatgtttttctttttaaataactttaaaatgaaatatacatttcaaagaaggttcttctactctttccacctgcctcctggtttaagaaacagagcattatgatgaatgctttggaagccctctgtgtccctttctcaactgtgtcttctctttccagaggtaaccactatcctgaatttgatatttattattcctttgcttttygtcataattttgtaacataagatatattaaaagtctttttgcaaacaacattgcttagttttgtatgttttgaacctttatatacatagagtcattctctataaatattgcacaattttatccaggataagagaacactgaatgtgttagtacctgtaagagtttcagtagtatttatagctaaaaagagaatttctggtactaggggacattcatttcttcagcttcactaaatattacataattatctttaaagtggttatactaa

SEQ ID NO: 261494 - DNA, 610 bp, Homo sapiens
ttgcagtcatatttactcattgtaaaaattttttaaaaagccaatttgcagcaccatataacatagacactacagatcaccagcaatcttatcctctcctcagccaaagaagacagtttggtgtatttttgtccagatatgtttttctttttaaataactttaaaatgaaatatacatttcaaagaaggttcttctactctttccacctgcctcctggtttaagaaacagagcattatgatgaatgctttggaagccctctgtgtccctttctcaactgtgtcttctctttccagaggtaaccactatcctgaatttgatatttattattcctttgctttttgtcataattttgtaacataagatatattaaaagtctttttgcaaacaacattgcttagttttgtatgttttgaacctttatatacatagagtcattctctataaatattgcacarttttatccaggataagagaacactgaatgtgttagtacctgtaagagtttcagtagtatttatagctaaaaagagaatttctggtactaggggacattcatttcttcagcttcactaaatattacataattatctttaaagtggttatactaa

SEQ ID NO: 261495 - DNA, 546 bp, Homo sapiens
ctttttgcaaacaacattgcttagttttgtatgttttgaacctttatatacatagagtcattctctataaatattgcacaattttatccaggataagagaacactgaatgtgttagtacctgtaagagtttcagtagtatttatagctaaaaagagaatttctggtactaggggacattcatttcttcagcttcactaaatattacataattatctttaaagtggttatactaatttataattcccagtagtagcatataattgttcttgtccttcacatttttgccaayaattggctattgtcagatgtcttaaatttttcagtttggttggccccaagtagtgtcacattgggacttacttacattttcattcctctagttactaataactttgagcatcttttcctacgtttgcttttcaaacaaggtctgtcacccaagttggagggcagtggtgtattcacagttcactgcagcctcgacctcctaggctcaggtcatccacctcagcctcccaagtatctgggactacaggtgcacgtca

SEQ ID NO: 261496 - DNA, 546 bp, Homo sapiens
ctttttgcaaacaacattgcttagttttgtatgttttgaacctttatatacatagagtcattctctataaatattgcacaattttatccaggataagagaacactgaatgtgttagtacctgtaagagtttcagtagtatttatagctaaaaagagaatttctggtactaggggacattcatttcttcagcttcactaaatattacataattatctttaaagtggttatactaatttataattcccagtagtagcatataattgttcttgtccttcacatttttgccaataattggctattgtcagatgtcttaaatttttcagtttggttggccccaagtagtgtcacattgggacttacttacattttcattcctctagttactaataactttgagcatcttttcctaygtttgcttttcaaacaaggtctgtcacccaagttggagggcagtggtgtattcacagttcactgcagcctcgacctcctaggctcaggtcatccacctcagcctcccaagtatctgggactacaggtgcacgtca

SEQ ID NO: 261497 - DNA, 633 bp, Homo sapiens
taaataaacttcgttgtgatgcttacaagtttaatatcttaaacttgtatctttaatgttttaaaagactggccaattaattttgtccttgtaagcttttaggatcaaggttatgctagtctcattaaaaaaaaagtaagcatttttcacttcccattttctaaaatctttgtgtaagattagtgttatttcttcctaaaatgtttactaaaattcaaatgtgaagacatatgggtctggagccttctttgtgggcaggttttttattagattcaatttctctaatagctataagactatttctattttctgtttcttggtgtatcagttttggaagttcttytttcaaattcacatgaaattgttcatactatcctcttatctctgtaaatgtctttgagatctatagtcttgtctcttttttcaattcctgatatgggtagttactgtctattcttgtccttgaatacttgctaaggcggggttggggtcctttcaaagacatgacttttggcttcattgatttttcttgtacattttcccccatttcattaattctattcatcttatttccttgctcccattttactttcttcttgttctactgagtttttgaaaggaatatttagagag

SEQ ID NO: 261498 - DNA, 633 bp, Homo sapiens
taaataaacttcgttgtgatgcttacaagtttaatatcttaaacttgtatctttaatgttttaaaagactggccaattaattttgtccttgtaagcttttaggatcaaggttatgctagtctcattaaaaaaaaagtaagcatttttcacttcccattttctaaaatctttgtgtaagattagtgttatttcttcctaaaatgtttactaaaattcaaatgtgaagacatatgggtctggagccttctttgtgggcaggttttttattagattcaatttctctaatagctataagactatttctattttctgtttcttggtgtatcagttttggaagttcttctttcaaattcacatgaaattgttcatactatcctcttatctctgtaaatgtctttgagatctrtagtcttgtctcttttttcaattcctgatatgggtagttactgtctattcttgtccttgaatacttgctaaggcggggttggggtcctttcaaagacatgacttttggcttcattgatttttcttgtacattttcccccatttcattaattctattcatcttatttccttgctcccattttactttcttcttgttctactgagtttttgaaaggaatatttagagag

SEQ ID NO: 261499 - DNA, 631 bp, Homo sapiens
attcagtaggtatttattagaaatctatgaggtaccaacatctatgtgaagtcctggttataatgcaaagaagccagtctagtgaatagacaaatgaatttattaaattaaaatacaatgatatatgtcatgagatgttcaagagctatgggggtacgtagagaaatatctgaggagggtaaagaataggagaagtttccccggctgaatcttaaaagtaaggtattttaagatgctactataccattaccacttaacaagtaaggaaaaaaaaaattacaaaaaaaaaaaaaaaaaagaaaasagccatatgattacatgaaaattgaataccttctcctgaatgatttttaggtagacaatgaaattaaggcagaaatcaagaagttacttgaaactactgagaacagagatacaaaataccggaatctatggaatccgactaaggcagtattaagagggaaatgtatagcactgaatgcccatatcacaagttagaaagatctcaagttaacttacaacttaacatcacaactaaaagaactaggaaaccaagagcaaacaaatcccaaagctagcagtagacaagaaataaccaaaatcagagctgaattgaaggagattgagataa

SEQ ID NO: 261500 - DNA, 583 bp, Homo sapiens
aagttatagaaggtgtgtcctgggaacagctgcaaaggaactgaagtgaggttaagcctggattgtttgaggttgaggacraaggccatcctagagcatgagggaaggagaatgtacaagatgaggttcaaagtatgggccattaaagccatgacaaggagtttaggtttttattctaatagagttatagtataatagtagttaacagtatgaatatgagccacatcaccttggttcaaatcctagctctgccacttagtttacttctctgtacttatttccatatcttttaaatggaggtagtaaggtgataaggttgataacagagttaaatgactcaatatttgtaaaatgctaaacatagaacctaggacattgttttacttaaattgtatgtttgtaaatataaaagttaagtaaataatgagataccattgaaaggttttaagtaggagagtaacttgatctttacattaaggaaaaaaattattcatctagtgtgtagaaaatatgtgttagaggacaagacctgtctcttcggcttatgacccatatattcaactgcctacccaacatcttttct

SEQ ID NO: 261501 - DNA, 583 bp, Homo sapiens
aagttatagaaggtgtgtcctgggaacagctgcaaaggaactgaagtgaggttaagcctggattgtttgaggttgaggacgaaggccatcctagagcatgagggaaggagaatgtacaagatgaggttcaaagtatgggccattaaagccatgacaaggagtttaggtttttattctaatagagttatagtataatagtagttaacagtatgaayatgagccacatcaccttggttcaaatcctagctctgccacttagtttacttctctgtacttatttccatatcttttaaatggaggtagtaaggtgataaggttgataacagagttaaatgactcaatatttgtaaaatgctaaacatagaacctaggacattgttttacttaaattgtatgtttgtaaatataaaagttaagtaaataatgagataccattgaaaggttttaagtaggagagtaacttgatctttacattaaggaaaaaaattattcatctagtgtgtagaaaatatgtgttagaggacaagacctgtctcttcggcttatgacccatatattcaactgcctacccaacatcttttct

SEQ ID NO: 261502 - DNA, 597 bp, Homo sapiens
attgttttacttaaattgtatgtttgtaaatataaaagttaagtaaataatgagataccattgaaaggttttaagtaggagagtaacttgatctttacattaaggaaaaaaattattcatctagtgtgtagaaaatatgtgttagaggacaagacctgtctcttcggcttatgacccatatattcaactgcctacccaacatcttttcttgaatgccttagaacagtagttctcaaacttttttgactcagggtccctttattgataatcactgtattagaaatgggaaaaaaaaacctagrtaacatttttatgaaaaataaccattttctaaaacaaaaaattgagaagagtaacattgttttactattttacaaatctctttagtgtctggataatagacatctgaattcttgtatctgattttgaattcactctgttgtgatattatacatcatgtagcctctggaaaactccagtgtacatttatagaagcatgaaagtggaaaagacaaataatcttttgatattatggaaatagtgtccatctcctggacccttggaagtcagtcttcaagatatcccagaatgtccaaa

SEQ ID NO: 261503 - DNA, 589 bp, Homo sapiens
ttgagacttccttttgagacttcacttaaagagttcgtaaagtaattgggagattactcagagagcagtaaatgaccttgaataatcaaacmccaaggaatgtgatagaaaccatttggcgttcggaatctagtagttgtaagacagcttcatgtagaggtagagtctgagctgagccttaagatttaggtaagcagaggaaaaagaattggcagcctcaggaagtaaattgggcaaggagtagggaaggcacaggggacacaaacctggttggagtaggtttcctgttgaggaaagcaggttgagcgggtaggacagatactgtattttggaatgctttcaatcctaggtggagtagtttaggtttaatgctgtagataaatagtagctactatagatttatttaatagtggtttttacaagattagtagatagaatagatttgaggctgggaggctggagagacaaaagaacctcatagtcaagatgagttgagaagaacctgggctaaggaagtagtggtaggaatataaaggaatagaatttgaaaatatttcaagagaaaaatgtagagttccttgtgacagaa

SEQ ID NO: 261504 - DNA, 589 bp, Homo sapiens
ttgagacttccttttgagacttcacttaaagagttcgtaaagtaattgggagattactcagagagcagtaaatgaccttgaataatcaaacaccamggaatgtgatagaaaccatttggcgttcggaatctagtagttgtaagacagcttcatgtagaggtagagtctgagctgagccttaagatttaggtaagcagaggaaaaagaattggcagcctcaggaagtaaattgggcaaggagtagggaaggcacaggggacacaaacctggttggagtaggtttcctgttgaggaaagcaggttgagcgggtaggacagatactgtattttggaatgctttcaatcctaggtggagtagtttaggtttaatgctgtagataaatagtagctactatagatttatttaatagtggtttttacaagattagtagatagaatagatttgaggctgggaggctggagagacaaaagaacctcatagtcaagatgagttgagaagaacctgggctaaggaagtagtggtaggaatataaaggaatagaatttgaaaatatttcaagagaaaaatgtagagttccttgtgacagaa

SEQ ID NO: 261505 - DNA, 640 bp, Homo sapiens
caggaagtaaattgggcaaggagtagggaaggcacaggggacacaaacctggttggagtaggtttcctgttgaggaaagcaggttgagcgggtaggacagatactgtattttggaatgctttcaatcctaggtggagtagtttaggtttaatgctgtagataaatagtagctactatagatttatttaatagtggtttttacaagattagtagatagaatagatttgaggctgggaggctggagagacaaaagaacctcatagtcaagatgagttgagaagaacctgggctaaggaagtagyggtaggaatataaaggaatagaatttgaaaatatttcaagagaaaaatgtagagttccttgtgacagaattgatctgggaatagcagattaagagacaaagacaatgccatacttctagtaaagaactagaattgtaggtgtatcaagagtagaaatagggagattggaaaccggtgaattttaatctatgctttgagttttcctagcctctgaatggactgtaggtcctgagctgagtttttctttcaggagtatataacttggcttatggtctattacctcagtcatgaccaagaaaacctgaagaaaaatataagtacaaaggtttccagaagtt

SEQ ID NO: 261506 - DNA, 640 bp, Homo sapiens
caggaagtaaattgggcaaggagtagggaaggcacaggggacacaaacctggttggagtaggtttcctgttgaggaaagcaggttgagcgggtaggacagatactgtattttggaatgctttcaatcctaggtggagtagtttaggtttaatgctgtagataaatagtagctactatagatttatttaatagtggtttttacaagattagtagatagaatagatttgaggctgggaggctggagagacaaaagaacctcatagtcaagatgagttgagaagaacctgggctaaggaagtagtggtaggaatataaaggaatagaatttgaaaatatttcaagagaraaatgtagagttccttgtgacagaattgatctgggaatagcagattaagagacaaagacaatgccatacttctagtaaagaactagaattgtaggtgtatcaagagtagaaatagggagattggaaaccggtgaattttaatctatgctttgagttttcctagcctctgaatggactgtaggtcctgagctgagtttttctttcaggagtatataacttggcttatggtctattacctcagtcatgaccaagaaaacctgaagaaaaatataagtacaaaggtttccagaagtt

SEQ ID NO: 261507 - DNA, 580 bp, Homo sapiens
acatggacacagggagaggaacatcacatacttgggcctgtcagggggtggggggctaggggagggatagcattaggagaaatacctaatgtagatgacgagttgatgggtatagcaatccaccatggcatgtgtatacctatgtaacaaacctgcatgttctgcatatgtaccccagaacttaaagtatattaaaaacagaaaaagaaaaataataattcaacaaagcctctaagaaatttgggattatgttaatcagccaaacctawgaataattggtgttcctgaggaagaagggaaatctaaaagttcagaaaacttatttgccggaataactgaggaaaacttccctggcattgctagaaatctagatatccaaatacaagaagctccaagaactcctgtgaaattcatttcaaaaatatcatcacctaggccatagtcatcaggttatctaaaatcaaggtgaaggaaagaacctttaaaaagctgtgagacaaaagaatcaggtatctataaaggataacctatcagattaacagcagatttgtcagcagaaaccttatcagccaggaaggat

SEQ ID NO: 261508 - DNA, 517 bp, Homo sapiens
tattaaaaaatggtgccgggataattggcaagccacatatagaagaatgaaactggatcttcatctctcatcttatacaaaaatcaacctaatatggatctaagccttaagtctaagacctgaaaccataaaaactctagaagataaaattggaaaaactcttctagaaattggcttaggcaaagacttcatgaccaagaacccaaaagcaaatgcaacaaaaacaaaagtaaatagatgggacctaattaaactaaaaagcttatgcacagcaaaagaaagaatcagcacattaaatagacaacccaccgagtgagagaaaatattcacaaaccatgcatctgacaraggaatctacaaggaactcaaatcagcaagaaaaaaacaaacaaacccatccaaaagtgggctaaggacatgaatagacaattctcaaaagaagatatacaaatagtcaataaacatatgaaaaaatgcttgacaccactaattatcagggaaatgcaaattaaaacca

SEQ ID NO: 261509 - DNA, 595 bp, Homo sapiens
ttttaaaaacctataactagtaaaaagattagattagtagtgaaaaatatcccaacaaagaaaagcccaggaccagatggcttcactggtgaactcttaagacatatttaaagaattaaaaccaatcctcctcaagctcttccaaaatattaaagaagagggaaaactttcatttgaggtagttttcattctattggaaaacttccattttttgaggcaacattaacctaatctcaaagtcatgaaaaaacagtacaagaaacaaaaactacaaaccaatatcctcgatgaatactgatacgagaatcttcaacaaaatrctagcaaacagaacttaatagtacattgaaagaattatacactcagaccaagtgaaattaattcttggaaaacaaagatggttcaacatacagaacaaacaaaaatattagtttaatacatcagattaatgaagaaaatcttcatactatctcaattgattagaaaaaacatttgacaaaattgaacaccctttcatgattacaacacttacagtagaaaaacttcagtagtttttctctattcctagtttgagtgttttaatcataaaatgccc

SEQ ID NO: 261510 - DNA, 577 bp, Homo sapiens
gaaaactttcatttgaggtagttttcattctattggaaaacttccattttttgaggcaacattaacctaatctcaaagtcatgaaaaaacagtacaagaaacaaaaactacaaaccaatatcctcgatgaatactgatacgagaatcttcaacaaaatgctagcaaacagaacttaatagtacattgaaagaattatacactcwgaccaagtgaaattaattcttggaaaacaaagatggttcaacatacagaacaaacaaaaatattagtttaatacatcagattaatgaagaaaatcttcatactatctcaattgattagaaaaaacatttgacaaaattgaacaccctttcatgattacaacacttacagtagaaaaacttcagtagtttttctctattcctagtttgagtgttttaatcataaaatgcccaatcttaccactcctattcaacatagtactggaagtcctagccagtgcaattgggcaagaaaaataaataaaaagcatttatattagaaaagaagaagttaaattatctctgttcacagatgatgtaatcttataaacagaaa

SEQ ID NO: 261511 - DNA, 595 bp, Homo sapiens
ttttaaaaacctataactagtaaaaagattagattagtagtgaaaaatatcccaacaaagaaaagcccaggaccagatggcttcactggtgaactcttaagacatatttaaagaattaaaaccaatcctcctcaagctcttccaaaatattaaagaagagggaaaactttcatttgaggtagttttcattctattggaaaacttccattttttgaggcaacattaacctaatctcaaagtcatgaaaaaacagtacaagaaacaaaaactacaaaccaatatcctcgatgaatactgatacgagaatcttcaacaaaatgctagcaaacagaacttaatagtacattgaaagaattatacactcagaccaagtgaaattaattcttggaaaacaaagatggttcaacatacagaacaaacaaaaatattagtttaatacatcagattaatgaagaaaatcttcatactatctcaaktgattagaaaaaacatttgacaaaattgaacaccctttcatgattacaacacttacagtagaaaaacttcagtagtttttctctattcctagtttgagtgttttaatcataaaatgccc

SEQ ID NO: 261512 - DNA, 567 bp, Homo sapiens
ctgattaagaagcatagcatgatctcatcaggcctggacaagtattgatgggctggggtatcatggggctaataaagagtgttatacagtattttttagtgacacataaaaactccctcatgaaagatacggaggcagagcgtaatatatatgtcattctaggaacagtggtattagggtgtctattgctggacattagtgatttcattaatgcactaagacaggcctctgttagggataagtggtggggagtgggcactggtgggtcagaaggaatgcaaagggaaggccctcacagaacaaagggccctgtaggtttctaggtctttctagatatgcagtaatctaataaaatacttcagatgactaggaaaagaataatttaattcaacactttatttacccatcttcaactttgcttttccccaaaacactatttaaaatatttcagaagggatgaggtgttgaaaggcagaaktgcttttgaatttttctttttttactcattatacctttaagttcaatctgatccactctactccttggattactgggaggaagaagaat

SEQ ID NO: 261513 - DNA, 634 bp, Homo sapiens
cataagggggataaaggataatttaaagtagtcaaaccttttttttttttacagtatcaaagcagttttattatactcagttgtctagcatccattcccatcaggggccacttaacacagctactaatgagcaggatccctgtaagtccataaacacctgctacggttatgggtggagacaaggagtaaatattagactgtaagctcccctactacattataaactcttgaggacaggaactgtgttacaatctyctttatgcacactgcagcacccagcataggatgctagcacataaaagaggataaacaaatgtttataactcttctctttccctcctacttaccttttcattgtcattactccatcactgtaaaataatgtgtctctctcctgccccttttttcatgtcttcagtgcttgccttagtgcctgacagtagacccacaagcagcatttaaccttgccaatggcaagcagaactaagtgagacagaaataaatatttgactctcccagatgttaaaccctcatgcagaatgatgagaaagattgtaaaatcatttccccaggaggtttctgaaaacatagaatacctagaatgattcaggggtaaagatctaccttgacacat

SEQ ID NO: 261514 - DNA, 588 bp, Homo sapiens
gttaagttttgatactcactagaagtcttcctcagaccaggaaacaatggcagggcagtgagttccagtgccttgttttggttttggtactcactatacatcctcccccaaatgggaagaaacagcagcctgtagattaagtttcaacacaaagtagtgaaggtctaactccaccaaataacacttgggcagaagctggaagaggtggccatctcttcaaatgtgcaggtaccaatgtaaagacacaaggaaagtgaaaactcagggaaatatgacatcaccaaaagaaaccaacaaagctccagtaattgaacsagaaaatttgaaaacctattaaatgtctgacaatgaattcagaataatcctctcaaggaatttcagggatcataagaaaatacacgtagaatattaaatgagatttggaaaacaatatagaaacaaaatgagagatttgacaaagaaatagaaacaatttttaaaaaccaaatagaaattctagaaataaagaatataataacggaactgaaaaactcatcggaaaacctcagcagcaggcttgaccaaacaggagaaagaatcagtgaactc

SEQ ID NO: 261515 - DNA, 615 bp, Homo sapiens
ccattcaacccagcagtccctttactgggtatatacccaaaggaatataaatctttctattataaagacatgcacatatatgttcactacagcactattcacaatagcaaagacatggaatcaacccagatgcccatcagcgatagactggataaagaaaatgtagtacatatacaccatgaaatactacatggccatagaaaagaatgaaatcatgtcctttgcagggacatggatggagctgggtgctattatccttagcaaactaatgcaggaacagagaaccaaatattacatgttctcacttgtaagtgggagctaaatgatgagaatgcatggacacatggaaggcaacaatacatacgggggcctatcggagggtggagggtgggtgtatatgtatatgcacccaacattggagcaccwaaatttataaaacaaatatgaatagacctaaagggataggtagactatagtacaataaataatagtaagggacttcagcaccccaccttcagcaatagacagaacatccagacagaaaatcaacaaggaaacatccggagttaaactgcaatctagaccttatttacagagcattccatccaacagctg

SEQ ID NO: 261516 - DNA, 513 bp, Homo sapiens
atgtaggttgattctatagtttagctattgtaaatagtgttacaataaacatagagtgcagatatctcttcgacattcggatttcatgtccttgagatatataccgggaatgacattgctggatcacatggtagttctatttttagtttttcaggaatcgccacactgttttctatagtggctgtactaatttacaattatgaccttcttttttttttttttttttttttttaacaatttttgacttaattccaccaacagtgtatgagtgttcactgttctttarattctcactggcacttgttttctgttgtgtttttgataacagccactctaattggagtgaagtgttatctcattgtgtttttaatttgtgtttccctggtgatttgtgatgtggagcattttcttttttcgtatacctcctggccatttgtatgtcttcattgagtaatgttaattaaggtcttttctttgcccatttttaaattgggttatttgttgttgttgttg

SEQ ID NO: 261517 - DNA, 513 bp, Homo sapiens
atgtaggttgattctatagtttagctattgtaaatagtgttacaataaacatagagtgcagatatctcttcgacattcggatttcatgtccttgagatatataccgggaatgacattgctggatcacatggtagttctatttttagtttttcaggaatcgccacactgttttctatagtggctgtactaatttacaattatgaccttcttttttttttttttttttttttttaacaatttttgacttaattccaccaacagtgtatgagtgttcactgttctttagattctcactggcacttgttttctgttgkgtttttgataacagccactctaattggagtgaagtgttatctcattgtgtttttaatttgtgtttccctggtgatttgtgatgtggagcattttcttttttcgtatacctcctggccatttgtatgtcttcattgagtaatgttaattaaggtcttttctttgcccatttttaaattgggttatttgttgttgttgttg

SEQ ID NO: 261518 - DNA, 513 bp, Homo sapiens
atgtaggttgattctatagtttagctattgtaaatagtgttacaataaacatagagtgcagatatctcttcgacattcggatttcatgtccttgagatatataccgggaatgacattgctggatcacatggtagttctatttttagtttttcaggaatcgccacactgttttctatagtggctgtactaatttacaattatgaccttcttttttttttttttttttttttttaacaatttttgacttaattccaccaacagtgtatgagtgttcactgttctttagattctcactggcacttgttttctgttgtgtttttgataacagccactctaattggagtgaagkgttatctcattgtgtttttaatttgtgtttccctggtgatttgtgatgtggagcattttcttttttcgtatacctcctggccatttgtatgtcttcattgagtaatgttaattaaggtcttttctttgcccatttttaaattgggttatttgttgttgttgttg

SEQ ID NO: 261519 - DNA, 513 bp, Homo sapiens
atgtaggttgattctatagtttagctattgtaaatagtgttacaataaacatagagtgcagatatctcttcgacattcggatttcatgtccttgagatatataccgggaatgacattgctggatcacatggtagttctatttttagtttttcaggaatcgccacactgttttctatagtggctgtactaatttacaattatgaccttcttttttttttttttttttttttttaacaatttttgacttaattccaccaacagtgtatgagtgttcactgttctttagattctcactggcacttgttttctgttgtgtttttgataacagccactctaattggagtgaagtgttatctcattgkgtttttaatttgtgtttccctggtgatttgtgatgtggagcattttcttttttcgtatacctcctggccatttgtatgtcttcattgagtaatgttaattaaggtcttttctttgcccatttttaaattgggttatttgttgttgttgttg

SEQ ID NO: 261520 - DNA, 562 bp, Homo sapiens
gtgtcatacaaaacctcataaagacatttctagatttttttggtcaaaattttgttacatacttacagaaaaattcccttaaatccaggcaagagggatcccattctggacccttttcttgaaaactaggctgtatcctcctgtagctcatgccactccctgctgggtaagatctcagggccctgagatatactcttcttcacctggagaacctctttcagctccttcctggtctgtctacagagggtggatgaacaattgagaaagcttattctaaaaggcctgggctggtcaaggggcacctctacagaagctggggtcacttatccttgggaaggaacaggattgagacagagaccagttctccctaagttgccattcactagtgtggggctctaaggagtccaagaatcctaggaaccttaggtatatttgctgaggtaggaaaagtttcttagcttgatttaaacctcctaaatattcargtatacagtatgtgaacctccatttttactcttgacagggcactgcaaacataaacattagagctaaagactgtatg

SEQ ID NO: 261521 - DNA, 617 bp, Homo sapiens
ttacacatagtgtacagtgtttattaactttacatcattttatccttgccttactatctggacagtgtagactgcctatattcctagttagttggggttgggatctcttctcttagagtggcccagcagttttagcccctctctaattctcttttcctgtgttgggagatatcaaaacaacagaattcttgccagtgggaacatttttcttttttagacaaggtctcattctgtcaccccagctggagtgcrgtggcacagtcttaattcactacagccttgaactcctgggctcaagaaatctttctgcttcagcctcctaaatagctggtactataggtgcgtgccaccacacccagctcatgggaataatttttacactccttcagaaggagtcatttgtgattggagtccacgtagaaacaggtttccctctgtacataatcgtaggtaccaaaatattactgtgtaaagtgttgtttatataggtcaatttttgtggaagatctaatttctattttcagagaacagagcacattaaaaaatctatttagtattgtgtactatataatttatgtgaattatatagctccttaactaaatatattactgagttt

SEQ ID NO: 261522 - DNA, 577 bp, Homo sapiens
tgagtagagatcagaaaacatcctattttctgctgctttgctgtcttaaatgctcacggtattccccagtgacacatatgatcttccagtcattcattacagttggaataacactcatatcctctactagaaccaaacacaacttcctctgcttggagtgaactgaaatgacatattgcttcagcaaagccctgtgtctcaatgaccttgataattcaggtgtcttagtaaaaattacatgcaatgctaagatttttaagttctattaatattattcactccaggaaatcaaagaaagatttagaattaaaggctaataacctcctttgtggggtggaatagaaaatattccaaataacttgtgattcttattctgaagaaaaaagttctcttctctccagttttcaaattgcaaattaaggtgaaaatagaaaagtgatatttgaccaacttgacatattctatataaattacactgggttgtaagttcattggaaaagacaaagtaatatgtgattgcaaacaagttactgcasagacctgttctaccacattcagttttcactgcgagatgaca

SEQ ID NO: 261523 - DNA, 537 bp, Homo sapiens
ttcaccaggcttggtagcatgytcactcactgccttccttggctgtggatgagggctcccctgccccatgtggctctcaggtgggccgtcacactacacagatcttccttcatctccatgggtcgtgccagccacctagtcagtcctgatgacagaacctggatcttatttgccattgcaggattcggacgctattttggttcttttcaatgagagcctccaattgctgctgcttctagtctgccatcttggcctcactaatcccagttatgttctttttgctcaagactgatttgactattcattcttttgtggtcccactcaaattttagaattgtttttcatatttctgtgaaaaatgttgttgaaattttgatagggactgcactgaatctatacagcactttgtgttgtatgaacttttaaacattaattcttccaatccatgaacatgggatattttttcatttgcatattcttcaatttctttcttcaatgttttatagatttcagtatacagaactttcacctccaaag

SEQ ID NO: 261524 - DNA, 537 bp, Homo sapiens
ttcaccaggcttggtagcatgttcactcactgccttccttggctgtggatgagggctcccctgccccatgtggctctcaggtgggccgtcacactacacagatcttccttcatctccatgggtcgtgccagccacctagtcagtcctgatgacagaacctggatcttatttgccattgcaggattcggacgctattttggttcttttcaatgagagcctccaattgctgctgcttctagtckgccatcttggcctcactaatcccagttatgttctttttgctcaagactgatttgactattcattcttttgtggtcccactcaaattttagaattgtttttcatatttctgtgaaaaatgttgttgaaattttgatagggactgcactgaatctatacagcactttgtgttgtatgaacttttaaacattaattcttccaatccatgaacatgggatattttttcatttgcatattcttcaatttctttcttcaatgttttatagatttcagtatacagaactttcacctccaaag

SEQ ID NO: 261525 - DNA, 459 bp, Homo sapiens
ttttgcacaatgagtatggaaatgtttcttccttttcaattttttggaagagtttgagaaagrctggtgttaattcgtcattaaatgtttggtagaattccccagtggaaccatcaggttttggtcttttgtttgctgggtttttgattactgattcaatatctttacttgttatattgctttgttcaggttttctatttcttcatgattcaatcttgatggtttgtatattcccaggaatttatcaatttcttctaggttatccgatttgttggcatataatttttcacagtagagtcttatgctcctttctattttgctgatatcagtgatcatatttattctcacatttataattttgagtcttttctcttttttcttacgtctcactaagggcttatcaattttgtttatgttttctaaacactaactcttcatttcattgacatttactatttt

SEQ ID NO: 261526 - DNA, 613 bp, Homo sapiens
tttttttcctcttctgaaacaattaccaaacgattttgttttctgtcttttccaacataaaacagctttttttctggaataaatgataccaaaagatagaattgcaatttttagagatctacgtagttttaagagaatcatagccttctctttaaaccatgaaggtttttgttttgttttgtaaaatcttactgcatttaaaacagaatatttatttttaatgatgctacaacacaaaggttcttagctgttacacttactagatacttaggaagggcagtagctgctataattctgtagctatcaatataagtagagcaagcttgttcaccaaagcacgtaataagtacggaaatatgaaattatctctctmtgggagtactcaaagtaggaagattttgcaggcacctcctaaaaatggcatagattagcaaataaattatgtacagaaaaacaacttcctggaacagaattttctaaaataatgttttatcatcactgtactttgcaagcaaacagctctctcagcttcttctatatttgagaaggtagggatggtgaagcgggcaagtggaaaaaactgtaatcctcaagacaattctctgtttcctta

SEQ ID NO: 261527 - DNA, 585 bp, Homo sapiens
tcaaaaaatggggggaaatttctacacagcacttcataaaagagaatatccaatggtcaataagcacgtgaaaatgtgctcaacatcattattccacagggcaatgcaaataaaaccacgatgacttagaattacacactactgaacaggctaaaattaaaaaccaaagacaacaccaagtgttggtgaagacaggcagcaactggaactctcatacattgtgggaggataaaatgttgcaaccacctaggaaaactgagtttcttctaaagctgagcacaaatttaccctaaaggtttggcaattctaattttatattccagtgaaattagtctatgactatmaaaatatgtgtacaaaaatgttcatagatattttatagtcataatagccactaaatggaaacagtaaaggtatcaagaagttttaccatgcgtatactctgttctggtcctgtagccacttctattgttaccaagtttcatgtcgctccaggtcagtgcttttcaaaccatctgtggtgaaacactagtggcaccctactgccctccaatctgccacataagacctcctgatgcctttact

SEQ ID NO: 261528 - DNA, 506 bp, Homo sapiens
tttcatttctacactatgaataatttgcataaagttaaaattacatacttcttaaatcttgttataaatgtttggtaaaatcatctgacattatttcttcttaaacctctttggtaagtgaaatttttctaaaattcatcaattttattaaggtttattagaataaagttgtaatatcctctataagtatctgcatcaygtgtggttataacactttttgcatcacaatattgcttatttataaattctgtaggattgtctctttatttttatttttattagttttgcgagttttgtgtcaattcatttgtgtctttaaaaaccaaattttggctctagttcacctcatcattgtatgtttcttttcttttcttttcttttttctcttgttctttttcttttttttttttagacggagtctcactctgtcacctaggctggagtgcagtggtgtgatctcggctcactgcaacctctgcctcccaggttcaaacaattctcctgcc

SEQ ID NO: 261529 - DNA, 579 bp, Homo sapiens
aggttctattcttcatggatgaactcggcatgtaaaaagtaggtgaagttaaggcaatggaagaaggatcagatggaaagtgtacacagtaggaagtgcagtgaacatatccttatctttcaacgttcacattaatgagttcattcatccatgaatcctttctgaccacatccccaatctcagggagaattgtgcacaccctcattggtacattcacagtaatatgtrtcaacctttatcataaaatctgaaacactctattgaatatattagtttatatgtctctctcccaaatatattgtaaatctttagggacatgagaatagccagagaaacaggaaaaaagccagaagaggttctggtaatagaagtctgggaaatacagagttcttagaagtacacagagaggctaagtgatataagaaccataatgtagctagtggttttggcaacagtatacagtatagttacagtatagcagggcagttggcaaccagactgaaatgacacaaggaatgaatggaaattcagaaagtggatttagaaacttgggcttagctataaaggcaaggagctaca

SEQ ID NO: 261530 - DNA, 579 bp, Homo sapiens
aggttctattcttcatggatgaactcggcatgtaaaaagtaggtgaagttaaggcaatggaagaaggatcagatggaaagtgtacacagtaggaagtgcagtgaacatatccttatctttcaacgttcacattaatgagttcattcatccatgaatcctttctgaccacatccccaatctcagggagaattgtgcacaccctcattggtacattcacagtaatatgtatcaacctttatcataaaatctgaaacactctattgaatatattagtttatatgtctctctcccaaatatattgtaaatctttagggacatgagamtagccagagaaacaggaaaaaagccagaagaggttctggtaatagaagtctgggaaatacagagttcttagaagtacacagagaggctaagtgatataagaaccataatgtagctagtggttttggcaacagtatacagtatagttacagtatagcagggcagttggcaaccagactgaaatgacacaaggaatgaatggaaattcagaaagtggatttagaaacttgggcttagctataaaggcaaggagctaca

SEQ ID NO: 261531 - DNA, 579 bp, Homo sapiens
aggttctattcttcatggatgaactcggcatgtaaaaagtaggtgaagttaaggcaatggaagaaggatcagatggaaagtgtacacagtaggaagtgcagtgaacatatccttatctttcaacgttcacattaatgagttcattcatccatgaatcctttctgaccacatccccaatctcagggagaattgtgcacaccctcattggtacattcacagtaatatgtatcaacctttatcataaaatctgaaacactctattgaatatattagtttatatgtctctctcccaaatatattgtaaatctttagggacatgagaatagccagagaaacaggaaaaaagccagaagaggttctggtaatagaagtctgggaaatacagasttcttagaagtacacagagaggctaagtgatataagaaccataatgtagctagtggttttggcaacagtatacagtatagttacagtatagcagggcagttggcaaccagactgaaatgacacaaggaatgaatggaaattcagaaagtggatttagaaacttgggcttagctataaaggcaaggagctaca

SEQ ID NO: 261532 - DNA, 506 bp, Homo sapiens
tgtccagctcagagagagaaaattcaccttccttctagccttttttgttctatttggacccttgatgaattgaaggaagcccatttcccttgatgagggaaatctttactcagtctacttattcaaatgaaaccctcacagacacacccagaaatagctgtttatcagctatgtgggcatcctttaacccagtaaagttgacacataaaatctaccatcacaagtccaccccttgtaaacttcgtacccatatgcattttctgaaacaacaatcaacctccaaatagagaaaatarcagaatcataattccacctaacataataaactatcccatacaaccaaaagtgtgctaattctttcccaagaagaggcgtgatgtttactcttcttccaatatccaatatttaaatactatgatgtaaaattaacaatatttaaatactgatataaagtcaatgtatcttatgttacatgatgaaggaaaagagaggaaagaaaataatga

SEQ ID NO: 261533 - DNA, 601 bp, Homo sapiens
agagtctctcatttttttattattccaaaagcaaagkaaatttcattctagtgtttaccagcaaagctcctgcaagagcatctatgtaaatgctatccatgtaactaaatgcattccacattttgcccaaactaaattaaataccaacagaaatcttgccaaaaataaaaagaaagtgttaagactattttctattaatctttttattactccttattataatggtatatatgtacaaagacatacagaactaagagtacagctcaaagtgaataaatctgtgtaaccacaaattaagaaacaaaccagcacctcaggagaaccatctgccctcccacgatataccctcacctctccccaaaggtaaactgaatcttaacttttcttacattagattaattttgccagcttttggaattataatggagaaatagagtacatattgctttgttgtggcttcttttattcaatattaaacttacataagattcatctatgttggtgtttgtaacagtagttcaccaactcttgtgatctggaatatatagtattccattttaaaatataccagagtttacatattaattctatggttaatgta

SEQ ID NO: 261534 - DNA, 470 bp, Homo sapiens
aagaaacaaaccagcacctcaggagaaccatctgccctcccacgatataccctcacctctccccaaaggtaaactgaatcttaacttttcttacattagattaattttgccagcttttggaattataatggagaaatagagtacatattgctttgttgtggcttcttttattcaatattaaacttacataagattcatctatgttggtgtttgtaacagtagttcaccaactcttgtgatctggaatatatagtattccattttaaaatataccagagtttacatattaattctayggttaatgtacattttggatatttttagtgttgggctattacaagtccataaatgcattgtcatcaggtatatagttccagaaatggaactactgggtcatggataatgcataagttcatttttctgatattcccaaaagattttcaaataattttactaatttacatagcaaa

SEQ ID NO: 261535 - DNA, 470 bp, Homo sapiens
aagaaacaaaccagcacctcaggagaaccatctgccctcccacgatataccctcacctctccccaaaggtaaactgaatcttaacttttcttacattagattaattttgccagcttttggaattataatggagaaatagagtacatattgctttgttgtggcttcttttattcaatattaaacttacataagattcatctatgttggtgtttgtaacagtagttcaccaactcttgtgatctggaatatatagtattccattttaaaatataccagagtttacatattaattctatggttaatgtacattttggatatttttagtgttgggctattacragtccataaatgcattgtcatcaggtatatagttccagaaatggaactactgggtcatggataatgcataagttcatttttctgatattcccaaaagattttcaaataattttactaatttacatagcaaa

SEQ ID NO: 261536 - DNA, 585 bp, Homo sapiens
gtgaatccttttcagaaggttttcaacttaccttgcccatccscatttgcagaattgctatctacaggaactatagccttacaaaatgtatttcttaaataataagacttgaaagttgaaattactgcttgacacatgggctgcataatggatgttgtgttagcaggcattaatacaagattaatctactgtacatttccaccagcattcttgggtgaccaggggaattctcaatgcttagtaatgttttgaaagaaatctatttttctaagcagtagatctcaatgagggctttaacaattcagtaaaccacatggtaaacaaatgtgctgtcatccaggctttgttgttaaatgtatagagaaaaggcagagtagattcagcataattttaagggctcttagatttttggaatggtaaatagcaatgccttcaacttaaaaatcaccagctgcattagcccatcacaagagagtcagactgtcctttgaagctttgaaggtaggacatgcttgaaaaccagtgatgtagattgaagattgattgagtatatttgaaattttgtttgtttttaagtaaaaaatg

SEQ ID NO: 261537 - DNA, 585 bp, Homo sapiens
gtgaatccttttcagaaggttttcaacttaccttgcccatccccatttgcagaattgctatctacaggaactatagccttacaaaatgtatttcttaaataataagacttgaaagttgaaattactgcttgacacatgggctgcataatggatgttgtgttagcaggcattaatacaagattaatctactgtacatttccaccagcattcttgggtgaccaggggaattctcaatgcttagtaatgttttgaaagaaatctatttttctaagcagtagatctcaatgagggctttaacamttcagtaaaccacatggtaaacaaatgtgctgtcatccaggctttgttgttaaatgtatagagaaaaggcagagtagattcagcataattttaagggctcttagatttttggaatggtaaatagcaatgccttcaacttaaaaatcaccagctgcattagcccatcacaagagagtcagactgtcctttgaagctttgaaggtaggacatgcttgaaaaccagtgatgtagattgaagattgattgagtatatttgaaattttgtttgtttttaagtaaaaaatg

SEQ ID NO: 261538 - DNA, 585 bp, Homo sapiens
gtgaatccttttcagaaggttttcaacttaccttgcccatccccatttgcagaattgctatctacaggaactatagccttacaaaatgtatttcttaaataataagacttgaaagttgaaattactgcttgacacatgggctgcataatggatgttgtgttagcaggcattaatacaagattaatctactgtacatttccaccagcattcttgggtgaccaggggaattctcaatgcttagtaatgttttgaaagaaatctatttttctaagcagtagatctcaatgagggctttaacaattcagtaaaccacrtggtaaacaaatgtgctgtcatccaggctttgttgttaaatgtatagagaaaaggcagagtagattcagcataattttaagggctcttagatttttggaatggtaaatagcaatgccttcaacttaaaaatcaccagctgcattagcccatcacaagagagtcagactgtcctttgaagctttgaaggtaggacatgcttgaaaaccagtgatgtagattgaagattgattgagtatatttgaaattttgtttgtttttaagtaaaaaatg

SEQ ID NO: 261539 - DNA, 243 bp, Homo sapiens
tacacatttgttgatgatgcccagacttgtatctccaaccttcaatgggaatctctgtctcatatactcaacttgcckacttgagctctccgtcttcatggagacaagtagcttaatgtgccacaaataatcacttgatttcatacttcaaaccttaaaattacctcccccacagtctcatctatttcagtcaatggccctatcatttatccagtggctcagtgcagaaattcagaagtcaac

SEQ ID NO: 261540 - DNA, 423 bp, Homo sapiens
cagaaatcaagacagcatggtattggcataaggatagatggatagacatatgtatcaacgaagagaattgaaagcccagaaataaatccatatatctatggtcaattgatttttgacaaaggttccaaggcgattcaatggaaaaaaatgttctttccaacwaatggcgctggaaaactggatatctatgtaaaaaagaatgatgttgaacttactaagttaacaacacatagaaaattaactcaagaaaatcaaagaattaaattcaagaaataaaactaaaacctatttagttagaaaacatgaccatatatctacataaccttggattaggcatggtttcttaaatatgacatgaaaaacacaagtaagaaaaaatagataaattgaaatattttaaattattttataattcaacaaggg

SEQ ID NO: 261541 - DNA, 495 bp, Homo sapiens
tcaaaaccaaaaaagacaacaaaaacaaaaagaggcctccagggaaggtgaaaatacattacagagggaggaacaaagagaagaattacacctgactccttgttagacactatgcaagaacataaacaatggagtagcatctttaaaatattgaagagaaaaagctgtcaaatcagaatatacacagaagaaaatgtctctcaaattgatggaaaaaatgacactttttttcagacaagcaaaacatayagaacttatcaccagcagagctacagtacagaaacttggatctacacaaacaaatgaagatctccagaaataaagtaaatgtaaaatatataatcataaacatatttttaccttttaaaataactctaaaatataatttattttatcatagaaagatagccacgtattatagatttgtagcataggtaaaaataagatatataaaaatagcacaaaaatgggagggacaaattgggagtctattgt

SEQ ID NO: 261542 - DNA, 495 bp, Homo sapiens
tcaaaaccaaaaaagacaacaaaaacaaaaagaggcctccagggaaggtgaaaatacattacagagggaggaacaaagagaagaattacacctgactccttgttagacactatgcaagaacataaacaatggagtagcatctttaaaatattgaagagaaaaagctgtcaaatcagaatatacacagaagaaaatgtctctcaaattgatggaaaaaatgacactttttttcagacaagcaaaacatatagaacttatcaccagcagagctacagtacagaaacttggatctacacaaacaaatgaagatctccagaaataaagtaaatgtaaaatatataatcataaacatatttttaccttttaaaataaytctaaaatataatttattttatcatagaaagatagccacgtattatagatttgtagcataggtaaaaataagatatataaaaatagcacaaaaatgggagggacaaattgggagtctattgt

SEQ ID NO: 261543 - DNA, 495 bp, Homo sapiens
tcaaaaccaaaaaagacaacaaaaacaaaaagaggcctccagggaaggtgaaaatacattacagagggaggaacaaagagaagaattacacctgactccttgttagacactatgcaagaacataaacaatggagtagcatctttaaaatattgaagagaaaaagctgtcaaatcagaatatacacagaagaaaatgtctctcaaattgatggaaaaaatgacactttttttcagacaagcaaaacatatagaacttatcaccagcagagctacagtacagaaacttggatctacacaaacaaatgaagatctccagaaataaagtaaatgtaaaatatataatcataaacatatttttaccttttaaaataactctaaaatataatttattttatcatagaaagatagccacrtattatagatttgtagcataggtaaaaataagatatataaaaatagcacaaaaatgggagggacaaattgggagtctattgt

SEQ ID NO: 261544 - DNA, 541 bp, Homo sapiens
tctggccttgccctcaactgctggaaggtgacctaggcccttggaatgtcctgcccgagaagagtgtgtttatttatctgggggcttagaccccaggacagtctgaatgtggtttatgatgggaacttagagccctgtgatgtcagtgctacctccagagggactggagaataaaagtgtcagcctcaccttcggaaggctggagactaaaggtcagctgtgcaggcaggacgtgattgagccccagtggagaactctgaacatcaaaggctcagttgagcttcggcaatagataattctctttggccattgtgacatgtggttgtaggagagcagcaccagccatgactccacagagagaggacaacaggggctccatgtctggcggttttcctgggctcttctctttgccaaagtgcrtctgtattctccccatgtagcaatccctaatcacagcgataacggctgtcacaagttccgtgggttcttctagaaaattgtccaatctctgggtagtcctggaaaccccccagcttgcaat

SEQ ID NO: 261545 - DNA, 585 bp, Homo sapiens
gaagcctagacaaggcactccggaaacagaaggactgagttgtcgaaactgtggttcgagatgtaaaacaaggctacggacagaattgaagctcagctatccgaaacaagtgacagtatgaggccccggccagctccttggctgtggtacgatgggtttgctaaaatgaggacagagtgactttgaccatgagtcaaagacagctatttcaaaagcctttgttctctgtgcctggcttatttcacttccagttagacaggaggaataagattcagtgatctattgcataacatgctgaccatagttaataataatgtattgtatatttcaaaattgcttaaagagtagattttaaagcttctcaccaaaaaactatggaagtgacatgttgcatataattagatttaattttatattaaacacatatgtatccaattatacacacacacatatacatacacatacacatctatacaaatacacatacatacagatataaatacayatacatacagatataaatacatataccttgtaccccataatacatacaattataatttgttgattaaaaataaattttag

SEQ ID NO: 261546 - DNA, 430 bp, Homo sapiens
aggcaggctttctgcagagttgaataacgcccaatcccaactaaaatgccaactgtggggccatgccagtggaaccgggcaggagacagcgactcgcccaggaagcccagggctgagtcggggaagacctattcsagcgctgcgggcagcggtgcccggcggaaagcgcagagtttgccagcgggtgcgcaaagatgcaaaaagcacacgccctgcccgtccacctggtgaacacctcgggaactttattttgggaagagccttcccaggaaacttttctcccgcccgcagcccttgccagagtccaccgggccgcgggccagcaggagaagcagggagccgcgggccgaggggctgccgcgggccgaggggctgccgcgggccgaggggcagcccggagcgggacgcggctcggctggccgggctcctc

SEQ ID NO: 261547 - DNA, 592 bp, Homo sapiens
ggctgggcgcgggagcgggcgggtcggccctgggagtagctccctccctgtcaccttgggggcctggacgcaggaggcgctagagacccggcaggagcgttgtgggggcggatgtcaccagggacagtgtcccctcccgacacgcgtgggagcggaggccgctggccttcgccctgggggccgaaggggcttcattgcttatcaccaaaggaacccacccttctggaagtttcctcctattcgagtgtggtccggcccaaagagcccccaaatcccacctcctcccccaaagccttaccccaaggaatccaaggcacaagagccctcccttctcctgccaccagcgagcatcccagagggcagccccagagggctgttccatgcacttttcatctcttccaggagatgaccagctctcaggactcagccttgtcaccacctaagacctcagaaccttctcgartggccccatgccccgcctccctggctgtcctgtcctcctcgctggcagagggcatgtaagctaggtagctgcgttaccctgagcacagggccaggccgggcacggatccttccagaggttttcatttta

SEQ ID NO: 261548 - DNA, 605 bp, Homo sapiens
ttatttcttgcaccacctctcaggaggtgctgtatttcatttaacattcctcttttgatgaatgtttaggttgtcccatttttggtattatgaagaatgcagcaatggccatccttcttcgtgatgtcttgggtctaattgccaatgcaattctaaggcattttctgagaagtgaaactgctgagtcatgagaaatgcstgtttttaattttaatagctactgccaggctgccctctgcagtggccatatcaatttacattgtctggccatttctatttctctacagccacagcaacacttgatattgttagactttggctacctctatctggggaaggagagaagggaccagtaggaaatacagtgtccaaaggagacattagctttatcctcaacatttcaatgtgcttataaaatgcatgcttgatgacttatgtaatgaaaagttaatcataagcaactcccttcaacaaaatagctctgatgaagctcagatctaatgggaaaatagatgctgagcaaatgcacagacaaaatttatgattgcaaatggtaagaagggctgtgaacaacaccaataggaggcggcaatgtgattgctgat

SEQ ID NO: 261549 - DNA, 548 bp, Homo sapiens
ggcttgtttactgaagcatctctagagccacaacaatgggtgaaacaccatggacagttagcaaatatttgctaagcaaatgaaagactacacgacaaggtaatgtttgacaaatgcaataaaaaataaataaataaaggatgaaattctatyagggtgtagagcaggatggaagaggattcattgaaaaggtcaaggatgcttgcatgggaggcagagtgtttgacccagatgggatttgttccaggggaggggaagctaacacaagcaaaggcaaggtcatgggacagtggagggggtacccagtcagtgggtgtcaatccagtttggccagaatgaggattgcatagacagggtgaatatactttaaagctcataaagcttaagctgaagggtttatcacatgcttaggtactgtcaaggccctgatagcgccctaataagcgtctcacgtgatcaatgtttctgtaacatttgcaagaataggatagttcaaccgcaatcaattaagactgatgtttccttccacctcacttcccttctatttg

SEQ ID NO: 261550 - DNA, 523 bp, Homo sapiens
atcgcatgaacccgggagacggaggttgcagagagccgagatcatgccactgaactccagcctgggtgacagagtgagactctgtctcaaaaagataaaaaaaagtcacctcacgaacacagactcaggtatggatgaaagggccttgttatgaatgacacctttattaccctgaggctatttcaggccctgaggacaaaaacacaaatattgtcacacatgatgctccttttgctcctatcacttaggaaagcacaagggttttagtggctctgaccaggagctgggagaaagaccaaaatatatatatttcttatcatgtcacaatatccaatccacttacgcttggtcctaataggtaacattttctatgtgctaaaaggacaatacgaatactcatttaatcatggatctgatgtgctagttatttttctagtacrtagtaagatacataactgttaaaatgataaatgttttttcaaagtttgtgaaactttgacctattcttttttttttttttttg

SEQ ID NO: 261551 - DNA, 519 bp, Homo sapiens
tcaaatgctaaacacgaaaaaatgtagccatttttataataacctgaayttcagttaatttgctgaaagaagtttgctgacatttccaggacataaatctgtcatttataatttcttctattaacatcagcaagttaatatatttaatatttctgtattggaatgaaagaagacattaatttgaattaacactgaatacattatacagtatcttttaaaaccaatcagactgtctgatttaatgattgtgaatttaataggttgaatacatacatttcttgatagatgagttgataatatccaacccaccttcataattaaatatcaaaagtctattcttattaacaactgctttaaggctgagtaaacatgagcttaattaaactcacagataatactaggggatgctgattgctgcactaaggaaaataaagtgatgcagcctgaccttaagaaattataaatatgggactgttgacaaatgataataagcagcaaacatctaagagaagataactc

SEQ ID NO: 261552 - DNA, 482 bp, Homo sapiens
gatgtctattggggataacacttccacataggatatttttttcctatgtgaaaaaagcatttactttcatctgtggatgatctctgactagactaaaatgtatgcgtttattaaatagattaatatcagttcctggtgggtggagattrtcagtctttaaattgctactctttgctgctttcctctgcatagatacagagaatctgtcagctccctggctagtccagcagaaagccctgggcatttcccagagttgatggcagaggagggtcgtctcttgtcgcctttttagcctgatttattgcccttgaattttttaataaggacatattttaagttctgtctagggactgagggcttggatcattcatgcagtgaactttgaataagttggaaagattggctgggccctgttatcataatggatggtgactatttgacatttacagtggtatgctccatttgcactaaaataaatgaat

SEQ ID NO: 261553 - DNA, 482 bp, Homo sapiens
gatgtctattggggataacacttccacataggatatttttttcctatgtgaaaaaagcatttactttcatctgtggatgatctctgactagactaaaatgtatgcgtttattaaatagattaatatcagttcctggtgggtggagattatcagtctttaaattgctactctttgctgctttcctctgcatagatacagagaatctgtcagctccctggctagtccagcagaaagccctgggcatttcccagagttgatggcagaggagggtcgtctcttgtcgcctttttagcctgatttattgcccttgaattttttaataaggacatattttwagttctgtctagggactgagggcttggatcattcatgcagtgaactttgaataagttggaaagattggctgggccctgttatcataatggatggtgactatttgacatttacagtggtatgctccatttgcactaaaataaatgaat

SEQ ID NO: 261554 - DNA, 537 bp, Homo sapiens
agccatgagcctaatgatcccttcttccctaagcatgatgagtataactgttccttgaaaataataagcagaaagtgtttcggatgcaaagaaagtccccacaggcccttgtgccatgctggaagttagccccttccaaagatcatttgctctggttatcagcttccagaygagagtgttttcctcctgcctttctgttcttattcatttgaatctgctgagtctgaccattgtaattatccctggtattcattttgtcaaagtatattagtgagacatcaataatatggatcaacccattccctttctacttgtttggttgtattgattcagtttaaataaaagtcaacctactgtataatgtttgtttaccctgacccttgctgaacatttccacatcctcacagactatgtttgtgtcatttgtttgactaaaaatacttagtttccctggggttcccatgtgacagtacgccagtgttggcctaagctaaactcactttctcaataggactgatggacgccgctggtcgttgg

SEQ ID NO: 261555 - DNA, 530 bp, Homo sapiens
caagccacacctagagagttcgtaattgttccttagagcttcttcagatgttttctgctaagttggctttatgtaaggtgctgaaagccacctgaaccctgaactcctgacataattgaaatgctctttgtcaccacaaaagcctgccttttctgcaacctatatggaaaaggctcaagaaggaaatggacgggatccatgtcaggtgatacttgtgggcctctttaggctgggtagagataggggtaggggttacgtaacaatgatttcaaacccacaacatcccttcattctctctggtgctagattcctaacttatgtgtttgctccatcagttctctagccagaaattcaatagcgagagtcaggcggccttcctgaaatgtcagacactgcagtaacagataattcagtccatctcactaaccccaggactgygagctttaagctttaaccagtgacagtgtgactctagttagatttggcattgcagctttgactttgtaagttttctgcaaattggatgtgag

SEQ ID NO: 261556 - DNA, 535 bp, Homo sapiens
tctgtttctgttttttgcattttaagtaaaggagtcctttttcttttggctttgctatttctgaagttcaccaaacctgccaaagtctggctgtgtctctcccacatcatcaataactattagaatgggcctggcctggcttggctttgattagcgttgctgtgactactcaaggaacagccattggattgtaatttaaggggtgcaaacaattcctttcattagcaaactgtacagtcagcattctgtgctttgttttcacattttaagtcaggttctgaggagggatagactttggctaaaaaaaaaatggcayacagtatattgataatttcctgagaaagacagtttgctggtattgtgggttgtcattgagtaagttagggctggctggtacttctcaagcaagcgggatctactatgtcaagttttctactgtagctgcttgatgtaacctttatgatgtggtcaagtgacacagaaaccaggaatcacttcctactcatcagagttacttattgtccaagcccacatg

SEQ ID NO: 261557 - DNA, 508 bp, Homo sapiens
cctttggagcttgctggtaacagccaggaacaaatttctcttcatgggctaatcgtgtctttattttgtgttgttttaacagggcttcttctccccacttaagttattagataaaatactgtttgagttaatgtaaattatatgttttatccttgattatggctgattattcttagaactaagaaggtagaataaactgattatgatttttgaaatgaaatctatttaatctaaactgactttttaagtttattaagacacaaaattctcatttctctttgaagagacaatccaaaatgtgtttaggcttttcagattttctttatattcctgaatttataaaccaaaaatgattatagtaagaagaaagttcagtatccttcccaaagtgtcaactaagaagttaggtgtttttttgcttcatctttaaagttttctgtttagtttggttgaggataaatcataaagaagakgtaaccgtattttttggcattcactggatcttcca

SEQ ID NO: 261558 - DNA, 682 bp, Homo sapiens
ttgtgtacattaattttgtatcctgaaactttgctgaattcatttacaagttctaatagcttttttggatgagtcttyagggttttctaggtatacaatcatatcatcagcaaacagcaacagtttgactttctctttactgattttgatgcccttgatttctatctcttgtctgattgctctgacttccagtactacgtggaatagaagtggtgacagtgggcatccttgtcttgttccagttctcagggcaaatgctttcaacttttcctcattcagtatagtgttggctgtgggtttgtcatagatggcttttattaccttaaggtatgtcccttgtatgccaattttgctgagggttttaatcattaagtgatactggattttgtcaaatgctttttctgcatcgagatgatcacatgatttttgttttcaattctgtttatgttgtgtatcacctttactgatttgcatatgttaaaccattgctgcatcactggtgtgaaatccatttgatcatggtgaattatcttttggatatgctattggattcagtcagctagtatttcactgagaatttttgcatctatgtttattagggatattggtctgtagttttttgttgttgttgttgttgttgttgttatgttcttccctggttttggtattaggatgatactgg

SEQ ID NO: 261559 - DNA, 489 bp, Homo sapiens
tggataccagcacctgctctggtagaggtagcaggggagtaaaatggactctgtgggagtccttggttttacttttgtttagtgcagtagttttgtttcggttggcctccagccaggaggtgttgctttcaagagcacatcagcagtggtactakagggaggatgcaaacttgtcctagggccacctggttaagtattcaggtttcttgggtggtgtgcagggcatagagctcccaagaagttatgtcctttgtctttggcaaccagggcaggtagagaaagaccaccagggcctccacctctgacttccaactgccatagaaggcccaaccccagtctcagccctactccactccagtacaacaggtgggggcaggcataggtgtgtctgagctcgaattctccttgggcagggcttgttgtggctgctgtaggggatggggggtgtggttcccaggccaatggagttatgttcccagggggattatg

SEQ ID NO: 261560 - DNA, 489 bp, Homo sapiens
tggataccagcacctgctctggtagaggtagcaggggagtaaaatggactctgtgggagtccttggttttacttttgtttagtgcagtagttttgtttcggttggcctccagccaggaggtgttgctttcaagagcacatcagcagtggtactagagggaggatgcaaacttgtcctagggccacctggttaagtattcaggtttcttgggtggtgtgcagggcatagagytcccaagaagttatgtcctttgtctttggcaaccagggcaggtagagaaagaccaccagggcctccacctctgacttccaactgccatagaaggcccaaccccagtctcagccctactccactccagtacaacaggtgggggcaggcataggtgtgtctgagctcgaattctccttgggcagggcttgttgtggctgctgtaggggatggggggtgtggttcccaggccaatggagttatgttcccagggggattatg

SEQ ID NO: 261561 - DNA, 489 bp, Homo sapiens
tggataccagcacctgctctggtagaggtagcaggggagtaaaatggactctgtgggagtccttggttttacttttgtttagtgcagtagttttgtttcggttggcctccagccaggaggtgttgctttcaagagcacatcagcagtggtactagagggaggatgcaaacttgtcctagggccacctggttaagtattcaggtttcttgggtggtgtgcagggcatagagctcccaagaagttatgtcctttgtctttggcaaccagggcaggtagagaaagaccaccagggcctccacctctgacttccaactgccatagaaggcccaaccccagtctcagccctactccactccagtacaacaggtgggggcaggcataggtgtgtctgagytcgaattctccttgggcagggcttgttgtggctgctgtaggggatggggggtgtggttcccaggccaatggagttatgttcccagggggattatg

SEQ ID NO: 261562 - DNA, 646 bp, Homo sapiens
atgttatcatgaagagaactcttacaaatattactatatatttgtatctgtttctatttgtattctmtctttatatttagctcctatgctcactttaacctacatcagtagttttatatgaaatatttccttgcttaattttgttctttatgtatatatatgatttttgatgatgtttcaagttgaaaaataacataacccatactgttacaaacaaccagaatatattgtgtatttgaaaaggcaggttaatataatatacagtgtcgttgcttgataaccctacatttaaattataggaggaaatagctgtttgtcttcattgacaatgaccttgaaattgtttttcttagtttactaaaacaaagaaaaacaaaccaaaccaaaatatgcaatacagtagaatatagtgtactcacacatattctttattaagaaaattatctgcattgtctttctttatatgtgaataggctatgtaacatttgtaacatctctctactacacattttttcaagctttcatattcaatatggttatattactcaacttgtatcttgaagtgtttataatcacataagagaggaaactgtcatcaaaatgagtcagggcatctgtggtgacttattggataaggacccacagt

SEQ ID NO: 261563 - DNA, 581 bp, Homo sapiens
acagcaggctgaagtgctttggggttccaagtaaacttgaaaggcagtctaggacacaaggactgaaattcttggtaactcttagtgctgaactggactcagagtcagtgtattaggattgcacatgacctagggagacaccagatggaatagataaagcagtgcttgtgccatcactccccagagtccaaggcagctcagcttgcttcttaaggtgaggagaatgaagagcaaagagggcttacatcttggataccatctcagccacagtaggatagggtattgtgcggcgtcatgagatacctgttccaggccttagctcctggatgacatttccagacacaccctgagccaaaggggaaccttctgccttgaaragaaggacccagtcctggcagggttcactacctgctgtctaaagaacccttgggccctgaataagcagaagtaatacccaggtagtatactgtgggccttgggctcttagacatgctgcattgaggtgtgacccagcacattcccagctgtggtggctacaggcagagacgccttctgtttgagaaaagcagagaaaaaagtaa

SEQ ID NO: 261564 - DNA, 603 bp, Homo sapiens
tcggccttccaaagtgctgggattacaggcgtgagccaccgcaactggcctttccaatcattttacaaagatgaacagatacaattcttatttactgcgtggccctctttatgtaattggaaatgaattgcttctgactgtttttgttgctatcactacattaaagttttccttttgtattcttttttgtactgtcttttcaaaatgtgaatttttatcctaagatttctcatttaaatataaatttctcagtcatgatacagtgcatgagcttttcagagagatccttctacttctgattcactttatgcctgattacagatctcttacttactggcttatacaaacaagatctcatttgacagatggaaaaaaaaataacaatagtaagcactagagtgattctttcctaagagtaagccagaggatagtaaaatcaaagaacagtaaaatcaaygtttttaaagtaaccacaaaataatgtagtttaatccagcctcttatctgaggctttaatctccatttccacatacccataaagggtttgataaactacaagctcaaagacataaagggaagagaaacagtttttctttctatgct

SEQ ID NO: 261565 - DNA, 555 bp, Homo sapiens
acacctggaaacttgcgcctgatttctcccacatttcacccactatgcctttttcctttgctaattttaattctttcactataataaactataaccatgagaaataacagcttttctgagtcctgtgagccattgagcctacgtgtggtcttggggtcactcagcacaccaragctttccttttttgctccattagcctttctaacggctatataacagaaccctgaattacatgtcctctgtttttaaaatatatagaatgttttctgctttcctgattgaatgtttactgatatacagtgccaattaactacttcaaggcatacttactccgtaggtgtaatgagtgattcgtaagagataatttttatgattctatggttctttccccagagtatttttgtggcaagggccattctgtctcaaataaatatgatattaatattttgttatttttaagagactggagtatgttatatcctaggttgatataacagagcctagttcttcactccagaatttcacaattattatttcagataacttctctttttg

SEQ ID NO: 261566 - DNA, 632 bp, Homo sapiens
agtttcttggctttaaagagcatcatctgctgatgattcctaaatctatatccccagactggactgttctctaacaagaggttagaacatacaactgtctacgcacaatttttattctgatgattatatatattgcaaactcaacatatgttataaataaatgtctagtttatctaaaagtaaaccagtttcccctatacccaatccttttcatcttrgttaatgtcatctccattattctgagtgcttaggacaaaaacctcagagacatcctatctttcacaccaaaattcaattctaaaagcaaatcctcttggctctataggcaaaatacatccagaatctgaccatttatcagcaccttttctgccaccaccctgttggaagccatcatgaccttccgcaacgtcccataagttttaatatgttctttccatttttatttgtttcaaggtatatttttatttctcttttgattttttatttgacttaatggttatccagaattgcatcgtttaattttcacatatttgggaattttctaattttctttctgtccctggtttccagttgtgtatacttgtggacagaaaagatacttgatatatttcagtattttaaatttgataaga

SEQ ID NO: 261567 - DNA, 559 bp, Homo sapiens
taattctaattatatatataattgatatattttagaggctgtgtttataattttattttttgtaaagcaagtcgattttctaaggatatcataggcactgtaaaaatctgttttttccttttctcttctcagcctttatccayagaaacttaaaaaccaaaaatggtcttgattccgcacaacatgcatcttgaaatgagaactcatatatatttcttcccttttggatgggagattaagcatataatgattattgcctttctttcaaccctcattcttttcaggttttttcccttcaattaaaatagacatctcttgagttctccttatgcctctcaataaactaacatttcatcagaatacaaaaaacgaatatctgaatacctttctctactgtaaaataatgattggtcatcagaattgggtaaattcaggtctctcttaaaacacaaatcaatatacaatgctgcgttttggtttttggtgcagatttctacatttatgtttggaatatctactaggaaaccacataagaaatcaggagagatcatgagaaatg

SEQ ID NO: 261568 - DNA, 604 bp, Homo sapiens
atgcatatcgataagtatgatccaccacataaactgaatgaaaaacaaaaaccatatgatcatctcaatagatacagaaaaaagcattcaattaaatgtagcattcatttattatttaaaaaarcccttaataatctaggcatcaaaggaggatatctcaaaatactaaaagacatatatgacaaacccacagccaatattatactgaatgggaaaaagtcaaaagcatcttccttaaaaaatggaacaagataagaatgcccattctcaccacttctatttaacgttgtactggaagtcctagccaaagcaatcaggcaagaagaataaagaaaaagaattaaaattccaagaagaagtcaaattatctctgttctctgatgacatgatcttatacctagaaaaccttaaagactcctccaaaagactcctagacttgtaaaattaccccagtaaaatttcaggatacaaaattaatgtacaaaaatcagtaccattctatacaccatgttcaagctgagaaccaaatcaagcactcaattccatttacaatatacacaacatgcacaaaatacctgggaataaatacatttaacccaaggaa

SEQ ID NO: 261569 - DNA, 604 bp, Homo sapiens
atgcatatcgataagtatgatccaccacataaactgaatgaaaaacaaaaaccatatgatcatctcaatagatacagaaaaaagcattcaattaaatgtagcattcatttattatttaaaaaagcccttaataatctaggcatcaaaggaggatatctcaaaatactaaaagacatatatgacaaacccacagccaatattatactgaatgggaaaaagtcaaaagcatcttccttaaaaaatggaacaagataagaatgcccrttctcaccacttctatttaacgttgtactggaagtcctagccaaagcaatcaggcaagaagaataaagaaaaagaattaaaattccaagaagaagtcaaattatctctgttctctgatgacatgatcttatacctagaaaaccttaaagactcctccaaaagactcctagacttgtaaaattaccccagtaaaatttcaggatacaaaattaatgtacaaaaatcagtaccattctatacaccatgttcaagctgagaaccaaatcaagcactcaattccatttacaatatacacaacatgcacaaaatacctgggaataaatacatttaacccaaggaa

SEQ ID NO: 261570 - DNA, 513 bp, Homo sapiens
taatacctgggtgatgaactaatctgtacaataaacccccgtgacataagtttgcctatgtaacaaacttgcactagtacccctgaacttaaaagtaaaaagaaaaggaggatatacctcaaagacaacctttatgaatgatgactaaaaagaggatactctactctctaccctctctcactataccttagcttaatagaacatcctagaactttaacagaaccctattaaagaaagcggggaaccccaagagagctaatattaagttttccaccatctcagtgaaatggtgctttaagtttgaagccactatagmcaatagactttaaaaaaatatacctagaattttggactgagatttatgtccattatgttgtcaaataatgtacttattttagggagttaaatatattccaataagtacagttggtttatgtgttaaaactattttttgtcctctaatactattaagtttataaaatatgccatgtgattctgaacttgattattaca

SEQ ID NO: 261571 - DNA, 595 bp, Homo sapiens
tgcccctccctttaggagaattctttctgccttgaaggatcagttcagtaaatattcctccaggaatcctttcataatccacctttttctatctgtctcccttcttcttctccttctccaccagccaggtgctcagaattcatcttgacttcctctgtgatgtcaactgatattgcagttactcctcatcatcagtgcagatgctcctgacttactatgtgtctgataaaaccattgcaaggccgggygccgtggctcatacctgtaatcctagcacttttggaggccaagacaggcagattgcttgagtctaggagttcaagaccaacctgggcaacatagtaaaaccccatctctactaaaaatacaaaaattagccaggcatggtggtgcacacctgtagtcccagctactctggaggctgaggtgggagaatcacctgagcccaagaagtcaaggctacagtgagcccagatggtgccactgcactccagcctgggcaaccaggaaaaaaaaagacatttgcaagttgaaaatattgtaagtggaatatgcattgtaatacacctaacctcgcaaacatcatagcttagcc

SEQ ID NO: 261572 - DNA, 610 bp, Homo sapiens
agtggtttagttagcatcacataggagtggtgcagtaaagtctgtctgaaatcaaagctgtgtgctttctgtgtatctctctgtcccttcaatggcaggggttgtagtagtcagctgttcattttttcaactggactttcccttggcagaactcacaaactgttgagtctttgttctctttagccaaattagttttttaaagatgtaaattaattgccaaatttaaagccagaagttttcatataaaatcctaacttcaggattctccttaaaaataaaaacataaaaggatctgacggcagcaggaatcmctcatggtatctgtcaaccagagccgaggtaggaatgtgctcttccttcagggttgctagtgcccaggtcaccccagcctgtcacacacattaactgcctggctcccgtaggcatgtgagcttgcatccctggataaacagtatcaaatgaagctacctagttttcactggacattgtctaccagcagggccagtgccttacaacttggaaatgggcacagtgggtatgaccaggagccataaacagaaggaaggacatggaactgaggagcaaaattgaacctggggggttgtttata

SEQ ID NO: 261573 - DNA, 344 bp, Homo sapiens
gatgcccttgtcaaaaaatcacctgactacaaatgtgaaggtttttacctggactctccattctatttcattcgtttatatgtatatgcttaccacactgtcttactataattactataacttaatattattgtaagtaacaacttattgctgctttgtagcaagttttgaaattagaaagtgtgagtattccaactttgttcttggccaagatgttttggctattctgygttcttttaatttcacacaaatttaaggataagcttgtcaattcctgcaaagacaacagctaagattttggtagagattgtgttaaacctgtagatcaatttgaagagcactgc

SEQ ID NO: 261574 - DNA, 581 bp, Homo sapiens
  misc_feature (1)...(581): n = A,T,C or G
gttcagatgttcccccttatttttaggcatattttaatactcatgactgaaatacatattttagagcttttttatttcctgggaaaataaaggtattccccaagggrtttggatgaactttgagagaattttaaatgcctgtcagaataatgagagccttcagacagaggaatggcaagagaaatgcccacctcctcccttgatgttaccccttgcagctaagaggcatggggagtgagattaactaactgtaagcagaattatgggatttagagtctctatctattgactctgttattatccaattgggaattctttcatttgtaacattcttcagttaaagaaggaagtaagaaaagccacaaagaaaagtttggagtcaggggtgaccaagccaatcatatcctatactgagatggtgccagaggtgggtaatccctgtccccatttaaatttctcttgtnttttacatagcatctctctccctctttttcctctctcttttcctctccctttgtcatctgatgatatacaatgaatggctttttatctcttagacattgatttgcctttaccaaagg

SEQ ID NO: 261575 - DNA, 532 bp, Homo sapiens
ctttcttgttggaagacattttacacctgtcaatggcagaaataattgctaggatttttttttttwaatcctctctggaaggtttaactatgtttggttgcatggtgcatttcattcccacaaatctaactgcagagggggaactctactgatttggactgggaagccaactggaagtcgcgctgcctactagcaaattgaatattgttatgcaaagttgggtgggagcaaagctatttcagaggctataacgtttccttccagttcactgatccactaatttccattcactttaaactgcttttgtattttttcagagaaaaaaagctattttctaccatttgcactgttcctaatctttggctttgaacaaaatctgtctggataacaaggagatatggtcaccctcctgcttttatggacagctggcaatgggtccaaacacatgcaaataaggaatatagctatttccataaaaggtggggccacatatgccctctaattatgctctgagatcttacaaggaggagaa

SEQ ID NO: 261576 - DNA, 588 bp, Homo sapiens
tgcagagggggaactctactgatttggactgggaagccaactggaagtcgcgctgcctactagcaaattgaatattgttatgcaaagttgggtgggagcaaagctatttcagaggctataacgtttccttccagttcactgatccactaatttccattcactttaaactgcttttgtattttttcagagaaaaaaagctattttctaccatttgcactgttcctaatctttggctttgaacaaaatctgtctggataacaaggagatatggtcaccctcctgcttttatggacagctggcaatgggtccaaacacatgcaaataaggaatatagctatttccataaaaggtggggccacatatgccctctaattatgctctgagatcttacaaggaggagaaagatagatttaaggaattacgaaaggaaaggcccagaaaatgggaacagcagcttggacaacataaaggattttctgagcaaaagacaatatacgarctttttttttttttttttagtatctccctccctgaaatagtcctctaaaagtttctaaatttggaggctttttatagtaccatggaaat

SEQ ID NO: 261577 - DNA, 576 bp, Homo sapiens
ccattttcatgcttaggttcaacaaagtgtggaagctgtgtagaaagatgattggacaaaaggccaygatctaatgctaatggactgagcggggaaacccagcaaggcctgtctagattcctgttgccctctccaagcacacattccttccttctgggtgtggagcaggaccctctctgaaatgggaatcttattatctatagtcaaacaaggtaggccagataatttgttgatggccagtttttacacagaaagtcaggggaaagttagagtaataattttaggttttatggctggcttttgttttggtttctgtgacatgcctaggggaagagagattctagtttctatgaccagcatcaggggagaatgaaactgagagacaggagggcaggagaagatcagagaaaaacttttgcttctgaggccttcaatttgcagtattgttttctgagccctaatagtaaaaatgtgtgatgatagcttgagagttttcttttgcaaatacatttgcatagtaacagaacagaaactttgatgtgagagaatcaaattcttagagatattttaggcaag

SEQ ID NO: 261578 - DNA, 485 bp, Homo sapiens
caatgccttccatataaaaagagcttaataaatgtcagctgttattagtctggattcttggtatattaagaagcatcaaaggactgaataattggaaattctttatattctttgcccatccataggacccatgtatgcacgggcagatttggaatccactttaggaaaactttctaaaatttagtattattcaaaatgctaacagtaaaatgattcactccttctcatgcatacagcccraggagatgctgaatgatcagctgttacggttttgtgcattcagttagaggctgcattagctctggaatgacaaagatgtcacttcagatcagttgatattggctaactgaaatactatgaatatgaaactgtgcttggctcagtggaaaacagtagccattctattcctgacaacaggaggggaggtgatggcatcaatgtcatttaattgctgaccctggactagatgttttctactagaaagg

SEQ ID NO: 261579 - DNA, 577 bp, Homo sapiens
ctttttgagattggaatgcctttccaataacaagttatcaataagaagttctaaaatgttatgatcagatcatcaccacagctgtaactttaactgaaatgttcttttttaggctgattatccacagaaactagtttaccattttaaatgactttttaagtcacagattatttaaagtgcacacaataacaacaaaaacaaagtaaactatttcacaatggcttgtgagtatggacctaacctgcatctttcttccagtctttacttttctccttattgcttcctttttatttccttttgtattagttcattttcacactgctatttaaaaaaaaaaaactgagactgggtaatttataaagaaaagaggtttaattractcaaagttccgcgtgtctggagaggcctcaggaaacttacaatcatggcagacagcaaaagaaaagcaagcaccttcttacatggcagtaggagagagagaaagtgaggggggaaatgccaaacacttttaagccatcagatcttgtgagaactccctcactatcacaaagacagcatggaggaaactgcccccaag

SEQ ID NO: 261580 - DNA, 598 bp, Homo sapiens
tgacccattttccagtgtacgaggcttgttgcatgattcattctcttgtttgatcctgctcctaaattgatagaatcaytgagtagacatttcactgaacacttttcccccttcagtttaactataggagacaagaaatctgaacaaattgaagggcaaggagttttaacttaaattgtttagcttcagggaaattttgctgacaattttccaatacccacagtacttctatttgaggagaggaggtgatttggaaacatgcaacttatacaaaaactgattccattttttctaaacgtgtcagtctgctgccatggaaagttttaaaactggaagataaatgcaatgacctacttatccaatgtgctatgagagttgtgtgtgtgtgtgtgtatgcactcgtgggggtgtgtgtgtgtatgtgttagtcaggggtggttgtgagcaagtatgtggtgtggctatgacaccaatcaaatttttggacagtgatcctttttcaaatgaaaaggttgcttttaggagtacatgtaaaaataatttacaaccaaatatcttggtatatatcttgaatttttaatgcattttttacactttt

SEQ ID NO: 261581 - DNA, 598 bp, Homo sapiens
tgacccattttccagtgtacgaggcttgttgcatgattcattctcttgtttgatcctgctcctaaattgatagaatcattgagtagacatttcactgaacacttttcccccttcagtttaactataggagacaagaaatctgaacaaattgaagggcaaggagttttaacttaaattgtttagcttcagggaaattttgctgacaattttccaatacccacagtacttmtatttgaggagaggaggtgatttggaaacatgcaacttatacaaaaactgattccattttttctaaacgtgtcagtctgctgccatggaaagttttaaaactggaagataaatgcaatgacctacttatccaatgtgctatgagagttgtgtgtgtgtgtgtgtatgcactcgtgggggtgtgtgtgtgtatgtgttagtcaggggtggttgtgagcaagtatgtggtgtggctatgacaccaatcaaatttttggacagtgatcctttttcaaatgaaaaggttgcttttaggagtacatgtaaaaataatttacaaccaaatatcttggtatatatcttgaatttttaatgcattttttacactttt

SEQ ID NO: 261582 - DNA, 598 bp, Homo sapiens
tgacccattttccagtgtacgaggcttgttgcatgattcattctcttgtttgatcctgctcctaaattgatagaatcattgagtagacatttcactgaacacttttcccccttcagtttaactataggagacaagaaatctgaacaaattgaagggcaaggagttttaacttaaattgtttagcttcagggaaattttgctgacaattttccaatacccacagtacttctatttgaggagaggaggtgatttggaaacatgcaacttatacaaaaactgattccattttttctaaacgtgtcagtctgctgccatggaaagttttaaaactggaagataaatgcaatgacctacttatccaatgtgctatgagagttgtgtgtgtgtgtgtgtatgcactcgtgggggtgtgtgtgtgtatgtgttagtcaggggtggttgtgagcaagtatgtggtgtggctatgacaccaatcaaatttttggacagtgatcctttttcaaatgaaaakgttgcttttaggagtacatgtaaaaataatttacaaccaaatatcttggtatatatcttgaatttttaatgcattttttacactttt

SEQ ID NO: 261583 - DNA, 531 bp, Homo sapiens
atgtgatagaaaagaaaaacccattttctggggagaaattcaaaccagctgcagaaatttgcataagtaatgaggagccaaatgtttaccaccaagaaaatggggaaaatgtctccaagkcatgtcagagatcttggtgaaagccccttccatcacaggcctagaggcccaggaggaaaaaatggtttgtaggccaggcccagggccctgctgctctgtgcaacctcaagagttggtaccgtgtgttccggctgctttggctccatccatggctaaaaggggctaaggcacagctcaggtcatcgctttagaaggtgcaagccccaaaccttggtggcttccacatagtgttgtgcctgcgagtgcacagaagtcaacaattgaagtttgggaacctctgcctagatgtcagaggatgtatggaaatgtttggatgcccaggcagaagtctgctgcaagggcagaacccttatggagaacatctgctagggcagtgtggaagggaaatgtggggttggataccctacagtc

SEQ ID NO: 261584 - DNA, 531 bp, Homo sapiens
atgtgatagaaaagaaaaacccattttctggggagaaattcaaaccagctgcagaaatttgcataagtaatgaggagccaaatgtttaccaccaagaaaatggggaaaatgtctccaaggcatgtcagagatcttggtgaaagccccttccatcacaggcctagaggcccaggaggaaaaaatggtttgtaggccaggcccagggccctgctgctctgtgcaacctcaagagttggtaccgtgtgttccggctgctttggctccatccatggctaaaaggggctaaggcacagctcaggtcatcgctttagaaggtgcaagccccaarccttggtggcttccacatagtgttgtgcctgcgagtgcacagaagtcaacaattgaagtttgggaacctctgcctagatgtcagaggatgtatggaaatgtttggatgcccaggcagaagtctgctgcaagggcagaacccttatggagaacatctgctagggcagtgtggaagggaaatgtggggttggataccctacagtc

SEQ ID NO: 261585 - DNA, 531 bp, Homo sapiens
atgtgatagaaaagaaaaacccattttctggggagaaattcaaaccagctgcagaaatttgcataagtaatgaggagccaaatgtttaccaccaagaaaatggggaaaatgtctccaaggcatgtcagagatcttggtgaaagccccttccatcacaggcctagaggcccaggaggaaaaaatggtttgtaggccaggcccagggccctgctgctctgtgcaacctcaagagttggtaccgtgtgttccggctgctttggctccatccatggctaaaaggggctaaggcacagctcaggtcatcgctttagaaggtgcaagccccaaaccttggtggcttccacatagtgttgtgcctgcgagtgmacagaagtcaacaattgaagtttgggaacctctgcctagatgtcagaggatgtatggaaatgtttggatgcccaggcagaagtctgctgcaagggcagaacccttatggagaacatctgctagggcagtgtggaagggaaatgtggggttggataccctacagtc

SEQ ID NO: 261586 - DNA, 460 bp, Homo sapiens
aaataaaaatcccactcaagggaagtgtgatttcattgagaagccctggcatcttcccttcagggagctcatgacaattaaagggacatatagatcattttaaaattcttataacagcaagaaaacattaacagatcaaatattagtcaatgtctccaactgaaagccagactactttagctaaaaattaatgaaaaattactcttagaacctatgcttsaaatttcctggctatgatattgaggctcaattgatataattccgattgcccactaagtttcattttctgactcaccattccataaaacttcaattttgaaagaggaataattatttcaggagaacttccaagttggatttgaaaaatcttccatgctttttcaaagttctaagagcattaaataagattgaggtaaattattggtagctttagcacatttatttttatttggaagttgca

SEQ ID NO: 261587 - DNA, 552 bp, Homo sapiens
ataaatcttggactgaagttttatgggcttccctccataaaactggactccaatacactgaaagtgcattttcttcccagttcatttatttactgagtgccattatgtaataaacactgggaagagagaaagaagagatacgaaagacagkctctgcacttgtgaaactgtcaaactagtcaggaaaactgacatgaaaacaattaaatgtaatctatggctgatgatgtaacgtgactgatttggagaaaagacagatgaggtagggaagatagaccggatactggaggataggggcagggaagggaagagggaatagacctactagaatattccagagaagaaattaagacaggttgaaccagactagaactagaaatggaaggaaaatgtaatgtatttaacaacagacactcaggagctcattgtgcaaaaggaaggccagttcacccaagttcacacagggaaattctggtcaaatttcgaggaagggtgtgaaagtgtggtcttgtaggcccctttagattcaatcatataaccagttacagcatt

SEQ ID NO: 261588 - DNA, 552 bp, Homo sapiens
ataaatcttggactgaagttttatgggcttccctccataaaactggactccaatacactgaaagtgcattttcttcccagttcatttatttactgagtgccattatgtaataaacactgggaagagagaaagaagagatacgaaagacagtctctgcacttgtgaaactgtcaaactagtcaggaaaactgacatgaaaacaattaaatgtaatctatggctgatgatgtaacgtgactgatttggagaaaagacagatgaggtagggaagatagaccggatactggaggataggkgcagggaagggaagagggaatagacctactagaatattccagagaagaaattaagacaggttgaaccagactagaactagaaatggaaggaaaatgtaatgtatttaacaacagacactcaggagctcattgtgcaaaaggaaggccagttcacccaagttcacacagggaaattctggtcaaatttcgaggaagggtgtgaaagtgtggtcttgtaggcccctttagattcaatcatataaccagttacagcatt

SEQ ID NO: 261589 - DNA, 552 bp, Homo sapiens
ataaatcttggactgaagttttatgggcttccctccataaaactggactccaatacactgaaagtgcattttcttcccagttcatttatttactgagtgccattatgtaataaacactgggaagagagaaagaagagatacgaaagacagtctctgcacttgtgaaactgtcaaactagtcaggaaaactgacatgaaaacaattaaatgtaatctatggctgatgatgtaacgtgactgatttggagaaaagacagatgaggtagggaagatagaccggatactggaggataggggcagggaagggaagagggaatagacctactagaatattccagagaagaaattaagacaggttgaaccagactagaactagaaatggaaggaaaatgtaatgtatttaacaacagacactcaggagctcattgtgcaaaaggaaggccagttcaccyaagttcacacagggaaattctggtcaaatttcgaggaagggtgtgaaagtgtggtcttgtaggcccctttagattcaatcatataaccagttacagcatt

SEQ ID NO: 261590 - DNA, 571 bp, Homo sapiens
aacatcaaacacatgagggaagggagagaaaaatgcagggcagtggttagaagctcctaagttggaatcccactcctttaatagccatgtgaccttgaacaaatgtcttaaacattctaagcctcagtttctttcactgtaaagtgagaaaaataatggctctcctttcaaaaagctgttaaattaaataaggtagtatataaaaatcacttgacataatatctaatatataataagcttcaaataaatgtcaacaatctattgattatcaacatgtaaaaagcatgtggtttatatcacattttcacttagcaccctccacctagtaacctccacctagcaaactccatttaacccaaaataaagggtcttgatcccctgtatggcctgtrttccaggggatgggccagggatttggatgtccttcacagataaagagtgaatctctgggttggacactcctggattccttagctttactctgaaccaacactcttcttagactatagagtcattctcagggtatgcttcatttatggctgactgccacctctgccatacatatgccaat

SEQ ID NO: 261591 - DNA, 571 bp, Homo sapiens
aacatcaaacacatgagggaagggagagaaaaatgcagggcagtggttagaagctcctaagttggaatcccactcctttaatagccatgtgaccttgaacaaatgtcttaaacattctaagcctcagtttctttcactgtaaagtgagaaaaataatggctctcctttcaaaaagctgttaaattaaataaggtagtatataaaaatcacttgacataatatctaatatataataagcttcaaataaatgtcaacaatctattgattatcaacatgtaaaaagcatgtggtttatatcacattttcacttagcaccctccacctagtaacctccacctagcaaactccatttaacccaaaataaagggtcttgatcccctgtatggcctgtgttccaggggatgggccagggatttggatgtccttcayagataaagagtgaatctctgggttggacactcctggattccttagctttactctgaaccaacactcttcttagactatagagtcattctcagggtatgcttcatttatggctgactgccacctctgccatacatatgccaat

SEQ ID NO: 261592 - DNA, 571 bp, Homo sapiens
aacatcaaacacatgagggaagggagagaaaaatgcagggcagtggttagaagctcctaagttggaatcccactcctttaatagccatgtgaccttgaacaaatgtcttaaacattctaagcctcagtttctttcactgtaaagtgagaaaaataatggctctcctttcaaaaagctgttaaattaaataaggtagtatataaaaatcacttgacataatatctaatatataataagcttcaaataaatgtcaacaatctattgattatcaacatgtaaaaagcatgtggtttatatcacattttcacttagcaccctccacctagtaacctccacctagcaaactccatttaacccaaaataaagggtcttgatcccctgtatggcctgtgttccaggggatgggccagggatttggatgtccttcacagataaagagtgaatctctgggttggacactcctggattccttagctttactctgaaccaacactcttcttagactatagagtcattctcagggtatgcttcatttatggctgamtgccacctctgccatacatatgccaat

SEQ ID NO: 261593 - DNA, 508 bp, Homo sapiens
tctccccagaagaggttgaaattgtcatcattttacaaatgaagcaaagaaaataaacatgtcctgactgtttaaggctagcggaaaaggtaaaattmagtaaatatacatatttcttgcttaacataagtaattcatgccttgagaagaaaagtctgcctaagaacgctgatcaggagactattttattttaaatggaaaaaaaagtcattcactatactttaatacaaagctcgttaccaatttcctaaatgtactaaaatacattgcctacatacataagtaacaaattatcatgttaggatataacatacttaaaacattgctttctgaccaccaaataattaatattgttgctaacatagagttaccggtgtgcagtaattcattgtgctttctaagtgcttctatacaggattgtgaggtgctaataattgaatctagaataaaacttgagaccattccaagataccgcttactttaaaatgttgtactaagtgtttggttc

SEQ ID NO: 261594 - DNA, 508 bp, Homo sapiens
tctccccagaagaggttgaaattgtcatcattttacaaatgaagcaaagaaaataaacatgtcctgactgtttaaggctagcggaaaaggtaaaattaagtaaatatacatatttcttgcttaacataagtaattcatgccttgagaagaaaagtctgcctaagaacgctgatcaggagactattttattttaaatggaaaaaaaagtcattcactatactttaatacaaagctcgttaccaatttcctaaatgtactaaaatacattgcctacatacataagtaacaaattatcatgttaggatataacatacttaaaacattgctttctgaccaccaaataattaatattgttgctaacatagagttacyggtgtgcagtaattcattgtgctttctaagtgcttctatacaggattgtgaggtgctaataattgaatctagaataaaacttgagaccattccaagataccgcttactttaaaatgttgtactaagtgtttggttc

SEQ ID NO: 261595 - DNA, 537 bp, Homo sapiens
tacaacccccatactgtaccaagcaaggttagtggctatggcaaacaccaccaggacagtactatctaaagacacatttggtagtgtggttaactatacaaaaaaaaaaaaaaggacactgtacagtttaagaacaaatcatatgtagccttacttctttctttaaaaggagtgagttgtgtataaggggtttaaatgctttatagaccaaaaaaaaaaaaaaaaactgtactacaaccaacttagttatcatcatcatctttattttcatcctcctcatctccctcctctttcttctttttcttgcatttttcagccttgacaactcccttttttgctgcatcaggcttttctttagctcactatgcagcaatatcctttttgtctttttccttcagcttcaaagacttttcataaggcagcttgtcatctgcagcagcrttattccacatctccctgtttctttgctacatcaccaatggatgttctttgatttttgcgtgatgcttagagcagaacaggaaaaaagtcaaagga

SEQ ID NO: 261596 - DNA, 539 bp, Homo sapiens
ataacaattaccaacaaggaacgggatttcactttttccattctgttttcatctttgccagttgaaagatagaatatgctaatttttttgactttgcatttcttgattagcagtgaaactgatgaatttctcacagggcagataaatctctcctctagaaacattcttagtccatttttcctttagggcatttatcttttgcttattaatttttaggaactttcatattaagaatagcaacacatttttaccacatatattgtagatattctcccaarttcttttataaatgaattggtagttttgaaaacaaaacttttaaatgtatacctggttaactcagtggcattttcttgtatggtttctgcccttaggttcatgattagacagagttttcctctcaagattatataaatattcacctgtatttttctataattttttacatttaaaaattttaaatgtaaaaatttaaattctattttaaatgtaatagaaattatttggtgtaacgtacagagtaaggatattaactgatc

SEQ ID NO: 261597 - DNA, 539 bp, Homo sapiens
ataacaattaccaacaaggaacgggatttcactttttccattctgttttcatctttgccagttgaaagatagaatatgctaatttttttgactttgcatttcttgattagcagtgaaactgatgaatttctcacagggcagataaatctctcctctagaaacattcttagtccatttttcctttagggcatttatcttttgcttattaatttttaggaactttcatattaagaatagcaacacatttttaccacatatattgtagatattctcccaagttcttttataaatgaattggtagttttgaaaacaaaacttttaaatgtatacctggttaactcagtggcattttcttgtatggtttctgcccttaggttcatgattagacagagttttcctctcaagattatataaatattcacctgtatttttctwtaattttttacatttaaaaattttaaatgtaaaaatttaaattctattttaaatgtaatagaaattatttggtgtaacgtacagagtaaggatattaactgatc

SEQ ID NO: 261598 - DNA, 558 bp, Homo sapiens
taaataaaatatcaacattttaaataaagacaagatctgtatcattatcatatctctattgattgtagcckttaaagtttaatctaataaatcctttctttatattttttgacatgtttaacaaaagtcaattaagcctctcaaataaaattcatacacatgcctcattttaaaaattcaaaatgaaatagctttatgaattctcttgaatgtaagaatgccaaggagaaaaatttgaacagatttttagtcagcaaaataaagatgcacttggagattagcatcacagaaatggttttctcatttgtcaacttgaaattaacattaacagccatttgtaaaacttagtgaactttatgaagtacacatcagtattctacaaaagtcataattgtaatgcagattttctacaatcacaggaaagatagtcctcactgtccaagagaagtgtattagtttgcttgggctgccataacaaaacaccacactggatggtttacacaattgagattgattttcctatggtcctggaggctgtaattctaagatcaagttgct

SEQ ID NO: 261599 - DNA, 558 bp, Homo sapiens
taaataaaatatcaacattttaaataaagacaagatctgtatcattatcatatctctattgattgtagccgttaaagtttaatctaataaatcctttctttatattttttgacatgtttaacaaaagtcaattaagcctctcaaataaaattcatacacatgcctcattttaaaaattcaaaatgaaatagctttatgaattctcttgaatgtaagaatgccaaggagaaaaatttgaacagatttttagtcagcaaaataaagatrcacttggagattagcatcacagaaatggttttctcatttgtcaacttgaaattaacattaacagccatttgtaaaacttagtgaactttatgaagtacacatcagtattctacaaaagtcataattgtaatgcagattttctacaatcacaggaaagatagtcctcactgtccaagagaagtgtattagtttgcttgggctgccataacaaaacaccacactggatggtttacacaattgagattgattttcctatggtcctggaggctgtaattctaagatcaagttgct

SEQ ID NO: 261600 - DNA, 584 bp, Homo sapiens
actgtaaattccataaagcaatgactatgaatactttattctatataggctgaatgtctgatagattgcccaccacactgaactattttttgagtgaattaatgaattgcatgtgtctaaatttccttgggattctaaaccaggcagtattccaaaattttaacattcagttttagtgcatgggatacataggatctcaaaaatgcaatcattgaatgagtcaaaagatcaaaagagattcattgaaatcggaaacttatctgtgtgagatgtaaattatttagtaatatattgaaattatgaatgtagctttatgatgatggtattattgtacgaattaaaggaaggactcaagatgcaccccaggtctaaatcctacttcgtarataactgtcagaacccactaggtccctctaaaatcaatatgcatccaccaggcatatattcggtccctgccgtatttccccagtcctagttttggtgaaatttatgcaaaatcttaaactgctaaatagacccagcagtcatgtagccaataatatgcttcataattataagcattttattagtaatctttggtctga

SEQ ID NO: 261601 - DNA, 526 bp, Homo sapiens
tattatttttatcataaaataatttagattgccaagttctatgctaagttctgaattaatagttattttggctttaaaatgctactgtaaacttaattacattaattatatatatatgtttacttacacagaaattagtcaccccttgactgctgacatttgaatctactttttcataagcatttcttattaagtatatcaatgataatatctaattaatttacaagctaccctgctaaggcaaactggaaattctttagggtaaaagggatatatcaggttcactggtattgtgttcaatattaacatcattgtggccgtttttttcttaaatattgaactaattcaactgtgatcagaaaccgtgccccaaatgacttcaattatttaaaatttgttcgacttacatwataatctaaattttgctaagcatttatgcgccttagaaggaaagtgaattctgtcatttgtggttaagtgctttccacagctttgttaagtcagcttgataattttgttttcagat

SEQ ID NO: 261602 - DNA, 606 bp, Homo sapiens
agtagtatcctcaatttgatagaatcgtaaggacgccttaaatttggttagcagttctacattcttgatgcaataatattttcagagtgtgggagaacatcaaactatggaaatatccctggagagatttgcttattaagttagttttcttccgycttcctggtagtttttgtttttttgctaaacaccaggggttttgccttcatttttcagatacatgtttttcatttgtctagtgaacttttgaatactttttgatgagatattaaggttggaaaaaataaccatctctttaaaataagaaagattgtgataatgataagtatataaagccctaaaactgaagatattcattacagcctgttaattggaatgaaaagctcatgcttactaattcagagtctataaataaaagacaaggattatttggggcatctttggggtccttattactgatcctggtgagcctccaccatttccaatgagtagggttgacacataaaatacaggctgtttagttaaatttgagggtcaaaaaaatagtgagtccatttttagtctaagtatgcctaagtattacaaaggatatacttatattaaaataat

SEQ ID NO: 261603 - DNA, 606 bp, Homo sapiens
agtagtatcctcaatttgatagaatcgtaaggacgccttaaatttggttagcagttctacattcttgatgcaataatattttcagagtgtgggagaacatcaaactatggaaatatccctggagagatttgcttattaagttagttttcttccgccttcctggtagtttttgtttttttgctaaacaccaggggttttgccttcatttttcagatacatgtttttcatttgtctagtgaacttttgaatactttttgatgagatattaaggttggaaaaaataaccatctctttaaaataagaaagattgtgataatgataagtatataaagccctaaaactgaagatattcattacagcctgttaattggaatgaaaagctcatgcttactaattcagagtctataaataaaagacaaggattatttggggcatctttggggtccttattactgatcctggtgagcctccaccatttccaatgagtagggttgacacataaaatacaggctgtttagttaaatttgagggtcaaaaaaatagtgagtccatttttagtctaagtatgcctaagtattacawaggatatacttatattaaaataat

SEQ ID NO: 261604 - DNA, 617 bp, Homo sapiens
gagtgagttctcatgagatctgatggttttaaaagtggccatttcccctgctccctctctctcctgccaccgtgggaagatgtgcctttgcttcccatttccccaccatgattgtgtaagtttcctgaggcttccccagccacgtggaactgagagtcaattaaacctccttcctttataaattaccagccttgggtagttctttccagcagtgtaaaaatggactaatacagtaggcatcacttatgtgaaatgctaaggggtaaataatctaagataaacaggtccaatgtcatttaattccaatatcatctacagtcatggagtcttgctgaattcaattgtctgcacacagtagtgatyggtaacttaggaacactagattaaattgacagctattaacaaagtttagaagaatggatatgggaggggaattgactgtcagttcatattcttttactactttattatttaaaaagcaaagtaaaaagtgcgactctacatttctcactttgttctcttatttgaggaataaaaggagtgaaaatggaagcaaagtataagttctttcttagtaaaaagcagattatattctcaatacaactttaattagaagg

SEQ ID NO: 261605 - DNA, 606 bp, Homo sapiens
caaagtaagtaatgaataaataagaaaggggttctgcatgaaccaaagaactgagtcccactaattgaggagtataattgccttacccttctccaatggagacacaaaaacaaaagaagaaaagagatgaagctgtatatgtctctttcaagcttcaggcccacccacctcttcctagttttatctctttaggccatttaaacatctccttgttagataattaggtaaccccagaggctgttctgatgattacctgaattaatgtataaagacatctgtcactgagtatatactcaaatactggtttcctcttcctcattttaatattttctttttcatctgcctttcacctagtagttctttatttgaaatctttcaaaacccttcaccattgtgttcattctcccctgtttttttctttctcttttgaagtatggtcaccttagtaccctactgaaagtatgtttctgatgcgtccstcttctggagatggcacatctgtgaatgcaggctgggaagacatgggtggtttcagcagccacgtcgccacccacccagcctccatccctaccctggaaatctatcgtgtaactctgctgctaaagc

SEQ ID NO: 261606 - DNA, 558 bp, Homo sapiens
tttctgcctttttaactcccccgagggtagatgggcaggctgctctcctgtgacacagtgccattttttagagttaattcttatgtcttttgcttcctttcaggaaaatgttcattgcttgacattrtaacaggctccttaaatacctgtgaaagggtaaagttcactaaaacagaatccattgcttctggttgaatagcaataatacttgattcaaaatcttaaccttccaactattaaaatgttaaatgtaaacagactcttatgttgccttaaataaatgccttccttaaaaaacaaaaacaaaaacaactgtttctcaaattaattttcccagattcatagatttctctccttaacctgataattggccaaacagtatttactcctaaatactgtttctaaattcttgtgttcagcgcactgggatgcatgagggtatattttttaaggcacaaagaaaatttgtttgcctgtgatctcactaataggtgtttattgccctcctggagccacagttgctgtgtcatctcaaggctggaattctggatgaagagg

SEQ ID NO: 261607 - DNA, 558 bp, Homo sapiens
tttctgcctttttaactcccccgagggtagatgggcaggctgctctcctgtgacacagtgccattttttagagttaattcttatgtcttttgcttcctttcaggaaaatgttcattgcttgacattgtaacaggctccttaaatacctgtgaaagggtaaagttcactaaaacagaatccattgcttctggttgaatagcaataatacttgattcaaaatcttaaccttccaactattaaaatgttaaatgtaaacagactcttatgttgccttaaataaatgccttccttaaaaaacaaaaacaaaaacaactgtttctcaaattaattttcccagattcatagatttctctccttaacctgataattggccaaacagtatttactcctaaatactgtttctaaattcttgtgttcagcgcactgggatgcatgagggtatattttttaaggcacaaagaaaatttgtttgcctgtgatctcactaatrggtgtttattgccctcctggagccacagttgctgtgtcatctcaaggctggaattctggatgaagagg

SEQ ID NO: 261608 - DNA, 525 bp, Homo sapiens
aaaacaaactgtacagtgaaaactggaaaaaaataactaatcctgcaatgtgacgctatagctrtatgtccacaagaaacaacagcaaacaaggaacaatgacctcccaaacagacaaagcaaggagccagtgactgttcctaatgagatggtgatgtgtgagctctcagatcaataattcaaaatagcaattctaaggaaactcagggaactccaagataacacagaaaagcaattcagaaatttatcaaagaaatttaagaaagagatcaaaataataataaaaaatcaaacagaaatcctggaaccaagaaatacatttgctaaactgtaaaatacattagagattctcaaaaacagaatgaatcaagcagaatgaagaatcagtaacctcaaagacaggctatttgaaaatacacagaggagaaaaaagaaaaataatgaaaggaattaagaatacttacaagatatagagaataacctcaaacaaaacaaaatgaaaacaaatctaagagtcactggaat

SEQ ID NO: 261609 - DNA, 567 bp, Homo sapiens
gtctagaacttggagattgggtgttttggaaataacatcagagtaagactgcccctgacccctattggaagggaccatatcaagtttttctcaccactgacactgcaatgaaggccttaaatcctaggtccacgttgcaattcaaaagagccctttcagattcttggaacagtactcctgttgggactttaaggtaaagctgaccatggaaatttctccctagaagtaaatggcatcttaaatgttaacagctttctcaaattcacagatcaagacttctgtaccatcatgaaaacgttatgcttttgtctttttccctcattttctgctgccctgatgcttttttcctacaggaagattcatgaggccataatcagtggatggctgtagactcaagcttgtattctagcataaaactagaacaattgytgggtatgtgggctaatgccaaaaaatcaggaaacagtcccactgatgccaatgcctctctgcattctcaatgacaatcactgtgagatgccagaagaagagtggaaagctatctttggtgttctaaatatcactgct

SEQ ID NO: 261610 - DNA, 492 bp, Homo sapiens
gatggtgacagagagtggcaccaatgtccgaagttttggttaatatctaaagttgagaggctgaccaaaakgagggaaattgttaaatcaaaccaaagtctggcttgagaaagcctccatatttgcatacttgagttcttatgtatgaatcacaacctaacctagcacatatacaaactgaaaacctcacttaggagaatgtgtctgtaatagtagctgactttcagccaatcatgacagtcatacttcagccactcacagtcagtcagtgatttaaatggtgttcaaataaggcaaacaccaagctgcaaccaatccagctgtttctgaacctcacttctgttttctgcatgtcactttcctttttctcttcataaatcttatcccaccatgtggcagccccagtggccgcctgattcacaagtcgtttttgtattttttcttgctcacttaaactctgttaaatttaatttgtctaaagtttttctttta

SEQ ID NO: 261611 - DNA, 389 bp, Homo sapiens
aaagtttgagaaacgactattctccctgagttcctaagcctcagattcacatgtgaattcagccaaacccttaatgaacagaaaatgccaatcttacttctgttgttctggagggcacggaatgagagctgccatgtttgtccattaagttgatataataacaatactaaaacttcaaaggtgacagaatcaaaagaaagtawggactaatggcctttaaaaaaagtgtctaatagcacattaaaagcgtaccccttatggttcaatattagaaactccattaataggattaatcacattaatagattgcgatgcagagtactaaccgctatttgatcatggtgagctactggggacaaggagaaaaatttatattatctccatagatt

SEQ ID NO: 261612 - DNA, 374 bp, Homo sapiens
ccagtgttgggtgcatatatatttaatattgttaaatcttgctgaattgacmcctttattattgtatggtggcctttttcgtctccttgcatagtttttgtcttaaaatctattttgtctgatgtaagtatagctactcctgctccttttcagtttctattggcatggattaccttatttctcccctttcttttatttctatgtgtgtcttcataggtgaattgtatttcctgtatgcaacagatcactaggtcctgttttttttaaaatccacacagccattccatgtcttttgatagactgatttagtccatttatattcattgctaatattgataagtaaggacttactcctacaattttttttatttgtt

SEQ ID NO: 261613 - DNA, 374 bp, Homo sapiens
ccagtgttgggtgcatatatatttaatattgttaaatcttgctgaattgacccctttattattgtatggtggcctttttcgtctccttgcatagtttttgtcttaaaatctattttgtytgatgtaagtatagctactcctgctccttttcagtttctattggcatggattaccttatttctcccctttcttttatttctatgtgtgtcttcataggtgaattgtatttcctgtatgcaacagatcactaggtcctgttttttttaaaatccacacagccattccatgtcttttgatagactgatttagtccatttatattcattgctaatattgataagtaaggacttactcctacaattttttttatttgtt

SEQ ID NO: 261614 - DNA, 374 bp, Homo sapiens
ccagtgttgggtgcatatatatttaatattgttaaatcttgctgaattgacccctttattattgtatggtggcctttttcgtctccttgcatagtttttgtcttaaaatctattttgtctgatgtaagtatagctactcctgctccttttcagtttctattggcatggattaycttatttctcccctttcttttatttctatgtgtgtcttcataggtgaattgtatttcctgtatgcaacagatcactaggtcctgttttttttaaaatccacacagccattccatgtcttttgatagactgatttagtccatttatattcattgctaatattgataagtaaggacttactcctacaattttttttatttgtt

SEQ ID NO: 261615 - DNA, 582 bp, Homo sapiens
caaactcccacgaggccaccaccactatgattgtactgggtcagacctgaaggcagcacagcactgggtctcaccgaaggcctactgtaaccactccctggctaccacttatgttcacttaaggccctgggactctactgtcagcaggtggtaaagccagagagscttgtgtccttcccttcagggtggcgagttccctgaggccctacgcattttcagaggtgctgtccagaagtcagggactagagtcaaaaaccttagaagtttacctggtgtcctattgttgtgcagctgagctggcactcaaaccacaagatgcagtctttcccactcttctctcccctttccaaaggaagaggagccacaccccatggtgtgagtggcagtgggatgctcttttatagccatattgcatgttgctcttttatagccacatttgcttttctctcactctcaccccctttttcaccactggcaaccattaattgatttttcatttttatactttccttattccaggaatgttttataagtggaattacacggtatataacattttggcattgacttttttcccccctc

SEQ ID NO: 261616 - DNA, 570 bp, Homo sapiens
tgaaaaaaaaagaagaaaagaaaaaaattaaacagaacatgttaacatctcaaaatattctgccacatttgaaatacgggagagttgaattcattagaggacttctattggaaaaaaggaattgtttttgaaaatgatgtctctgcagttgcasagactgtgttggacctaggtccgtagaacgccgtgatgtcatcattgatgtcagagaatctgcgatgggcctggtgacctttgaaccttaacagccctgcagtgtagtgggcactgggcagtgctgctccttcactaagcggtctgagttctttagctatctcggagattcaactacgtttactcgtactgaatctttttaatgaatttcctgagagccaagaagggccaatctacaggaaaaagtgggaggtggacattaagcatcttctagaaactcttctagctgatatcatgaaacgacgacaaaagaggaaacatttggaaaatgaagagtcccaggaaaccgctgagaagggaggaggtatgtgcggggcaaactttctggggcacaagcgtcactggccagcctgagcc

SEQ ID NO: 261617 - DNA, 623 bp, Homo sapiens
atttagctcattatagtgcatcttatatacttttaaaactcatgataactgtttttcatacatttttaggactacccccccccacccccacacagaggtaactaatataaaagatctgcatatatccagtccatgttttaattattttcttgcatgtatatatccatagcaatatttagaattcatgtgactatttacatgattgttataacattatgaaacatattttatttcaatcaacatgttttcaagatttatccatgtcaatcatggatcaagayccatttaacaatttgatactgttccatcatatgcatgtagactaatttattttccattaaaatattatcgaacaatgaatgtttccattacttctctggaacacacaggatttaatagaacactgtgtagacttctcctgagactcagaaagtgtcaggctgtttgaaggattgctgcttgcctttagcccccttccataggcttcctccagtcagacacttcaagcatggatgacagttgtcaggaatttgaagcacagatgaaaggaaaattcacccacatggggagatctaagccactgcccagaaggtaacaggttaattttaggcatcctgttgggc

SEQ ID NO: 261618 - DNA, 623 bp, Homo sapiens
atttagctcattatagtgcatcttatatacttttaaaactcatgataactgtttttcatacatttttaggactacccccccccacccccacacagaggtaactaatataaaagatctgcatatatccagtccatgttttaattattttcttgcatgtatatatccatagcaatatttagaattcatgtgactatttacatgattgttataacattatgaaacatattttatttcaatcaacatgttttcaagatttatccatgtcaatcatggatcaagacccatttaacaatttgatactgttccatcatatgcatgtagactaatttattttccattaaaatattatcgaacaatgaatgtttccattacttctctggaacamacaggatttaatagaacactgtgtagacttctcctgagactcagaaagtgtcaggctgtttgaaggattgctgcttgcctttagcccccttccataggcttcctccagtcagacacttcaagcatggatgacagttgtcaggaatttgaagcacagatgaaaggaaaattcacccacatggggagatctaagccactgcccagaaggtaacaggttaattttaggcatcctgttgggc

SEQ ID NO: 261619 - DNA, 563 bp, Homo sapiens
taacacacataaagcatagtattctatatactatagtatactatactgtatagtatagtatactatactaaagcatagtattctaagtgttcaacgcaatgagttttaacaagtggatgtacctgtgtaatccatacttaaagaaccccagaatattatcagcatcctagatatctttttgggcctgctttctgcctaatacgcacaccacctcttcccgaataaacagaattctaacttctcacatcccagattatttctgactttttcagctttatataataacattgaatcataaacaggttgaggtttttggagtcatgtttaagaaatctttgcatgctcgaaggagatgaacgtatttgcctgtgtttttttctagatgctttattgtctttttcttttagacgtacatatggaattgatttttgtgaawggagcaaggaagaggtcaagattcatttaaaaacaatgtccatatctagttgacccatttccgtcaagtaaagagctcatatttttcatacatgtgtgagtttgttacatctcacttctgtcccatt

SEQ ID NO: 261620 - DNA, 599 bp, Homo sapiens
gcagtgacttctcctttggcgagagagcacccagggccaacacaactgtcaccacaaccacacagagcaagttgaactcatactgggaacagcttagagaagcacgcacatctcaacaacagcctttgttatttaattcatgacactaaccacgcgcaagctcaaacaaacacacatgctatcctaaccatcactctaccctctatattcacatttcatttatggcttgactttttgtcatatcctgaaatgaagctttgcatttacccgatgagttgcgtctcctggtgctcctcagttcttgctatttcttttgtcttataaaagatcaggagcagacttattgtgcagatcgtccacctcttcctaatggagcgcatcttgggtgcccgagaaagtcctggttgccccagctcccgcaccttctcttgatataaaggctccgttttggggagatagtcgcgggggtgaaatctgtaaaatgcgaggagagcttggagccgggatcccgggatcagatcrctggggtcttctgtggccgagctccctctggtcctcgaacgctgcccagcgacctctcgccctgtttgcgccagctc

SEQ ID NO: 261621 - DNA, 525 bp, Homo sapiens
cttcttggtacgtgaggctctcggagctgcctctcctctgaccctcaggtcctcaccgagtttgctccaggagtatattgaaaacatacccagtgctctctcaagcacccactgcttagagggcccagatttcttgtccttctttcccttgcagagctggagactgcatcgggcatctggtgtttaaactaaacaggcaaactcgactaaaggtccacagtgctcattgtgtagactagctgccctccgatgggtgctctgattatcagtggttccagtgcagggcctgtcactaarcaggcctcacttcctccttgggggctttcccatgggaggtgtggctttttactctacatggaaatgactctctgcagccacagaacacagtcattttctgaattatcccagtctctcatgcgccctggattcctccagatgccttatatctcttgtgcaaagttgtctaaaatttggttcccagcttccaagccttgccttttggccttcctggaagtatttttgttg

SEQ ID NO: 261622 - DNA, 558 bp, Homo sapiens
tctgtgcccccacaaaatcttatgttaaaatgtaatccccattgttggaggtgccacccagtgggaggtatttggatgttgggggaagatccctcaaggcttggtgctggcctcgcgatagtgagtgagttctcacaagatctggttgttgtcgagtgtggcgcctccctccaaccctctcactcctgctttgctatgtgacgtacctgctctcgcttcaacttctgccctgagtgaaagcttcctgaggcctccccagaagcagatgttgatgccatgtttcctgtaaaacctgcagaatcatgagccaattacatttttttcttataagttacccagtctcaggtattccttcatagtgatgcaggaatggcctaatacaatgggtcaactgatgaagtgctggatcggccaccctagatcttattctgtcacagaccacagtggccctctcatcctgccatgaaagggaaccagaggtgccctgttttaacttaactggcctaaggtrgcaaaatgtcatgaccacaattagtaaagccttggtgggctaatagt

SEQ ID NO: 261623 - DNA, 650 bp, Homo sapiens
ggtgtgggaaacagagagtcacctgtctggaggataacaatgtgtgcttgacataataaaggcttaatgtrtgtcatccagtcttttccaaatataactgaatgagaaaccccaacttctttttggtaacactcattagcatcttccagaactagtgctccatggaatgtacttggagaatgatgctttggaagaaaagaaaacgggggaaagaagccagataatttgaagacagctagtgaaaagtgctaatgcatttaattattagtgataagaaatgtatgtgctaatttgtctaatgatgtgctatatattaaacataatatatatccatgtaatatgtttatatgtagttggctgagaaggatgtccaatacatagagtataacctgcaaataaataattaggcaacttgaagataagcataacttaagcctaatgaacagcacctaaatatttcttagactttaaatgataggaatcaaatgttttcagggaaaacacatcactgacacatctagtaaagcttccagttggtcaactgcttttctcttttgtaatataaccaggatacctcagtcaatccccattattgagcagaaggcaacccataacatcaggcaaattactagggaaggcaaacattttaa

SEQ ID NO: 261624 - DNA, 507 bp, Homo sapiens
gaactgacctgccaaatacatcctcttgaggcttcttgtgtaccagacaggaccccagggcttccaaaaatagcctctatttctcacaagtctatgaaggaaatattagagttcagattttacaaatgaggaaactgggactcagggagattaagtggccttccccaggggcaatagagctggaaagtaatgggcctgaagaagcgagctggatttttctgattycacaactcgtgaccctgaatcctacttgcaagggcattgagcctagcgtggtggggcagttctcttggtgttagacctctggagcctgtaccaagtgactatggagaggtgaagaatgtccagattaacaggcaaaaaaggaggcaaaatcatagacaccaaacaggagatctctccaaaccaccacttaattttctgactgcttaatagtaatacaatactgtattgtgcgcattcaacaatttcatattagccatctgattggcacctcgctacaaccca

SEQ ID NO: 261625 - DNA, 507 bp, Homo sapiens
gaactgacctgccaaatacatcctcttgaggcttcttgtgtaccagacaggaccccagggcttccaaaaatagcctctatttctcacaagtctatgaaggaaatattagagttcagattttacaaatgaggaaactgggactcagggagattaagtggccttccccaggggcaatagagctggaaagtaatgggcctgaagaagcgagctggatttttctgatttcacaactcrtgaccctgaatcctacttgcaagggcattgagcctagcgtggtggggcagttctcttggtgttagacctctggagcctgtaccaagtgactatggagaggtgaagaatgtccagattaacaggcaaaaaaggaggcaaaatcatagacaccaaacaggagatctctccaaaccaccacttaattttctgactgcttaatagtaatacaatactgtattgtgcgcattcaacaatttcatattagccatctgattggcacctcgctacaaccca

SEQ ID NO: 261626 - DNA, 608 bp, Homo sapiens
tcttatagagtcctctgattttcttttatggcatttagcacagcagtttaaaaacatccttttatggctgggtgcagtggctcatgcctgtaatcccaacactttgggaggtcaaggygggtggatcattaggtcaggagaccgagaccatcctggctaacacggtgaaaccccgtctctactaaaaatacaaagaaaaaaaatagctgggtgtggtggtctgcgcctgtagttccagctactcaggaggctgaggcaggagaatggcgtgaaccccagaggcggagcttgtggcgaaccgagattgcaccactgcactcaagcctgggccacagagcaagactccatctcaaaacaaacaaacaaacaaacaaacaaaaacatccttttatttctgtgttatctgatcaaagtctatctcccctggtaggctgaggcttccacaagaatgggagtcttgtgacttctcctcactgccctatgcccagggctgagccctgaatcgtcttgagagctccatcattctgtgttgagtgaatgaatgtaggacaggacctggatttgagctcagtttccaccaataagtacttgggtgagaagtagcatca

SEQ ID NO: 261627 - DNA, 620 bp, Homo sapiens
gggaggatctgccatgcacttttaaaccatcagatcatgtgagaactcactcactatcgtgagaatgacatgggggaamccacctccataatccaatcacctccccccaggtccctcccccaacacatgggaattgcaatttgatatgagatttgggtggggacacagagccaaaccttatcaaccactaagaaatgaagaagtatgtattacgttaatcaggaggaatcacaggtctccttacctgtcagcaaggatacatctatgtgaacaattgacataattgatcagaaggcatagttgagaggaagcaactggggcacaggagaagtggcacagcccataaaaggtgacgagaataacaagtggcttgcggtgaaagcccaaaatatacaacacagaagcaaagacaagctttccaaactggcaaatgttattttcacacggctgcccatgattccctgaatttgcttccatctcctctttttcttcttttctccatcccttgactcttttatatgagcattcaaccaacctttatggtagacaatgaaaaatgtaataagaaggatactgaaaatgtactctcagagttcagaaggggaagacatccctcctag

SEQ ID NO: 261628 - DNA, 620 bp, Homo sapiens
gggaggatctgccatgcacttttaaaccatcagatcatgtgagaactcactcactatcgtgagaatgacatgggggaacccacctccataatccaatcacctccccccaggtccctcccccaacacatgggaattgcaatttgatatgagatttgggtggggacacagagccaaaccttatcaaccactaagaaatgaagaagtatgtattacgttaatcaggaggaatcacaggtctccttacctgtcagcaaggatacatctatgtgaacaattgacataattgatcagaaggcatagtygagaggaagcaactggggcacaggagaagtggcacagcccataaaaggtgacgagaataacaagtggcttgcggtgaaagcccaaaatatacaacacagaagcaaagacaagctttccaaactggcaaatgttattttcacacggctgcccatgattccctgaatttgcttccatctcctctttttcttcttttctccatcccttgactcttttatatgagcattcaaccaacctttatggtagacaatgaaaaatgtaataagaaggatactgaaaatgtactctcagagttcagaaggggaagacatccctcctag

SEQ ID NO: 261629 - DNA, 620 bp, Homo sapiens
gggaggatctgccatgcacttttaaaccatcagatcatgtgagaactcactcactatcgtgagaatgacatgggggaacccacctccataatccaatcacctccccccaggtccctcccccaacacatgggaattgcaatttgatatgagatttgggtggggacacagagccaaaccttatcaaccactaagaaatgaagaagtatgtattacgttaatcaggaggaatcacaggtctccttacctgtcagcaaggatacatctatgtgaacaattgacataattgatcagaaggcatagttgagaggaagcaactggggcacaggagaagtggcacagcccataaaaggtgacgagaataacaagtggcttgcggtgaaagcccaaaatatacaacacagaagcaaagacaagctttccaaactggcaaatgttattttcacacggctgcccwtgattccctgaatttgcttccatctcctctttttcttcttttctccatcccttgactcttttatatgagcattcaaccaacctttatggtagacaatgaaaaatgtaataagaaggatactgaaaatgtactctcagagttcagaaggggaagacatccctcctag

SEQ ID NO: 261630 - DNA, 619 bp, Homo sapiens
attctcataattccaaactttattttatttatcttcctacacatattaatatgctatagtgggaactgtcttaaatttttaaaatatattggatataagttatagaaaacttaacttaaaaggtagggcatggtggcgcatgcctgtaatcccagcactttgggaggccaaggtgggcagatcaggaggtcaagaggtcgagaccatcctggccaacattgtgaaacctcttctttactaaaaatataaaaattagcttggcgtggtggtatgtgcctgtagtcccagctactcaggaggctgaggcaagagaatctcttgaacctgggaggcggaggttgcagtgagctgagatcacgccactgccctccagcctggtgacagagcgagactgcatctcaaaaataataataataataataataatattaataatgataattaacttaaagaaaaaatatatctactgtttcttctctcaattgttctgctcccccagtgagatgacaggaagaatttctctctctgccatcttttaattttgactgtaaactatcacttcagtccattctacttcattttcagagcagtaatrttacagacttcttataagaagaaa

SEQ ID NO: 261631 - DNA, 578 bp, Homo sapiens
ttcctgctgctacattgtttgcttacccacccaccctgacaccaccttcaatttattctccaycagtggtcatagtaaacatttaaaaatacaaatcacatcataacattctgcataataaagtcttcagtgaattcctattgctctcaaaataacaccttctcctgttattaactcctctcatcactcttttattttcttcatagagtttatccccatgtgtatttgttgagtgcacagactaagaaactaaagtaattgacttattttggaggaagtggatctgtggtcatgtagaacactatgcttactatgtgagagtctctaagccataatgaaatcccttattccagataccctaaaaagaatgaagactgaagactttacagaaggatataaccttaggtgaggagagtctgactaaattgctaaattcaaatcaaatgctttttatacatttattgagacgattatggtttcttctcctttatttctgtaattgtggctaactatacagattgtttttcaaatgttaaatcaaacttccattcctgtaataaaccctgctttattatgat

SEQ ID NO: 261632 - DNA, 572 bp, Homo sapiens
gttttgttattttttgtcaccagagtctgtggacacatggagctccatttttcaagtgagcaatgaagaaaggactaacaagtggtcccagattccctcatatgaaaacaataacacactctgtaacttggaggtctggaggtttatgttggcactaattggaatgctaatgcgcaatgagtctggtctctcctctcaaacactaacaaacacaagtcatttcctactgattggtttcaacctaacaaccattttcttgagcccaaaagaaaattttattttagatgatttagattatgttgattactcacttatgagccatacgtaagttggtcaatgaagaacagattgctacaacttgttttctgaagaaactcctccacccacttaccaccaccaccacccaggattaactctcaaacaagaatgatatcatgtgaaaaggaatctagagcttccctaaatacttcataagctttggggtatcagagacccttttgagcatatgataagagctacgggctcttrtgaaatggtcctactgataaaactgtatttttatctcggggctt

SEQ ID NO: 261633 - DNA, 588 bp, Homo sapiens
ataaaaaagagagaggaatgtataattgtcattgtgaccaaaacagccacaataacacgacaactagtcattatatattgaacacttgtcttatgcaggctytgcattaagtgctcaacgatcattggcacatttaactctcattacccccatcttatgacacaaatttttactactcactgtagaaatgagaaaagcaattctcaaaggacttgtccacagtcacatggctttctggtgctagacctgggattcagagaataaagggtcactgatgcacatgtgtacatttgtgtggtgtggggtggccatagtccccatgtgttctcaaacccacctctgaattgaaaggtgaagagcatcgtaaatcatgaaaaccatccaggatgtctcttctaactattgctgcgtgtccttttagcacagattttcattttattgtcatgccatagcctcaaatgtattcttgaattggatgctgttattttcagtcagtagagatagtatgggtgaagctatcaaagcattctcattccaaaggctcccagacacacagctaacacatgggagatgtaccaccagaaatgg

SEQ ID NO: 261634 - DNA, 588 bp, Homo sapiens
ataaaaaagagagaggaatgtataattgtcattgtgaccaaaacagccacaataacacgacaactagtcattatatattgaacacttgtcttatgcaggctttgcattaagtgctcaacratcattggcacatttaactctcattacccccatcttatgacacaaatttttactactcactgtagaaatgagaaaagcaattctcaaaggacttgtccacagtcacatggctttctggtgctagacctgggattcagagaataaagggtcactgatgcacatgtgtacatttgtgtggtgtggggtggccatagtccccatgtgttctcaaacccacctctgaattgaaaggtgaagagcatcgtaaatcatgaaaaccatccaggatgtctcttctaactattgctgcgtgtccttttagcacagattttcattttattgtcatgccatagcctcaaatgtattcttgaattggatgctgttattttcagtcagtagagatagtatgggtgaagctatcaaagcattctcattccaaaggctcccagacacacagctaacacatgggagatgtaccaccagaaatgg

SEQ ID NO: 261635 - DNA, 588 bp, Homo sapiens
ataaaaaagagagaggaatgtataattgtcattgtgaccaaaacagccacaataacacgacaactagtcattatatattgaacacttgtcttatgcaggctttgcattaagtgctcaacgatcattggcacatttaactctcattacccccatcttatgacacaaatttttactactcacwgtagaaatgagaaaagcaattctcaaaggacttgtccacagtcacatggctttctggtgctagacctgggattcagagaataaagggtcactgatgcacatgtgtacatttgtgtggtgtggggtggccatagtccccatgtgttctcaaacccacctctgaattgaaaggtgaagagcatcgtaaatcatgaaaaccatccaggatgtctcttctaactattgctgcgtgtccttttagcacagattttcattttattgtcatgccatagcctcaaatgtattcttgaattggatgctgttattttcagtcagtagagatagtatgggtgaagctatcaaagcattctcattccaaaggctcccagacacacagctaacacatgggagatgtaccaccagaaatgg

SEQ ID NO: 261636 - DNA, 610 bp, Homo sapiens
tgaacacttgtcttatgcaggctttgcattaagtgctcaacgatcattggcacatttaactctcattacccccatcttatgacacaaatttttactactcactgtagaaatgagaaaagcaattctcaaaggacttgtccacagtcacatggctttctggtgctagacctgggattcagagaataaagggtcactgatgcacatgtgtacatttgtgtggtgtggggtggccatagtccccatgtgttctcaaacccacctctgaattgaaaggtgaagagcatcgtaaatcatgaaaaccatccaggatgtctcttctaactattgctgcgtgtccttttagcacagattttcattttattgtcatgccatagcctcaaatgtattcttgaattggatgctgttattttcagtcagtagagatagtatgggtgaagctatcaaagcattctcattccaaaggctcccagacacacagctaacacatgggagatgtaccaccagaaatgggaggcatgtgagaatttgcagagaaaacctayactctcagaatcagaaggactgctgtcttaacaaactgggcaaagcagactatgtttctttcctatca

SEQ ID NO: 261637 - DNA, 634 bp, Homo sapiens
aaacatgtacaattagagcatagtatggtgtctgatagacagtaggaaccaaaccaatttkaattatcacaaattgtctcactgaatccccataatagctgtatgtgacaggtaataactctcattttgcagatggggagactcttattaggagttgggaagaacatgactgcagccactggcctataagtgacagagctggtctcctttcaccacacaggaagtttctctaatgtagtttacatactgatctcacaggaggttaacttggagggtacacaggaataatagttatgtattgactataatatatacagagaaacataactactaccagtctcattttttatgtttagaatgaagctgagtatgagaaattatgttgatttaaaaatattaaatccgtagttatacagatgagacattgaagtggctaaagttgtcaatgtgacttatagaagcaaaggaagttagagctatctactcattaatgtagagcaggaaaaatatcaaaggaatgaatacggggttgaggttcagacttaaggcctggaatatgtgtgtgtatgtgtatgtatatttctatgtgtatatatatttaaattctagtcatcctagaatttcaatataactt

SEQ ID NO: 261638 - DNA, 406 bp, Homo sapiens
ctagggttcatcctgttgtgcatttgctcatcacacacattcattccacaaacactaatggagcatgactgtagataaaatamcatttcagacagtggaacaagagaagaaaactcagtttcctaacttaaaatccagaataataccaactagactaagttgcctctttgtccaggaaagtttatgccacaaatcaaaataaaggcaggtctttaggagaacctcattgctatcagagatgctctaaacttgtaggagcctatcaattaagtgtttagcactcaggtgttggtttattttggatcttgggcttgatgtgatgatttcttcttgagaaaacttgttttgggattccagctgttgggatcaaatccacagggataagagaagtcaacttccttcctcg

SEQ ID NO: 261639 - DNA, 575 bp, Homo sapiens
ccctgttcccaatagctttgcctttgtgagtttacagaaaatgttcgagttccatttctrtaagcatcatccccatgtgactccctgaacacattatagcccttcattaaaatgtaaatggcatcaggaagggacatcactttaacctcttatcaattatcactgcctcagtatgattcaggttatctgcctgtatctagaaaaattaatcactccctgctgtgacagtcctcatatattccagttttcctaagcactttctaatttcataattttacccttctcaaaagggtgacttattaaacttacctacttatgagtatttgtatacattaatattttacataaattaaaatgttgaccaaaaaaatcatgggtcaaagcatgtgttctgccttttccttctagaggtacagtacatgccctagttttagcagtcactgggctgttccatagtgctttgcacacatggctaaactacctccctgggcaatgcctcctcaagggcaaagaccttagctggtgctcaataaatgcttactgagtgattagtaaagatactaagtggactaata

SEQ ID NO: 261640 - DNA, 575 bp, Homo sapiens
ccctgttcccaatagctttgcctttgtgagtttacagaaaatgttcgagttccatttctgtaagcatcatccccatgtgactccctgaacacattatagcccttcattaaaatgtaaatggcatcaggaagggacatcactttaacctcttatcaattatcactgcctcagtatgattcaggttatctgcctgtatctagaaaaattaatcactccctgctgtgacagtcctcatatattccagttttcctaagcactttctaatttcataattttacccttctcaaaagggtgacttattaaacttacctacttatgagtatttgtatacattaatattttacataaattaaaatgttgaccaaaaaaatcatgggtcaaagcatgtgttctgcyttttccttctagaggtacagtacatgccctagttttagcagtcactgggctgttccatagtgctttgcacacatggctaaactacctccctgggcaatgcctcctcaagggcaaagaccttagctggtgctcaataaatgcttactgagtgattagtaaagatactaagtggactaata

SEQ ID NO: 261641 - DNA, 618 bp, Homo sapiens
ccaggggattagaaatcattctggcataaagacacatgaacatgaatgttcattgcaacactattcacaataacaaagacatggaatcaactcaactgcccatcgataacagattggataaagaaaatgtggtacatatacatcatggaacaaagattatgtcctttgcagaaacatgaatggagctggtggccgttatcctaagcaaattaatgcaggaacaggaaaccaaatgctgcatgttctcatttttaagtgggagctaaatgatgagaactcatgaacacaaagaagaggacaacagayactagggtctacttgtgggtggagggtgagaggaggaagaggagcagaaaagataactattgggtactaggcgtagtgcctcagtgacaaaataatatgtacaagaaacccatgtgacatgagtttacctatataacgaacctgcacatgtacccccaaacctaaaagttaaaaaaaagaatatttctacaatgaataaaacagtgttttgctttgccatttctctcagcatccctctgtccaataacccaaaacagtttattagaagggatgggttggacatggaccaaaagagagcaaaagtacaaacca

SEQ ID NO: 261642 - DNA, 539 bp, Homo sapiens
attggtctttgagaaagaaatctggtgcttcttccacattgcttttctttaaactttgacattgaagtaacatgtagaaatgcttctcattttaataagggcatattcttaattgtatgaaaagcaccagaatattacctaaaaatagaagatccctaaaatgctagggtctttatcatgtcaaatgacagttgtttatgacatcaatttatttttttactttgcaattgcgtaaaaatagcaataacgtggcaagtgagatgatgcgattgattcacatgctgaattattcattcaatttcagctgttgacttcacatgagacatcttcgaacgcacagcgtataaattatgatgaatctttttgccacaaccactcaaacctctctgatgctttctgtatccatttatgcatacagcctggaatttctggtatctccttaactaagtccaaagtgattctatacattaaaggctgaagagtggggctccagcaaayggtctccaggaagtgacattctgttctgagaaaggtcagtt

SEQ ID NO: 261643 - DNA, 619 bp, Homo sapiens
attctcataattccaaactttattttatttatcttcctacacatattaatatgctatagtgggaactgtcttaaatttttaaaatatattggatataagttatagaaaacttaacttaaaaggtagggcatggtggcgcatgcctgtaatcccagcactttgggaggccaaggtgggcagatcaggaggtcaagaggtcgagaccatcctggccaacattgtgaaaccycttctttactaaaaatataaaaattagcttggcgtggtggtatgtgcctgtagtcccagctactcaggaggctgaggcaagagaatctcttgaacctgggaggcggaggttgcagtgagctgagatcacgccactgccctccagcctggtgacagagcgagactgcatctcaaaaataataataataataataataatattaataatgataattaacttaaagaaaaaatatatctactgtttcttctctcaattgttctgctcccccagtgagatgacaggaagaatttctctctctgccatcttttaattttgactgtaaactatcacttcagtccattctacttcattttcagagcagtaatattacagacttcttataagaagaaa

SEQ ID NO: 261644 - DNA, 457 bp, Homo sapiens
tcgccatgttggccaggctagtctcgaactcctgacctcaggtgatctgcctgcctcggcctcccaaaatgctaggattacaggagtgagccaccatgcccagcaataaacataagtttttaaagtgaacagcattattaatgattaggaaatgcaaaataaagctaggtaccatttttcacccaaaaggttgaaagcaataataatacctaggtcagcagaaatgtaaggaagtgggtaccctcatacattactggtggtcatgtaagttgttacaacctgtctggacagcaatttggcaatgtgtctcaaaatgcattaagatgtggctaagattattcctgtctcccaatawccattttacccttcccagagaaatatatatatttatatatatttttactgggcctctgaccacacagactaaagatgcatttgcagcttggtgagaccaagt

SEQ ID NO: 261645 - DNA, 541 bp, Homo sapiens
gaactccatagctctcacataaccaccaacagcatgttgttgtgcttctttacagtttccaggaggttttagtttttggttgaggktatttctaaattcttaggttataataatcatgccatgcacatatttctaaaacattcttttttaacttgagtatatcataagcattttcccatgttagtacatagtcttcaaattatgactgccaaatactttgtaagtgactacacctattttgctcaatacccaccaatcattaggcaattaagttgtcattcttcaaggggtccattttctggaagcgatgtgtttgaatcatgaagaaaagtgtcttcaagaatgggcctgcctcctctggtctttatcacggccactatggccagtgcttaggctgctgatggaacttaattagttcctctgctaacactccatacctccacattcaccagcagctgctcctgaagtcacagagtgtgagggcaccacttctattatctggtccaatcctactttcattgacaatgagcaacactgagct

SEQ ID NO: 261646 - DNA, 621 bp, Homo sapiens
aattcttcaaaatcaagattctttaagtatactatgacaagttacctattgctgactcaacaaaggctaaaagaaaatgtttgacttggaataaggaaaaaatcatgaatttgtagtataattaaaagatattgtgtaagccattaaagaagctgtaaaatcttraaaaggatatttcaatggtcactaaataattccaatagataaagcgtaaatagttaaccaaaattaacttatagattaattcaaattattgacatttctcacatgcatcatgaagttgtaaaatctgaagcttaacattatataaagaagctatttcatttaaggggaatgaataaaaaatgatgatgataataataaacaataacagataacatttcctgaccgattactgtgtgccagacacagtactgagccatttatgtgaattatctatgtaatccttacagcaacttaactaagaagtagtagtttttattgtccctgttttacagttgaagccgtgtaatatacagctagtgttttcctcatccatcaaaaaaatctttaatatatttggctgtaacaaatgagcatggcaattatttccttgtctcattgctttatctatgtgagaag

SEQ ID NO: 261647 - DNA, 510 bp, Homo sapiens
gacttccatggaaatactagtttgctgatgaaaggaatccttaaggcattagcatgacttctctgttcactgagcaaggctrgttattctaataacatattatccaggtatgactattcatttcaaacagtacaagtgctatatttactttgttttgagggcttcatgtcattttgctaacatcaaacccacaacaagcatattctaaatcaaattaaatcacataatggcaggaacagagtattcatttaagttaaatgagtgtgcctaccagcattaataaaagaaaggccaggtgcggtggctcactcccataatcctaatactttgggaagccgaggtaggaggatgacttgagcccaggagtttgcgactagcctcagcaacatagcaagaccacatccttatttaaaaaaaaaaaatagccaggcttggtggcatgcacctgtagtcccagctactgagaggggtggagtatagggtgaggtaggaggatcgcttgagcctcga

SEQ ID NO: 261648 - DNA, 321 bp, Homo sapiens
gctatatttactttgttttgagggcttcatgtcattttgctaacatcaaacccacaacaagcatattctaaatcaaattaaatcacataatggcaggaacagagtattcatttaagttaaatgagtgtgcctaccagcattaataaaagaaaggccaggtgcggtggctcactcccataatcctaatactttgggaagccgaggtaggaggatgacttgagcccaggagtttgcgactagcctcagcaacatagcaagaccacatccttatttaaaaaaaaaaawtagccaggcttggtggcatgcacctgtagtcccagc

SEQ ID NO: 261649 - DNA, 597 bp, Homo sapiens
ctagcatgtgactttctagaagaattgacctgcctcatcataacttggagagttcatcatgtgctgtgtgtaggtcacttataaaatattaaataaatgaatttcagactgttcactgggttactttttcatctacaaataaatgtttcttttatttttccgcacttgggctacttttctatgattatccctgatcagtaataaataacaatttaattttttaaactttttattttaaaataatttcaaatttacttgaaagttacaaaaataccacaaagaatgcctgtgcatatacatatatatatgcatatatatgtatatgcaatgtgtgtgtttgtgcgtatgtatatatatatacacacattgtatgtgtatacacacattgtgtaaatatatatatacacattatatatgttttttgtaatcatttaagggtaatttgtgcacattaggctcctttacttctaaatacttcagtgtgcatttcctaagaataaggacatttacttgtataattatcrtacaatgatacacaaaaaatttaacattaatgcaatagtaccaatttaatccatagacctaattcaaatttca

SEQ ID NO: 261650 - DNA, 494 bp, Homo sapiens
gtagcaataaacgcttcttggaatgcatattcactaaaagttagatactctaagagactaagctacttcctggtcaaaactgaatatgtgaattggaaagtacaaaagatatttccatatttacactgtacagatgttttgaataatcagtgacatttgtgactcagctgccattcttcccagtggactcagttctgaaccactaacccagaccaggaagcagagtgaccacaggtatctcrcagcaggcattgccacaaaagaatctgaacacatttatcctcatggttttaagcccacattgtcaaaggctttgaagatttgaggcaaaatgcgaggaaactgctgaggaagtataagtaggtaaaagaatgtcagtattcaaagctgcatttggtcaggacattcaggagaaaaaatgcttgggcagcctcacctcccacttccacttcctggccaatcgcatatgtatgcaaatatacaaagccacaacc

SEQ ID NO: 261651 - DNA, 579 bp, Homo sapiens
tcaatatcctccaggaaaacatgacatctccaaatgaactcaataaggcaccacggaccaaacctggagaaacagagatatgtgacctttcaggcagagaatgcaaaatagctatcttgaggaaactcaaagaaattcaagataatatagagaaggaattaagagatctatcagataaacttaacaaagaaatgaaaataattagaaagaatcaagcaggaattctagagtttaaacatgtaattgacacactgaagaatgcakgagattcttttcgtagcagaattattaagcatgagaattagtgggcttgaagacaggctatttgagaatacagtcaaaggagataaaggaagaaagaatcaaaaacaaagaagcatgcctacagaatccagaaaagagtttcaaaagggcaaatttaagagtaattggccttaaagaggaggtagaggagacaggagtaaaaaatttaatcaaagggtaatagcagagaacttcacaaatctggagaaatatatcaatattgaaatacaggaaagttatagaacaccaaggagaattaacccaaagcagactaca

SEQ ID NO: 261652 - DNA, 532 bp, Homo sapiens
aaattatttttttgtgaaataccaataacattggtataaattacaagcaatgttacataataggacaaatatgtataaggccaaygctatttttgtatattccctaaagttttcaattaaatatcagcaaacaataaaagaacatattaaataaatattatatgttccactaagttatagtgatcacttaaatccaaaaaagtatgtactgcacaaaaagaaataaaaaaaattgaaatgtaacttacaatgagactcacatatatgcagtccattgaatttcaatggaagtattaaagcacttaaatgtgtaaactgtttcaaaaaattgtataaaaataactggatatttgtatgtaaggagaaatgaactctggtttttatctcacaacaaatacatccattaaataaaaatggataatagaccaaaatgtaaaaattaaaatcccaaaaattctaaaagaaaacttaaaaaaatttgcaatgtttatatagaaaaataatttgcctgcttaatgtggcaactataggc

SEQ ID NO: 261653 - DNA, 566 bp, Homo sapiens
cctctcttcctgtagcagtttcccaaacttttcatataactacttctttcaggcctctacrtaacattactttgtagacaaggctttcccgcctccttgaaatatggtgtctcagtacctgtattgtaataaaacctatcacacaaatgtttctcattttattttttgtttttaatactgtagaggtaaggcctgtgacttttctatctacccagcattccccagcactcataatgtatttgctcaataaatgttcctagatagtccctattttgggaatttcactgtcatcttttccctttccaagtctgaatcctagaagtctactttattacactccttctcccttaagtgaaatatacatgtatacacacacacacatatatatacacacacatatatgtgtgtataaatatatgtgtatgtaaatatgtgtgtatatgtgtgtgtgtatatatttatatatcgtttttgcctctttaatatgtcttccatatctcatttgtctttcttttgagacaaggtcttgctctgttgtacaagctggaatgcaattgcaagatctc

SEQ ID NO: 261654 - DNA, 488 bp, Homo sapiens
aaaatgcaattgaatttctgttgcttgaaacagaaataccaatattgaggagaaatgaattatctttttcatactccctcaagtgcttaaatcctagtatattactrtttgtttcattttttgtctgagacatccatgactacctctgtgaggtcaacagcagcctacttggcagctggtgcaggcatagagcggagggatttataaataggttagatcatttccttatcactcagtctgcatagggaacaccatgagaaggtaaaagtatgagtttgtggcaggacttggtatggttgtaagtcgaagatatcagataattttctgtaggttgttcatttttgagttgcttcagggtatgtcgatattgataaaaggtctgaagttacagactccatcagtatcctccaagccaaaacagcaatcatttccttaaaagaggacaactatgtcctgaaattttgagtttctattgtgattcttctatt

SEQ ID NO: 261655 - DNA, 488 bp, Homo sapiens
aaaatgcaattgaatttctgttgcttgaaacagaaataccaatattgaggagaaatgaattatctttttcatactccctcaagtgcttaaatcctagtatattactatttgtttcattttttgtctgagacatccatgactacctctgtgaggtcaacagcagcctacttggcagctggtgcaggcatagagcggagggatttataaataggttrgatcatttccttatcactcagtctgcatagggaacaccatgagaaggtaaaagtatgagtttgtggcaggacttggtatggttgtaagtcgaagatatcagataattttctgtaggttgttcatttttgagttgcttcagggtatgtcgatattgataaaaggtctgaagttacagactccatcagtatcctccaagccaaaacagcaatcatttccttaaaagaggacaactatgtcctgaaattttgagtttctattgtgattcttctatt

SEQ ID NO: 261656 - DNA, 410 bp, Homo sapiens
aatctcttcttcacggccctgggcccaagtcaamaatcctctattgtctgtctctataaatcagttattctgttctgggatttaatgtaaatggtatcatagagtgagtattattttattcctagtttttaaataatcatcattttataagttgcatccacgttgttatgtttatcaataatagtttattctctaatgcttagtaatgttgcatcatctgtttttaattatttacaagttgatgagtgctttgtttctaattttttgttattatgaataaaactgctgtgaacatttccatcaggtctttatgttgacagtgtatttatttttcttggaagccacaagaagtagtttttgtgtctcttttattttcaaatggtccaaactctgttatttaaattaatttc

SEQ ID NO: 261657 - DNA, 413 bp, Homo sapiens
gactgctaaacgtgtggacgtgaatgagctaatccaaccagtgggtgtaaaatgatggtaaaaatgataatgagagaaccatggtgaaactgaccagaaaggcagaaagggtgaattgcagttgcagataagagatggaaaaacaagcagagaggaatatggtgagccatgagcactggtgtagaagccaagataaagaaagattcaagaagagggagaagtcagaatattgttgaatgttgttgtgctcrtgattttgtttttaaatacaataatcaggaaatgataactttcagtacatgctattccaaaatatagcaccctggcacttgaaaaaacagcagaagaaacaaggtctctctgctcttctcctgtccttctctcctgaagcaggccctaaaacacttatccga

SEQ ID NO: 261658 - DNA, 514 bp, Homo sapiens
agaaatcatgcttaccagcctcaatgacacctgtgaatttgamgatgaggccagggataaagaagacataaacattttgagaaaattggtgaaataattcaacattcactccctctaatgtgggatgaatcaatctgatgactggacattaaaaattagttttaagagactcttggtgtctactctgacttcaaaatagcatagttcttcacagttatgtgatttttttctagagcagtttttagtgactttgggtaagagcaaaaactgggggctttatcttggggaaatatgacaaaaaaatacagacagtttgaaatataacactaatgattatgccctctcttcacagtgctctaaatcttggtatcttaaaaaactgtgacaacttttgtaaccttcagtttcatgagatggactaattagtatgagtggtgaggccacatgggatttagattctagttgtgagacagactagttgtaaagcatgtgatttcctttagttaaattgctt

SEQ ID NO: 261659 - DNA, 514 bp, Homo sapiens
agaaatcatgcttaccagcctcaatgacacctgtgaatttgacgatgaggccagggataaagaagacataaacattttgagaaaattggtgaaataattcaacatycactccctctaatgtgggatgaatcaatctgatgactggacattaaaaattagttttaagagactcttggtgtctactctgacttcaaaatagcatagttcttcacagttatgtgatttttttctagagcagtttttagtgactttgggtaagagcaaaaactgggggctttatcttggggaaatatgacaaaaaaatacagacagtttgaaatataacactaatgattatgccctctcttcacagtgctctaaatcttggtatcttaaaaaactgtgacaacttttgtaaccttcagtttcatgagatggactaattagtatgagtggtgaggccacatgggatttagattctagttgtgagacagactagttgtaaagcatgtgatttcctttagttaaattgctt

SEQ ID NO: 261660 - DNA, 561 bp, Homo sapiens
ggtatataagacaagttagcactaatgaccyactgtacagcatagtccttatagataacaacactctattgtatacctaaagattttctaagagggtagcatttattttatgttctaatacaaataataaataagagattagcagaaaatttggaggtgatggatttatggtacagactgcagtgattgtttaacaggtgtatacttctcttcaaactcattaaattgcatacattatgcatgatattttataaatacaatttttaaatgaaaaataacattgagtttttttttttaaatgtgggatgaacatatttggaaaattgaaatgcaaacagtttgttagcaataccattaatttgttaatttatcttataattatcaaagtggagatacaggattcaatgtctcctaaatttgataagaaagcagtgtttccaaaaactatctcagggaagaactatttaaggaaatgcatattgaggaacattgaaaattatgaacatcactatccctttcggtttattttctacttaataagaaattaaaacaatatatatt

SEQ ID NO: 261661 - DNA, 561 bp, Homo sapiens
ggtatataagacaagttagcactaatgacctactgtacagcatagtccttatagataacaacactctattgtatacctaaagattttctaagagggtagcatttattttatgttctaatacaaataataaataagagattagcagaaaatttggaggtgatggatttatggtacagactgcagtgattgtttaacaggtgtatacttctcttcaaactcattaaattgcatacattatgcatgatattttataaatamaatttttaaatgaaaaataacattgagtttttttttttaaatgtgggatgaacatatttggaaaattgaaatgcaaacagtttgttagcaataccattaatttgttaatttatcttataattatcaaagtggagatacaggattcaatgtctcctaaatttgataagaaagcagtgtttccaaaaactatctcagggaagaactatttaaggaaatgcatattgaggaacattgaaaattatgaacatcactatccctttcggtttattttctacttaataagaaattaaaacaatatatatt

SEQ ID NO: 261662 - DNA, 356 bp, Homo sapiens
tacattatgcatgatattttataaatacaatttttaaatgaaaaataacattgagtttttttttttaaatgtgggatgaacatatttggaaaattgaaatgcaaacagtttgttagcaataccattaatttgttaatttatcttataattatcaaagtggagatacaggattcaatgtctcctaaatttgataagaaagcagtgtttccaaaaactatctcagggaagaactatttaaggaaatgcatattgaggaacattgaaaattatgaacatmactatccctttcggtttattttctacttaataagaaattaaaacaatatatatttttcagaatatagtgccttggggaa

SEQ ID NO: 261663 - DNA, 356 bp, Homo sapiens
tacattatgcatgatattttataaatacaatttttaaatgaaaaataacattgagtttttttttttaaatgtgggatgaacatatttggaaaattgaaatgcaaacagtttgttagcaataccattaatttgttaatttatcttataattatcaaagtggagatacaggattcaatgtctcctaaatttgataagaaagcagtgtttccaaaaactatctcagggaagaactatttaaggaaatgcatattgaggaacattgaaaattatgaacatcactatccctttyggtttattttctacttaataagaaattaaaacaatatatatttttcagaatatagtgccttggggaa

SEQ ID NO: 261664 - DNA, 540 bp, Homo sapiens
caatggaataaaactggaagtcaacttcaaaaggaactctcaaaaccatgcaaatacatggaaattaaataacctgctcctgaataagcactgggtcaaaaatgaaatcaagacagatattcaaaaattatctgagctgaatgacaataatgacacaatctatcaaaacctctgggatacagtaaaggtagtgctaagaggaaagttcatagagaactttccacacatcacatcaaagagactgaaagagcacaaaccaacactctaaggtcacacctcaaggaagtagagaaataagaaaaaaaacaaaacaaagcccagcagaagaaatgaaataaccaagatcagagcagaactaaatgaaattgaaacaaacaaacamaaacaatacaaaagataaatgaaataaaaagctagttatttgaaaagataaataaaattgatagaccattggcaagattaaccaagaaaagaagagagaaaatccaaataacctcactaggaaatgaaacaggagatattaccactgacacaactgaa

SEQ ID NO: 261665 - DNA, 587 bp, Homo sapiens
caacactaacagatcagaacattattcagagaatataatgctggtaactttcattgtagatgctagacactaagtactacacaaatgggtaggaggcacaatagcgtsttaaacatttgatgaacaaataacataaaaggtgggagttaaccaccaaaaataatacaatactcttttcatcctcctgtcattctcctccacaaaaaatccacagcaatgatgaatagtgtttgttatagttctaataatgtcatttgatagcaggtttaggtttttcctgaatccaagggctttacatgagtctgaaataaagaacaccatttattgtaactctgactgttgtgttctgatttcttttctggtaaatctttatgctatgattttagatgatgttgaactttataaatgaggcttagcttacattatccggaaaaatattatttgtgtgaatgagctgaaataaataaataaaagacagattctttgttcctctttagtaacagcataagcctcagagaccaaataaaataagggaggcttacttcccctactcgaggtatttgtttcattcccttgctggaaatgtc

SEQ ID NO: 261666 - DNA, 587 bp, Homo sapiens
caacactaacagatcagaacattattcagagaatataatgctggtaactttcattgtagatgctagacactaagtactacacaaatgggtaggaggcacaatagcgtcttaaacatttgatgaacaaataacataaaaggtgggagttaaccaccaaaaataatacaatactcttttcatcctcctstcattctcctccacaaaaaatccacagcaatgatgaatagtgtttgttatagttctaataatgtcatttgatagcaggtttaggtttttcctgaatccaagggctttacatgagtctgaaataaagaacaccatttattgtaactctgactgttgtgttctgatttcttttctggtaaatctttatgctatgattttagatgatgttgaactttataaatgaggcttagcttacattatccggaaaaatattatttgtgtgaatgagctgaaataaataaataaaagacagattctttgttcctctttagtaacagcataagcctcagagaccaaataaaataagggaggcttacttcccctactcgaggtatttgtttcattcccttgctggaaatgtc

SEQ ID NO: 261667 - DNA, 587 bp, Homo sapiens
caacactaacagatcagaacattattcagagaatataatgctggtaactttcattgtagatgctagacactaagtactacacaaatgggtaggaggcacaatagcgtcttaaacatttgatgaacaaataacataaaaggtgggagttaaccaccaaaaataatacaatactcttttcatcctcctgtcattctcctccacaaaaaatccacagcaatgatgaatagtgtttgttatagttctaataatgtcatttgatagcaggtttaggtttttcctgaatccaagggctttacatgagtctgaaataaagaacaccatttattgtaactctgactgttgtgttctgatttcttttctggtaaatctttatgctatgaytttagatgatgttgaactttataaatgaggcttagcttacattatccggaaaaatattatttgtgtgaatgagctgaaataaataaataaaagacagattctttgttcctctttagtaacagcataagcctcagagaccaaataaaataagggaggcttacttcccctactcgaggtatttgtttcattcccttgctggaaatgtc

SEQ ID NO: 261668 - DNA, 587 bp, Homo sapiens
caacactaacagatcagaacattattcagagaatataatgctggtaactttcattgtagatgctagacactaagtactacacaaatgggtaggaggcacaatagcgtcttaaacatttgatgaacaaataacataaaaggtgggagttaaccaccaaaaataatacaatactcttttcatcctcctgtcattctcctccacaaaaaatccacagcaatgatgaatagtgtttgttatagttctaataatgtcatttgatagcaggtttaggtttttcctgaatccaagggctttacatgagtctgaaataaagaacaccatttattgtaactctgactgttgtgttctgatttcttttctggtaaatctttatgctatgattttagatgatgttgaactttataaatgaggcttagcttacattatccggaaaaatattatttgtgtgaatgagctgaaataaataaataaaagacagattctttgytcctctttagtaacagcataagcctcagagaccaaataaaataagggaggcttacttcccctactcgaggtatttgtttcattcccttgctggaaatgtc

SEQ ID NO: 261669 - DNA, 580 bp, Homo sapiens
catatccttttttaaagaaaatctttaatgcatatttattaatctctaaatttagaatgaaatttttgtcttacctacctggaattgtctataatgtctacccttattctgccttttctgacaatttaattatgttctatcagagatagctctattaaaatttaagccaaaaacagaagcaactatttagatagttaataatgtatcccaatttgtaagaatatgtttaaatggcttgattaaaagcagaatgtactgttttctaaatagtcttcacaatttctttaatttgcctttcttctcaactatttgtcttacctcctgagtttactctagaactttgtagaattaactattaccgccatgttaacaatacctattgatttttgtctttcaatattagaaaattcaaataaaggccatgaactcaagtgatgtaagccggtttatttaaaatactrtatgctaacaacacctctatctggacttaaatccctgttgtggcaaaaaaaaacctacatatgctgataaaagacaagattatagttcagacatgaactttcccacattaaaaggcaga

SEQ ID NO: 261670 - DNA, 594 bp, Homo sapiens
tcccctgttgtgcttaaacagcttccttcaaatttctggtggctcctggaggcctgtgaggcagtgacatgattctgagagacagaacatccctgcaggcccaggaagatgtgatctttcccacttgtctctgctgagatgataagtattcacagcatgacattccgagaaaaaaattacataaaagcarttttcctcagtactatttctggaccttgtatgagtcactcattgccttctgaagtgcttgcattgctaatgagggctttccatgcacaatacagcaagaatccttcaaaattctattgggatggagaataaagaaattgctgtttcattcttaagttcatcctgaagggttagagacaaactaaatggaagaaccaaccacttatgctgtgctaggtgctttatctacaaagccagccacctgggaagtacaagctcaatgcatctagaatgccccatgcctgtctcagtagtgtttaattcttccaagagcttattgtaccagctggaagaaatacagtgacacacttcttagagataagtctatctcttgttatgtgcagagctggaatcttgtgttatgtg

SEQ ID NO: 261671 - DNA, 481 bp, Homo sapiens
ggggcatttaaaacagcctgcttcccaatgaggtggaattaaatggtgatgttatcctattggaggctgtctcctggaggtgataacctatgttcctgatcactggggggatggtgcccttattcctacccacttgtcatgcctcccaaatgtctgtatgacattgacctgaarccacctttgcaaaattatgacagcaagagaaatatgacatagttgactccatcttacttctaacctccagtttctccttggtcattcctgggtgtagaccaagctgaatttgggatgaatttagtttatactttaaccttaaagcaaggatggtaatagcccttcttaaaacaaaagcacctttttaaaactaaagaaaggtcacccgttaggattatgagaggggcttgaatttgcctaagatgttggcatagttactccttactgttcaggagtcatgtggccagaggtcacaagatttgtgact

SEQ ID NO: 261672 - DNA, 481 bp, Homo sapiens
ggggcatttaaaacagcctgcttcccaatgaggtggaattaaatggtgatgttatcctattggaggctgtctcctggaggtgataacctatgttcctgatcactggggggatggtgcccttattcctacccacttgtcatgcctcccaaatgtctgtatgacattgacctgaaaccacctttgcaaaattatgacagcaagagaaatatgacatagttgactccatcttacttctaacctccagtttctccttggtcattcctgggtgtagaccaagctgaatttgggatgartttagtttatactttaaccttaaagcaaggatggtaatagcccttcttaaaacaaaagcacctttttaaaactaaagaaaggtcacccgttaggattatgagaggggcttgaatttgcctaagatgttggcatagttactccttactgttcaggagtcatgtggccagaggtcacaagatttgtgact

SEQ ID NO: 261673 - DNA, 481 bp, Homo sapiens
ggggcatttaaaacagcctgcttcccaatgaggtggaattaaatggtgatgttatcctattggaggctgtctcctggaggtgataacctatgttcctgatcactggggggatggtgcccttattcctacccacttgtcatgcctcccaaatgtctgtatgacattgacctgaaaccacctttgcaaaattatgacagcaagagaaatatgacatagttgactccatcttacttctaacctccagtttctccttggtcattcctgggtgtagaccaagctgaatttgggatgaatttagtttatactttaaccttaaagcaaggatggtaatagcccttcttaaaacaaaagcacctttttaaaactaaagaaaggtcacccgttaggattatgagaggggcttgaattygcctaagatgttggcatagttactccttactgttcaggagtcatgtggccagaggtcacaagatttgtgact

SEQ ID NO: 261674 - DNA, 574 bp, Homo sapiens
gcctattgctgttgaccaccaaagtaaacactgcaagctgtagtgactttccagtgctaaggagatggagtgactgcaaaggccacagtaaataggactctttaatgacagggcaggaggaggctgccccaggcccaatttattgctgatacagagtctctgaattagggcacatgatgacygctgatcgttaagtagggctgtgaggaaatgtttgtacatatgaagaagctaattaaggtggcttgccagatatgcatactcaatctctgcttattgaggcttcttcctcctgtgagggaggctctccccaatcacataagatctccagcagtcatcctgcatgtgagtgccctgggtagaatatgaaggggctcggggacgagcttgggaactagaagtaaatggttaagattcggcagagggtttttattgtggcaatatctgaacatttgcacatattttctaaacatctttctagagatgacttgagtctcacatacgtgtttctattttaaagcagagtttggatccttccaataagtgcccaaagccaccaaatttggtatagctg

SEQ ID NO: 261675 - DNA, 574 bp, Homo sapiens
gcctattgctgttgaccaccaaagtaaacactgcaagctgtagtgactttccagtgctaaggagatggagtgactgcaaaggccacagtaaataggactctttaatgacagggcaggaggaggctgccccaggcccaatttattgctgatacagagtctctgaattagggcacatgatgaccgctgatcgttaagtagggctgtgaggaaatgtttgtacatatgaagaagctaattaaggtggcttgccagwtatgcatactcaatctctgcttattgaggcttcttcctcctgtgagggaggctctccccaatcacataagatctccagcagtcatcctgcatgtgagtgccctgggtagaatatgaaggggctcggggacgagcttgggaactagaagtaaatggttaagattcggcagagggtttttattgtggcaatatctgaacatttgcacatattttctaaacatctttctagagatgacttgagtctcacatacgtgtttctattttaaagcagagtttggatccttccaataagtgcccaaagccaccaaatttggtatagctg

SEQ ID NO: 261676 - DNA, 574 bp, Homo sapiens
gcctattgctgttgaccaccaaagtaaacactgcaagctgtagtgactttccagtgctaaggagatggagtgactgcaaaggccacagtaaataggactctttaatgacagggcaggaggaggctgccccaggcccaatttattgctgatacagagtctctgaattagggcacatgatgaccgctgatcgttaagtagggctgtgaggaaatgtttgtacatatgaagaagctaattaaggtggcttgccagatmtgcatactcaatctctgcttattgaggcttcttcctcctgtgagggaggctctccccaatcacataagatctccagcagtcatcctgcatgtgagtgccctgggtagaatatgaaggggctcggggacgagcttgggaactagaagtaaatggttaagattcggcagagggtttttattgtggcaatatctgaacatttgcacatattttctaaacatctttctagagatgacttgagtctcacatacgtgtttctattttaaagcagagtttggatccttccaataagtgcccaaagccaccaaatttggtatagctg

SEQ ID NO: 261677 - DNA, 606 bp, Homo sapiens
cttgtgccatcaccctgtgtgttcccagagcagctccttgcttcattttgctttctcttaataaatgacatggcagtcctccctgccccaaagtgaaaaattaattaatttcaggaatatattttatttaactcaatatatcaaaatattattgcaatcatataaaatcaatgtaactgatgtgaaatattaatgagatgttcaccttctaactttatactatgtcttcaaaatccagggcttgttttacatttccagcacatctcaattttggccctatattttcaytggaaatatttgatccgtatttagatttcataaaattcatagccaaaaaactagattgacataaccaagttgttccaggcacacttaagagtttttcaaccactgaatcgagtaataatgtttaatgtttaaacaagttaaaatgaaataaaattcaatattcagtttctcagtctacatttcaagtgctcaagaggcacatatgaactggagagaaatgaaaccaaaaaaacacgggctagtgagttcagattaaacagccacctgaaatcatcattgactgattactcttcttgctggctacctcggcacagcaaa

SEQ ID NO: 261678 - DNA, 559 bp, Homo sapiens
ctgcatgaaaaactgataataggagattaatgtgtttcacagataaggtgaagaaagaagaaattgagcaagagaagaaaagcagagtaaggagccaagagtttaatggcaaaaggacattcatctgaggcataattaatcctcccttcttaccttcagccccagagaactagaagtataactaaacaaaagcttaagaggcaccactttggaaaatattatttcttgaaacatgaatggcgtgaccatgggtctgaacaaagacacctttggggataaataacccacagactggttcctgcccctttcagggcatatttcagaaggaatcacatgcactgtgtttgtatcacaaaccctttgaagcaaatcaaatttttaaattctctcrctgttgctttaatatgctatatcttgcttatccatcatgtaggaaaacattaaaactacttaaaagtgtttacagatgctattcctagcctatttttctccaaaatcaactagtttcccagctgatcaactgaaactgtagaggatgtggcactctcaggaattatac

SEQ ID NO: 261679 - DNA, 582 bp, Homo sapiens
aatccaatgtgtgaggatttgtaaggaactcgggaaagcttattgaagctcttgggtaactcaaagataactcatgggagatttttcatggtttttttttttttctgtgaacttgtgtcctaagaargaagggaagagatagtgataaatgtctttccccacccttagtgggtgtgaggaacaggaactttctgtaccttgtctcacaaagtagaagaggtaaacctgagtcatccactcacttctataaataaacaaaaaactggcataagtgtattagtaaggattttctagagaaacagaaccaacaagaaaagagaggcagagagagaaagaaagaaaagaaaagaaaagaaaagaaaagaaaagaaaagaaaagaaaagaaagaaagagagaaagagagtgggagacacctcaaaggagatttatcatgggaattggctcacaagattgtggaggccagaaaattctaccacctgtcatttgcaaggtagaaaaccaagaaagccaggagtgtaattcagtctgagtccaaaggctcaaaaaccaggcgagaccatgctgtaactcccagtccaagg

SEQ ID NO: 261680 - DNA, 552 bp, Homo sapiens
gacataatcagaaacttcaacataagccccaggtcttctgcttctgtcaaaacactttttagttgctcttacttctatatatattaatcagcctccagctgattcaagatttatcatcaaakaatcagattcttttcatttttatcaaattaggaattaaatttcctttgtgacacttctctctgagacgtataatgatttcttttcttttcagatattgtatcaccttcaattctgataaccatagaacacaggggatcttttatcatttttaaaaaatcataaaggatctgaatcttttaagtataatcttttaagtgacgaattgtttcaaataaatcacttaaatccctgatgtattataggacttgacatcaaaattaagtactcaaaatatgcaagcacagtattagaaatgtcgcatgtattagaaatagcccacctgctctaacataagctagggtggatggcgaagcccactcccccaccacacacaccactgccccctatacacaatctttcccccatataacttcccaggtggatacagaa

SEQ ID NO: 261681 - DNA, 552 bp, Homo sapiens
gacataatcagaaacttcaacataagccccaggtcttctgcttctgtcaaaacactttttagttgctcttacttctatatatattaatcagcctccagctgattcaagatttatcatcaaagaatcagattcttttcatttttatcaaattaggaattaaatttcctttgtgacacttctctmtgagacgtataatgatttcttttcttttcagatattgtatcaccttcaattctgataaccatagaacacaggggatcttttatcatttttaaaaaatcataaaggatctgaatcttttaagtataatcttttaagtgacgaattgtttcaaataaatcacttaaatccctgatgtattataggacttgacatcaaaattaagtactcaaaatatgcaagcacagtattagaaatgtcgcatgtattagaaatagcccacctgctctaacataagctagggtggatggcgaagcccactcccccaccacacacaccactgccccctatacacaatctttcccccatataacttcccaggtggatacagaa

SEQ ID NO: 261682 - DNA, 383 bp, Homo sapiens
ggtggcggtgtgaggaagccgacatggatagagcagccaaaggaagctctgaataggctctggaaaaaactacaacccaacaaactattccatgactgtaaggcgctggaagcctgccaaagtcagacatacattctcactgacctttttagacctgattgactcccaatcagactatgaagactgtgaccraggagtgaattcctgttccttcctggtgatcctgcattactttccagtaagttctctcatggtccaattgttcttttatctgcacaggaagggaatgtgtgattccttttggaaactggagtactgtgggagccaggcccactctcctggctgctggagatctgagcatacccaggtctggaaagaagcca

SEQ ID NO: 261683 - DNA, 598 bp, Homo sapiens
catacagcatgaaatccttaaattgtactactccatcctcccaacatgccatcagttaggtaagtgtaactgcaatattccctcaacatcatatatgcctctgccacatcctgggcacctgaaatagagatgaagacactgtttttgtgctaatgaaccattttaatgcattcagatcaacactgtcagttaacaggagaacacagacagatyctcgtacttacaatggatgggtagcagtgaatggaggtcaacataaaggaagtcttcagaatgaacgtaaagcctgagagttgtttcaaaggaccaataggtgttgtctaggaagtaaagcaggaaggaagattgaatagcctgtgcagagtcatgcaagttggagaagtcaaaatgtgtgcaggaaaatgcaaaataccattagtaaggttaaaatagaaatacatgtggggaaatggtcaaccatgaagtggaagaggtaggcagatcccagaccatgaacactggattccatcctaaaaacattcaactccaacctatcgacagtagaggaacatggaagactgtaaaggaggagagagtaattcagtttgcttttaagaaa

SEQ ID NO: 261684 - DNA, 604 bp, Homo sapiens
gtcatgcaagttggagaagtcaaaatgtgtgcaggaaaatgcaaaataccattagtaaggttaaaatagaaatacatgtggggaaatggtcaaccatgaagtggaagaggtaggcagatcccagaccatgaacactggattccatcctaaaaacrttcaactccaacctatcgacagtagaggaacatggaagactgtaaaggaggagagagtaattcagtttgcttttaagaaagataactgtgataatagcatgtagtttataccatctcaaaggaatttcagaggtaaattaaagctagtgtatttttatgatcccaagataaaaataattctgctctgtcaaacatttaaattcatagatcatacaataatctgtttttctgtaaatgtacagaacattatggctaaatttaacaccacaaatgaaaaccatcacaaggcttcatcaaagcagagacttttgtgagcatgtaggtctgttatttattatttagtgttcacagcactttacaatgctggcctagagataatttaaaccactggtcaattccccagccttttatttctgtgaggcaatataatttaagaagactaatgccag

SEQ ID NO: 261685 - DNA, 607 bp, Homo sapiens
tttgtcacagggattaaattagttaagggtataaagtgcttattatgcctggcacacagtaggcactcaataaatattagttgtccttgggtttgtcattatgattaccgtctccaaaacagacaaacctaygaacaaagactatctttctgcttctcctcttactttcaaattatgtttatattttatttctattgctgcagcaaaacaaaagactttttaaaacaaaggaaaaggctgcaaactgtatcttcagggaattctttatatattgccacctgcattcttcttttctccaagatctaagttattcttccagggtaattttttatttttctgtcttgtgtagcaggcagagcagggtatgtatataaatgctcacatcctaacaatatgctgaaattttcatcaggagatccaaaggtgctaagcctagctttctggatgtgttaattcttacttccgcaaggaaaatactgtatggaattgatacgacccacgcaaaaggctgttgtgcttttctgatattcacagacacatcagctcctggattaaatttgggatttaacatagcagagtccaatcccctgacattgcctggtaaccg

SEQ ID NO: 261686 - DNA, 389 bp, Homo sapiens
tttttccttgtagactaatggttgcatctagctgtgtcttcacaacccatgatgcaaggggcagggtagctctctgggacttcttttataagagcaccaattccattcataccatttatgcccccatgacctaatcacttctcaaaggcctcacatcctgatactatatgaccccatacctgataccttgggaatcagaatgtcagcatatacatttgggaggacacaaacattttgatcataacaaggtcctagaaaagaaaattgaaatcacagaagtagatttgattatttaacatttgcatctagattgccaacattttatttctgttaatgagtttgcaaattcaacyctgttagagcgataccagcttcataccatcccacag

SEQ ID NO: 261687 - DNA, 551 bp, Homo sapiens
atcaggagagattttcttgaaactgcttcacagcccagcttctctctcttcacttccrcttccatctctgcccagcaagtgttgatcccaagagcatttcctaataaactccttggaaattaatctgtctctgtctcagagtttgtgtctcaggagatcaaacctataaaagtgttccagaatgaacaaggaggttatcaaaaaaaaatacaggcataaaaacaatctgttaatctttgattggcgtataactctgagacaattctccccatgtaaataatgcctaggtgtgctacatttagtatatgaagaaaaggtaaagactcagttatagggcagaacacaggtggctcacgcaagtcatctcagcactgtaggaggccaagacgggaggattgcttgagcccgggagttccagacccgccttggcaacacagtgagacccagtttcataaacaaacaaacaaacaaaaaaagcaaaaaagcacccagttgtagagcaatatgatttttccaacagagggagacaaaatttaaacataagctttaat

SEQ ID NO: 261688 - DNA, 551 bp, Homo sapiens
atcaggagagattttcttgaaactgcttcacagcccagcttctctctcttcacttccacttccatctctscccagcaagtgttgatcccaagagcatttcctaataaactccttggaaattaatctgtctctgtctcagagtttgtgtctcaggagatcaaacctataaaagtgttccagaatgaacaaggaggttatcaaaaaaaaatacaggcataaaaacaatctgttaatctttgattggcgtataactctgagacaattctccccatgtaaataatgcctaggtgtgctacatttagtatatgaagaaaaggtaaagactcagttatagggcagaacacaggtggctcacgcaagtcatctcagcactgtaggaggccaagacgggaggattgcttgagcccgggagttccagacccgccttggcaacacagtgagacccagtttcataaacaaacaaacaaacaaaaaaagcaaaaaagcacccagttgtagagcaatatgatttttccaacagagggagacaaaatttaaacataagctttaat

SEQ ID NO: 261689 - DNA, 551 bp, Homo sapiens
atcaggagagattttcttgaaactgcttcacagcccagcttctctctcttcacttccacttccatctctgcccagcaagtgttgatcccaagagcatttcctaataaactccttggaaattaatctgtctctgtctcagagtttgtgtctcaggagatcaaacctataaaagtgttccagaatgaacaaggaggttatcaaaaaaaaatacaggcataaaaacaatctgttaatctttgattggcgtataactctgagacaattctccccatgtaaataatgcctaggtgtgctacatttagtatatgaagaaaaggtaaagactcagttatagggcagaacacaggtggctcacgmaagtcatctcagcactgtaggaggccaagacgggaggattgcttgagcccgggagttccagacccgccttggcaacacagtgagacccagtttcataaacaaacaaacaaacaaaaaaagcaaaaaagcacccagttgtagagcaatatgatttttccaacagagggagacaaaatttaaacataagctttaat

SEQ ID NO: 261690 - DNA, 551 bp, Homo sapiens
atcaggagagattttcttgaaactgcttcacagcccagcttctctctcttcacttccacttccatctctgcccagcaagtgttgatcccaagagcatttcctaataaactccttggaaattaatctgtctctgtctcagagtttgtgtctcaggagatcaaacctataaaagtgttccagaatgaacaaggaggttatcaaaaaaaaatacaggcataaaaacaatctgttaatctttgattggcgtataactctgagacaattctccccatgtaaataatgcctaggtgtgctacatttagtatatgaagaaaaggtaaagactcagttatagggcagaacacaggtggctcacgcaagtcatctcagcactgtaggaggccaagacgggaggattgcttgagcccgggagttccagaccmgccttggcaacacagtgagacccagtttcataaacaaacaaacaaacaaaaaaagcaaaaaagcacccagttgtagagcaatatgatttttccaacagagggagacaaaatttaaacataagctttaat

SEQ ID NO: 261691 - DNA, 588 bp, Homo sapiens
gatcagctgctaacccttctttagggttaaggtgtctgtgcaagagctcttctgaagccctttaccattcttttgatttgaataaattgaggtttatatcatttttctaagtgttctgatcaaccttcctgtacattcttcacttgaattacaacctgaggctcatggaggcatattcaaatctcctgcgggaaattctcaraataaatatgccctctccatcctccactaagaatcactccctgataagccacatcttttaaagggctggatcatcctgcttaggcagggtgggagtgggaaagttagcatgtactgagtgtttcctatgtgtcaaggattaggataagcacttaggtttgttatctaagtctaatctaaacaaaacatccactgttattatattatcataggtgagaaactaaggtttacagaagttacctaacatgctgatggtaacccagcaattaaatgattagagacaaaatgtaaacaaatgatgcctaaatcctgtgcccaaactcttacccacaatgttacgtatagtaccccctggcagaaatttgtcttcttaaagtagcacttggt

SEQ ID NO: 261692 - DNA, 655 bp, Homo sapiens
acaaactggtattctctgtttccacatccacatggagtaacatgattttagttgatagcttcgagtttgtatgttctcgggtccaggtccttgtgagacaataatttctctctttcaatcccarttccaacaaaccaaaagaccaattacttgtgaccaaggagatgaggtcatattatacacacatatataaataaaccctgggaactctgcagccctaacaccgtgtgtatttgttttttggagtatagcgtggggaaggaagggttacagttccaaaaaaaaaaataaataaataagtttttaggaagccagctgttgggattttatcctgcttacataggtttaaatacataggtgtagagaagacctagaagccaaagaattcccatcaaagtaactatacaatttaatgagctagcttgccacaattctatggatgcttgaagaagacacaaggttcctatgtcagagacaaagaattttattactcatagcaaaagcagtcactacccaccactactaagctgtagcccataacactgtttccagctctgacaccaactggctgtattatctgcaacaagtcatttggcttttcagatatttagtcctcacctttatttttgcactaggtagacacggcccaaaatag

SEQ ID NO: 261693 - DNA, 586 bp, Homo sapiens
tttctatttgttttgcttctttaaatgctccttctggacccactgtactacctagaattttaatgaaagcttccaggaaaggcatctgtgtgctcaaagatgacagcttacgtgtatcagaaggatggtggatctcttgatacccacctcggccccaggttcaggtccctgccttacacccagcctttgccgatcaattattctcctctgctactgtttgacacttctcacctgacacatccaacactgcctcctccttctttcttcccactggcccaaattcagtctcagccatgaaacaaagtatttctatccataaatgcaggtaagtttgctgcatggtgtcaatttaggaacyataaaacctaacctggctaccccattggaaagtaatgctgcttttctctattagcagaataaaaattggcacttattgatgagagataaagaagcacagtgaatgaaaaagcaaattcatcaactattgaaaagtataccatttccatacaattagacactctggttggtccatttccctcaaatgttttctgccctttttccatctgttttctacttcagaatactt

SEQ ID NO: 261694 - DNA, 538 bp, Homo sapiens
ccatctgttttctacttcagaatacttttctctaacccttctacaacattaacttgagtgacctgaaggttaaagcctgcaggtattagaagaagaattgccagtcatgcaagctgccaaaagccagctcatccagatactctggagaatttagcactggaaacaaagcaacatgacctttctgttttgggacatcactcattctacctactttttccagttctgccaggaattcattgatgaaagcagatgacatctgagataatacctggtcagactcacctkaagcccatggaggatttatctttgtttctaccaactgtacaataagattttaaaatagcacattcttaattgtctgtatttatgtatattctcctgaaaaactgttatgtaagcagattttctttaaacatgcatccaaaggaaattcccaagtcaattagttcatactaagagaatacaaacttatttaacatcaacctaagtaaaatccactggagaagataagtgtgtagcttagaattacagattgtat

SEQ ID NO: 261695 - DNA, 638 bp, Homo sapiens
ccacatccttcttcttcttactgtcattgctctcatctagacccttacggtttcagtttctattagattagcagcctctcacagtccattctctgcctgactgcttataaatcttccatttaaaatgccatgtgtttcatgtcaggttcttctgaagcctctgctctccagcagtggtaggcagcataagggctcccaaagatgtccatgccagatagtgtgacatgtcatatcatatgacaaagaaattttgcatgtgtaattaaaactacagatttttaaatggggagattatcctggattatcctggtagatccagttggaacacatgagcccttgaaaacagagaactttctccagctggaagcagaagaaatacagcagaagagaaagtcagagagattcaaaacatgacaagggctcaamtcaccattgctagttcaatgatggaaggcaaggtgacaaggaatacatttctcctttcaccactgtcaatcctgcatcatggcctgaaggctctccctatctactgctgctccgctcagaggacctgaaggagctcaaagagggtaccaggtgacagccagcaagaaaacaaacctcagccttatgactgcaaagaactgaattctgccaac

SEQ ID NO: 261696 - DNA, 638 bp, Homo sapiens
ccacatccttcttcttcttactgtcattgctctcatctagacccttacggtttcagtttctattagattagcagcctctcacagtccattctctgcctgactgcttataaatcttccatttaaaatgccatgtgtttcatgtcaggttcttctgaagcctctgctctccagcagtggtaggcagcataagggctcccaaagatgtccatgccagatagtgtgacatgtcatatcatatgacaaagaaattttgcatgtgtaattaaaactacagatttttaaatggggagattatcctggattatcctggtagatccagttggaacacatgagcccttgaaaacagagaactttctccagctggaagcagaagaaatacagcagaagagaaagtcagagagattcaaaacatgacaagggctcaactcaccattgctagttcaatgatggaaggcaaggtgacaaggaatacatttctcctttcaccactgtcaatcctgcatsatggcctgaaggctctccctatctactgctgctccgctcagaggacctgaaggagctcaaagagggtaccaggtgacagccagcaagaaaacaaacctcagccttatgactgcaaagaactgaattctgccaac

SEQ ID NO: 261697 - DNA, 562 bp, Homo sapiens
atgcgacaacttactgaaacgtaaccaatctcccatccctatatttccagaacataaactcttgcttgaacacggcaatatagtgattataagcttttatataaaacatatttttggaatcatcaactattatctgctaaggaatttcaacttggtaaattactgtcttgaaaacacataactgcctgctaagggctgcttttctcttgatactaaaaaaactagcgatagggtcctttattgaattaaatttgtatcctatttctagaaatttgagctggtttacaaaaatatgtatcatataaaagaataagataaatgtgtttaattctaagcaacattctttcytctaattttaaaatttctgaaatgagggagtctgtttaaatggatgtgttcctgataatgtttctctttctattgagagtctaaatctcagccccacagtcagtggcaactgagagtgaaagatagcttgccaattggaaatccaactgaagggaaaatatgggttaaagaaatagaagggggatttgtacacttagcacatactaccactaat

SEQ ID NO: 261698 - DNA, 562 bp, Homo sapiens
atgcgacaacttactgaaacgtaaccaatctcccatccctatatttccagaacataaactcttgcttgaacacggcaatatagtgattataagcttttatataaaacatatttttggaatcatcaactattatctgctaaggaatttcaacttggtaaattactgtcttgaaaacacataactgcctgctaagggctgcttttctcttgatactaaaaaaactagcgatagggtcctttattgaattaaatttgtatcctatttctagaaatttgagctggtttacaaaaatatgtatcatataaaagaataagataaatgtgtttaattctaagcaacattctttcctctaattttaaaatttctgaaatgagggagtctgtttaaatggatgtgttcytgataatgtttctctttctattgagagtctaaatctcagccccacagtcagtggcaactgagagtgaaagatagcttgccaattggaaatccaactgaagggaaaatatgggttaaagaaatagaagggggatttgtacacttagcacatactaccactaat

SEQ ID NO: 261699 - DNA, 569 bp, Homo sapiens
aatgcttcaggctgcaacaactgagttctgccacaggatagtccatatcccatctgggtgtcttcggacatcaatctctgactttttcacgcacacatttgttttgggctagaggcaggtacaatcattaytgctacttgatccatggtggagctcaaagtggacgatgtgtaggcatcagactaccttgctgtttctgccataataccctaattaattaccctcttgtctgcacctgagacttctctggcccctggcttctcactctttgggcatggagcattcttgatgctcccactattctgcatcaaaacatgctcacatatatattttttgctatgatttcactccatggtctacaggttgattccagatttcaggtatttcccagtttctgacataatgagaattaccttcttgttttcaaatatgtatctgtggatgttaaaacacataccacaccacatgcagacacaacctctatatccttcctcatagttctctggactttgaagtgcctcttttttattatgcataaaaatttagctgcaactcctgtctcaaaatat

SEQ ID NO: 261700 - DNA, 569 bp, Homo sapiens
aatgcttcaggctgcaacaactgagttctgccacaggatagtccatatcccatctgggtgtcttcggacatcaatctctgactttttcacgcacacatttgttttgggctagaggcaggtacaatcattattgctacttgatccatggtggagctcaaagtggacgatgtgtaggcatcaractaccttgctgtttctgccataataccctaattaattaccctcttgtctgcacctgagacttctctggcccctggcttctcactctttgggcatggagcattcttgatgctcccactattctgcatcaaaacatgctcacatatatattttttgctatgatttcactccatggtctacaggttgattccagatttcaggtatttcccagtttctgacataatgagaattaccttcttgttttcaaatatgtatctgtggatgttaaaacacataccacaccacatgcagacacaacctctatatccttcctcatagttctctggactttgaagtgcctcttttttattatgcataaaaatttagctgcaactcctgtctcaaaatat

SEQ ID NO: 261701 - DNA, 588 bp, Homo sapiens
ttactataattttgggagtttattcccccttcccttcaaagtcaaatgtcacactcagacttactcaacaaatgaaagcaaaaacttcttaaggagttttgaaataygacatgtggaagaaggcatcctatatcctggtttgaagtattccattacaaagtttttataatttttattccaataaataatatgtcccataaaataatcatataacttacattccaactttatcattgtgtaatattcccatatgtcatccctcgttattttcatatactcacaaacttggttactccatcagcatagtctatcttgccagtacctgtttgtctgtgcctggccacttgtctagaccgtatttatccacctctctcccaccccatagaaagattatctacttctcaaagttcagtcttattatattcttctttcccacagccataatcactctacttcctgtgaattttcttacctcattttgagtcccttgtcttactcatcagtctgtcccaactgtgcctataatttcggcttactcatgagacaagaattattttaaatcaattcaattcaataaatgagtaatga

SEQ ID NO: 261702 - DNA, 588 bp, Homo sapiens
ttactataattttgggagtttattcccccttcccttcaaagtcaaatgtcacactcagacttactcaacaaatgaaagcaaaaacttcttaaggagttttgaaatatgacatgtggaagaaggcatyctatatcctggtttgaagtattccattacaaagtttttataatttttattccaataaataatatgtcccataaaataatcatataacttacattccaactttatcattgtgtaatattcccatatgtcatccctcgttattttcatatactcacaaacttggttactccatcagcatagtctatcttgccagtacctgtttgtctgtgcctggccacttgtctagaccgtatttatccacctctctcccaccccatagaaagattatctacttctcaaagttcagtcttattatattcttctttcccacagccataatcactctacttcctgtgaattttcttacctcattttgagtcccttgtcttactcatcagtctgtcccaactgtgcctataatttcggcttactcatgagacaagaattattttaaatcaattcaattcaataaatgagtaatga

SEQ ID NO: 261703 - DNA, 483 bp, Homo sapiens
acctcagaagagggccattctgtggaccttggcttttcaattgatattgaggaaaaaggattctacacagagaattttcattcagcagcctgggttttctgaggggatgatgtgaatcttgaggatggtcccagatgtcttagtaaaaaacctcacccagtagctggtaaggactctacaattatggtaaaatgaatatgtcttagagaacttgtagccagcctccaggctctttgaagtcagcraatgtaaacgccagatgaagtgtttggggagctgaaatacgtatggtcccataagactatacatgtaccatgtgtttcttaacatcatgaaagaatctgaagctattaaaataaaagctttattaatagctcattcaggcattgaagagtaattccaaagttggaataaagattaatgtagacagagtcaagagtctgggttcatcctatgaataaaaaatacttattaatttgaaaa

SEQ ID NO: 261704 - DNA, 530 bp, Homo sapiens
caacttttctgcttgctcctcagtcacctcagaagagggccattctgtggaccttggcttttcaattgatattgaggaaaaaggattctacacagagaattttcattcagcagcctgggttttctgaggggatgatgtgaatcttgaggatggtcccagatgtcttagtaaaaaacctcacccagtagctggtaaggactctacaattatggtaaaatgaatatgtcttagagaacttgtagccagcctccaggctctttgaagtcagcgaatgtaaaygccagatgaagtgtttggggagctgaaatacgtatggtcccataagactatacatgtaccatgtgtttcttaacatcatgaaagaatctgaagctattaaaataaaagctttattaatagctcattcaggcattgaagagtaattccaaagttggaataaagattaatgtagacagagtcaagagtctgggttcatcctatgaataaaaaatacttattaatttgaaaaaatgcaccagacagtataaaga

SEQ ID NO: 261705 - DNA, 483 bp, Homo sapiens
acctcagaagagggccattctgtggaccttggcttttcaattgatattgaggaaaaaggattctacacagagaattttcattcagcagcctgggttttctgaggggatgatgtgaatcttgaggatggtcccagatgtcttagtaaaaaacctcacccagtagctggtaaggactctacaattatggtaaaatgaatatgtcttagagaacttgtagccagcctccaggctctttgaagtcagcgaatgtaaacgccagawgaagtgtttggggagctgaaatacgtatggtcccataagactatacatgtaccatgtgtttcttaacatcatgaaagaatctgaagctattaaaataaaagctttattaatagctcattcaggcattgaagagtaattccaaagttggaataaagattaatgtagacagagtcaagagtctgggttcatcctatgaataaaaaatacttattaatttgaaaa

SEQ ID NO: 261706 - DNA, 589 bp, Homo sapiens
ctttattaatagctcattcaggcattgaagagtaattccaaagttggaataaagattaatgtagacagagtcaagagtctgggttcatcctatgaataaaaaatacttattaatttgaaaaaatgcaccagacagtataaagaagtaacaaattaccacttagtattccaattctacagtgtaactatattattgcttctgcattgtcttgttattacaattaggtctagtcctggtttctaaacatatatgaaatactcatttggtattataatgtatttattttgatgtactatatatgattttacagcttttttacatttaatatatttaataactatacctttatttaataagtatttgttatgtatttttacacacttcattgatattctaataattccatgatgttcttataagatgaatttagtgaactaaaaattaatagctatatatagttccctaaggcaataatggtttatgattaaaaagcaaacttatgcttcaattacragcttcagcatgtgaaattattatttcagtccaatctttactacaaaatttgaacttttgtgaacttctgttttat

SEQ ID NO: 261707 - DNA, 600 bp, Homo sapiens
acaatgaggccagataaggcgctggggcataagggcaaagcaggaaggcttgtaatcctcctgaggtcgtactccccyctccgtctgccccatgctgtctcagctttcaggtacacagggctctcacagtcactcaacaggcatttttagggtatctactctgttgcctctgggatactgcacgaggatgaaatgatgggtaagatacagtttctgactgggaactcacagtccagatcaggagacagacaaacaaataactgactataatgtaattcagaaacaccctggtggtcctgggttctctttgtcataactttgttaggtctcccctctggcaccatggtgggtgtggatatctttatcttatatttctaccaacctcactgttctggctccaattttttcaaagcactgatctcagattattcttctgcatatagatacccagtttttccagcaccatttattgaagatactgtcctttctacaatgtacatttttggcacctttgtcaaaaatgagttctctgtaagcatattgatttatctctgggttctctattctattccactgatctatgtgtctgtttctgtgcca

SEQ ID NO: 261708 - DNA, 584 bp, Homo sapiens
atttttatttctacaactagttattttgctatgatttatatcagttaggattttctgttgcaacagaaaatctgactcacagtgtgttaagcaatgaaggggatggactgactcacaaaagttgaaggcttggaaatagcacgggttttattttgtttgggtggctcaaacttttcatcaaaagcataatttctttcacctccttccttggtgttgcaagctttccatctggatttaaaacaatctcagcagtttcacccttcatatcgcaaatcacagagtcagaaagagagtggagacagrcttcaaacctcagatgtcatcattttgccatgtcccttggggaccactgtgagctatttcacttaggctaaatacagggggaatagaattgtcctgattgagttaccagaaaaccagggcccaccctggacctgagggtggagtgatgtactaacttccatgagttagtacataatggggaagaaaagagggtattgggagaagacctctgacctctcagactcaagccatactgacacagtaacactctgcaccaaatgagtaataaacaacactcacac

SEQ ID NO: 261709 - DNA, 605 bp, Homo sapiens
atattatgaaaaataatatatccattctatttacgtatagatatacaaattctaatgaaaatggtaaatacctaaatcaaactttttattaaaaatacgtgtagtatatcataatcaactaaagtttatacccatataatcacaaaaaaattttaatgcaattcttcrttagtatgaagaaaaaaatcatgattgtctcaatagtgcaaaataatcatttaataaagtgcagtatgtacgtgtgtgtttgtatttaaatcccctaaatagtagaaacaacaggttcctttcataacctgataaagactatctactaaaaacctaatcataaataaaagtacataaacaggaacaaaaacatttaatggagaaacttgttttaagattcagaagaacaatgctgattataacaacctttgtttgtcctaacatcaaaagttctgaccaattcaacttaatccaggtacataaaagatgatctaaataactggaaatgtagagtatatttatgggtgaaaaaaatctgtaaagattttaattctcacaaaattaatctaaaaattcagttgaattccaataacattttataaatttttgagtaactt

SEQ ID NO: 261710 - DNA, 605 bp, Homo sapiens
atattatgaaaaataatatatccattctatttacgtatagatatacaaattctaatgaaaatggtaaatacctaaatcaaactttttattaaaaatacgtgtagtatatcataatcaactaaagtttatacccatataatcacaaaaaaattttaatgcaattcttcgttagtatgaagaaaaaaatcaygattgtctcaatagtgcaaaataatcatttaataaagtgcagtatgtacgtgtgtgtttgtatttaaatcccctaaatagtagaaacaacaggttcctttcataacctgataaagactatctactaaaaacctaatcataaataaaagtacataaacaggaacaaaaacatttaatggagaaacttgttttaagattcagaagaacaatgctgattataacaacctttgtttgtcctaacatcaaaagttctgaccaattcaacttaatccaggtacataaaagatgatctaaataactggaaatgtagagtatatttatgggtgaaaaaaatctgtaaagattttaattctcacaaaattaatctaaaaattcagttgaattccaataacattttataaatttttgagtaactt

SEQ ID NO: 261711 - DNA, 605 bp, Homo sapiens
atattatgaaaaataatatatccattctatttacgtatagatatacaaattctaatgaaaatggtaaatacctaaatcaaactttttattaaaaatacgtgtagtatatcataatcaactaaagtttatacccatataatcacaaaaaaattttaatgcaattcttcgttagtatgaagaaaaaaatcatgattgtctcaatagtgcaaaataatcatttaataaagtgcagtatgtacgtgtgtgtttgtatttaaatcccctaaatagtagaaacaacagkttcctttcataacctgataaagactatctactaaaaacctaatcataaataaaagtacataaacaggaacaaaaacatttaatggagaaacttgttttaagattcagaagaacaatgctgattataacaacctttgtttgtcctaacatcaaaagttctgaccaattcaacttaatccaggtacataaaagatgatctaaataactggaaatgtagagtatatttatgggtgaaaaaaatctgtaaagattttaattctcacaaaattaatctaaaaattcagttgaattccaataacattttataaatttttgagtaactt

SEQ ID NO: 261712 - DNA, 619 bp, Homo sapiens
ctgggaattcagatctcatgggagagctgtccttgaatccactggatggcagggcagcagattttccaggccagggttagtctgcagtcacagggcaaacaagaagcaatccgttagggcacagatgggtcaggcaaacctcagctggtggctggtgcatgggtttgcaatgagaatgaggatgtccatgtagcaagaggcctggaagatgaggtgttcctgttagaaaggccctgttgggaggtggtagtataggaaggactgcaagagaaaaacayaggagagacaagagatgagcagagagaatcactccacctgcactggcaggcaggagacctggagtatagaatgcctatactgaaagggtcacagaaagatgatttccagaccatgtgagaggcgcaaggtctcagagagactgtgcattctgggtgcatggctgggacaaagcaccccttaatgtccacacatccaccctgcagcagatggaaagagcaggagcacccctcccacttgcaatgttcctctagcctcctctgctaagaaatcttagcatcatgctttctattaagaagaactatgtagaataattctgcctattattgcagagtatatatcg

SEQ ID NO: 261713 - DNA, 552 bp, Homo sapiens
agaatgaaacagctaaaacaaaggacctgaagagggagcattaaactgttttcaatcattatattcctaccaagcattagacagtttatcaggctgcttcttaagtgctgctacctggtataaagaaaaataccaaaggaaataaagctcaagtgaggaagaggagaggggtmtttctgcaccacatcagatatatcccctttccctagggtgaaggggcaattgagtgcagcagcgtggcactggtaggtcagggagtgctggaaggggaggcggacatcacaagacacagacagacccattaaggacaaactgaggatgccaaatgcaaactgtaggtacataaaagtagttcttgaaagagcacttaaaataaccagcctattcctacctctctatctcagtgtttctcaaattgaaccaccgaggcagttgtcagatactccaggcatcacatcgggtctaccaaattggtatttatgcagtggggctcaggaatatggatcttaataaacacacagatcatgaatgtcatgcacactcaagttgaga

SEQ ID NO: 261714 - DNA, 483 bp, Homo sapiens
taatgagctcatttctacctgaaacctgccactcccacattaatgcctcattttaccttcttcatacctsctagataccccaaatgatttgtaggtgtgtatctccattttattaatatatatgatgaaaaacaaattactttgctaaaagaataacagatactcagtgcttataaagaaggtgccttttctctctgatctcccccgtaagaactaaacctcatccctggtctctattttgggaaatttttcatctcacaggccacaaagacaaccaatttcttgaacagaatggcactgtgatgagcgcagaggtcatgctgaatactgcatgccgttagttaattacacacttttccaaggccgtccttggtacagatgcagtgaatgctaatggcatgtgctttttgttccagcaattagttttgatctctgtggcttaatgctgtgttcagttgttctgaaagagaaaaaaaaaagctc

SEQ ID NO: 261715 - DNA, 561 bp, Homo sapiens
tgccttttctctctgatctcccccgtaagaactaaacctcatccctggtctctattttgggaaatttttcatctcacaggccacaaagacaaccaatttcttgaacagaatggcactgtgatgagcgcagaggtcatgctgaatactgcatgccgttagttaattacacacttttccaaggccgtccttggtacagatgcagtgaatgctaatggcatgtgctttttgttccagcaattagttttgatctctgtggcttaatgctgtgttcagttgttctgaaagagaaaaaaaaaagctcttcgtcagcaccatttattttcatatattcattcaggaagacttattgaagcctacctagttctcttctaggcattgtgaagaatgaaaatgwatcattctccccactcaagaagttaacagtatctaagaggagagagaacatgtaagcaaaatatgacatactctatgatcctgtgtttggaggagggaaaagtcctttcctttattcaataaatatatgctaggcaccatttgaagtactcaggagacagaagtgaa

SEQ ID NO: 261716 - DNA, 619 bp, Homo sapiens
tcagtaccttacagttaatataccaattgttattaactttgttggtgttaataaattcatatatctttgtaaagactgactacatttattctcaggcattaagtaaactatagtaaaggagaaggataagaatatttcaaatatgccaaatggaagtgcgattttgccacctagtaacaccaattttgcaaatgtgtcacccttcaactataaacttagagcaatgaaatatatctgagcctcaagactgttctgcctcaacaatgggttcagtagaaacaacaagctcctccaagtgatatttatccagttccccaaggacatctcctctcactttactgtctttcaggtggcttgaggcaatggacaaagcggcccrtcttgtccgccaggtaaaatttccttgatatttatctcttctttcattttgcatttcttctcagagggagaaaggaacatgttagatgtcatgcagtctaccccgggacgtctcagatgtgttctaaaagctgggaaagaggatcttaagacaacagggttttttgctcagttcctatgggggagcttgcattcctgctgctcttttcattttcaggagtttgtatgccatccttctcag

SEQ ID NO: 261717 - DNA, 591 bp, Homo sapiens
aggtgctttgtctctagctctctgtaactaatcagctctgcttcaagggccttgaggagctatttttcttccagccacagttcttccatttaaaatggtaatcccaggtctcattttgtattttctcctgtgcaaggatatgaaggtcacccacttagccaactcttcagttcatgcgaaaatgcatttagaagcagcaactaaggcaatataaaagtgaagatgaattgaagttatttatattcagtaaaaatctgttgtaggagtaaggtaagaaaaatgtgtctccacagcaggaatgctttatacacggttaaggaaaacccatgagccacaaaccactaaccaagattacaaactcacttcattccagaagctgctgagacaggtaaggggcggatgaaggatggtaagtatgtgcctaaggtgcttccaaagcggaagcaccaaagtgactgagaaaaraacttgaaacaagtatataggtatactacctcaaagtgataaccagtgggaaaagaagaattcgatgagctcatgtttatgcttactcaacagattagttttggtttaaatttgaatcacagaata

SEQ ID NO: 261718 - DNA, 586 bp, Homo sapiens
aagaagatgcatctaggacttttatagctagaaagggaacatcagtgtctggcttcaagttttcaaaggacaggctgactctggttaggggctaatgcagctggtgactttaagttaaagccaatgctcatctactattctgcaaatcctagtacctttaagaattatgctaaatctagtcctcctgtgctctataaatgtaacagcaaaacctggatgatggcgtatctgtttacagtatggtttactgaatattttaattccaccaytaagacctactgctcataaaataatattcctttcaaaatattactgctcactgacaatgtacctagtcacccaagagttctgacagagatgtacaaggatattaatgttgttttcatggctgctggtacaatatccattctgtagtctatgggtcaatgatcaagtccaacttcaagtctttttatttaaaaaaatgtattatagagttatagctgcctggaaaagattcgtcattctagatgccatgaagaacaattgtgattcatgggaggaggtgaaaatactaacattaatagtagtttggaggaagttgatt

SEQ ID NO: 261719 - DNA, 586 bp, Homo sapiens
aagaagatgcatctaggacttttatagctagaaagggaacatcagtgtctggcttcaagttttcaaaggacaggctgactctggttaggggctaatgcagctggtgactttaagttaaagccaatgctcatctactattctgcaaatcctagtacctttaagaattatgctaaatctagtcctcctgtgctctataaatgtaacagcaaaacctggatgatggcgtatctgtttacagtatggtttactgaatattttaattccaccactaagacctactgctcataaaataatattcctttcaaaatattactgctcactgacaatgtacctagtcacccaagagttctgacagagatgtacaaggatattaatgttgttttcatggctgctggtacaatatccattctgtagtctatgggtcaatgatcaagtccaacttcaagtctttttatttaaaaaaatgtattatagagttatagctgcctggaaaagattcrtcattctagatgccatgaagaacaattgtgattcatgggaggaggtgaaaatactaacattaatagtagtttggaggaagttgatt

SEQ ID NO: 261720 - DNA, 580 bp, Homo sapiens
tactattttacttccttggatacctgcatttagtttatgttgacacccttgatgtaattctctatgtgctaaaatttaacccctggtgtttataagcaatacaatgggttacagtgaaattgtgacagtgtagggccttagcatctttttaaaagtattatttttattgatagctggattacccaatatcattattccaaaagttattatacatctaccaataataagttttacaaaaatttgaaccatgttcttcatgattcaaggattgaacttttaatccctttrtaattgaagatgttcaggcaattaacttggattgtacttgtgtttttctgactcaaaatagaatgggtttttgtatcacttaataacacaatatttttcacacttctggtcatgaaatcaattcagtgggtcataacaagcattttcttaatgaaatagaataaaatagaaaatattagagtacagctataggaaggacattatttttcataaaacttttgtttcaaaagtatgtaaatatgtatctataatatgtatatgtgttaggatgcactatgaaatgtacttctta

SEQ ID NO: 261721 - DNA, 536 bp, Homo sapiens
ggacttcaagttctggtcttaggtatttaaagattatctgttccataaacctctccattatattccaatcattgaatataccatggtggattagccactgtgtggcatatttggatttttctgtttcttaatcttcagtataaaaaagtccaggtcatcaacatagaaggaagtacagcatgccataggccaagagccacacaaggcttccaaaattttcaggttgaattttttttctgattctttaatagcaattcaattaatccagataaacaggagcatctgtctcaccagtccatcctggccagattatccagtgccagtccatcatgtaggttccttctcttcttcctgttgccactgtctctgtctggtctaaactagttggggtcagagatttgaagcagaatgaaatgagagctatttaacaatctgctgtcaggtagccattgctgtcctgggaggagggacagcttatgctacygctggagaatagcaggcaggtgcataatccactttgccaggcagtcacctgt

SEQ ID NO: 261722 - DNA, 606 bp, Homo sapiens
tcatacagattcacaaagaatgttcagtggtcttataaattcagtaaatactagattaagcaaaccagtttctctagtctagcatttctcagagtctctgwcatttgcactgggaatacccctgagtgagttagtgtgtgcactgtttctccactaagctgaccacaggaccaattttctatacagaaatttccagtactcatgttctaaggagctcattctggctgacactggtataggtaaggtgttatcttccagcaccctcctcatcagggtcttgctccagccccttagcaaggggcagctggagggaaggtttattttgtttttatttatttacttaatttttttttagatacacagggtatatatagttgtttgttacatgggtatattgcatactggtggagtttggatttctagtgtacctgctacccaaatagtgaacattgtacccaataggcaatttttcaaccctccccacactcttttggagtccccagtgtctattaacaaatgtttgttttctgcttctaatttgatctgtgtctttgtctcctggctgtgtgaaagtcctctgctctttcattgcatgtctcacatttt

SEQ ID NO: 261723 - DNA, 534 bp, Homo sapiens
tcactggtttttccactgatgtcctgtcactgtctcaggatccaatccaggagatcatgctgcacttagttttcatgtctccttactctccgccaatctgcgacagttcctcattcttttcctgcttttcatgaccttgccacttttgaagaggactgagcaagtatttgtagaatgtcccttaatgtgaatgtggttgatgttttctcatagttacactgaggaagtgcccttctcattacatcttgtcatggggtacatgatatcccatggcttaccactggtgatgttggctttcaccactaggttaagatgacatcttgccaggtttctccacagtagttactattttttcttttccatgctctatatatagaagtaggtctcacttctaggaatccagcccacrctcaaaaggaagagaattaagctttatcttctagagaaaggagtatcaaataatttgtgaacataggttaaaattgccacagtaattaatgagtacttttagaagagataccttgaggctatgaa

SEQ ID NO: 261724 - DNA, 543 bp, Homo sapiens
attaactgctcagatatgatggaaggacatatattatttctgctgtatacagatggaaaagctgaatctcatccatggcagagagtcttctaagcagtaagctcccttatttacctgggaaccctgatgatcaacttattgctcaatgagttgcccttttcaggttccaatatccaggtagtagagtcagcaaactgaaattaagtcagtgcttgtaaacagtaactatttaagattcatagcaaatgtttaaggtacccacaacctaaactttcatttccttttagtattgttaattaaaaatagccctctttttcttaaataaattagctaagggagacaggatgaaatatacatgctggtgatagtcattaggaattctcataagctcttatccttgagtcatttatgccctaatttttcacagcaaacaaatgctcattttccatatggctygccttattttccgtattttcatatactatgccttttctcttctatttgtcattttctattagtgttctttatttttctttatttgct

SEQ ID NO: 261725 - DNA, 612 bp, Homo sapiens
aatattccatgtatgccaaaaggtggaagagttcaacccacaggtcaagacttgagatctcaaaggagagatcacaatctgatacccagcccttgttgccataaacccagaccagttggaaaagctgatacatctttgtggcatatatacattttgcaacatttttgactcagacatagtcaatgttttatacctgccactggaggtttggctgagctctgtttgtactgtggtaatgcttaaatcagagcctccttttggggagcgttgacccagactagcagataggaatgtgacaagagccacagtttctagactagacaacaaaagcaaaccagaaaaacaattactccaagttgctgtcttctttttctaagagcctcctcatcatggttgttagaaaaacctcagagccmccagagtaaaataataataataaagattttttttgcccataatgagagtttgcaaaaaaaaaaaaattgtggcaaatcagtaccattacccaagtggaagacctatgcacttcctcctagaagaaagagaaccattttctgctgggcaacatagacagtagacctgagaaaagttcagttttcttttcaaaaagaa

SEQ ID NO: 261726 - DNA, 619 bp, Homo sapiens
gtacactcgtaaaattgtctggactgaccctgggaaaaacagtcaattagttgcctttttttctctcctggtcaattccccacaccctgttatctattaataatttatttttaattcctgaattttaaaaacagcttctttattaagctgttgattgacatacagtaaaattgacatacagtaaaatgcataaagttaaggtatacaatttgakaggttttgacatttgaatatacttatgaagtgatcaccacaattaatataatgaacatatgattcaaccccaaaagtcttctcctgcttcattgtaatctctccctcccgactctacacttgctccctaccccagacaacaattgatctaaattctgtcactatacattagtttgcattttcaagaaatttatatacatggaattatgcgatatatactcttgtctggcttcattgagcataattattttgacatttgtcaatgttatactgagtatcaatagttcatttcctttttttgttgagtagtaattctttgcattctatttctgattaactgtggtaaggatttacaaaaggtctcttacctggaccattcttgagcctttaatgtcttcaatacttc

SEQ ID NO: 261727 - DNA, 575 bp, Homo sapiens
ttcactttcaggaattcaattcagtttctttttattctattctatttccttcaatacagtttgataaacacccagggaagtgctatgagttggagaaccatgtagatgctgggagacagaatgggaagaggcagggttgtgcttctcctcttctgaatccagattggatatgggcatcacttgaccaaggaatgctcttttgggcagggtgggaccaaagaagataaaaaagccataaaaaaagcaggatcaaaaaagattcagactggtatttaggcagaagaaactaaagcaaggagatacgaagatttaactctaagcagacaaactgaatgtaatccccaygcatgttgttttatcaatgagataatagaatttgagagtttattattcttatggtttgaatatggtttgtccccaccaaaacttgtattgaagcctgaaccctaatgtggtgatgttaggatgtcacgcctttgaaagatgattaggtcattaagatgaattaatgtctttctctccaggctggattagttctcctgggaatgtgttagctcttgtacaagtggatgagt

SEQ ID NO: 261728 - DNA, 533 bp, Homo sapiens
aaatgatggctttgagtttcccctattgctaacccagctgggctaccattattacctactagataagttcacatgccattctgctctcttaatttttgtttgcttcttgtctaaggtcaatttgaaaaaatgtgtaataagtgactataatatgcaagatgttaaatgctgactacaatcccttaatttgtatttcacataattttcaaggaacttcaccacccgtggtctcatttgattttcacaccattgctgagcaggtagtaatggactcattttacaatgacctcctggaggmaggtgatggatctctgaagtcacaaaaccagtaaaagattgtggtctggctgagaaagaattgctttataaaatcacaaaatgctcatcatgtaagaaagagaccttaacagtcaactaattcagtcatctcacagatccagccctctccttcgtagattgggaaacccaaggttcagagagggaaagcgacttgcctggagtcacacagttactgtgctctggtcactcaatcc

SEQ ID NO: 261729 - DNA, 448 bp, Homo sapiens
atacatattgtataagtaatgctttttggtcttgattaatgaaccttttcacaaaatatccaaaagatagccatctattatttctactaagggttttcagttttgattttgagagctaagactttatstttggttgatttcagtgtatggtgtgaggtagagatctaacttcattcttccctctatggatttgtattgtttccagctccattcattgagcaggccctctccccactggcataaaaagctgcttctgtcctgaattccatttatgcacatatttgagtctatttctgggctgtctagtcaattccactcatcagttttgtctatccctgcactaatttcttatcatcttacttcccatagcttaataagttctgagaagtaagtactccctctctcccacgaaaggctctagttattcagtattatgatcactaacccc

SEQ ID NO: 261730 - DNA, 448 bp, Homo sapiens
atacatattgtataagtaatgctttttggtcttgattaatgaaccttttcacaaaatatccaaaagatagccatctattatttctactaagggttttcagttttgattttgagagctaagactttatctttggttgatttcagtgtatggtgtgaggtagagatctaacttcattcttccctctatggatttgtattgtttccagctccattcattgagcaggycctctccccactggcataaaaagctgcttctgtcctgaattccatttatgcacatatttgagtctatttctgggctgtctagtcaattccactcatcagttttgtctatccctgcactaatttcttatcatcttacttcccatagcttaataagttctgagaagtaagtactccctctctcccacgaaaggctctagttattcagtattatgatcactaacccc

SEQ ID NO: 261731 - DNA, 448 bp, Homo sapiens
atacatattgtataagtaatgctttttggtcttgattaatgaaccttttcacaaaatatccaaaagatagccatctattatttctactaagggttttcagttttgattttgagagctaagactttatctttggttgatttcagtgtatggtgtgaggtagagatctaacttcattcttccctctatggatttgtattgtttccagctccattcattgagcaggccctctccccactggcataaaaagctkcttctgtcctgaattccatttatgcacatatttgagtctatttctgggctgtctagtcaattccactcatcagttttgtctatccctgcactaatttcttatcatcttacttcccatagcttaataagttctgagaagtaagtactccctctctcccacgaaaggctctagttattcagtattatgatcactaacccc

SEQ ID NO: 261732 - DNA, 568 bp, Homo sapiens
gacgtagctgaccagctggaatgaaagtgggaacagggagcaggatttcgcgtgtgaagaccctaatccccagcgcctcattcagtggcttgtattaattttccactggaggttggagctgttcctttgcatcatccccctrccaagcatccagggtgctttccatgtaagcgtcatgcccaggtggtgtctgttgtgtagtatactcctgagcactcacgcagcctcccaggagctgcctgttcctgggatctgctgacaagcagaaaccacggtaatggtgcttgtctggaactttggagccttaatggcctcttgtgagctcctccccaaagcgagaccctgccttgctgacacatggtctttccttcctcccgcgcttcctagaagaggggatcatgaggagctcctgtctccctcccagggcttgagcctgagccccgctgctgtttggcctctagaaaggacctcgtcatctggggtatccccaaagccgctggcctcttccttccagtgggcagcacagagccttcctccacagtggaggttacaacaatattccgagttg

SEQ ID NO: 261733 - DNA, 568 bp, Homo sapiens
gacgtagctgaccagctggaatgaaagtgggaacagggagcaggatttcgcgtgtgaagaccctaatccccagcgcctcattcagtggcttgtattaattttccactggaggttggagctgttcctttgcatcatccccctgccaagcatccagggtgctttccatgtaagcgtcatgcccaggtggtgtctgttgtgtagtatactcctgagcactcacgcagcctcccaggagctgcctgttcctgggatctgctgacaagcagaaaccacggtaatggtgcttgtctggaactttggagccttaatggcctcttgtgagctcctccccaaagcgagaccctgccttgctgacacatggtctttccttcctcccgcgcttcctagaagaggggatcatgaggagctcctgtctccctcccagggcttgagcctgagccccgctgctgtttggcctctagaaaggacctcgtcatctggggtatccccaaagccgctggcctcttccttccagtgrgcagcacagagccttcctccacagtggaggttacaacaatattccgagttg

SEQ ID NO: 261734 - DNA, 623 bp, Homo sapiens
gggcagggaagcaagactggcaaagrgcaagctgtgctgccttgtagttgtaacacacaccttataggatcccaggaggagctcaggagctgagatagttcttcagagtcatctttgagaacaagacttttacaaccctcctttgatagtcattggatgcaggctgcccccggggaagaagtgtgatattaacaagacagcttccttcagaggaagacaattcctgattctcagacgggtgcttagcaggagccagaactcctagcaagcaggagaatggtgttccagtgctgaggtgagggatatgggtggaccagcacaccgtgtccactttagggcagggattagcaaatggtgtcctacagcctgtttttgtacctgtaagctaaaaatagttttgaaaataaatcaaaatagtaacatatttacctaggactttacatcatctcatgcactattctaaatatgtgcatgtatccacatactttatctttaaacagtcctggacagtattattactgatttcatagatgacaacaccaaagcttccagataagttagctaagaaatcaaagaccacacagccaatggttttgaattccagctgaaattcaagcccaggg

SEQ ID NO: 261735 - DNA, 543 bp, Homo sapiens
gttaattaatttgctcaaggttacacagctacagtattaagttaggattcacctcatgtytgtctgccctctagagtgctatgccaaactcctttgtagaataagaaaaattataacaagcaatgaaaacttatttttaagtagaataaattaatggaacatacatcttaaaggatagaccaaaactaaaacaagacccaacatttttcctaatggataataatgcaaataaagaaatgaatgagagaatagttgcacttattctctaacatatttactgattttatgtagagcccacacttttgaattcctcttactgtgtgtttcatcagtattgtgagtttattcttataccttatagtgtttcatcactttaagtttgtcagtcccttgggacatgatgcagcttttagttttaagcaattttaccacattggatactggtgtcacaactcttaagtttttattaaacctagaggggaatccccagtctgcatttttaaaatgcagattagatgcacaattcaatgtacaaagattgta

SEQ ID NO: 261736 - DNA, 543 bp, Homo sapiens
gttaattaatttgctcaaggttacacagctacagtattaagttaggattcacctcatgtttgtctgccctctagagtgctatgccaaactcctttgyagaataagaaaaattataacaagcaatgaaaacttatttttaagtagaataaattaatggaacatacatcttaaaggatagaccaaaactaaaacaagacccaacatttttcctaatggataataatgcaaataaagaaatgaatgagagaatagttgcacttattctctaacatatttactgattttatgtagagcccacacttttgaattcctcttactgtgtgtttcatcagtattgtgagtttattcttataccttatagtgtttcatcactttaagtttgtcagtcccttgggacatgatgcagcttttagttttaagcaattttaccacattggatactggtgtcacaactcttaagtttttattaaacctagaggggaatccccagtctgcatttttaaaatgcagattagatgcacaattcaatgtacaaagattgta

SEQ ID NO: 261737 - DNA, 543 bp, Homo sapiens
gttaattaatttgctcaaggttacacagctacagtattaagttaggattcacctcatgtttgtctgccctctagagtgctatgccaaactcctttgtagaataagaaaaattataacaagcaatgaaaacttatttttaagtagaataaattaatggaacatacatcttaaaggatagaccaaaactaaaacaagacccaayatttttcctaatggataataatgcaaataaagaaatgaatgagagaatagttgcacttattctctaacatatttactgattttatgtagagcccacacttttgaattcctcttactgtgtgtttcatcagtattgtgagtttattcttataccttatagtgtttcatcactttaagtttgtcagtcccttgggacatgatgcagcttttagttttaagcaattttaccacattggatactggtgtcacaactcttaagtttttattaaacctagaggggaatccccagtctgcatttttaaaatgcagattagatgcacaattcaatgtacaaagattgta

SEQ ID NO: 261738 - DNA, 616 bp, Homo sapiens
attgcctttttatatttgtcaaaaatccattgactatatatatgtaagaatctattcctggacattttattctattccattaaagtatttatcttctggtcagcacagcctttatcaatgaaactttaaaatgatatttgtagtgtgaatcttccaacattgtttttcattttcaaagtggttttatctaggtttgtatttccatatgaatattagaaatggctcatcaatttttacataaacattattagaatgtcgattaaaattttaataaattcatatatcacttgtaagtaagtgacttctttttctttgtttgtttttgagatggagtcttgctctgtcatccaggctggagtgcaatggtgcaatctcggctcactgcaactactgcctcctgggttcaagcaattctcctgcctcagccttccgagtagctgggactacaagtgcccaccaccatgcctggctacttgtttgtatttttagtagagatggggtttcaccgtgttggccaagatggtctcgatctcctgacctcrtgatctacctgcctcagcctcccaaagtactgagattacagaagtgagccaccacgcccggccgcaagtaactg

SEQ ID NO: 261739 - DNA, 466 bp, Homo sapiens
cagcaacacaataatctttatatacgatgtagtgaaacaatggggccatttgatgatcctggaatgaaacgagcagtaagggataaaaataatatagcaaaaaaaattaatttgcttcagtgtacattgaaagacttgagtgtaagccaaaaagaaaaaaaaaggcttttgaaccatacaccttagagatactagatcaaattttgctaaatgcacagaagatgaagtagatacacctgacacagataaatcacagcatgtggatggcacacactgaaccattttgagaaaactgaagggtaaaattttaactgttacataaaatgtatggcttgtccttagaaccaggctaacaagctggagacaygtgcattgccaatataacactaatccataaaaaaatggttccggaatggcccttgagtgccagagccattctttctttctttaattgcagattcctctg

SEQ ID NO: 261740 - DNA, 545 bp, Homo sapiens
gttggaaatttcagcttcacccaccaacctctggaaaagagtagggggtggctggagatgaagctctgtaaaaaatcttgaacaatgagatttgatgaacttcccagttggtgtaygtgtcgtgatgctgggagggcagcacacctgagaggacatgggagccctctacttcccacccatacacctttcctacccatctcttatttgggtgttcgtgagctgtattctttataataaactggaaatggtgagtaaggtgtttccctgagttttgagagccattatagcaaatttttgaacctgaagaggaggtcctgggaatattcgatgtatacccaagttggacagaagtgtgtgtaatctggggaatccactacttgcgactggcatcggaagtagggggcagtcttgcaggactgagtcctcaacctgtgggtctgcactaacttagggtggttggtattggaactgaatggcatcatcagatacccagttggtgttcacacagttggacaactggttgctgatgtgaagtaaaacccaca

SEQ ID NO: 261741 - DNA, 542 bp, Homo sapiens
tgaaagaagaaaaaatcattttctctggccattgttggttagaaataccatccacaagcttttatgcagtttgtaaatttaatgtttttcttttcagatgaccagttttactttgtgtattacatatcatgttaataaattattggaggtaatggggccagttgcttagtgttttgtgactcagtttcttcctctgtaaaataaggataataataataaaacccacctcagagggttgctgtgatgattaaatagttaatacacagtgcagtgcttagaagggttcctggatcacagtgaatgtaatgcaactgttgctactattttgttgttcttgtcattatttaagagttaactatggagtcggaggagactgaattcgagtcctgggccaccagttagctgggtgatagtaagccattttaagtgtctgtaaaatgggcataataacagtatcttccttaggctggggaaaaagtwgacgagattacgtgggataagccactcctgtgtctggcacagagtaagttgagctgtttaca

SEQ ID NO: 261742 - DNA, 495 bp, Homo sapiens
gactccatctaaaacaaacaaacaaaaaaaaaaaacaagaaactgaaattatttcattcctgatacattcaactgcatgctttcaaagtataaagccatgcactgactgatggtatgggatttcagagatgaaaatgccattcagttcaagattaaaaataaggcaatgagatgcatgtaaaattttatgaactggtagaaacaatagaagtactatttaagaaatccaattattttacttgagtacaggctgaatttcagtttgggggtgcagagaaagagacctatcaggaataaaatgtgttagatcagaaaagagcatgaaagcttgaagaaggttaagttgcattgggactctgcaaagagtgagtaaaagattyatctgaaagtaaaaacatttagcataaatgactaattatataatcaggatttttaaaaagatgaaagatcaaaaacatgatggtggcataaatcctggaaaacagagaacagcaa

SEQ ID NO: 261743 - DNA, 586 bp, Homo sapiens
gaatttttctgcttcctacttgaataagaactgtaaaaaccccaaattttcactgtttcttggctatcaagaaggttggaccaaagctgacctccttatcctaataattagtgcatgcttggcacgtacttttcatctgtttgtctgatcttctgaattgattcttgttctactctttaattaccttggatcttcatgtttyaataccataggatgcttcaaatctattctataaataggtgagattggaaacaatgagtaaatatttatcggatcattatttttccaatgttaagtgttttaatcagtgtagtatgtttatgatttttgaaactctatttttcatgatatcttgagttattaaacatgattccactaaaagcatttgaatattttatctggcccaaattctgatatatgtacaaatgttcacacattataggcaagattacatataaaagaatggcatacaatgtatcagtattgctgtggaacaaaccattccagcttagtggtttaaaacaacaatcaccttattaactcaagaattcagtgggttggcaatttggggcggattcagccagtc

SEQ ID NO: 261744 - DNA, 353 bp, Homo sapiens
ctttccagacagaatgtatacttccctatttctgtctagtcatctcataaaggggaaatgggcacagagtaaggatatgggcatgtggtcctgtaaaaccatcacttccattgaccagggagaaaagaaaacatagtcagtctccttagccaacaatatgccattatagtaatcattattgatatgctttggctttgtgtccccaaccaaatgtcatctcaawttgtgatccccacgtgttgatggagggactagttgggaggtcactggatcatgggggtggttctcccatgctgttctcatgatagtgagttctcacgagatctgatggtttaaaaatgtttggcattccc

SEQ ID NO: 261745 - DNA, 615 bp, Homo sapiens
cagagtcggctttgtaagaaaaacactctgatcaagtggggagatgttaactttgagactcctgtcaaagtatccagtgggcagtgaagaatgtggatctagagttcaggagaatggtctgctccaagcatttagaattagaaaacatcagtatgtaggtaatttgccactgctggtataaaaacgataccaggaagaacttgtgcactgagacgataagtaggctaagaatagcattgataatattttagatggagacaaacccataatgtttataatgtactgttatgtttacatagagatttatatctactcatctacatctacatctattttattacaaaagaatttcacttctttgagagacaagggtgcctcatcacttaccagaagacaacaaaagttgtatttttgaaaaagtaatgaaacaattacctgacaagatttttcaacacttctttgttggccttaacttgtaggagaggaaacccatagaaaggaaacagactgttaaatggaagaaaagtcatgtracttcctcttttagattatttacaggctgtgaagcaaacagtgaagttaccaaacctgtagctaaatctataaaatatatca

SEQ ID NO: 261746 - DNA, 532 bp, Homo sapiens
atgtgatttgaataaagaatagagaataaaacatttgtttggcttaaattgggcaacttgatttaagaagcaccagaacaatacacaaaactacatatgccatccaaccctgtcaagaaataccattccaatgctgtagggctgtgccaattcattcagaatgccatcttaagcctgcctcatatggcwagtcagtaaagagtcacaaccatttccagtttcctttaatccctgggagatggattcaagaggccagtctgcctttttcacattgctggggaaataaagcagaaaccacaagtttcctgattgcttctaactttatagtgctcagcagtcatacagagcaagtaatcctccaatatatgctgatttttattgaggactgcaaatattcagactccaattctttttgaaataaagtaagacagtgagtaataaatagaaacttcagaacaggcaaaactaattctattttgaggctccagtaggtttttttttttttttttttttttttttctattgtttaggt

SEQ ID NO: 261747 - DNA, 565 bp, Homo sapiens
tgtttggtcacttgcaaacaaacaattctaattgactcaggaagaaaacatgaaatttcatatataaacttcagagtggttagcagggagcattgaggaaagtgggaatgtgctggaaaggaagggaagggtacagaaaggggagaacttctttaaagtgttcattgaacttttaaaaaggcaacttgccatttagtagaaatttaactactgagaaaatcagatgtatcttattagcgttggtgtgttgcagttgtgatactgcaagtgtgagcagtaaaatgcactgagtatgtcagaagtagccttagctttcctagctggattaaaactataaagtatccaaatgcctgtacttcagcttggagtcttggaatgtctggacaactttctttaaaggaaggcttattataaagtagtgtagtatcaattgactacmaaacgctttcaccacttcccagaagagcttcagctcaattcagcacaatatgactgggtatgactacccattacaatatgctagcacgtgaattcattatgtgcaatatctaagcccatcaatgtt

SEQ ID NO: 261748 - DNA, 557 bp, Homo sapiens
gatcacagttcttaacccaggttttaaatctaatcagatgacagaacctagaaattcattaacagtgactcacaaatcctctcctattccwtttttttttttttctgttgcccttctagcacctgtgggttcctcactttactgtgatttaccacacacacacaccaaaatctggattgggctttgctatctctcatgtttcctctggcttatccatcttacaagtcactacctgacataattgcataaatggcaactccaattacacaattaccgtcttcaaaaggtcttttaccttataaggtgaaatgcaagttagctcatcattttcattttcaactcacttttctcaccttaagtttttaaggcattgtatgctcttgtcaaataggtctcctcactgtttttcctatggatgtcatattgattattggcttggcattgtttctttctctaactcattcctttttatggctgagtagtattccatcaattcctatatatatatatatatatatatatatatatatatatatataggaattccatatatatgg

SEQ ID NO: 261749 - DNA, 555 bp, Homo sapiens
tattggcttggcattgtttctttctctaactcattcctttttatggctgagtagtattccatcaattcctatatatatatatatatatatatatatatatatatatatataggaattccatatatatggtggaatatatatatattccatgtgatatatatatatatcgcaatacatatatattccatgtgatttatatatatatatgatggaatatatatatatataatccatgtgatatgtgtgtgtttgtgtatatatatrtgtgtgtgtgtgtgtgtgtgtgtgtgtgtgtgtgtatcacaatttctttatccactcattgattttatgtgccttggtctatttttctttattttctttattttttatttttatttttccataggttattggggtacaggtggtgttgcttacatgagtaagttctttagtggtgatttgtgagattttgatgcacccatcacctgagcagtatacacagcaccctatttttagtcttttatccctcactcccctcccactcttctctccaagtctccaaagtccattgta

SEQ ID NO: 261750 - DNA, 646 bp, Homo sapiens
ggaagttcaatgttgtcacccccttaaggtgacattacttcaagaaaaccagaccagaattgtcttcagagaagaaggcagtgattccatttttgtttagtgttttcttctctcagattggcagtcrggtcacgttaaaagtggcaatgttttgtttggtgtgtaagcttataaaaccctggccatttcagcacacagcttcttttttgccttttacaattttttcttataaactccaagtatattagtattattgacattcagaagggctagcttacgaaagtgttgctcagaaaaaatggggatattgtctcaaagagaagaaagaacgcttaataaaataaatcttaacatttcaatggaatcataatatatatatatattttctattgttgtgcatgagaaaatctgggaggtagaagttattttcctctaattttcacactgcctataatttttcagtttttcctgatgcccaatattttctttagagctgaataagtagattcagagattctcttaacccagagagccccttttcaacatcaagtctaataaggaggccccagacataactatagtgtcccagactgcccttttatactagacgaaaggtaaaacgagccgatcaagtaacaaattacaa

SEQ ID NO: 261751 - DNA, 575 bp, Homo sapiens
cggttcaacacacttttatgcaacgtctcctgagaggagagtgctgtgcaaaaccagaggctgatatgatgagtgatggaccctttgcctttagagagttcctctacaactaagagagggattgaaatgtatgctcaaggggcaacacaatggtttcttctttaggtccaagaccagctacataatttttagggctgcaatgcaaaataggatgggtcctggcactgcgcagaagtcaatctccccttcccactggctgctgtccctatttttggtgcaaagataacccccaagggatcacaacctctgggctgggccatgctcagttcctggatctagggtaggcaagaaacactttcccaatccctaaacaaagcccaggactctgtcagcccaagggagagacagacatccacctacttaccctgagatgccataggcaccagtatctcactcacaggtcccattccagyggagtcataacagatacaatttttgaagttggccttaaagattcatttcaacagttctagaaggaaaaaaaaaaaggcaatataggcagagattgctccctg

SEQ ID NO: 261752 - DNA, 520 bp, Homo sapiens
gacaagttattccatcctttatggtattttttctttagcataattcctaaattctatgcttgtttatattaaagaaagctcagtgagtgaaatctagtacggatatatgtaaactctcaataaacttctattcattatcaggtggcaggtctcaaagatagagataactcctatataaaaagaattttgctctaaaaagaaaaaaaattctggaaaactctgttcttgttcatgtttcaccttagtaarcaccattttaccctatatcaatttagataatgtgagggataagaacgtttggagggggaagaagtgaaggagatcctaagaaaagctaaactgaagtgaaggaaatgttcaaccagagggtacacactcttgataagaaagcacctttggttctaatttgttgaaatgaacatgaagatggtagctctctttcaaaaaattgactgttctcctcacaagtattataattgtattaacatgatggatctttagcaaattaataatgtttaat

SEQ ID NO: 261753 - DNA, 534 bp, Homo sapiens
cagcagcctaactcactctgactgctttgcctggtagaggagataaatgaagcaggttagccttcttggtccaccaggagaacaccctggaaataagaaagagaatgggaggtacagaaataaaatggattccttcccaatcaccccaagtatactgaatagaaggtgaatgaaatagagagaaataagggcaagtcattcctgatcaaaagtaaggaaagaaaaataaagcttctgagctaagagtgtcaaggtgattgttcttgctataagtatctttcccctagagcagtgcgtgttagacagatacacaaccagatatacactgttyttattgtgtccagaaaaaatacatgcataaatgaaaaggttttatgaaacaatatgtgacactgcaagtcctgtgaggataacattccaagagccccagtggatgcctaagactgaggatagtattgaacccatatacattttgctttttctataaatacatacctatgataaagtttaatttataaatcagacacagtaaaa

SEQ ID NO: 261754 - DNA, 628 bp, Homo sapiens
atcagcagtagtggccaggttgtacttgccatgggccttaggtgagactcagaaccatgctggcttcaggtgtgacccagcaccttcccagctgtggtagctaaaggagagactccttttgtctgaggaaaggaatgggaataataagaggaccttgtcatatagcttgggtaccagctcagccatagtggcatacagcaagcagatacccagggtccctgattccaagtcttgactcttggacaggattttttggatgtgccctgggccagagggaagccacttccctgaagggagacacctaggcctggcagcatttatcacaagctaactcaagagcccttgggccgtgaatgaaaacttgtggtagccaggcagtactccttatgggcctgggtggtggtggccatggggagagactcctctgcttgaggaaaggggagggaagagtaggaaggactttgtcttatgacctgggtgccagctcagctacagtagaatagagcaccaggtagattcctaaggttcctggttccaggccctggttsacagatggcatctctggacccacctggggctgagtggaacttgctgcactgaaggacacaagcctagctgtatttgccgc

SEQ ID NO: 261755 - DNA, 441 bp, Homo sapiens
ttcctggttccaggccctggttcacagatggcatctctggacccacctggggctgagtggaacttgctgcactgaaggacacaagcctrgctgtatttgccgcctactgactgtagagcccttgggccttgagtgaacatgtgtggtagccaggcaatggtccctgcgggccttgggtgagaccctgtgctgtgggtctgacccagtgcagtcccagtggttgtggccgcagtggtgcttgtgtcacctctccctcagctccagacagctcagcacagagacagactcttatttgtttgggggaaattaaaggaagaaaacaagactctctgcctggtaatccaagaattctcctggatcttacccaagaccaccaaggcagtacctctgtgagtctgctgtgagtctgcaagagtcacagtgctactgagcactggggtg

SEQ ID NO: 261756 - DNA, 569 bp, Homo sapiens
aaaagcccaggacccaatgggttcagatgcagaattgtaccaaacatttaaagaactaataccaatcctacacaaactattctgaaaaaaraaagaggagggaatacttccaaactcattctacaaagccagtattactctgataccaaaaccagacaaagacatcaaaaaaggaaaactgcaggccaatatccctgatgaacattgatgcaaaaatcctgaacaaaatactagcatattaaattcagcaacacatcaaaaagttcattcatcatgaccaagcagtatttatcccaagatgcaaggatggttgaacatttgcaagtcaatcaatgtagtacatcatatcaacagaatgaaggacaaaaaccatgtgatcatttcaactgatgatgaaaaagcatttgataaaattcaacatccttttatgataaaaaaaaaaccttgaaaaacagaatagaaggaacatacttcaacataagaaaagccgtatacaacagacccacagctaatatcacactgaatggagaatactgaaagcccttcctgtaagatctggaacaaaacaa

SEQ ID NO: 261757 - DNA, 600 bp, Homo sapiens
ggcttctattcaaaagacaggcaataatgaatgctggtgagaatatagagaaaagggaaccgtcatacacttttggtgggaatgtaaattagtaaaactacaatggagaacagcttggaagttcctaaaatcaataaaaatagaactaccatatgttccagcaatcccactgctgggtacatacccaaaagaaaggaaatcagtatatcaaagagatatctgcactcccatgcttactatggcactagtcacaatagccaagatttggaagcaatctaagtgtccatcaacagataaatggataaagaaaatgtggtccatatacacagtagagtgctatttagccataaaatagaatgagatcctgtcatatgcaataatatggacggaacatgaattaacaacatkatgttaagtgaaagatgccaggcacagaaagacaaacttcatgtgttctcacgtatttttgagagctaaatatcaaaacaatttaattcatggagatagagagcagaatgatggttaccagaggctgggaaggatagttgggggtagggtaagtggggataattaatgggtacaaaaatatagttagataaa

SEQ ID NO: 261758 - DNA, 589 bp, Homo sapiens
tgccctgaaaattatgctgtggcagaattgccatgtaggagaagtttagggatggcaatctagggcaacaaggaacttgtctggaagtgtgtttacctggtaagcacagttttacctggaatttacrtttatgtggtaagacttggggaatggggctaatgaaggtaaggggcattaaatgactccctctctgaagccacttttctgtgctgctttcatttaatgacctgtacttaccactctgtagtgggtgatatggtttggagggttgtgcattcctgttctatcagacatgagagttggactttttaacattaaaaccttaaaaactttggattcatctaaagacgttaaatttatgttcctggtagacagctgtatctgttagaatttcagatgactatatgtcatcacagtaacctaaccatagtcaagtaagggttggctttgtcacctagtagaaatctggaggtaggctatctaggttggggcagcagctctgcggtggtgtcagtccccagctaccttctacctttctccaacaccatttttcacataaagcattcatcctcatggttatctcatagtc

SEQ ID NO: 261759 - DNA, 479 bp, Homo sapiens
gttcttctttatctgcaattctgaatacagaaagctgtaaaatggacggctttttcacaagttttctgcaaactcagtaggtaataaaacttgaactgaccagagtctatttatagtctttattccatttagtatgattgctcatatttggggctgattatgtttggttcattatacatgtttgattattggtatggccccaaattcctctggggctattgtatactgtttaatacaayatattgcctttctaaaatacacaaatttctgaaatcctaaacatatatatccccaagagatttggaaaagggctttagacttgtatgtcccatctcagagggctgctgtgaggagttgacatggcgtccatctcttgcaaatgcctatcagataagctgttagttgttacagacccctgagacgtgaccttattcactgaataaatatttattgaattcctgccgtgtgccaagtgcagg

SEQ ID NO: 261760 - DNA, 627 bp, Homo sapiens
taccaggccttttataatctgctcttagtttatttttcctctctcacattattttctttgacttgtttgatcaactcaaagaaaagtttgtaattccttaatcttatcaagttcatccacagcttcagatctttgcataccatgttctctcgggcctgggagcatccctagttctcttcaacgcctctgtttttgactttgtaaatgttattcaatcagtgtgggtttagctcccatttcatgaagaaagccttctcaggtttcctgcagtttggtttattgctcgtctaatgtattatttactgttaagtaatcacaataaaaatgggagtgactttatttattaatgtatctttatcatctagcctctgtggtaaattttcaaacaatatttgctaaagcacagaatragtaaattaattgactactctctaaattttttgaatgattaatgttccaataagtaaatgaattaatctactaatcaatacttggaaagtgctcacctcttttaaacttggcaatagttctctctctctctctgtgtctttctttttttttttttttgttagctcttacagcgaaggataaatctctacaactttaagggatttggatatacttagc

SEQ ID NO: 261761 - DNA, 534 bp, Homo sapiens
taggttgatgcaaaagttattgtgggtttgtcattactcttaatggcaaaacacgtaattacttttctactaacaaaataggtcctgaatgacttttcattctcagaataagtgatatatttttacatattttttaataaatatttactttttcttataactaaaggaaagtcacacaggggactgagtagagtgattattgtaaataaatatggcactagctgtggtttcaaggcagggcatgactcaatgaataaatcttcattcttayatggcaaatgcagtttatactgatgaaggtggtaattaatcaggtgtttgttatcacctgggaccagaaaatcagcctgttaatggtgagaatggaaaaatgttgtctctgcctttcataaatactaaaagaataaggagtaaaaatatcctatctaatggcttcttctcagagcaaaaggcaattaatagcgaaatgaagaaaaattcccaaacagcttgcctgcttacaaagataagggaattcagtatcactttgtgagc

SEQ ID NO: 261762 - DNA, 416 bp, Homo sapiens
ataaggtaaattcctactatggtaagctcaacctacacccaagaatgaacaagagcagcttgtaggttaaaagcaagatggggtcagttaggtcagatttcattcactgtcgtaattttcctatgtttgattttttcagtgtcataatttttgcaaaggtgttttcaaatacacttttctttcttcaactcataaatagcaactggacagctgagtaaatgcactaggattctccaattaactaatccctttaygtggtccattccctgccaaaaagctcaagttttcttatataaaataattctcccagagtttttgagattattctaataaaaattgtaaataaaaaattattgtaaacgataaaattgaaagtcgatatctcgtccctttaatcccacttaataatcaatttt

SEQ ID NO: 261763 - DNA, 515 bp, Homo sapiens
tttttcacctggatttttatatgtaagaaattttcctctgcaagtttctacttaggcatggttaacacttgagaaaggttttctcttgttgaggttctgtgggattccagccagactttcattgttaagacaggccttgagttttgtctttcattgaagcaacatgcatcataggtaataattcattcaaggctctgttgagagtgatctcaaccttaatcagtgtatgtttagtttccatgctgagaaaaggaaatttgttctatgaaaacttagacttattaaaagctctgaaacaaatagattctagagttatataattttgagaaatggtatctatgatatccctttcttggagattcttaagatgcattagcctcttagaggttctagtatgtttgttttccctaaccagaattttccgtatttactaagcaatggaattttttcatawgctacacagtggaactaatgttaatatcgtattagagacaggatactgtaatagtctgtta

SEQ ID NO: 261764 - DNA, 589 bp, Homo sapiens
caaatgtctccagatattgtcaaatgtctcctggagggcaaaatcacccccttttggagactaccaatgtagatagtttgcatcacaatgtcttatttctttgattttctcaagtgttccttctcagttctgatggaaaagatgggccaaaaccggaattctttaaattgtcacagatcatggaaatctttttgcgtataaagaaataagaaacctgccttgttctaaaattgaggttatggccggggtgcagtggctcatgcctataatcctagcactttgsggggctgaggtgggtggatcacttgaagtcagaagtttgagaccagcctggtcaacatagtgaaaccatgtctctactataaatacaaaaaatagcctggtgtggtggcaggcacctgtagttccagctactggggaggctgaggtgggagaatctcttgaacctaggaggcagagggtgcattgagccaagatggcaccactgcacttcagcctgggtgacagagcaagagtagtgggtgggagtccatggttctgtacagttataaggatagctagtgagcacttagcaacttttgtgcgggaa

SEQ ID NO: 261765 - DNA, 558 bp, Homo sapiens
tggggggggattaaaccattgatgcttggagggcctcagaagataagacatttgaacaatttctattagactggaaattagtgtaagagttttcagttgtgatataaagtagaaaaaaaagatactccaamatacatgctggcattaaagagtaggagtggaagctggtattaaggagtaggggtgggagctgatctgctagtagaacccgtaaaggtttcaggttcctcaggcaatgtgtctgcaaggcaagtctgaaagggggcctgaaaacaaggggttaaagaatagcccatctatgttataagaaaaaaaagatattctttcctatgtagaatgttcaggactgatttactatagtacagaaatagaagggcagaggaaacaatgttagaatgttaggaataaaacatgcatatttcgttagaatatccagatgtggttgagaagttgtggcaattctgaaaaagaatttggggcaatttgaagagccctagaagtcagtaacagaaatggaaatgccttatccctaacttcccttcagaaattatcaatgtt

SEQ ID NO: 261766 - DNA, 566 bp, Homo sapiens
acaacaacaacaacaacaactcatgcaagagacaataagcctcttaaataaagmcaaaagatacacaggaggtagaacagatctatctggtgtctgatatgacagctgttttctacaggtggttcataaaccccattccctacccctggcatctcgttaaaattctccaggtcactaaaagtgataatagtatttgtttagaaagaatgtatttccacccccgaaacataagagtttgaacatatcaaataaaaactaccagcaattggaggagagatcacgacataaacagccaaagatggagtaacaccagtggtgagttttcagcatttacagttgtatacattttatgtttcatttgtaggcacatgttgtttatatctgaacacaagttcatttcttattttattttatgttttttagagacatggtcttgctctgttgcctaggctggagtgcagtagtgccatcatagctcactgcatccttgaactcctgggctcaagcaatcctcccacctcagcctcccaagtgctggaattacaggcatgaaccaccacatctgg

SEQ ID NO: 261767 - DNA, 566 bp, Homo sapiens
acaacaacaacaacaacaactcatgcaagagacaataagcctcttaaataaagacaaaagatacacaggaggtagaacagatctatctggtgtctgatatgacagctgttttctacaggtggttcataaaccccattccctacccctggcatctcgttaaaattctccaggtcactaaaagtgataatagtatttgtttagaaagaatgtatttccacccccgaaacataagagtttgaacatatcaaataaaaactaccagcaattggaggagagatcacgacataaacagccaaagatggagtaacaccagtggtgagttttcagcatttacagttgtatacattttatgtttcatttgtaggcacatgttgtttatatctgaacacaagttcatttcttatttyattttatgttttttagagacatggtcttgctctgttgcctaggctggagtgcagtagtgccatcatagctcactgcatccttgaactcctgggctcaagcaatcctcccacctcagcctcccaagtgctggaattacaggcatgaaccaccacatctgg

SEQ ID NO: 261768 - DNA, 613 bp, Homo sapiens
ggggctgacaacaaagggaaggagggtactcttcagggtgatgaaacattctgtatcttgattttgtggtgcttaccctgccttaaatgtggcctgwtgcctggaactgcaacagagctcatggccctgagttgacaaacaacactcccaggatggggaagcatccagaatgatggagcctgtgtcttcatcgtacttgagccacactgcagaaggcccgccctagataatcccagactcgccaagcaagaaaaataaacttgtatattttagacattgttattcaggttgtgcaaatggatacatcctagcagattagtatcctgtaaataaaagacttattactagtgttattataattcgtagaactactcagatctctccaatatctagagagaaccatgattaaacccttaaagaaaggtttcatcttttcttacttacagcttttcactttaggagatttcttggccccctttggtaatgtttaattgcttttttccttagcaaactgacgcacattatatattatagtaaaaattaaatacaatttattactctgcaatgggttttgttacattttaccactgataaatctatttaagtttaaaaa

SEQ ID NO: 261769 - DNA, 523 bp, Homo sapiens
tgtagtcccagctactcgggaggctggggcaggagaatggtgtgaacccagcagacggagcttgcagtgasccgtgattgcgctactgcactccagcctgggtgacagagcgagactccatctcaaaaaaaaaaaaaaaaaaaaaaaaaagaaggggcaggcgtgctctctttgcatgtgaggacacaacaagaaggcagctgtctataaaccaggaagagagtttaccaagaactcattcctgccagcactaatgttacacttccaacgtccagaactgtgagaaataaatgtttgttgttgaagccacccattttgtgaaaatttgctatgaagtccaagctgactaacgcatttattatgcaaccactatgtgctgtgcatttttctaggtactgactgtatagcggatgtacaaactgttacctttcttcatggaaattcaattcaaggagtgtagtgtggaaaacagaatcctatataatccttacgatttgtacctgctgatggttgctttgagttg

SEQ ID NO: 261770 - DNA, 523 bp, Homo sapiens
tgtagtcccagctactcgggaggctggggcaggagaatggtgtgaacccagcagacggagcttgcagtgagccgtgattgcgctactgcactccagcctgggtgacagagcgagactccatctcaaaaaaaaaaaaaaaaaaaaaaaaaagaaggggcaggcgtgctctctttgcatgtgaggacacarcaagaaggcagctgtctataaaccaggaagagagtttaccaagaactcattcctgccagcactaatgttacacttccaacgtccagaactgtgagaaataaatgtttgttgttgaagccacccattttgtgaaaatttgctatgaagtccaagctgactaacgcatttattatgcaaccactatgtgctgtgcatttttctaggtactgactgtatagcggatgtacaaactgttacctttcttcatggaaattcaattcaaggagtgtagtgtggaaaacagaatcctatataatccttacgatttgtacctgctgatggttgctttgagttg

SEQ ID NO: 261771 - DNA, 597 bp, Homo sapiens
tattaatatgtttaagagcatgaatgtaatacaaatatttaacgatttaaaaatcattttctgtacgtataattgcacaacacatttcatgggtgatcagctgtcaagcttattttactgtgtcctttaagctgtccaaaatataaaaatttcttcgtctttaaatgtcatagtgtgacctcaaaaagcaatgctgcatgaatgtgtagtgacagttgacacacaggaggtgtcattttaggcatctgcacagaaagtacaaaaacatacctctaaagtacccatttgcttcgacttggaacttttccctaagatgcaaakatgcatgtgcatgcaccccattccccccaaaaatcacatgcagtgatatttctttcttgagacttagtcccgctctgtcgcccaagatggagtgcagtggtgcgatcgtggctcactgcaacttccagctcccaggttcaagcaattctgtctcagcctcttgagtagctgggattacaggtgcacaccacatttctataaaaacatgcaagtacttttttgcatcacaataatgaaaagaatgtgttctaacgtttgtgtcacataatgagaact

SEQ ID NO: 261772 - DNA, 525 bp, Homo sapiens
acaactaagattgagaataagacaaggatgtccactctcaacacttctactcaacatggtaaaggaagtcctggacgaggcaattaggcaaaataaataaataaataaataaataaaaataaaaggcacccatataggaaatgaagaagtaagacaacctccatttgcagaagatatgatcttacatatagaaactgctgagaattcagaaaacaatgtgttgaactgataatcaacttcagtaaaattgcaaggtacaagatcaatattttaaaaattgtttgcatttctatacactagaaatagacaatccaaaaatgaaattaagaatacaatttcacttacaatagcatcaaaaattaataaaagcaaaataagtgcaaaatgtatatcatgaaaataaagaaaaagaaggaaatgttaaagatctaaataaatataaaaatggtccatgttcatggacaagaaaagttaatattgttamaatggcaatacttgcccaattaatctacagatttaatacaa

SEQ ID NO: 261773 - DNA, 536 bp, Homo sapiens
ggaacttgcctgaaaagaaatattcatttgtgttctttggattctcagatcttcccagatgacaaaaatcattgagttcttggtaccagcggtgtaaaactctaatagatttctatctgtaatttcctaattatgattatattgatattgaagcgatgatgctactgcattgttatgagccacttacaatgttaaaaattaaattatgatggagtattttataataataaaatatatttttaaggaaattatattattaactttcttaaggggagaaattgtatcccatagtgctttacakccctttattattaagggaacttaattaacaccctcttggaggaatgcctgcctgagccttggaaacacagggtagtagggaggagggcacttttccccacctggcgaaatcttctagagtgtttggcgggggcagatttgagttgaacaggttctggtgaatgttctgagacatagtactactatctaggtgctttctttaatgagcagtacctaagtaccgaagcatatttgaa

SEQ ID NO: 261774 - DNA, 604 bp, Homo sapiens
ggtttatgtatcctgcagatctaactcacgccgtgtagaggatggacttgggctgaatacagacagagggatgagtctgaatgctgttataaggttaacrgagagtatgacaagggcaggtactcaggcaggtctccaggcaggagcctcaacctggacgaggactggatggctcattaagctgccggataacacctcattgacaggcctacagcctcaggaatgggccttgggctgagcatgagccagatcattgtactggccagaggttagggctggctactaccaagagggacttgattatcatcttaaataaagcaggacttgatcatgacccttcataaaaaagcatcatctgtatagtgttcctgcctcaggtctgcatagttcttgggaatcatgaagaaaatatgaaaccaaaatctctatttgtgggaaagatgaagaatccaacagctttttgatctgaaaataggttctgggtgaggaaagccaagacagaaatgagataaggtacaaagtaaacctttagctctaataaaaagcaccaataacttctttccagatgactcagaacccttagacaatcactaaacagtctgaa

SEQ ID NO: 261775 - DNA, 609 bp, Homo sapiens
cacaccacaaggctgtccttctgtctaacacagtatcttgaattgtgttgtaaatagtcacctaaatgtctctcgtctgttttcaccctagggatgcgaacattcttgaactgatattctgcttcttttcctttccatacactgcagtgattatagttgttttgagattcttcatcaaaatatatttttgagatttatttttatgcaaattaaaagcttaagagtttatgttatcattagtataawtaccttcatattaattcttgcaaattgccaattgacaaattatactaatattcttgtctataaaataccagtcatcatattaagcgtataatagttctaaatttatttgagaataataaatagtcagctgttcaaagaatttgatgtagggccttagaaaggttgaatactttatggttataattatttgacatatttcttacatcaattactgtatcttaatgcttttatatcaattttgaagtgtggtttctttcctaaatgtcatcttacttcaaaaagctaatattaattttacatctaaaaacaatcaatataactaattttatttagaagaattgcagtataaacagatgttttaca

SEQ ID NO: 261776 - DNA, 586 bp, Homo sapiens
aatttgagaaatgtgcaataaaactaggattcgaaggttagacaggcttgtggcccactggccatgcaactttgaataagttaattcatgtaagtatcagtttcatcatttgtaaaacagacttaaatacttatttaataagatggatatgaggattaaaggagatactgtcatgaaaaattatcctgtgctatctttggcagacggtcagcacccaacaggtaccratactcctgataccacaagtatagcatttaatgagaaaaagagttcagtttttaattatcttttggagttttgtgtttattccctactggccttctggccaactctatagtgtttactgctttcttcatattacttatatattgtagattgaagaaaataatgctttataacccacactcttcataactttgcattccagcagaatgacaatgataccaattctacacagcctcattactaagtacataacctttgagatatttgatatatcgccttaaaaacagacaattgaaccaatgaaaaatgcttctacaaaactgcctcaaatccactgttgaaaactttaatgaatgattca

SEQ ID NO: 261777 - DNA, 586 bp, Homo sapiens
aatttgagaaatgtgcaataaaactaggattcgaaggttagacaggcttgtggcccactggccatgcaactttgaataagttaattcatgtaagtatcagtttcatcatttgtaaaacagacttaaatacttatttaataagatggatatgaggattaaaggagatactgtcatgaaaaattatcctgtgctatctttggcagacggtcagcacccaacaggtaccaatactcctgataccacaagtatagcatttaatgagaaaaaragttcagtttttaattatcttttggagttttgtgtttattccctactggccttctggccaactctatagtgtttactgctttcttcatattacttatatattgtagattgaagaaaataatgctttataacccacactcttcataactttgcattccagcagaatgacaatgataccaattctacacagcctcattactaagtacataacctttgagatatttgatatatcgccttaaaaacagacaattgaaccaatgaaaaatgcttctacaaaactgcctcaaatccactgttgaaaactttaatgaatgattca

SEQ ID NO: 261778 - DNA, 512 bp, Homo sapiens
ctgggttattcagcttggatatctggctttatagattccagcatatctgaacattttaggccattatttctttatgaattgtttttctgttctccattatttcctttccttcaatgactccaattaagtgcattttaggccacttggaattgtcccacagttcatggattctcttgcaattcaattttttttttccttttgtgtttaatttgggtagtttctattgttgwcttcaagttaactaagctttgctttctgccaaatgctttaaacctaccattttattcccccatccagtgtatttttatatcagacactgatgaatcaaacatctctaaaaatttcatttgggtcttttttgtatcattcatgactttatttaactttttgcacatgttgattatacctatattaattatcctttttgttaattctaacatctgtgctagtttcagctgattgacttttttctcctcaatctgggtcatatcttctgctcctctagacatgta

SEQ ID NO: 261779 - DNA, 569 bp, Homo sapiens
ctgatgaatcaaacatctctaaaaatttcatttgggtcttttttgtatcattcatgactttatttaactttttgcacatgttgattatacctatattaattatcctttttgttaattctaacatctgtgctagtttcagctgattgacttttttctcctcaatctgggtcatatcttctgctcctctagacatgtaatcatctttcaacacagacattttcattttacttcttgggttctggataggtttgtattcctataattgtcttcagctcttttatgaagcacattaagttatgtgaaagcaatttgatacttttgagccttgctttttagatttgttagggggagcagaacagcatgtagtctagggctaatcatcctgccctatgaargcaagacacttctgagccccaactcaatgccccatggactatgggttctcccagcttggctggtgggtgctggcaaacattcccacctctgtgtgagtaccaggcacagtttcctcacatcctttcagatggttctttccctggtctctgctagtttccttacatacatgggct

SEQ ID NO: 261780 - DNA, 611 bp, Homo sapiens
ttgtgtgtgtgttggggttggcgggtgggtgggtagggtcgtagccctgtgccatcggttcaaagagacttttcgtgaaatttgttggttttgaggactgtaaaagtgatttcatactctgaatataaaactggataatagggtaatgttttaaaatttattatgctattattcagaatgccaaagtattattttttttcccaaaatcagtctggacatttactactttttagactttttgacgttgaactttctgtataaaaattggctgggttttgagcttttggtaagaaataaaagccgattaagcactggccgccccgcggctggtacccaatgcccgagtcactgtggcagcattcgcactggtgtggggagtcctttcaactcaaggaggctgggtttctgggcaccctygaagttttctggatgtctttttatctttctcgtgtgaactgcactacaaaagagaccagcccgcttcccaagccagccagacacctgggtcttgagccataaactggcgtagttaagctttgcagcttccagtgtattttatttattcttttgttgggtttttgtttgtttcttcttgtaaaattgtacagaaa

SEQ ID NO: 261781 - DNA, 611 bp, Homo sapiens
ttgtgtgtgtgttggggttggcgggtgggtgggtagggtcgtagccctgtgccatcggttcaaagagacttttcgtgaaatttgttggttttgaggactgtaaaagtgatttcatactctgaatataaaactggataatagggtaatgttttaaaatttattatgctattattcagaatgccaaagtattattttttttcccaaaatcagtctggacatttactactttttagactttttgacgttgaactttctgtataaaaattggctgggttttgagcttttggtaagaaataaaagccgattaagcactggccgccccgcggctggtacccaatgcccgagtcactgtggcagcattcgcactggtgtggggagtcctttcaactcaaggaggctgggtttctgggcaccctcgaagttttctggatgtctttttatctttctcgtgtgaactgcactacaaaagagaccagcccrcttcccaagccagccagacacctgggtcttgagccataaactggcgtagttaagctttgcagcttccagtgtattttatttattcttttgttgggtttttgtttgtttcttcttgtaaaattgtacagaaa

SEQ ID NO: 261782 - DNA, 584 bp, Homo sapiens
catagtgaagtgtcttagggcatgactgattttcttttatttcagtggggacaatggcccccctttttttaaatggttttgaagtcagagatttgaaccccaaagcaaaactgctcttggggcgagtaccacaagtatcccacactgtcggcaaactcccaatctctccccaccaagccaagcccaatccaggctggaagcacccctgggtgagagttggtgcccagagcaaaattgtagccaatatcagaaggcttcctttgaaaatattgtcaactggggagatttccrgaaaaaactgcactgcatttctctcttgaacacatgactgaatcctgaagcggtcacatacattttctgctgtgaatgcttgggaaggtgagcctaggacactctcgcactgaggcagatgtccacacctctgcatatttgttctgataaattaagtgctccatgccagctcccacagaaaagcctccaaagatacaacccaggagataacagcctttaaatattgtgcctgtcttcaaacactaattgtccctgtgggcactgatgtagttgataccaagagatgtacccat

SEQ ID NO: 261783 - DNA, 618 bp, Homo sapiens
ctttggtggctgttggaaacttctgctgagagagctgagggtgggttaggagtacattctgatgatcctttctccccgctcatccctccatggaaagacaagggcaaaggcaacagaaaacacagtatgtgctcataggggaagctcagtgtatagaagctagtttctccatgtactggcataactgagcattgatcatttgttcattcattcattcgcttattcatttattcagaaagtatcaatctttgagcaataaatgcccatgccctttgaaaagcactaatggtaaattaaagaaggctgcagagactgctctgcttcagttgcccttttgtttcccaagagtcaggcattaagcttcctccaaacaccagcctgtccatctagtctcgtctgacagcaagtgcactgtgtgttgaagtcttggttatgaatgatatgataccagagaccctgtcrcattcttctttgatttaccattagcgcttttgaaagggcatggcctgatcccgctctcgtctcagaacccacttgaaaaaaccagggggtttgttctaagttaatgtgcttctattgctagctttcatcatcttgatataaagaactactccatca

SEQ ID NO: 261784 - DNA, 518 bp, Homo sapiens
ggtggaggaaggaggaattagtccctgttttggcttccagcctcctggcttcagctggaacgtcagtctttttctcgygagctgggattttacatcctggacgttcaggccttcagatttggcctgggtcacaccactggctttcctgggcctccagcttgcagaaggcaggtcttggcacttcccaatctccataattgtgttagtgaacacttcccaatagatctcttcctgtatatatcctatggcttctgttctctaaagacccctgactaatacagtcctaaaaacattcagacactcagaaataacaacacaagcaacaaaataacacaatcaggtaaagtgccatgaacgtagcgcccctttcctacacaaccactttacagttactgttggttccttagtcccagccctcagtcatgggaaacgcctgctcaggacgacttccacgacaaaagccttgggagccatccaccccaaactcagaaacaacatttctagatctctcagtgtct

SEQ ID NO: 261785 - DNA, 490 bp, Homo sapiens
aaaaggccaaatgcctggcaacacactagctggtttataaccttcattctcagtacttcttgatcttcctctagttgccattttcttaatttttaagatgtgtcaacgagcattgaacatttccaaaagcttcctttggggctaccttttcccaartatttagggctatttctgaggtgtgtatggtacatgaattttggtgcaaaaccatccattcacaggtcatggaaagcaggtggagatgggggtcgaacctctgcaagcacacagggcccacatgcactgtgtgctggctgctaagcctgctctaagtctctgatacctgcaatttgtctcaggaagaatcttgtgtggcagatattatcattgcttacgtggcctgctctgtgactctcatgcctacaatttgtctcgggaagatttctctggggcagatattatcattacttacatgttacaggtcagaaaactgaggcacagagtgttaaaa

SEQ ID NO: 261786 - DNA, 488 bp, Homo sapiens
attatcctgcaaactgtcgtcacaactgtatccctcagccaagtgttttaataaagactagcttaaatgcttgttcttcctcagatctggattaatttaacaggctgggatgatgtcgagcttgtgttttatctttgacataaaaattgcatctttcataacacaaaaaaattccatgtctacactccctactggaaggagactaatcacttctataacaataaggctaaaataattcaagttcgcagaaatatgtcagccaaaatcacactagaaactagaggaakacaggcctgggagggagaatgaagcattgtaaatctctgctgtttatcctggcttggtgtttgaagtttcaagatgaccaagtactacttttgtgaacgatgatataagtgagcctcataatgaataagaaggtgtatgcaataatacctgagctcatccagagcagtcatgaggtatggagtatgcaaaaattgcattta

SEQ ID NO: 261787 - DNA, 565 bp, Homo sapiens
tggtttgtggtgcagggtgagcaggaagtgacacaaggaacccaaacctgaatttgatcagtggccctactgggcctcagtgtttcaggggcctctcccttctatgaaggtcacacagattgccactggccagtttttactagtttccttaaatctatcagattatatcttactgatggtttttttttttttttwaaccaagataatctcttcttcccatttaattacatgctggtctgagaaaagtacaaacacatctcatcgtagacacatattctccgaagccctaacaagaaaggtactgcattctaggagtagactctggaaatggacttccaacgcttgtgacaaaatgctcttgtgatgtgaagttgtattatattaaacatatttaatatcagttcttatttctttaaagtgtcccttctcactttctttatttttaaaagaatcactgacttcttttctgaaactagtagatgcatgtctttctaatgtctcccatgatggttcagttcttgagctccacaaggtcaatgtggctcctcttaccctcagctcactg

SEQ ID NO: 261788 - DNA, 522 bp, Homo sapiens
acacacagctgttcacatggatatctgccatcacccggagtgaagcacagcaaatccagggcccctctatggcttcttctccatgtacatctgttgtgcctgctttccaccatccttggtgatatcttggtccccacacatctcctattgtctccattgtttgttttctgtaatgcttccttgcagtctatacatttccctgatgtgcatttgtgtcacccacaacaatcaacctaggatgcccctgacaacgacacctggctcctccccagactcttcaatcacctccctgaggaagactccaacatttcatcctatgtggacaacaggcgctgtaggaagtgctgtgatggcacagcacggtgagggggcgatgagggggaggctcrtacttctgctggtgcaaatgcttgtcataaacactaaccagaagtgagcattttcacgaactgttcttatttgacttccccagccacttgttgatgatggttggcgtatctggctgtgggtgatcctgggtcc

SEQ ID NO: 261789 - DNA, 601 bp, Homo sapiens
aaagctcctttactttccaaacgggaggataacaatgaaacactcctttcatatgaatctttaagtttttcttttgtaattcttattttaaaggcaatttcaattacatcaggatgctaaatcaatgggataaacagaaaggatgttgtaagtttttctccttctaaaagaaagtagctaacagagtggacaaacaccagatccctaagcagccattgggccacctgtggctccttcacccatgtacttaggaaacagaaatcatttcataacgtcctccagtattaaaaagctagttgtccatcaacacaaaatgttgcctatgctgcacctcccccagctcctatcacgcatcttcctttgcagcaggctccacgtctccaagtctcagacaataacagtcctcctccagcctcagccttcatcaccctgttctcccaacaackgctactgttgctgtttcccattacaaaattcagctttttcttaggtccctcagtagaatttttgcttcatatcaatcagttaaaactcttactcttactatttgaaagatcttgctttatctttctctgacttttacaaaaaaaattggtcatca

SEQ ID NO: 261790 - DNA, 569 bp, Homo sapiens
catgagatctgctttgctttggctaatgcaatgtggacagaaataatcacgagctagatccagcccaggattaggagaccttttgtttttcaggtcactctcttgcacctcattaggaaaagaacacttccgggtagcccaccagtcccaggatgagagacacatggagcagagctgccctagtcaacctgcagtctattattgtgtacctctgagatttcatggttgttatgcrgcattattgtgatacaaactgccctcacaccaaaactgtatttgctgagcctggataagtgacattcacctattatcttttgtttatgtagaaatatggtagtctttcaaaacatataactcattattcttttcatgataaaaacaattcatgttcatataatttgggagaaaaacaaagatataaagacaaactaaaaataatctataattgtcctgcccaagcagaacactctgctttccatacggccttgtctgcctactccattttcctctgtattctcaaaattggtggcatactttactttgtcaagacctctatcttgttccaagaa

SEQ ID NO: 261791 - DNA, 529 bp, Homo sapiens
tataacttgtgtgtaatctgtgtgtgaaatgcatgcttgagtgatgtgtgtgcaggtgatatgcaggtaacacacgtgctctgtgtggaaggcctatgtgctcacagtctgtgtgtaaggaggtgcagcagcccagcacttcagagcaatgtggcagtcttcagtattacttctacacattttctagcatcacagggctctcttccttcttattgccatactttgatgcatcaccttttctgggaatgtcagtcctggagcatgtggaaagccctgatgaccttcctggcttccgattagaggggaccctccactagctgaacaggagttgatttcagcaccgtgtccaatggtgcattgtcaattaagtcctgccatactttgcttcygcaaaatggccatctgctttactaaaaattcttcagaccttgtcattgctggatatgctttgaagaacagtgcaccaaagaatgcaggaaatgagagaagccaacgcaaaccatgctgctcagagttagaaaatactaac

SEQ ID NO: 261792 - DNA, 610 bp, Homo sapiens
gctccaagggagtgaagccaggtggtcgtcacctgcgagttgagactggatggaactcgtcttccagcttcacagccagctctttccatccagctggatttgcaggttcaaggagatgaccagaacatttttagagagtacattgttaaaagatgctggaaagaatgaaattatcactcacatgygatgactcttcagttagcagttagagaagaaagtgctaatcaagtcaaattataaagtatgccttcagtcactgatgacagtaaattggtatttctaaaccggaactgtttatcatcaacagtcaattcaattctctaaaatagagcctctagggaaatgagaatcactcaaaaggtggaaaaatattcaatccttggataagagtctatggaggtcatcagatgagagctgcagctgtgctccctggaataggcacagggcaccttgtggcacaccagcacccaagtcagccctgcaggctggtgcacctgcaaagcctgagcaagcatagatcagcaccagtgtgagaaaatcacccaaaggggaatctcatcctgcaaacatgaccgccacactcacacaccataaagtgaaaaagcaaaat

SEQ ID NO: 261793 - DNA, 606 bp, Homo sapiens
aatttctacctatattgtcgcatagtgttcttcctatcattatgtctcttcttttctcctaagaacaccagtcataagggattaagcacccagtctactccaatataacctcatgttaamttgactatagctgcaaaatccctactttcaaataaggtaaacatttctcaggttgccttacattcacaagtaccagggattagaatttgaatctattttggggggaggacacagttcaagacataatccttaaaaatcctgttacttctgtttcttaatttttctttaaagaagaaggggaacataaagagtaaattattcatcaatttacccactcatacaacaggtatttattctgcatctagtttatgttgggcactgtttaaggtcctgatgagaaagctgtgatcaagacagatcaggcctttggtctttccaagctaatatcctaactgtaacatctacaatgaacatatagacaggaggatttttgatagtggtaagtgctgtgaaaatatagaccagataaaggatatagaattactccataggcaggagtaagacaaggatgttcttgattagataaggaaagtggggaagacttca

SEQ ID NO: 261794 - DNA, 606 bp, Homo sapiens
aatttctacctatattgtcgcatagtgttcttcctatcattatgtctcttcttttctcctaagaacaccagtcataagggattaagcacccagtctactccaatataacctcatgttaacttgactatagctgcaaaatccctactttcaaataaggtaaacatttctcaggttgccttacattcacaagtaccagggattagaatttgaatctattttggggggaggacacagttcaagacataatccttaaaaatcctgttacttctgtttcttaatttttctttaaagaagaaggggaacataaagagtaaattattcatcaatttacccactcatacaacaggtatttattctgcatctagtttatgttgggcactgtttaaggycctgatgagaaagctgtgatcaagacagatcaggcctttggtctttccaagctaatatcctaactgtaacatctacaatgaacatatagacaggaggatttttgatagtggtaagtgctgtgaaaatatagaccagataaaggatatagaattactccataggcaggagtaagacaaggatgttcttgattagataaggaaagtggggaagacttca

SEQ ID NO: 261795 - DNA, 606 bp, Homo sapiens
aatttctacctatattgtcgcatagtgttcttcctatcattatgtctcttcttttctcctaagaacaccagtcataagggattaagcacccagtctactccaatataacctcatgttaacttgactatagctgcaaaatccctactttcaaataaggtaaacatttctcaggttgccttacattcacaagtaccagggattagaatttgaatctattttggggggaggacacagttcaagacataatccttaaaaatcctgttacttctgtttcttaatttttctttaaagaagaaggggaacataaagagtaaattattcatcaatttacccactcatacaacaggtatttattctgcatctagtttatgttgggcactgtttaaggtcctgatgagaaagctgtgatcaagacagatcaggcctttggtctttccaagctaatatcctaactgtaacatctacaatgaacrtatagacaggaggatttttgatagtggtaagtgctgtgaaaatatagaccagataaaggatatagaattactccataggcaggagtaagacaaggatgttcttgattagataaggaaagtggggaagacttca

SEQ ID NO: 261796 - DNA, 555 bp, Homo sapiens
tacagggaactaaattttaccaacaacctgagtgagcttggaagcagattcagccccagaacctccagagacaaattccatcaccttgattttggccttgtgagactagccgaggatcctccttggctacagttcacccagatgcctgacttacctgatgcctgacttactacagtctacccagatgccagtgagataacaaatgggtgttgttttatgccactgaattagtggtaaattgctacagcaataatagaaagctaaggccattatcygtatttcccattccacatgcaatccatccaagcagttggtcctttctattcccactgtgtcataaatcttgggtaatgtgttacttattttagactttaattattaccataaatgaatactgaaatgactaacttcaatctaaccttatattctatcatctacattcaattagaatgattatcacaaaatgcacatctgatcagggcattccttcttactttgtgtgaataaatcctttctgccaatgcaaccaattcaagtaccctttccttcaaagca

SEQ ID NO: 261797 - DNA, 555 bp, Homo sapiens
tacagggaactaaattttaccaacaacctgagtgagcttggaagcagattcagccccagaacctccagagacaaattccatcaccttgattttggccttgtgagactagccgaggatcctccttggctacagttcacccagatgcctgacttacctgatgcctgacttactacagtctacccagatgccagtgagataacaaatgggtgttgttttatgccactgaattagtggtaaattgctacagcaataatagaaagctaaggccattatctgtatttcccattccacatgcaatccatccaagcagttggtcctttctattcccactgtgtcataaatcttgggtaatgtgttacttattttagactttaattattaccataaatgaatactgaaatgactaacttcaatctaaccttatattctatcatctacattcaattagawtgattatcacaaaatgcacatctgatcagggcattccttcttactttgtgtgaataaatcctttctgccaatgcaaccaattcaagtaccctttccttcaaagca

SEQ ID NO: 261798 - DNA, 564 bp, Homo sapiens
atgccttcagctagaagatggccttaggggaacacatgtggatacgtgaggagagaaaggagagactgttcagctggccagagcatttgagcaaatgcggacagtcaatacagcagcagatgccaccgccagcttgccttgacacatagttccctgctcyggaacaattttattgactttacagtggaggggtctttcatggtttctccagtgttttcgacttttgttacaggccagaggcaagatctaataaattgaaagaggcagaagtgttgtatttcaaatagatgtccttatgttttgcaaattgcaaaatgaaagagtgggttattttaaagagcttcacagccccttccctctcaccatggattttttttttaaacatttaagggcattacagagacaacatgataaatgtccaaaggtagggaggagaaaaaatacaaagaaaaagaaatctgaagaagatcttgaatataaagttaaagaaggaatatagagatgaagattcccttttattactcatccttgatattaacttattgggattcaattgcaaattga

SEQ ID NO: 261799 - DNA, 564 bp, Homo sapiens
atgccttcagctagaagatggccttaggggaacacatgtggatacgtgaggagagaaaggagagactgttcagctggccagagcatttgagcaaatgcggacagtcaatacagcagcagatgccaccgccagcttgccttgacacatagttccctgctccggaacaattttattgactttacagtggaggggtctttcatggtttctccagtgtyttcgacttttgttacaggccagaggcaagatctaataaattgaaagaggcagaagtgttgtatttcaaatagatgtccttatgttttgcaaattgcaaaatgaaagagtgggttattttaaagagcttcacagccccttccctctcaccatggattttttttttaaacatttaagggcattacagagacaacatgataaatgtccaaaggtagggaggagaaaaaatacaaagaaaaagaaatctgaagaagatcttgaatataaagttaaagaaggaatatagagatgaagattcccttttattactcatccttgatattaacttattgggattcaattgcaaattga

SEQ ID NO: 261800 - DNA, 564 bp, Homo sapiens
atgccttcagctagaagatggccttaggggaacacatgtggatacgtgaggagagaaaggagagactgttcagctggccagagcatttgagcaaatgcggacagtcaatacagcagcagatgccaccgccagcttgccttgacacatagttccctgctccggaacaattttattgactttacagtggaggggtctttcatggtttctccagtgttttcgacttttgttacaggccagaggcaagatctaataaattgaaagasgcagaagtgttgtatttcaaatagatgtccttatgttttgcaaattgcaaaatgaaagagtgggttattttaaagagcttcacagccccttccctctcaccatggattttttttttaaacatttaagggcattacagagacaacatgataaatgtccaaaggtagggaggagaaaaaatacaaagaaaaagaaatctgaagaagatcttgaatataaagttaaagaaggaatatagagatgaagattcccttttattactcatccttgatattaacttattgggattcaattgcaaattga

SEQ ID NO: 261801 - DNA, 551 bp, Homo sapiens
cttcacagccccttccctctcaccatggattttttttttaaacatttaagggcattacagagacaacatgataaatgtccaaaggtagggaggagaaaaaatacaaagaaaaagaaatctgaagaagatcttgaatataaagttaaagaaggaatatagagatgaagattcccttttattactcatccttgatattaacttattgggattcaattgcaaattgaaaacatccctgcgtaagtacattttatgtacttgttaaaataggagttggctgcccccctgactttcaagactttcagatatatttcaattgtatttattagttaaaaattgtatacctttttctgggacattttatgaactcrtcaacttgaaaaatatggattattattgttgccagtactgtatttaccattttattacatattttttcctgtcttacccactaaaatgtcagcttcatcagtgaaaaaaccttgtctcctcttcctcagtcttatatcagcagtgcccagtggattagtgaaaatctggtaaataaatatttg

SEQ ID NO: 261802 - DNA, 470 bp, Homo sapiens
aatgaatgtgtgtgtgtacttaaattaaaaaaattaaagagtagccatataatgaaatgtagaacctttatttttatacttgtttttagagagacagatagcaataaatgttatatgtataataagaattaaattgtacatttagaagacatgagtagctttactcaaaatacacgagcagtgaatgttaattttgcttggatatttttgatatcatgattctaaaacctttataaaagagtcagtgtagaaatgaatgctgactraaggtcagtgtgttttattaaaatcaaatcctggtaagaatctaggatgacgttttgctactttgaatttcagagaaagcatttcaggttttgaaaacagattctggcagtttactccaatagcttagaatttagttttctttaatcagcttgtgttggcaatttggatgatattgcttagctttagtagtgtttttgatgcac

SEQ ID NO: 261803 - DNA, 561 bp, Homo sapiens
gagaagatgctttccttgcccctccctcgcttctgttggtggctggcactcctcggtcttacttggtttgccgcrgcatcactctgatctctgcgtctgtctttgcatggccgtctcccacttatgtctgcatttctgtctccaaattttcctcctatgaggacagcagtcatattggatttaagcccgcctttaattcagcataacctcagattaatttattatatctacataatccctatttccaggtaaattcatattctgagtttccgggagacataaatttaggggggacaatattcaaccttgtacaggggtataatgtttaatacattcatggagtgtacttatcacttcaaaacagcaatataaagtttcaattgcctatccatctccaagccatggagtagcagaacctaatgtaagggttgagatctctccaatcttagagaaaattcacatctctgaagctaaagaaagtaaacattatctgtgtatttgaggatggagtttatggaaattgtgtcagattctctatggaaactaagccaagagtgacag

SEQ ID NO: 261804 - DNA, 552 bp, Homo sapiens
agccaagagtgacaggaattttttcactgagaattagaatcagaattatgtttatctttgcattacttgaatctagaacagaggagtcccttgttctgttaaccaacgatcctttcagaagaaataccctactctaattctttaaaattgggttgctcaaatttagataaacacaactttggggctgaaaatctcaaaatgtttcatgtgtagctaatacatttacaatgtgaaatttttgttgcyatagctatcattttcctcattcatattagagacaggattagacttcaaaataattgtgctttattattaatgtccattaaataattatgaataaatgattcacatttatggatagtaaatgacatctttgaacttaaagatatttaaaataattgctttctcatgaataagttaaatcattttctttgaaaatttttaaattactgtattcatccttacactaccagttttccatttatatctgaaatgctacttccaaagtacttttaaaatattgaaatagaagatttctattggaaaatttga

SEQ ID NO: 261805 - DNA, 552 bp, Homo sapiens
agccaagagtgacaggaattttttcactgagaattagaatcagaattatgtttatctttgcattacttgaatctagaacagaggagtcccttgttctgttaaccaacgatcctttcagaagaaataccctactctaattctttaaaattgggttgctcaaatttagataaacacaactttggggctgaaaatctcaaaatgtttcatgtgtagctaatacatttacaatgtgaaatttttgttgctatagctatcattttcctcattcatattagagacaggattagacttcaaaataattgtgctttattattaatgtycattaaataattatgaataaatgattcacatttatggatagtaaatgacatctttgaacttaaagatatttaaaataattgctttctcatgaataagttaaatcattttctttgaaaatttttaaattactgtattcatccttacactaccagttttccatttatatctgaaatgctacttccaaagtacttttaaaatattgaaatagaagatttctattggaaaatttga

SEQ ID NO: 261806 - DNA, 552 bp, Homo sapiens
agccaagagtgacaggaattttttcactgagaattagaatcagaattatgtttatctttgcattacttgaatctagaacagaggagtcccttgttctgttaaccaacgatcctttcagaagaaataccctactctaattctttaaaattgggttgctcaaatttagataaacacaactttggggctgaaaatctcaaaatgtttcatgtgtagctaatacatttacaatgtgaaatttttgttgctatagctatcattttcctcattcatattagagacaggattagacttcaaaataattgtgctttattattaatgtccattaaataattatgaataaatgattcacatttatggatagtaaatgacatctttgaacttaaagatatttaaaataattgctttctcatgaataagttaaatcattttctttgaaawtttttaaattactgtattcatccttacactaccagttttccatttatatctgaaatgctacttccaaagtacttttaaaatattgaaatagaagatttctattggaaaatttga

SEQ ID NO: 261807 - DNA, 581 bp, Homo sapiens
ttgtgttcatgtgtacatattatttaactcccacttataagtgagaacatgtggtattcgtctgtttytgacttgtttcacttaagataatgatctccagttctatccatgttgctgcaaaaaacatgattgcattcttttatggctgcataatattacatgatatatatataccacattttctttttccaatcatccactgatggacatttaagttgattccatatctttgctattgtgcatagagctgtgatacaaatggcaaacaagcgtatgaaaaagtgctcaacatcaccagtcaaaaaaaaaattcaaatcaaaaccacagtgagatgtcatcttacaccggtcagaatggctattactgaaaagacaaaaaatagtagatgttgaagagggtgcagaaaaaaaggaatgcttataaaatattggtaggaatgtaaattagtacaacctctatggaaaacagtatgaagatttttcaaagaactaaacatagaacaaccattcagtccagcagtcccactactgagtaaacaaagtaaaatcaatcattatgttaaaatgatataatgctcttg

SEQ ID NO: 261808 - DNA, 581 bp, Homo sapiens
ttgtgttcatgtgtacatattatttaactcccacttataagtgagaacatgtggtattcgtctgtttttgacttgtttcacttaagataatgatctccagttctatccatgttgctgcaaaaaacatgattgcattcttttatggctgcataatattacatgatatatatataccacattttctttttccaatcatccactgatggacatttaagttgattccatatctttgctattgtgcatagagctgtgatacaaatggcaaacaagcgtatgaaaaagtgctcaacatcaccagtcaaaaaaaaaattcaaatcaaaaccacagtgagatgtcatcttacaccggtcagaatggctattactgaaaagacaaaaaatagtagatgttgaagagggtgcagaaaaaaaggaatgcttataaaatattggtaggaatgtaaattagtacaacctctatggaaaacagtatgaagatttytcaaagaactaaacatagaacaaccattcagtccagcagtcccactactgagtaaacaaagtaaaatcaatcattatgttaaaatgatataatgctcttg

SEQ ID NO: 261809 - DNA, 561 bp, Homo sapiens
acctttgtttctttgaacaaggaaaatagcaaactgtcttggaatgttttcatggctacttaaaaatattattatgctttatatttttatagcagtttcaggtttatagmaaaattgggcagatagtacagagagttcccatacgtcttctttcgaccacacaaagattccttgttgctaacatcttgtattggtgtggtacctttgtataatcgatgaaccaatattgactcactattattaactaaagtctatagtttccattagggctcactttttgtgttgtacattctgggtttttaacaaatgtataatgatatgtgtctattattatagcgtcatacagaatagtttccctgccttaggaatcttctgtgctccacctattcatacctccctctcccaagcccctggcaaccactaactgttttactatctccatagttttacctttttttagaatgtcatatacttggcatcgcacaggatgtagcctttatagactgacttcttttattttgcaatatgcatttaagtttcctacatgtctttttgtggctt

SEQ ID NO: 261810 - DNA, 561 bp, Homo sapiens
acctttgtttctttgaacaaggaaaatagcaaactgtcttggaatgttttcatggctacttaaaaatattattatgctttatatttttatagcagtttcaggtttatagaaaaattgggcagatagtacagagagttcccatacgtcttctttcgaccacacaaagrttccttgttgctaacatcttgtattggtgtggtacctttgtataatcgatgaaccaatattgactcactattattaactaaagtctatagtttccattagggctcactttttgtgttgtacattctgggtttttaacaaatgtataatgatatgtgtctattattatagcgtcatacagaatagtttccctgccttaggaatcttctgtgctccacctattcatacctccctctcccaagcccctggcaaccactaactgttttactatctccatagttttacctttttttagaatgtcatatacttggcatcgcacaggatgtagcctttatagactgacttcttttattttgcaatatgcatttaagtttcctacatgtctttttgtggctt

SEQ ID NO: 261811 - DNA, 576 bp, Homo sapiens
aaccattttgactacatcagtgaggtagctttccaagttatttttattatgataaytctatttttaaaataatttttaaataaacattttattcaagttatttaattttaatccaacttcataccatgttttatagttttctttaaaaaatctattcagctacattgacatatttttaataagccatacaatttttctaatttagtgatgttgtgtcaggaatatttttataattcaccatcatgcactacataagttgggattatttttccaacaggataagatttaaatatgagcctgtgacttttagttaatgttaaacttgcagcacagtttttttttcttggaaatatttttaaaaacacaaattaagggaagaaaatcacacaaatattatagcaattaaaatgacaatatatcatgagttcttctatattaaaattttatcttccttccacttgccattcctcatatactttggaatatttctgatatattactgcatggatgctcacagacatattgtctcagttttagaaacaaatgacagcttcattttccagatcatttttaagg

SEQ ID NO: 261812 - DNA, 576 bp, Homo sapiens
aaccattttgactacatcagtgaggtagctttccaagttatttttattatgataactctatttttaaaataatttttaaataamcattttattcaagttatttaattttaatccaacttcataccatgttttatagttttctttaaaaaatctattcagctacattgacatatttttaataagccatacaatttttctaatttagtgatgttgtgtcaggaatatttttataattcaccatcatgcactacataagttgggattatttttccaacaggataagatttaaatatgagcctgtgacttttagttaatgttaaacttgcagcacagtttttttttcttggaaatatttttaaaaacacaaattaagggaagaaaatcacacaaatattatagcaattaaaatgacaatatatcatgagttcttctatattaaaattttatcttccttccacttgccattcctcatatactttggaatatttctgatatattactgcatggatgctcacagacatattgtctcagttttagaaacaaatgacagcttcattttccagatcatttttaagg

SEQ ID NO: 261813 - DNA, 576 bp, Homo sapiens
aaccattttgactacatcagtgaggtagctttccaagttatttttattatgataactctatttttaaaataatttttaaataaacattttattcaagttatttaattttaatccaacttcataccatgttttatagttttctttaaaaaatctattcagctacattgacatatttttaataagccatacaatttttctaatttagtratgttgtgtcaggaatatttttataattcaccatcatgcactacataagttgggattatttttccaacaggataagatttaaatatgagcctgtgacttttagttaatgttaaacttgcagcacagtttttttttcttggaaatatttttaaaaacacaaattaagggaagaaaatcacacaaatattatagcaattaaaatgacaatatatcatgagttcttctatattaaaattttatcttccttccacttgccattcctcatatactttggaatatttctgatatattactgcatggatgctcacagacatattgtctcagttttagaaacaaatgacagcttcattttccagatcatttttaagg

SEQ ID NO: 261814 - DNA, 558 bp, Homo sapiens
tacattgaagaagcttcagaatatgtccactatgtgctagcaaaagctgggagagcataaatgggaagaaacttggaggtgttkatggagagaagcagaatattaatataaataagggagaatgcatagaaagaggcatacttctgtgatgcaagatttaataccctgacaaggacccctgatgatgttactaatatgctgctggaatggcccttcaaagtgtggcaaaagcaatggctcatgctatgtaaaatagaaaagccagatggtaaggacatgcttaaaaatgggcattccagggtgcatatcccatggaagtatagagcactcatgagctgaactgattgttttatgagaggatccagaagaccattcatttatccataatttatacaatgaaaatcagaagtcctgagcccatgtacagctttaaataagttctcagactcagaagccacttactgaaggaaaggctgaaactctatgagaaaggactttgcagcatcatagtaaatgcactaactattaattcttccatgttcccaagggatctgttgt

SEQ ID NO: 261815 - DNA, 558 bp, Homo sapiens
tacattgaagaagcttcagaatatgtccactatgtgctagcaaaagctgggagagcataaatgggaagaaacttggaggtgtttatggagagaagcagaatattaatataaataagggagaatgcatagaaagaggcatacttctgtgatgcaagatttaataccctgacaaggacccctgatgatgttactaatatgctgctggaatggcccttcaaagtgtggcaaaagcaatggctcatgctatgtaaaatagaaaagccagatggtaaggacatgcttaaaaatgggcattccagggtgcatatcccatggaagtmtagagcactcatgagctgaactgattgttttatgagaggatccagaagaccattcatttatccataatttatacaatgaaaatcagaagtcctgagcccatgtacagctttaaataagttctcagactcagaagccacttactgaaggaaaggctgaaactctatgagaaaggactttgcagcatcatagtaaatgcactaactattaattcttccatgttcccaagggatctgttgt

SEQ ID NO: 261816 - DNA, 530 bp, Homo sapiens
aattaaaactctgtgttgaacgtaataagattaaaatatctataagacagttcagtagagatggcaaaagggctgttgggcatattaatctagaatattgaaatggctagggctgggtatattacaataaggagtcaaaaacataaatggaacaccagaacttatttctcttatctacctgtaactttgtacctattgatcaacytttcctgatcttctgtaccctgtactctcccaacctctagtaaccagcattcttctgtctacttctatgaggtcaatggtcaacatttttagattctacatttacctgacatcatgcagtacttgtacttctgtgccttgcttatttaacttaagacaatgtcctctagcttcatccatgttgttgaaagtgacaaaatttcagtttttttatggctaaatggtattgcattgtgtacacatactacattttaaaaattcattcatctgttgcacagtcgggtgactatagccaacaattaaatattgtaaacttcaaaatgtct

SEQ ID NO: 261817 - DNA, 530 bp, Homo sapiens
aattaaaactctgtgttgaacgtaataagattaaaatatctataagacagttcagtagagatggcaaaagggctgttgggcatattaatctagaatattgaaatggctagggctgggtatattacaataaggagtcaaaaacataaatggaacaccagaacttatttctcttatctacctgtaactttgtacctattgatcaacttttcctgatcttctgtaccctgtactctcccaacctctagtaaccagcattcttctgtctacttctatgaggtcaatggtcaacatttttagattctacatttacctgacatcatgcagtacttgtacttctgtgccttgcttatttaacttaagacaatgtcctctagcttcatccatgttgttgaaagtgacaaaatttcagtttwtttatggctaaatggtattgcattgtgtacacatactacattttaaaaattcattcatctgttgcacagtcgggtgactatagccaacaattaaatattgtaaacttcaaaatgtct

SEQ ID NO: 261818 - DNA, 554 bp, Homo sapiens
ccaggaagtattaggagtcacaagttaacgtctttaatgtaaggaaagtgacaaagacattggtaaacagaaagattagagaagagtagtgtgcttgaaagcatatggctttttcaagactttttcttctttagaggaagaagaggaggaaaatattgtttagatgatgtaaccaagagcaagarcactctacaaagtttttgtccttgtggtataaagggacatggaagaaacaaaaacaaaaatccaagcttcatagagtgagaaccagttttcagttaacatatgaagatggaagaactatcttaaggcttaaaatataacacccttcctaatatcgttaatatttacatatattttcttatttaattctaatagtcacttcccaaggtgatgctaaattgtctcaattttataaatgaggaactcatagcatggaaatgttgagtaattttcccatggttacatatctagtaaatattgatgtcaggattcaaaatcagggcatctgacttcagaccaagctacaatttcacctggtcctaaaaagtgga

SEQ ID NO: 261819 - DNA, 554 bp, Homo sapiens
ccaggaagtattaggagtcacaagttaacgtctttaatgtaaggaaagtgacaaagacattggtaaacagaaagattagagaagagtagtgtgcttgaaagcatatggctttttcaagactttttcttctttagaggaagaagaggaggaaaatattgtttagatgatgtaaccaagagcaagaacactctacaaastttttgtccttgtggtataaagggacatggaagaaacaaaaacaaaaatccaagcttcatagagtgagaaccagttttcagttaacatatgaagatggaagaactatcttaaggcttaaaatataacacccttcctaatatcgttaatatttacatatattttcttatttaattctaatagtcacttcccaaggtgatgctaaattgtctcaattttataaatgaggaactcatagcatggaaatgttgagtaattttcccatggttacatatctagtaaatattgatgtcaggattcaaaatcagggcatctgacttcagaccaagctacaatttcacctggtcctaaaaagtgga

SEQ ID NO: 261820 - DNA, 550 bp, Homo sapiens
tatagagtgaagaggaggagcaaggtgtggacctaagaaaataataaattctgtgtaactgacagcaaaaacacagacttaggcactgtattctagctgataatgatatttctcaatagataccaggttaacagctctagtactgctatacatgtgtactgaaattgaacagttaaataaatggaggacatccacgtttatcactgatggagtgggagtttacagataagcaggaggaggaggccagaaagatgcatgtggtgatggattagaattggagacatcctgccctcaaggagagagaacataaaagaacataaatccgcttttcatcaatgtgagctgcaccaacttrcctcctcccaaagagcacaaaatagaaaggaacgaaaagaaaagagcaactttacagtgaagaaacctacaaacactacctcagccaggtgatcagagtcaatataaatggtgataagaagtgttgataatagatactcttgatatattgtgatgaaatggcattttacttctgcatccttcctcctgaaagccc

SEQ ID NO: 261821 - DNA, 571 bp, Homo sapiens
tgggcaggctggttgaagtctctccagggaccacttcccacctgactggctcagaataaagttgtgtaaaatggaatgaagaatgatgggtatgtatatctcacttgtaataaaccagcacaaaatgtagtgtcctctccccttccaaaaagctgtttattgtctgtcattattctgtgttttarcacggcattcttatctgatttggccaagctgtgacagatttacctagaatgggttaactcatctaactcatacatctggattctcagctaaaaaggcaggatgtctgaagccactctccatttgatctcttattagtctatggatggatgcatcttgattagttcatgtagtgaaagaagaaattccatcagaacttgaggaaatgttccaatgagcaaatacttttaatttctctacctgtgtatatctacgggtatctacagaacaaggcaagttatacggccaaacccacattcaaaatgaaagagaattacccaatgtgtgtatagaaagtgacgctttatagaacatatgtttaaatatttctatagggtagattaatagg

SEQ ID NO: 261822 - DNA, 580 bp, Homo sapiens
ttctgatgttattttgttatatttttaaatcattgaattcaaagctttaaatttataattgttattaacattgatatggaattaaatttgtctttcataaatgtatagatacatatactaaattaatgtattcatgcatacacaaatacataactatatgactttagtcctgaccattgtcattcaatgccagatgaaagcaaaacaaaatgcctctttataactgaatccactcccataagcatttcctcccatccaatgtattttttctttaagagagaagactgaatatcaaaagtactggtgattatgactaaatgtaattacttttcaattcagttgtacatgtcttgacacttaacagcagaattatctgttctgtaatgaaattcacctatttttattctcctctktttgcacttgtttacgtcccttccttttccttccctttccattccatgctaacatgaaagatattgaaatatcactcgaaataatcttatttttcttaattcttattttaagtatctagttgaggaggccactaatagcaggattaggcagacataaatgttcagaa

SEQ ID NO: 261823 - DNA, 499 bp, Homo sapiens
acaaagtcttccctactcttgccactcccccattcttccttcttatctcttcacacctagagaagagttctcttttggaaccatgagctgtggatcctgggtttaggagatgggtgctgccagcattcacttgcctaccgtggctggtgtctcaataggtcacgtgccccaccattccactgtctcaggtccagttaagcactaggccttacctaagatttgccttccttttgtcctagatattctttcaaatttatttagggctccacagcacttttgtccacagatggtgaggcttgcaggaactcaatttcagactactgggatcggtgagtcccctctgggtaggcctcgttatatgttccccatgggtaggcatcagttgagtttggtctggttttgttttctgttataataaagcagcaytgaattcactacctcaaaattgctgctctcaccctctcatcggcacacagaaaatctatccatagcatgccaa

SEQ ID NO: 261824 - DNA, 551 bp, Homo sapiens
ttaaaaccaggtactatgagtgttcacctgatttttggttcatataaaggcgctttgattttgtagatagttgctaagttgatgtccttgcaggagggttgatcagtggaggcttctattccaccrtcttgctctgtgtctcctagacatatctgtttatttttatacgttaataaccaatttatatatagtaatgtattcctcatatttttaggcacatatttatttaattaatcttaaaatttttaaagtatgttatttatttgtttttttgagatggagtttcactcttgtcgcccaggcaggagcacaatgtgccatggcacaatctcacctcactgcaacctccacctcccggattcaagtgattctcctgctcagcctcccgagtagttgggattacaggcatgcgccatcacaaccagctaattttgtatttttagtagagacagggtttctccatgttggtcaggttggtctcgaactcccaaactcaggtgattctcccgccttggcctcccaaagtgctggattacaggtgtgagccacca

SEQ ID NO: 261825 - DNA, 572 bp, Homo sapiens
aggtaccaattcagcaagagaatataacaattttaagtatgtatgcactctattctggatcacccagatatataaagccagtatttttaaagctgaagagagatataggccccaatacaataatagctggagaatttaataccccactttcagcattggacagaccatccagaaagaaaatcaataaagaaacatcacacttaatttgcactatagaacaagtgaatctaacatatatttacagaacatttcacccaatggctgcagaatacacattactttcctcagcacttgcgtcattttcaaagatagaccatattttaggtcacaaaacaggccttaaaacattaaaaaaagaaataatataatacaacttctctgactataatggaaaaaaactaaaaatyaataaaatgataaacgttggaaaatatatactacatggaaattaaacactatgatcctgaatggacagtgggtcaatgaacaaactaaaaaggaagtagaaaaacttcttgaaataaatgaccatggaaacacaacaaaccaacactaatgggatacagaaaaca

SEQ ID NO: 261826 - DNA, 572 bp, Homo sapiens
aggtaccaattcagcaagagaatataacaattttaagtatgtatgcactctattctggatcacccagatatataaagccagtatttttaaagctgaagagagatataggccccaatacaataatagctggagaatttaataccccactttcagcattggacagaccatccagaaagaaaatcaataaagaaacatcacacttaatttgcactatagaacaagtgaatctaacatatatttacagaacatttcacccaatggctgcagaatacacattactttcctcagcacttgcgtcattttcaaagatagaccatattttaggtcacaaaacaggccttaaaacattaaaaaaagaaataatataatacaacttctctgactataatggaaaaaaactaaaaattaataaaatgataaacgttggaaaatatatactacatggaaattaaacactatgatcctgaatggacagtgggtcaatgaacaaaytaaaaaggaagtagaaaaacttcttgaaataaatgaccatggaaacacaacaaaccaacactaatgggatacagaaaaca

SEQ ID NO: 261827 - DNA, 597 bp, Homo sapiens
gtttttttatggagtccagtttaatagaacattacatataaatacataattttattttttaaaatatataataaaacattatgcatgtttatatgttataaatataacattatattgtaaacatataacgtgttttacaatataatttacaaattatagaacatgtaacatatgttttataacattttttaaatatggccattcttgcaggagtaaggtggtatctcattgtaattttaatttgcacttccctgatgattagtgattttgaccattttttcatatgtatgttagctgtttgtatatcttcttttgaggaatgtctgttcacatcttttgccaactttttgatgaaattatttgagtttttcctgctgttctgtttgagttccttgcagattccagatactagtcctttgtcagaggcatagtttgcaaatgttttctcccactctgtgggttgtctgtttattctactgattatttcttttgctgtgcagaagctttttagtttaattaggtctcactcatttttgtttttgttgcatttgcttttggagtcttgrtcataaattctttgcattggccaatgtccaa

SEQ ID NO: 261828 - DNA, 556 bp, Homo sapiens
atgtgcctttcctcaaagcagttgagtgagtttgcaaggaaatgtttctaatacctatacttacctatgatgactcaatggaaatggcatactccgaagctgcaaaaagctgcaaatgcacacacatayctacatgcactagccccatggatttccttgctatggttggatatggttgtttggtcctaccaagtttcatattggtatttgttccccagtgctggaggtgaggcctggtgggagtgcttgagtcacagggggaagatatgtcatgaatcgttggtgccattcccaagagtgagtgagctctcactcttaagttccaaagagaacttatgattgaaaagagcctcacactgccccttctcctgtcatatgacctgcacaaactggcttcccttcttctgccatgagtgaaagcagcctgaagtccacctcagaagcagatgctgaggccatgctttgtgttcagcctctggaaacatgagacaaataaacgtcttttctttataaattacccatcctcgggtatttatttatagcaacccaaatgaac

SEQ ID NO: 261829 - DNA, 547 bp, Homo sapiens
tcaatttttaattttttgagaaacctccaatctgttctccatagtggttgtactaatttacattcccaccaacartgtgcaagggtttccttttctccatatccttgtcatcatttattattgcctgtcttttggatacaagccattttaactggggtgagatgatatctcattgtagttttaatgtgcatttttctgatgtccgatgatgttgagcaccttttcatatccctgttcaccatttgtatgtcttctttttagaaatgtctattcaaatcttttgatcatttttaagttggattattagattttttcctatgaagttgtttgagctccctatatattctggttattaatcctttgtcaggtgagtagtttgcaaatattttctccaattctgtaggttgtgtcttcattttgttcattgtttcctgcgctgtgtagaagctttttaacttgacgtaatcccatttaccagttattttttttttccactttggttgcatgtcctagtgaggtagtactcaaaatttttttccaagaccaa

SEQ ID NO: 261830 - DNA, 547 bp, Homo sapiens
tcaatttttaattttttgagaaacctccaatctgttctccatagtggttgtactaatttacattcccaccaacaatgtgcaagggtttccttttctccatatccttgtcatcatttattattgcctgtcttttggatacaagccattttaactggggtgagatgatatctcattgtagttttaatgtgcatttttctgatgtccgatgatgttgagcaccttttcatatccctgttcaccatttgtatgtcttctttttagaaatgtctattcaaatcttttgatcatttttaagttggattattagattttttcctatgaagttgtttgagctccctatatattctggttattaatcctttgtcaggtgagtagtttgcaaatattttctccaattctgtaggttgtgtcttcattttgttcattgtttcctgcgctgtgtagaagctttttaacttgacgtaatcccatttaccagttattttttttttccactttggttgcatgtcctagtgaggtagtaytcaaaatttttttccaagaccaa

SEQ ID NO: 261831 - DNA, 601 bp, Homo sapiens
ccaaaagctccatagctccattcaaatttcaaattttccttattttattaacttcggtttttgagaaaatgattttatattttaatattttacacctacttttctctctctctctctctctctctctccctttctcttaaaagatacacacatatatatgtgtacatgaaaggaacaaatatatatatatatatatatatatatatatatatatatatayacacacacacacatatacaggataaggtaggtttgctattgtataattagatttgttaaagggagtaatctatatatccaattgatagatacataaaacacttattagattctgcaaccaaccaagttgatactctgtcatcactactgttaagaaaatctatgtaaacatagtaacacatatcttaaaataggatctttaccaaaatcatttcataaaattatagaagatattggcagcttcaaatagataacctagttacctagatgctgttttaagtttccaaacctgaaagcttggggatgttaagaaatgcaaaagtcatctttgtaactagctagacataaacacaaatacatcatatgggaaagtatatttgtg

SEQ ID NO: 261832 - DNA, 582 bp, Homo sapiens
ggctgcattagaaaaacaaacaaacaaaaaggaacttggcaataccaaatgctgccaggatgcagaatagctggcactcacatacactggtgatgggaatgcacaacacagccacttttgaaagtgtatgtaagttttatataagtgcatatgtaccctaaaacttaaagtataataataaaaaaaaaactaatcatacacttatctggctcagcaattccattcgtagtgtctaagggaaagaaaaccttaggtttgtggaaaatctgtatagaaatgtagcattttaaactaataatcatcaaaatctagaatcaaatccaacactctttatccagtaaatggttccaaacaaacaaaaatcctgtggcacatccatgytgttcagcaataaaaaaatgaacttttgatacacacaacatcatgttatcctctcagatgtgtttttgattaagtaaaaagagccagaggcaacctagctatatattttcatttctgtgactttctggatgagacacttaagtggttgctagaggagagaagttgactaaaaggagcagcatgagggaaatttatggttat

SEQ ID NO: 261833 - DNA, 597 bp, Homo sapiens
ccctttctgtccatgtaagcaaagagcttaggaggaggatgagacgagaaaaaaatcattggactcagagttgcttttttgtggaatgttgtttgcagcacgtaggagctgctcaagaaaaccaccagcaaagttttttcatgtctaaagaggggatgctaatgctccttctctgatgcttgatatatagtcacctaaataaatgattccagctgtgggaccttatttagagaggaagttcttcagagaatttgacatgggcctctttcagcgtgagagcttttgtgaacatagaagctgatgtcttcttctcagtttgatattcctgaaagcagaattgttgatgtggcctgcatcagtgtactatggtagaaatgggaacagaaagaaaggaaacttagaacttctcatgsaacattaagaatgaactttgtggtgaaggcagaaattgtaagcgtatgatgacagaaaagatattctccattgtgcctatttttagcatgggcttggtttacaggaagtatgtgatgaatatggtatgaatctttgctctgtaatgcgaaaggcggaataaaaacgcacaacaacgttcattaa

SEQ ID NO: 261834 - DNA, 634 bp, Homo sapiens
ttaatgatgttcttattttttcatgtgtatatttgcctctaatatataaatctttattaaaatatctgtccaaatatttttcttattttataagaaaataggtgtaagttttataataacaactcattattaataatgagttgttcattattgaattttgcaagttctatgtatattctggctatttgttctttactagatacatgtgttgatggcgtaaaactttgtaaagtatttgaagagatttattctgcgccaaatatgagtggcattgccctataacacagccccaggatattctgagaacatatgccccagatggttgagctgcagcttgatttatccattttaggagacaaaagacatcaatcaatatatgggtatacactggttcrtacagaatggtgggacaactcaaagtcggggcttccaggtcataggtagattcgaagattttctgattagcaactggttgaaaaagtttatctaaagacctggaatcaatagaagagagtgtctgggataagataaggggttgtggagactaaggttcctattgtgcaaatgaaacctccccatagcaggcttctgagagaatagattgtaaatgcttcttatcagacttaaaaaggtg

SEQ ID NO: 261835 - DNA, 560 bp, Homo sapiens
agcaagaaggtatactctggacaacttaaaagcgggttcccattgggagggctttcctggcctgggtgagtgatgtgacctagatacatgacctaggaggacaggaggctgcaagttggacttacagatggacctctgcatagggcaaactatcacaggcaacactcagtgggagtgtgtggttcctgagaaggttagtgtctgtataaaggatatatatctttaggatgtttctagaaaactggagagaaagatttactaaaataaacccaggttcttaatttcggtttaagcataaatttctacaatttttcaggtgccttatgagtttttgcagatatacccacagacacttaaatgaacgaaacaaggaacaacaaacaggacacttgctayacatgccgaggaccctcactttaggaatatgtagaaaacaatgtggcattttcaaatggataaaaagctgttcatatctcccacaattgactgaatgttctaagcttaaataaacaattatacaaataatgacagtgaagtcatacaaaactatttaattaatg

SEQ ID NO: 261836 - DNA, 560 bp, Homo sapiens
agcaagaaggtatactctggacaacttaaaagcgggttcccattgggagggctttcctggcctgggtgagtgatgtgacctagatacatgacctaggaggacaggaggctgcaagttggacttacagatggacctctgcatagggcaaactatcacaggcaacactcagtgggagtgtgtggttcctgagaaggttagtgtctgtataaaggatatatatctttaggatgtttctagaaaactggagagaaagatttactaaaataaacccaggttcttaatttcggtttaagcataaatttctacaatttttcaggtgccttatgagtttttgcagatatacccacagacacttaaatgaacgaaacaaggaacaacaaacaggacacttgctacrcatgccgaggaccctcactttaggaatatgtagaaaacaatgtggcattttcaaatggataaaaagctgttcatatctcccacaattgactgaatgttctaagcttaaataaacaattatacaaataatgacagtgaagtcatacaaaactatttaattaatg

SEQ ID NO: 261837 - DNA, 516 bp, Homo sapiens
ggaagctgagtcaggaagttgggatcactatttgtactctctagcctcacaaagttaggaagcattaacaacaacaacaacaaaaaaaaaagtttactatttccaaactttaaacttactaaaatcagtgaagatttttttttctcacctgagctgggccttgctatttctagggcttgcggagctgatctgtatttytttgtcttgcttttctctcaggatcctttcagcaagcaagaggtacgtggctgtggtttgggtacacttgttggtttctagagctctgaggaaaacaaggcttgctttgtacaagaagcaaaattgatttaaacatgcaaacaaaaaagtataagcaaatgaaattcaatgacctgaaatctttaagttatgcaaaaatgcaaactaggaaactaaaacacctagtggttatttaggtcacccgtgaaattctgaataataaaaaataaaaatgaggtaattattcagagggcttcataaggttgcagagtgaagtca

SEQ ID NO: 261838 - DNA, 516 bp, Homo sapiens
ggaagctgagtcaggaagttgggatcactatttgtactctctagcctcacaaagttaggaagcattaacaacaacaacaacaaaaaaaaaagtttactatttccaaactttaaacttactaaaatcagtgaagatttttttttctcacctgagctgggccttgctatttctagggcttgcggagctgatctgtatttctttgtcttgcytttctctcaggatcctttcagcaagcaagaggtacgtggctgtggtttgggtacacttgttggtttctagagctctgaggaaaacaaggcttgctttgtacaagaagcaaaattgatttaaacatgcaaacaaaaaagtataagcaaatgaaattcaatgacctgaaatctttaagttatgcaaaaatgcaaactaggaaactaaaacacctagtggttatttaggtcacccgtgaaattctgaataataaaaaataaaaatgaggtaattattcagagggcttcataaggttgcagagtgaagtca

SEQ ID NO: 261839 - DNA, 516 bp, Homo sapiens
ggaagctgagtcaggaagttgggatcactatttgtactctctagcctcacaaagttaggaagcattaacaacaacaacaacaaaaaaaaaagtttactatttccaaactttaaacttactaaaatcagtgaagatttttttttctcacctgagctgggccttgctatttctagggcttgcggagctgatctgtatttctttgtcttgcttttctctcaggatcctttcagcaagcaagaggtacgtggctgtggtttgggtacacttgttggtttctagagctctgaggaaaacaaggcttgctttgtacaagaagcaaaattgatttaaacatgcaaacaaaaaagtataagcaaatgaaattcaatgacctgaaatctttaagttatgcaaaaatgcaaactaggaaactaaaacacctagtggttatttargtcacccgtgaaattctgaataataaaaaataaaaatgaggtaattattcagagggcttcataaggttgcagagtgaagtca

SEQ ID NO: 261840 - DNA, 582 bp, Homo sapiens
ctggaagctcatacaggtgaatgctggcagttgcgccaataagaaaaggctacctgggactaggcatgttcaaaatggcagctccgtcttcccttcttttgccagccacatgtatagtaaggagcaggcaagatggcgctggccaagtggaaagaacatttgcataagattagggtggggtggccagcttccccgacccgcacactatgtaaatgtcacacctggtccaaccaatctgtgggccccatgtaaatggaataccacctcctcaagcctgcctataaaatctggtgctctctgccgcaggccagatttcccttttgggcacccctctctgtcttgagagtaagagttcttctcctttctctttcttttgcctattaaacctccactcctaaactcactcctcatgtgygtccatgtccttaatcttcttggtgtgagatgatgaaccccgggtatttaccccagaaaacagtgccgcttcaacaacataaaaagcaaaccccaagggagggggaaagtctgctttgcagaggtgtcacataattagattcaaatgtccaattttcaacaaaatgt

SEQ ID NO: 261841 - DNA, 602 bp, Homo sapiens
actggtagccagagtcttcctggtcttgaagagaacctgctgtctatgggcctgggggctgctctctttccctgggagctgttggccactctcattctatagactggacttggagagtgactctgcattcatttaccagcttgtgcttcagtttcatgtgtacttcaattgacttccatttctttctacccactactttgactccctttgatctcttactattctcagagaacctgagtaatcacatataaaaataaaatttctgctcatggggatgccacatttagatgtgggggctgtgaatgactgacagcygtaggccattttaagggccacagcatccactgctcatttgtaaaaacttactttcctgccagtttcctgccagaaccaatgcaaatcaaagtgtcagtttcttgactaaaataacattttttttccttctgcaaaaagatggagtcagccagacccttcttatgcccttggggagatggaatagcagcgtgcccttcaacacggcagaaagagataattactcctcctcccagccccagcccctcctggattctgtgcttgactgtgcccaagactgagtggagcag

SEQ ID NO: 261842 - DNA, 602 bp, Homo sapiens
actggtagccagagtcttcctggtcttgaagagaacctgctgtctatgggcctgggggctgctctctttccctgggagctgttggccactctcattctatagactggacttggagagtgactctgcattcatttaccagcttgtgcttcagtttcatgtgtacttcaattgacttccatttctttctacccactactttgactccctttgatctcttactattctcagagaacctgagtaatcacatataaaaataaaatttctgctcatggggatgccacatttagatgtgggggctgtgaatgactgacagctgtaggccattttaagggccacagcatccactgctcatttgtaaaaacttactttcctgccagtttcctgccagaaccaatgcaaatcaaagtgtcagtttcttgactaaaataacattttttttccttctgcaaaaagatggagtcagccagacccttcttatgcccttggggagatggaatagcagcgtgcccttcracacggcagaaagagataattactcctcctcccagccccagcccctcctggattctgtgcttgactgtgcccaagactgagtggagcag

SEQ ID NO: 261843 - DNA, 586 bp, Homo sapiens
gttgcagctgtgtgcttcagtagggctttgtctgtctccctaatgcattaggaacatgatcattatcacattcctgacacagagtggttccatgtctgtgctatcaagtacagcaggggggagataacgttgccttttgtgtccccatgataggcccagacatgctcctcggtggtagccaactcagttggccctcctcagggactgtctggcagggtgggatgtgtcccttttcttttctgcatcaaaatgtacctatttggggtagatttcttagacctttgctctctgtaggttgaatattcattgtgaataatcacttcaacacatttagcagccttctcctrctaaatatgaggtttgccattcagtgtgataaaccaagacataagcaagatacagatttttgtgttcaaggaatttaaaatcttagtgacaatgaggcctatccacagataacctaattcaatccgatccaatgtcctgttggttttatctcttagatgccactaggatctgtccatgtttctccatagccataaccctctctggctcaagccaccatcactgacctggaggcttgcaa

SEQ ID NO: 261844 - DNA, 652 bp, Homo sapiens
acactcgttcttttatttgttgacttattattttataaaacatgtattgaactcctactaygtttgaggcactggagatacaaaaatgaaaaaaggccaggcacagaagctcatatttgtaatcccagcaacttgggaggctgagatgagaggattgcttgaggccatgagtttgagaccagtctgggcaccatagcagacctcgtcaatatgaaaaataaaaaatttaaaaaattggcctggtgtggtggcatgcaactgtaatcccagctacttgggaggctgaggggggaggctcacttgaggccaagagtttgaggttacagtgagcaatgattgaatgattgtaccactgcattccagtctgggtgacagaatgagacccctgacttcaaagaaaagaaaaaaaaaacaattctgctctcaaatctcaaacccttgctttctataaggaagagcaataaccaaaaagcctagtcaggaccactgatgtgatgtccggttgcttcctctctggtaagccggtgaatcatactttgtacagaaatctttttagataaagcctctttgtaaagaattcaacaccttaataactttcaggggtgagactttgccaagctcttggctacagcacacggctgggtatgagttg

SEQ ID NO: 261845 - DNA, 467 bp, Homo sapiens
aggcggggggcttctttcgaagaatctataaagattagattaattactggcccacaatcccattatgtgaactcacagagccaaagaacattaaagctggcagagaataatttaaccttattttatagatgaggaaacttgggcccagagaggaaaaataatccccctacttctcccacagtctcaaagctaattaccagcagaactggaacagaaaccagktcttttgatttctagattaggattcaacaagtatttaactcattaattagaattttcctagttccaacctggatgtctttcagaatgggtggctcaatttttatgtttgctgttaagattccctcagggctgcctggctaattttattactattttgattttactcagtcaacatttcagaaatttgcagtcttcccatcatctgtgtcagaactatctgttaaaaatgcaaatctctagccttt

SEQ ID NO: 261846 - DNA, 467 bp, Homo sapiens
aggcggggggcttctttcgaagaatctataaagattagattaattactggcccacaatcccattatgtgaactcacagagccaaagaacattaaagctggcagagaataatttaaccttattttatagatgaggaaacttgggcccagagaggaaaaataatccccctacttctcccacagtctcaaagctaattaccagcagaactggaacagaaaccaggtcttttgatttctagattaggattcaacaagtatttaactcattaattagaattttcctagttccaacctggatgtctttcagaatgggtggctcaatttttatgtttgctgttaagattccctcagggctgcctggctaattttattactattttgattttactcagtcaacatttcagaaatttgcagtcttcccatcatctgygtcagaactatctgttaaaaatgcaaatctctagccttt

SEQ ID NO: 261847 - DNA, 427 bp, Homo sapiens
ttcctcaccgcatttaggttcaagcaataagcctggatccaggcaccaaccacctagggcccttttactcccaatactgcagaggagttatcttgcctatctgtgtgtgtctccagagcccacaagctcacagctttagtaactactgtgttatatttctggtctgtttctagcacatagatatttatttttctttatgtatgtatgggcatgtggtttactttttttaaaactttcttttaaattcgttcttaaaatattttatttataattgctaagtgtttggagtgcaggtagcgacttcaaagcatgagcttacaatgtcattttgatctgcagaggcaggctctggggatgaaaatagcagcagttcctatgatgccatctttgagacayctaccattaccgctactgctatgttgatatt

SEQ ID NO: 261848 - DNA, 427 bp, Homo sapiens
ttcctcaccgcatttaggttcaagcaataagcctggatccaggcaccaaccacctagggcccttttactcccaatactgcagaggagttatcttgcctatctgtgtgtgtctccagagcccacaagctcacagctttagtaactactgtgttatatttctggtctgtttctagcacatagatatttatttttctttatgtatgtatgggcatgtggtttactttttttaaaactttcttttaaattcgttcttaaaatattttatttataattgctaagtgtttggagtgcaggtagcgacttcaaagcatgagcttacaatgtcattttgatctgcagaggcaggctctggggatgaaaatagcagcagttcctatgatgccatctttgagacatctaccattaccrctactgctatgttgatatt

SEQ ID NO: 261849 - DNA, 589 bp, Homo sapiens
agcttgttcttcttctttttttttttttttttcgaacatgtgcctcttatacagtccaggatgatcaactgtgtatayaataaagcatgcttagaaaatgtgactggtagtatttttctgttaatgtatttgagctattttcattttaaaataattcatttccagcatgtatggagggaggttcttttacaattattcaaatacatttttccttgcaggcattgaattgtttactcaatgttaatggttccttacaaatatttactgaatctctctgtaaactctcgtctaaattagaccagaaggttcaaaactctaactcccttttgctatccagccttttaaggtaatctttctgctggtatctgtacaattaactgagagcattttaataacagggaataataattgctgtttgcttatcatcaagaggaatttcccccttatgaatttacttttaggaagactagattgttatgtagcacgcggtgatgctgataaggactttaattactgtgtgagagattttggtggacggggaacaggaatttgcagtgtttttgctcatattttatggagaattgagaat

SEQ ID NO: 261850 - DNA, 589 bp, Homo sapiens
agcttgttcttcttctttttttttttttttttcgaacatgtgcctcttatacagtccaggatgatcaactgtgtatataataaagmatgcttagaaaatgtgactggtagtatttttctgttaatgtatttgagctattttcattttaaaataattcatttccagcatgtatggagggaggttcttttacaattattcaaatacatttttccttgcaggcattgaattgtttactcaatgttaatggttccttacaaatatttactgaatctctctgtaaactctcgtctaaattagaccagaaggttcaaaactctaactcccttttgctatccagccttttaaggtaatctttctgctggtatctgtacaattaactgagagcattttaataacagggaataataattgctgtttgcttatcatcaagaggaatttcccccttatgaatttacttttaggaagactagattgttatgtagcacgcggtgatgctgataaggactttaattactgtgtgagagattttggtggacggggaacaggaatttgcagtgtttttgctcatattttatggagaattgagaat

SEQ ID NO: 261851 - DNA, 589 bp, Homo sapiens
agcttgttcttcttctttttttttttttttttcgaacatgtgcctcttatacagtccaggatgatcaactgtgtatataataaagcatgcttagaaaatgtgactggtagtatttttctgttaatgtatttgagctattttcattttaaaataattcatttccagcatgtatggagggaggttcttttacaattattcaaatacatttttccttgcaggcattgaattgtttactcaatgttaatggttccttacaaatatttactgaatctctctgtaaactctcgtctaaattagaccagaaggttcaaaactctaactcccttttgctatccagccttttaaggtaatctttctgctggtatctgtacaattaactgagagcattttaataacagggaataataattgctgtttgcttatcatcaagaggaatttcccccttrtgaatttacttttaggaagactagattgttatgtagcacgcggtgatgctgataaggactttaattactgtgtgagagattttggtggacggggaacaggaatttgcagtgtttttgctcatattttatggagaattgagaat

SEQ ID NO: 261852 - DNA, 522 bp, Homo sapiens
ttacaaaaccagctacagcccaggcttgtggcacttgctgcctctttcattgagaaacaatgtggtctaaaagagtaaccctgagttcaaatgttatctctgctctttctatagcgtgttttaaataatartaatttctaaaaatattttccaaatatgtaaagttatatgatcatattgaatatgtttcttcaaactatatgctcctcctcatacatttgtgagttgcccatcccatgaggaatcactgaattagagttttttaatggacccccatgcttatctggagtgggagcacatactgtggaataacataatcaatctgaatgtcattagcattcattatctttaaacgcatgtaggagacagctatatgcttagggcactgtctagatggacccacagcctttgatttctggcaccttgcaagtcaagatggttctgcagtagacaggcatgaaggaactggtatattggcaagatcacattgcagttgagacattttcattgtacacaagcata

SEQ ID NO: 261853 - DNA, 613 bp, Homo sapiens
aataatttctttttttcttttcatttcaattatctcctagagtgacaatcacttyaagtctcacattgacaatgtctcagtttgtttgtaccgctctaacacaatacctgatactgggtaaatttagagagcacagatttcttttcttactgttcttgaggctgagaagtgcaagttcaagtcactggcaggtttggttgtcagatgaaagctgctttctgcttccaagatggtgccttatggctgcatcctctggaggggaaaaactctatgtccttacatgatagaagggatggaaggcatgaaaagatatgaactccatatgtcaagctcttttatataaatatctaacatcattcattagggcaaagtcctcatgactcaattaccaactaaaggccaactctaatattgctgcatagaggattaagtttcaacatgaattttggaggggaaactatctttcaaaccatagctccatctatgtgtgggtaactgtgaaatttaaacttctactgcactaatttttcctgaaagacagataatgtatatatctacattcttaatatcttcccacaaaagtctaagaagctccaataattttgttcaaaag

SEQ ID NO: 261854 - DNA, 613 bp, Homo sapiens
aataatttctttttttcttttcatttcaattatctcctagagtgacaatcactttaagtctcacattgacaatgtctcagtttgtttgtaccgctctaacacaatacctgatactgggtaaatttagagagcacagatttcttttcttactgttcttgaggctgagaagtgcaagttcaagtcactggcaggtttggttgtcagatgaaagctgctytctgcttccaagatggtgccttatggctgcatcctctggaggggaaaaactctatgtccttacatgatagaagggatggaaggcatgaaaagatatgaactccatatgtcaagctcttttatataaatatctaacatcattcattagggcaaagtcctcatgactcaattaccaactaaaggccaactctaatattgctgcatagaggattaagtttcaacatgaattttggaggggaaactatctttcaaaccatagctccatctatgtgtgggtaactgtgaaatttaaacttctactgcactaatttttcctgaaagacagataatgtatatatctacattcttaatatcttcccacaaaagtctaagaagctccaataattttgttcaaaag

SEQ ID NO: 261855 - DNA, 613 bp, Homo sapiens
aataatttctttttttcttttcatttcaattatctcctagagtgacaatcactttaagtctcacattgacaatgtctcagtttgtttgtaccgctctaacacaatacctgatactgggtaaatttagagagcacagatttcttttcttactgttcttgaggctgagaagtgcaagttcaagtcactggcaggtttggttgtcagatgaaagctgctttctgcttccaagatggtgccttatggctgcatcctctggaggggaaaamctctatgtccttacatgatagaagggatggaaggcatgaaaagatatgaactccatatgtcaagctcttttatataaatatctaacatcattcattagggcaaagtcctcatgactcaattaccaactaaaggccaactctaatattgctgcatagaggattaagtttcaacatgaattttggaggggaaactatctttcaaaccatagctccatctatgtgtgggtaactgtgaaatttaaacttctactgcactaatttttcctgaaagacagataatgtatatatctacattcttaatatcttcccacaaaagtctaagaagctccaataattttgttcaaaag

SEQ ID NO: 261856 - DNA, 613 bp, Homo sapiens
aataatttctttttttcttttcatttcaattatctcctagagtgacaatcactttaagtctcacattgacaatgtctcagtttgtttgtaccgctctaacacaatacctgatactgggtaaatttagagagcacagatttcttttcttactgttcttgaggctgagaagtgcaagttcaagtcactggcaggtttggttgtcagatgaaagctgctttctgcttccaagatggtgccttatggctgcatcctctggaggggaaaaactctatgtccttacatgatagaagggatggaaggcatgaaaagatatgaactccatatgtcaagctcttttatataaatatctaacatcattcattagggcaaagtcctcatgactcaattaccaactaaaggccaactctaatattgctgcatagaggatkaagtttcaacatgaattttggaggggaaactatctttcaaaccatagctccatctatgtgtgggtaactgtgaaatttaaacttctactgcactaatttttcctgaaagacagataatgtatatatctacattcttaatatcttcccacaaaagtctaagaagctccaataattttgttcaaaag

SEQ ID NO: 261857 - DNA, 556 bp, Homo sapiens
tacttaacttgccattctctattttacatatagtcactgttttatcttcaatatgttattataatttgtaaaaaatattttttgctatgtttatttgcttattgcctgccacccttcaaaagaaagctagaatatcccttcaacagcaaaaataatatctgttatttcacccttttatctccagcaccaaagaattacaacattatttgcagaacaaaacaattctatttcatagaggtaaccttggcatcagtgtaagtccaggcaaaaatggagacgggctttggaaaatgagagttttcactgatattggacaaatgtctagtgtgattgcctagcccataaaaggcattttataaacacttgttgaagaattgaatgacctatgtaagagaaagaggagagtcacagataatggatatttcacagccattatatggtggggtaaaatccaaaatattcctaagggttctcaaagggccagtgtaratggcagcaaagtcattgcatattgccacatggctttaaaagtgccaaagtgatccataccagaggt

SEQ ID NO: 261858 - DNA, 496 bp, Homo sapiens
gaaaattctatgtattttgagctaatataattatattcacacagtagtaagagcagataatatctacctctaaatgttataataatgtgataaaacattttcttttgagacaaatatcagatatgcaaaatggaagacaataaggagtaattattatattttcagaagctaaacaattattttaaatgttctagaccaagaatatactctcaggaatcatttctatagttcattaaatattctagacctacgatgaaatatataatattattaatgacttayaatcttaaaataaaaatgatgggattaatgggcttgttaatgtgtaatgtaaacattggtatcaagttttgaaattgtatttccctggcagatatgggacacatgatatcaaaatactaaagaattcctgtaaatgctttatctaagtgatattaaatattttatagccagtaagcagcctaatgtgaagaaaatagtttggcatgaagacttg

SEQ ID NO: 261859 - DNA, 496 bp, Homo sapiens
gaaaattctatgtattttgagctaatataattatattcacacagtagtaagagcagataatatctacctctaaatgttataataatgtgataaaacattttcttttgagacaaatatcagatatgcaaaatggaagacaataaggagtaattattatattttcagaagctaaacaattattttaaatgttctagaccaagaatatactctcaggaatcatttctatagttcattaaatattctagacctacgatgaaatatataatattattaatgacttataatcttaaaataaaaatgatgggattaatgggcttgttaatgtgtaatgtaaacattggtatcaagttttgaaattgtatttccctggcagatatrggacacatgatatcaaaatactaaagaattcctgtaaatgctttatctaagtgatattaaatattttatagccagtaagcagcctaatgtgaagaaaatagtttggcatgaagacttg

SEQ ID NO: 261860 - DNA, 550 bp, Homo sapiens
tactggacaacttaaacttgtatttacgaaatctggcgaccctagccattgccaaattgattaaccttagaactatgtttaccagaatccctttgactgtatgtagatttggccaaaatggactttgaacatgacttccatgatggaartgaagtagccacttttattctataggactttgaagtcagatagggtgatggaaagaaaggtacttgttgggatttagcttaatctcactgtccttgatgcagcctctagtttctgtcttgattgctgaggtttaattgtggcaagagacctctccaggagctggcagggacatgcttagattctcagcttttcccacaaaaactctaatttgtccatctgtgtgatgcttcttaaggacttgttagtctatttttctctgtgtctgcttatcccaataatcttcacttctcaactcctcccacatttatataagacttgatttctgtaatatccatgacattgaaaatactcactatcacaatttaagtaactctgattgaattaagataaatatggataa

SEQ ID NO: 261861 - DNA, 558 bp, Homo sapiens
ctaaatgaagtcgcattttcacattttggatagatgaatttgggggaacattattcaatccataagagtctaccaagtttatgtccattccacakgcaaaatatatttgcaccatccccaaatcttcaaaagtcttaattcaatcttgtctttgctctaagtccaaaatttcatctaagtaacactatctcaaagagttccatatttaatcatctaaattgaatatggatgagaatctgagtatgatccatccaaagacaaatgtcccccaattttttttctacctggaaactagaaaacaagttatccacctcccaaatacaaggatgggatagaccaggaatagatccatccattctggatggctcaaaacaagttcaaaacccaacaggttcagagacctgaaaataaacctctgtgagttgaggttctgccatctgagcccctgatgcaaccccaccctgtaggcggcctgtggatgtagtggccacctgccaatctctgagccacccccagggccatactttcttcttgaatgataatgtatgtttgcagctg

SEQ ID NO: 261862 - DNA, 497 bp, Homo sapiens
atatatttgcaccatccccaaatcttcaaaagtcttaattcaatcttgtctttgctctaagtccaaaatttcatctaagtaacactatctcaaagagttccatatttaatcatctaaattgaatatggatgagaatctgagtatgatccatccaaagacaaatgtcccccaattttttttctacctggaaactagaaaacaagttatccacytcccaaatacaaggatgggatagaccaggaatagatccatccattctggatggctcaaaacaagttcaaaacccaacaggttcagagacctgaaaataaacctctgtgagttgaggttctgccatctgagcccctgatgcaaccccaccctgtaggcggcctgtggatgtagtggccacctgccaatctctgagccacccccagggccatactttcttcttgaatgataatgtatgtttgcagctgaatagctccatgagttcattttctggctgtggaattttg

SEQ ID NO: 261863 - DNA, 479 bp, Homo sapiens
aagaaataattagtgagcttgaagacaggctaattgaaaatacacagtcagaggagaaaaaagaaaaaacaacaataatcctacgggatctgaagaatagcctccaaagggcaaatctaagagttgctggccttaaagaggaggtagagaaagtggtaggcacaaaaaatttatataaagggataataacagagaacttcccaaacgtagggaaaaatgtcaatatccaagttaaaaaaaaagttatagaacaccaagcagatttaacacaaagaagactctcaggcatttaataatcaaactcccaaagattaaggataaagaaaggatcctgaaaacagcaaaagaaaagaaakaaatagcacacaatggagctccaatatgtctggtatcaggcttttcagtggaaacctcacaggccaggagagagtggtatgacatatttaaagtgccaaaggaaaaaactgccctagtatagt

SEQ ID NO: 261864 - DNA, 479 bp, Homo sapiens
aagaaataattagtgagcttgaagacaggctaattgaaaatacacagtcagaggagaaaaaagaaaaaacaacaataatcctacgggatctgaagaatagcctccaaagggcaaatctaagagttgctggccttaaagaggaggtagagaaagtggtaggcacaaaaaatttatataaagggataataacagagaacttcccaaacgtagggaaaaatgtcaatatccaagttaaaaaaaaagttatagaacaccaagcagatttaacacaaagaagactctcaggcatttaataatcaaactcccaaagattaaggataaagaaaggatcctgaaaacagcaaaagaaaagaaataaatagcacacaatggagcyccaatatgtctggtatcaggcttttcagtggaaacctcacaggccaggagagagtggtatgacatatttaaagtgccaaaggaaaaaactgccctagtatagt

SEQ ID NO: 261865 - DNA, 556 bp, Homo sapiens
aatatgtctggtatcaggcttttcagtggaaacctcacaggccaggagagagtggtatgacatatttaaagtgccaaaggaaaaaactgccctagtatagtatatctcacaagaacagccttcaaacatgaagaagaaatactttaccagcaaaggctgagggattttcatcaacaccagacctgtcctaygagaaatgttaaagggactatttcaatcagaaagaaaagtacattaatgagcaataagtaattacatgaaggtacaaaactcactggtaatagtaagtacacagaaaaacacagaatattataatactgtaacagttgtgtgtaaactcttgtcctaagtagaaagactaaaagatgaaccaataaaaaataataactacaatgacctttcaaaatttggaaagtgcaataagatatacatagaaacaataaaaattatgaagtgatggattaaattaaggcatagaatttgtattagtcttctttttgcctttctgtttgttgcttatgcaaacagcgttaagtgttagcttaaaataatgggt

SEQ ID NO: 261866 - DNA, 516 bp, Homo sapiens
acagcagcttagccaaacactgtggggtaatcactctgctcaggactgattcctgtgcagtcagttcttctgcacatcttgccttcaaggtctgccagctgaatgcactgtgtttccaacattgccctccaaacagacctttcataaggaaaagtcactgctacttcattaattccagaagatggatggtgaagtcatattgmtttgatatgctttcagagtcaggctgttcatgggaagctagaactctctgaaacagaaaagtttttaaattctggctactttttcataggattctattatgacacctcagaggaattttttttatttaagtctgtcattttaaaggaaaatggttagatgtgactagggctgtgaaaacacagtagctaccagtgcctggcaaagtttgtactctaacatatttctgctaaaaaataaaaagaatattttccattattgccttggattctttcatcttttcttacatgttaagaaacttaatatctgaagagt

SEQ ID NO: 261867 - DNA, 516 bp, Homo sapiens
acagcagcttagccaaacactgtggggtaatcactctgctcaggactgattcctgtgcagtcagttcttctgcacatcttgccttcaaggtctgccagctgaatgcactgtgtttccaacattgccctccaaacagacctttcataaggaaaagtcactgctacttcattaattccagaagatggatggtgaagtcatattgatttgatatgctttcagastcaggctgttcatgggaagctagaactctctgaaacagaaaagtttttaaattctggctactttttcataggattctattatgacacctcagaggaattttttttatttaagtctgtcattttaaaggaaaatggttagatgtgactagggctgtgaaaacacagtagctaccagtgcctggcaaagtttgtactctaacatatttctgctaaaaaataaaaagaatattttccattattgccttggattctttcatcttttcttacatgttaagaaacttaatatctgaagagt

SEQ ID NO: 261868 - DNA, 516 bp, Homo sapiens
aaaacaaattcttccctttgttcttcagggaattgactggcatcctccccaaggaacttgtgcactggactataaggagacctaacaaatattaaggaaaaaaaaaacatttctatttcaagctgcagctccaatatccaaacaaatatctactatataatgtgcatgtctatgtatgcatgttttgtgtatctttgtctttgtatgtgtgtatgcctctgtgtacgtgcatacctgatttgtatgtgtgtgtctgtgttcgcacaatgcatgcatgtytctgcgtacctgtgtatacgtgtgttctacatgtgtgttcactcaggcctcatgcacagcaagcaagtgcacccttcatgctggagagactgttgggctgatttgttgcctggtactgccccttaacagttttgcttcttgagaaagtagttacattgtttttccaaacctcagtgttcttatttataaaattgtatgcatgataccatgaaagaaagaagttaaccagtgtgtttt

SEQ ID NO: 261869 - DNA, 584 bp, Homo sapiens
ttgtttgttttgtgcttctcaggcaagggcagtgactggaagctgggagagagggtcaacagctgaatctcagcctgatggaggccaccatttaataagtaaatacatgcacggtaagcctcatatgactttcgtctctctattcttttagaagttggtctaatccaaccatatatacaaatgcaattatttctccttcaatattttcattcattcaatatacatcgggtattatgaataaagtccrtgtagatacaagtagtctcagttccccaaaatgtttagagtgtataataccaaaaaatgctattataaagtttagtgagaaaaaagtttgtttttatataaccatatatgcaatatgattacaaatctgctaaattgttgagcaaacaataaatggttaatcagtgttgatggatgagcaaactatgaattattttccctcttttaattttcatctccaaattttctataatgtggttgtatgaatttattcatatagagagaatttacaggtggctgaagtgaatctgggttcagatgttggacttcgcggtttattcttttacagagtttgagat

SEQ ID NO: 261870 - DNA, 516 bp, Homo sapiens
aaaacaaattcttccctttgttcttcagggaattgactggcatcctccccaaggaacttgtgcactggactataaggagacctaacaaatattaaggaaaaaaaaaacatttctatttcaagctgcagctccaatatccaaacaaatatctactatataatgtgcatgtctatgtatgcatgttttgtgtatctttgtctttgtatgtgtgtatgcctctgtgtacgtgcatacctgatttgtatgtgtgtgtctgtgttcgcacaatgcatgcatgtctctgcgtacctgtgtatacgtgtgttctacatgtgtgttcactcaggcctcatgcacagcaagcaagtgcacycttcatgctggagagactgttgggctgatttgttgcctggtactgccccttaacagttttgcttcttgagaaagtagttacattgtttttccaaacctcagtgttcttatttataaaattgtatgcatgataccatgaaagaaagaagttaaccagtgtgtttt

SEQ ID NO: 261871 - DNA, 530 bp, Homo sapiens
tgagattctgaggtgtgagcgaactgagatcttgaggtgtagtaatcttcctggagtcatccagggaggttttggaaggcagggacacaaacccacacctgtctccaaagccagccttgcaatcattctctcctttgcctcacctctgcccaaagctgttgtgaagaacaatatggtggttgtggaactggcactggcatcctggttccctttatccagctaatgtttgccctcttctcwgacacacttgtttcccttgatacctcagctggcacatgattttttagagtcgactcaccattctgccctggtagaaggagagagatttgggaaaaactcaaactggacagggaatgctggcttcatggagaagggcatatgctggcacactttaacagcacctcgtggtactgaacttgccttgcaagttttgacagccattgaactgcagaacccactgttcctagtgttcaacccaggaagaaacagaaggagaactgccaggatgtaactgcttaatcgcttcctaa

SEQ ID NO: 261872 - DNA, 530 bp, Homo sapiens
tgagattctgaggtgtgagcgaactgagatcttgaggtgtagtaatcttcctggagtcatccagggaggttttggaaggcagggacacaaacccacacctgtctccaaagccagccttgcaatcattctctcctttgcctcacctctgcccaaagctgttgtgaagaacaatatggtggttgtggaactggcactggcatcctggttccctttatccagctaatgtttgccctcttctctgacacacttgtttcccttgatacctcagctggcacaygattttttagagtcgactcaccattctgccctggtagaaggagagagatttgggaaaaactcaaactggacagggaatgctggcttcatggagaagggcatatgctggcacactttaacagcacctcgtggtactgaacttgccttgcaagttttgacagccattgaactgcagaacccactgttcctagtgttcaacccaggaagaaacagaaggagaactgccaggatgtaactgcttaatcgcttcctaa

SEQ ID NO: 261873 - DNA, 527 bp, Homo sapiens
ctgtctgtgatattcctagctgatgttctgagctggaccacttccgaggatggagataataggaagccttccattacaaatacttggctgctgaaagacctaaacatttgagtcttcactgttttcaacagctccttccacacctgtccaacatagagatccacttaacagaagtcctaccctctagatattgccttatttgaaaaggtaatatcttttaatcccatttctttctatcccattgccagagctctttcccattgctttcttcactttcttcacaatcttttttcttttttaatttttaaaaatagggtctcattctgtgcccasgctggagcacagtgatgcaaccaagctcaccacaaccttgagctcttgggctcgaataatcctctggcctcagctaggactacaagcatgtgccaccatgccctgctaaccccatctcaatctttatacccataagagaaccttttcttagaagcctcttttcttagggtttggaggttgatttactattgcca

SEQ ID NO: 261874 - DNA, 517 bp, Homo sapiens
ttttaatttttaaaaatagggtctcattctgtgcccacgctggagcacagtgatgcaaccaagctcaccacaaccttgagctcttgggctcgaataatcctctggcctcagctaggactacaagcatgtgccaccatgccctgctaaccccatctcaatctttatacccataagagaaccttttcttagaagcctcttttcttagggtttggaggttgatttactattgccaatatagcaaatctttattttccttaggtttattttgattttttaaaacaatagtctttttactcaaactttggcaaagartttgggctagtataccaagtaaataagctttaattttctcttggccatgtatcttctattagtttctgcataagaccctcagtgcttccatgtttactgctggctgcacaggcacctctcactagatggcacttaggatatttttcaaccatctttctgaccaaaattgtatgtgttctatgtctcatccctaagaaagttgata

SEQ ID NO: 261875 - DNA, 517 bp, Homo sapiens
ttttaatttttaaaaatagggtctcattctgtgcccacgctggagcacagtgatgcaaccaagctcaccacaaccttgagctcttgggctcgaataatcctctggcctcagctaggactacaagcatgtgccaccatgccctgctaaccccatctcaatctttatacccataagagaaccttttcttagaagcctcttttcttagggtttggaggttgatttactattgccaatatagcaaatctttattttccttaggtttattttgattttttaaaacaatagtctttttactcaaactttggcaaagaatttgggctagtataccaagtaaataagctttaattttctcttggccatgtatcttctattagtttctgcataagaccctcagtgcttccatgtttactgctsgctgcacaggcacctctcactagatggcacttaggatatttttcaaccatctttctgaccaaaattgtatgtgttctatgtctcatccctaagaaagttgata

SEQ ID NO: 261876 - DNA, 530 bp, Homo sapiens
tgagattctgaggtgtgagcgaactgagatcttgaggtgtagtaatcttcctggagtcatccagggaggttttggaaggcagggacacaaacccacacctgtctccaaagccagccttgcaatcattctctcctttgcctcacctctgcccaaagctgttgtgaagaacaatatggtggttgtggaactggcactggcatcctggttccctttatccagctaatgtttgccctcttctctgacacacttgtttcccttgatacctcagctggcacatgattttttagagtcgactcaccattctgccctggtagaaggagagagatttgggaaaaactcaaactggacagggaatgctggcttcatggagaagggcatatgctggcacactttaacagcacctcgtggtactgracttgccttgcaagttttgacagccattgaactgcagaacccactgttcctagtgttcaacccaggaagaaacagaaggagaactgccaggatgtaactgcttaatcgcttcctaa

SEQ ID NO: 261877 - DNA, 583 bp, Homo sapiens
agatcaattacccacaagtccctgtggagtctcttccataagaaactggggaagcccaggccatcagtattctgcacacacactaacagcttgtgcttgcagaggcaatcatttttcagctcttttcagattctctttcttggttatttttccatcttggctaaaagggtttctcttttgtaccaagcaggggcaccaatctaacagaatttattagaaactgctcgattgggattttgctggagttctactgaggttgaaaatctcaaacaatatgtgatgaaaattttaggctgttttgggtgacttcaatcccaaggtctttcttggctgatttgagttccttctttcagagatttaggcaatgttagtttcagatgggaggtctggtagatcctaaaaatgaggtagctctatgtcagccattcagtggagaaagagcccatgctactctgtatgacmaaatactatgcctttatttgcatacaggtgtgaatgaattatttaaagagaaaaatgtgcgagtgggtactgcataagtgccactcacagtcgttgcactgtgcttttcagtaagtgtgaa

SEQ ID NO: 261878 - DNA, 583 bp, Homo sapiens
agatcaattacccacaagtccctgtggagtctcttccataagaaactggggaagcccaggccatcagtattctgcacacacactaacagcttgtgcttgcagaggcaatcatttttcagctcttttcagattctctttcttggttatttttccatcttggctaaaagggtttctcttttgtaccaagcaggggcaccaatctaacagaatttattagaaactgctcgattgggattttgctggagttctactgaggttgaaaatctcaaacaatatgtgatgaaaattttaggctgttttgggtgacttcaatcccaaggtctttcttggctgatttgagttccttctttcagagatttaggcaatgttagtttcagatgggaggtctggtagatcctaaaaatgaggtagctctatgtcagccattcagtggagaaagagcccatgctactctgtatgaccaaatactatgcctttatttgcatacaggtgtgaatgaattatttaaagagaaaaatgtgcgagtgggtactgcrtaagtgccactcacagtcgttgcactgtgcttttcagtaagtgtgaa

SEQ ID NO: 261879 - DNA, 349 bp, Homo sapiens
gggaagttactatgattgctcttcctgtcatgggtgcatggaaggggaaggtctgagatyatcccataagggagagaacacacaattccccaggagaacccaggcaaagggcaggggcaagcttgcttcaggaataccaacccatagactctctgctacagaaaatggcactcagctctctgattccaaatgaaaagagggtgaatgaggaagagggaggttgaacacacatggagaaaagatgagtagatgggtcaccagaaatggacagtctgagattccccgacttctggaattacagggaacttgtgcacattccaggcatggttgtgcaacaagccaagttctg

SEQ ID NO: 261880 - DNA, 532 bp, Homo sapiens
caagcttgcttcaggaataccaacccatagactctctgctacagaaaatggcactcagctctctgattccaaatgaaaagagggtgaatgaggaagagggaggttgaacacacatggagaaaagatgagtagatgggtcaccagaaatggacagtctgagattccccgacttctggaattacagggaacttgtgcacattccaggcatggttgtgcaacaagccaagttctgtgtcatacaatgggggtctaatgatcggggtctgcctagaaagcattggttccactgtttaccccckgaccccctcctcctatggaaatgtgtgaaagaagagttaacagacagattctcagtggcctaaaggaaaaagtttaattgcatttttatcttaaaatattccactttaatttcaaagacattttgttttccacctgtctcctatcaggcacctccatttgtgaagtaaattaaaaaataattaatggatccagctaaaggaaaagaggggactattatgagaagtccagataa

SEQ ID NO: 261881 - DNA, 577 bp, Homo sapiens
aattctgactttagcctctctcttgccaagagaccctattgcaagttaaacagcaaaacatccattccatatttctgtgagwtgcttgggctccagtgctgcttcagtctggtgcaaagccaaaatttgttaggaaaaccttggccatgttaatcttaaagtaaacagggagggcgagggtgaggcctttcgggagttaaaatactcactcaccatgtgagcacaattatttccagaactaccatgtagcttacagtccaggagaggacggtgggtgctgaggaaatgttaatggatccaagagcccattaatgaggggaagctcacagttggctctctctttgtgaaggtcattaggataaatcccagactgaaaaggccatgcatataagaagggcaaacactggtcctataattacccttatcctttaggcccagaatgctgaaacaagacaagctacttcttctcagatttaagtggaatgaacattgtctccaatgaaacattatctgatatggaaagacctcagccctgatggcctcatttctaggacctctggacaaagtgcctccaaca

SEQ ID NO: 261882 - DNA, 577 bp, Homo sapiens
aattctgactttagcctctctcttgccaagagaccctattgcaagttaaacagcaaaacatccattccatatttctgtgagtygcttgggctccagtgctgcttcagtctggtgcaaagccaaaatttgttaggaaaaccttggccatgttaatcttaaagtaaacagggagggcgagggtgaggcctttcgggagttaaaatactcactcaccatgtgagcacaattatttccagaactaccatgtagcttacagtccaggagaggacggtgggtgctgaggaaatgttaatggatccaagagcccattaatgaggggaagctcacagttggctctctctttgtgaaggtcattaggataaatcccagactgaaaaggccatgcatataagaagggcaaacactggtcctataattacccttatcctttaggcccagaatgctgaaacaagacaagctacttcttctcagatttaagtggaatgaacattgtctccaatgaaacattatctgatatggaaagacctcagccctgatggcctcatttctaggacctctggacaaagtgcctccaaca

SEQ ID NO: 261883 - DNA, 463 bp, Homo sapiens
cagaagacagtaatgcctcatgtccctgccacagagcctctgagccatgtcaatgaagggccatgtcgggaactggaacytgcccacatgtaagccatcacaatcccagactccagaaagacctgacccaggactgaccacgcatgaacctggcaacttctctgaccacaaggagtttgaaatttaatccacagtacacttgatgttaaaagcttcaggataaactcctcttacagcttacaaagacaaactaaccaaaaacaaaaaaaaaaaaaaaaaggaaaagaaagaaaaaaagatgggcaaaggatctgaatggcatttctccacagaagataaacaaatggccaataagtacataaaaacatggtccacataattagctatcagggaaatggaaatcaaagcatctgggagataccatgtcacacccactaggaagactacgataaaaaagacagac

SEQ ID NO: 261884 - DNA, 463 bp, Homo sapiens
cagaagacagtaatgcctcatgtccctgccacagagcctctgagccatgtcaatgaagggccatgtcgggaactggaacctgcccacatgtaagccatcacaatcccagactccagaaagacctgacccaggactgaccacgcatgaacctggcaacttctctgaccacaaggagtttgaaatttaatccacagtacacttgatgttaaaagcttcaggataaactcctcttacagcttacaaagacaaactaaccaaaaacaaaaaaaaaaaaaaaaaggaaaagaaagaaaaaaagatgggcaaaggatctgaatggcatttctccacagaagataaacaaatggccaataagtacataaaaacatggtccacataattagctatcagggaaatggaaatcaaagcatctgggagataccatgtcacacccactaggawgactacgataaaaaagacagac

SEQ ID NO: 261885 - DNA, 330 bp, Homo sapiens
tctggttgactactcgaaagagatactacagggatccatagttattgtttttaataaataataggctagtctgtctagtatccccacaatgttctatgctawtatggtaggtttcagagaagatcaggtgagtaagtttgctaagacaaaattacatgggtgtattaaaaattgaccataattttgtgatatataaaatgtataccttaccattgcctcactcttctgcagttgataaacttcagccttaaggagggtaaagcaataaggacctggggtctgttacctacacatgcctgctgagaccatttctctgctcagtgaaaatta

SEQ ID NO: 261886 - DNA, 587 bp, Homo sapiens
attattatgtttattatcgagacggagtctcgctctgtygcccagtctgtagtgcagtggtgcaatctcggctcactgtaacctctgcctctcaggttcaagtgattctcctgcctcaacctcctgagtagctgggactacagaagcatgccaccgcgcccgaataatttttgtatttttagtagagacagggtttcaccgtgttggccaggctggtctcgaactcaggtaataccacccaccccagcctcccaaagtgctgggattacaggcatgagcccctgtgcctggcccattttcctgcatattaaagtaatacttgctaattattgcaaatttgagaaatgcagaaatgaagaaaaagtcacccataatcctatcactagaaattaacattttaaaatgttttgttttagcttttaatgaagttgccaagaatattatgaatttttgatgtttttctatggatgagctacttgggcttagctcttttagaggccaaagtttattttcccgacaatcctcctcgcatgcttgggccccactctggactcttaatgtagaaggtaacgttccccatcttctct

SEQ ID NO: 261887 - DNA, 587 bp, Homo sapiens
attattatgtttattatcgagacggagtctcgctctgttgcccagtctgtagtgcagtggtgcaatctcggctcactgtaacctctgcctctcaggttcaagtgattctcctgcctcaacctcctgagtagctgggactacagaagcatgccaccgcgcccgaataatttttgtatttttagtagagacagggtttcaccgtgttggccaggctggtctcgaactcaggtaataccacccaccccagcctcccaaagtgctgggattacaggcatgagcccctgtgcctggcccattttcctgcatattaaagtaatacttgctaattattgcaaatttgagaaatgcagaaatgaagaaaaagtcacccataatcctatcactagaaattaacattttaaaatgttttgttttagcttttaatgaagttgccaagaatattatgaatttttgatgttyttctatggatgagctacttgggcttagctcttttagaggccaaagtttattttcccgacaatcctcctcgcatgcttgggccccactctggactcttaatgtagaaggtaacgttccccatcttctct

SEQ ID NO: 261888 - DNA, 587 bp, Homo sapiens
attattatgtttattatcgagacggagtctcgctctgttgcccagtctgtagtgcagtggtgcaatctcggctcactgtaacctctgcctctcaggttcaagtgattctcctgcctcaacctcctgagtagctgggactacagaagcatgccaccgcgcccgaataatttttgtatttttagtagagacagggtttcaccgtgttggccaggctggtctcgaactcaggtaataccacccaccccagcctcccaaagtgctgggattacaggcatgagcccctgtgcctggcccattttcctgcatattaaagtaatacttgctaattattgcaaatttgagaaatgcagaaatgaagaaaaagtcacccataatcctatcactagaaattaacattttaaaatgttttgttttagcttttaatgaagttgccaagaatattatgaatttttgatgtttttctatggatgagctacttgggcttagctcttttagaggccaaagtttattttcccgacaatcctcctcrcatgcttgggccccactctggactcttaatgtagaaggtaacgttccccatcttctct

SEQ ID NO: 261889 - DNA, 606 bp, Homo sapiens
gaaatgaattccacagtaatacagataacaaggagaataaaacccaaagtcagagaccttgatatttgattatcttcagttgtttggaatgcatggtttgagcatgctcatgagaacactggcatgatactgggtaggttccctctttaaggcactaactactctggagagtgactccaaaatgtggtttcccactcctcattactatgacaaatttcacrttaactcaattgtcagaccctttccctgctgatacagggttgaagggttggcttggtgatcaattctttgagctttcagagagattttgcagcttaatggaaagctaatttaaggaaaaaaaaaaaaagaagttgaactaggatttgctctagggaccataacatgaatgttctattgtaagcttcttgatggaaggcattatattttaaaatcctatagtaatacaattaataaatacagaaaatgccagctgatataatagaaaattgttcaagttcaagactccaaaaattaatctgatcccatttcaaagtgaagctaaaaagatgtccatgtttttagttgtggaatttagagtatgtgatggggcctacttggaatcct

SEQ ID NO: 261890 - DNA, 584 bp, Homo sapiens
taatggtggccatatattttatcctttttttctaagctaatagcatttctcccactcttaaaaggcatatgcagaaatcaccaagggtgatgtgacagcataacattagcaaagtttaaaagtacacaagagctaaactgtggatacccacacaaacagggagagacctacttcctggtgtcaatgaaattacagctctaaagagccaatatgtcatttaatttaaaagtcactgttcatgaattgcagttaccmtctggcctgcaagcatgtgttcatagctaagaaattttctctatgcccaggtagaatatattgctggcttttccaggggaacctaatgccaaatagaatggcacctacataaccaacttgaggcatgctttaaaaagtgtccctgtgataagccacaagaaatgacagactatgttgaggaactcagtgactctacagccatgctaggcttggagcccactcagacaacaacatgggattgttgtttttaagccaattgctcacagtcgataaaacaaaaggattaaacttttgacagactttccctattctcaccaactggctaatgc

SEQ ID NO: 261891 - DNA, 519 bp, Homo sapiens
acatggacacacagaggggaacaacacacactggggcctttcaaatggtggaaggtgggaggagagagaggatgaggaaaaataactaatgggtactaggcttaataactggatgatgagataatctgtacaataaatctccatgacacaagtttacctatgtagcaaacctgygcttgtacatctgaacttaaaagttgaaaaaatatcttgaaaaaaaaaaaaaaaagaaaaagtcttctcctaaatttaggcaacattctatttcagttgagctgtgtataactggcccatgggtgcagggatcacgttttcctacctagaaagggaaacatgatcttacaaaggaattatttgtccttgtatgatttggtgacacaaaaattctcattggggcatgaaaataaaatatatttaatgaaaagatttgattggaaaaaataaagttacagaaaactaggttgttttcagagaattcaacaaacttagggtgaataaacactaaagttctacttcaca

SEQ ID NO: 261892 - DNA, 519 bp, Homo sapiens
acatggacacacagaggggaacaacacacactggggcctttcaaatggtggaaggtgggaggagagagaggatgaggaaaaataactaatgggtactaggcttaataactggatgatgagataatctgtacaataaatctccatgacacaagtttacctatgtagcaaacctgcgcttgtacatctgaacttaaaagttgaaaaaatatcttgaaaaaaaaaaaaaaaagaaaaagtcttctcctaaatttaggcaacattctatttcagttgagctgtgtataactggcccatgggtgcagggatcacgttttcctacctagaaagggaaacatgatcttacaaaggaattatttgtccttgtatgatttggtgacacaaaaattctcaytggggcatgaaaataaaatatatttaatgaaaagatttgattggaaaaaataaagttacagaaaactaggttgttttcagagaattcaacaaacttagggtgaataaacactaaagttctacttcaca

SEQ ID NO: 261893 - DNA, 619 bp, Homo sapiens
taatatataataattaaagtatttagtatgctagatgtgctatggaaagagtacaggaaagctagggagatgaggagtaatgaggtgagagatggcagttgaaatctgaaataggatcatcaaggtaggcctttctgagaatgtgacatttgagaaaagagtgtgaggaaatgagcaagttagccatctggattatttgaaggrgaggcaggggcaaagacagtccagacagtacacatatgtgctaagacaggagcgcctcacctgtgtaaggtttaaggacatttctatggctggagaaaaatgatcctggaggaaaggtgagaggtaagagtagagtgaggggaagtggttggtggggccagatcacatgggccatgtagactcttgaaaggacttctgagggaaatagggagccactggaggattttgagcagagaagggatataacttgacttatactttacaggatcactctagctactctgtggagaacagattgtagagataagggtgctaccagggaggctactgtggttcccggcaaaggatgatggtgcctcaggacaggatagtaacacttaggaagacagagtatagagtgatagacgctggccca

SEQ ID NO: 261894 - DNA, 600 bp, Homo sapiens
ggtatcattaacatcataaggctacatgcaattrtaaaagaagatgagggataacttacacaggacatagtccttgctagattttatcaagaccctcattttctagtggtatatcacctttggaaaagccaggccattctgaagtaggtctttgtctttccagtctagaaataattgttatgtcaagttcagtgataaaatgaatggctgccattggctgaggacccactgtggggcatggagctagtgggcatctctccagtcatctcacaacaaccttgctcatctcttccttttaattattttactgtgcatactcatgagatctgaaactcatgtacgttggcacctttaacataactacactagttcttcctataaagttttctaatgatagtggaacttttaaattcagtttagtttttgacattttatttgtctttttgagaagccaataggacttcaaaatgttgggcttttccaatagacagctaaaaatgtagacctgaagtttacaaaaatgattagagctaaaggtatagatgggaaagtcatcaatgctgaagtgatagtcattatgtggaaatttagcaaaggaaa

SEQ ID NO: 261895 - DNA, 600 bp, Homo sapiens
ggtatcattaacatcataaggctacatgcaattataaaagaagatgagggataacttacacaggacatagtccttgctagattttatcaagaccctcattttctagtggtatatcacctttggaaaagccaggccattctgaagtaggtctttgtctttccagtctagaaataattgttatgtcaagttcagtgataaaatgaatggctgccattggctgaggacccactgtggggcatggagctagtgggcatctctccagtcatctcacaacaaccttgctcatctcttccttttaattattttactgtgcatactcatgagatctgaaactcatgtacgttggcacctttaacataactacactagttcttcctataaagttttctaatgatagtggaacttttaaattcagtttagtttttgacattttatttgtctttttgagaagccartaggacttcaaaatgttgggcttttccaatagacagctaaaaatgtagacctgaagtttacaaaaatgattagagctaaaggtatagatgggaaagtcatcaatgctgaagtgatagtcattatgtggaaatttagcaaaggaaa

SEQ ID NO: 261896 - DNA, 516 bp, Homo sapiens
tgcttgaactcagagttcctgtttrtgcaacagtgctgccttctgctatcagccacatgtagacttagttgaggagtcctatgtgtagattcataaatttagggcaacaaagcatgtgtgtgtaggggggttgggcaagagagctaaggctaagtcagggccagaagttgcctgtaagtagctctgtaaagcacccatgtctgatttgtgggggtgacatcatcattagctgcagatcaatactgaccagaatttaaggtactatgccatagctttaagtcttcataatttaaagatgactaagttgtctcttctctgtaggtctctactttgagttagatgacttcagaaatgatcacacatttcatgtcaaatttccaggcctcaaattcctgttcccagtgatatgagtacccacagataattcactggtaagatcaccgagtgacccaggaatgaaaccttccattgaagatgtttatttagagctgtatccactgtccacagccaagggaa

SEQ ID NO: 261897 - DNA, 516 bp, Homo sapiens
tgcttgaactcagagttcctgtttatgcaacagtgctgccttctgctatcagccacatgtagacttagttgaggagtcctatgtgtagattcataaatttagggcaacaaagcatgtgtgtgtaggggggttgggcaagagagctaaggctaagtcagggccagaagttgcctgtaagtagctctgtaaagcacccatgtctgatttgtgggggtgacatcatcattagctgcagatcaatactgaccagaatttaaggtactatgccatagctttaagtcttcataatttaaagatgactaagttgtctcttctctgtaggtctctactttgagttagatgacttcagaaatgatcacacatttcatgtcaaatttccaggcctcaaattcctgttcccagtgatatgagtacccacagataattcactggtaagatcaccgagtgacccaggaatgaaacctwccattgaagatgtttatttagagctgtatccactgtccacagccaagggaa

SEQ ID NO: 261898 - DNA, 604 bp, Homo sapiens
ataattacatagaagccaggcatggtggtgcctgcctgtagtcccagctactcaggagggtgacactggaggatcacttgagcccaggagttcaagggtacagtgagctatgacatgccactatgatgtgccactgcagtccagcctgggcaatggaggagaccccatcttttttaaaaaaatagaagagagactataactgagatttcaaatttccaaattcaattttgtcagtacatttcaaaccgagaaaatgtcctaaatgtaatgaactagcttacattttaaaaaaatatcacttacaaggatggaytggataatttaaagatacctgtgaagtaaaattagtagtaatttgtgtgataatttagaactctaaatttcaaatagcagttacacggaaagcaagttggcattttatttatgagaatgaagggtctttaagagaccctttagtatttccatgtcctaaagacaactcacaaggtcatctcttctaatgctattaactcacaggggaggttagaggtcttgtccagagccccataactaattggtggctgcaccagaattcattgaactcaagtatctagagaagccaaag

SEQ ID NO: 261899 - DNA, 493 bp, Homo sapiens
ttttcctagtttctgtcatctttgggctttctattgacatgaggtgaatagatttagggctagaatgttttaaatgctgagagacytaaaggacctctatttcaacccattgcattacagattagggaaccaatgcctaaaaaagttaggtgatttgtctgaggtacacaagtaaatgtggcagggctgcattaggggttgggtttctgactctcctcctcccatgcacagtcactgtgctgcctcgtgaaatacagccctctctgctgccagttacaactggtgcattctactccagcctgggcaacagagcaagactctgtctcaaaaaaacaaaaacaaaaacaaaaaaactggtgcattctttcataaaggaaagaaatcaaattctgaatgtgaatacctgaattttcattccccacttacattgttacaggagtgaagtacaatttgcttaatgaaataaaatttcagtatcctccttagtgtatgt

SEQ ID NO: 261900 - DNA, 595 bp, Homo sapiens
ctacgaactttcctcttagcactgcctttgctatagcctagaggttttgataggttatgtcattattgtcattcagttcgaagaattttaaaatttccatcttgattttgtttttgacccagtgctcattcaggagcaggttatttaatttccgtgtatttgcatggttttgaagtttccttttggagttgatttccagttttattccactgtggtctaagagagtrcttgatatgatttcaattttcttaaatttattgaggctcgttttatggcttatcatatggtctatcttggagaaagttccatgtactgttgaatagaatgtgtattatgtggttgctggatgaaatattctgtatatatctgttaagtccatttgttccaaggtattgtttctttgttgactttccgtcttgatgacctgtccagtgctgtcagtgcagtactgaagtccctcactgtttttgtgttgctgtctatctcatttcttaggtccattagtaattgttttataaatttgggagctatggtgttaggtgcatatatatttaggattgtgatattttcctgttggacaaggccttttaccatt

SEQ ID NO: 261901 - DNA, 588 bp, Homo sapiens
gccttgctaaaaaataaagaaaatcctactttgacttagagatattcattagctagagtaaattgcttgtttttttaaaagacctttttacaataaaataagtttgcaggtatctttttgaaggtgcatacaggttgcaaaaaaaaaaaaaattcttgtcgggttttgtagaggctgacattgaaaaagttgaggccttttaaacaaaggagtatctcagtgtcagctcctgaattgtatcctttcctgtccatcactgtgcaggtgaagcaaatgattggattcagtcaatgctatgattaatgagttcctctccggatttgggactgcctatcaatcatgtcattagggagaatgtgccctgaaagaggcagaccttagccaaggaataactgcattaatcttaatctgtatatgcacccagccagccaagtcagggtcaccatgatgaaaaacaataatcttcaactcgacaaattacttkgcaaagacagatacttctttactttttgggctgtgtgttctccagaatctaagttgactgtttacagcttgagtgttactacaaagtgaaggttattttaatga

SEQ ID NO: 261902 - DNA, 377 bp, Homo sapiens
ttcacacctacactctactgatattttataaactccgaggactatgggcactcaaatccccagctatttcattaacgcttaaggcaaatttcagtcagaaccttcaggctgatgacaaattaataaatccattctaccaatctcaagggctctgagtctatgatgatgtcaacaacacaccagggaaggatcttttaagactgctacacactcgtctttctgtctttatttaaataagtttaattctgtctaagccgtatatatgtaayatattgtgtcatccaattttagagctgataaagtatgaagaaaatctatgtcttaggatgaaggcaatatatgtatattgatgtatttgtcatttcttcttttctgta

SEQ ID NO: 261903 - DNA, 609 bp, Homo sapiens
ggtttttccccaactgataaaactttgacagaggtaaattccatcctcaagcctttcatgtagtgcaggagaaaaggtttttagaataaaggagagtaaataagcataagaaraaaatcaaataaaaaatagagatgaatacaaatttttatgaaagaaaaacaatgccaaatctggttctttttcaagaaattcaagttgtataaaacaaaataaacaacattttatagaagtttggaggaaatgtaatatttaaaaatcacatcttaaagacaaaagaggcggaattttgctgtgttaaaatgtttatggatgggtctagtttgacaatttagcctgttggatgtgactttcacagtctgttggcagtttgtaggcaagccatcacacctgtgactctgcggttgattaatgagtctttcagctcattgctaccatctgaagaagggctatggcctttctgagcttcactggtttattccccttaactgcagtcctgccatggtacttccataagaaaatcacacctggttaaagctaatgaaaacctcaatatgtcattttctagacaagtcaaaaagcatgtaaaactagacaaaagacgtattc

SEQ ID NO: 261904 - DNA, 424 bp, Homo sapiens
acctgaaccaaggacccagcttgatggaagccatctttaaaatattgtaccattgcagtttttctccacaaacatttgcaaacgtttttgtgagctacatggaagaagagcaattatgggactttttatataacatcccaggtatgagacatttactgtttgtaaaagaaatrttctatagatacttatatgtacctttaaagatgtttagaagttgtattgatactggttttgctgaatctgttgttggtgaaagtttaccttacattttttcagtataaagccttctgttgggaatcattaattattggttcctgtaaaatttcatatactttgggacaagatgcaagggaggtggaagggaaaagattttctttttttattaattagggaatgttctatcataaaaatttattttaatatt

SEQ ID NO: 261905 - DNA, 516 bp, Homo sapiens
ctatttaaaaagacaaagttgggtttgtcctctaaaacaatctcctaggacatagacaaactattttaggcatgagttcaaagttcctcattatcttcttagcaaagatctttactactctgagagtttttgcgagtctgcttatatagaatgtaatgtatttttgtaatgctacatgttgaaaatgaatacaaccaaatgtagtcacwtagcaaaaaaagaaccctaccacttgccaagcagacaagtttattcatgactggcatgggtatgtctatgggtacatttgtggtctttccctaggaatcgtaatctaccctgtacactaccagacccttttcctatgcctcctctgtaagtggttcagcagagacctcatgcaggcttcctggatctgcatctgcagaaacgagtagaaaactcagaaggagcatcacactcagaacatctccctgatgagccctcacgtttgcatcagaggcagcctgaggatggtccttttccaggaagccccct

SEQ ID NO: 261906 - DNA, 577 bp, Homo sapiens
gatcagtttcagatgttttctattaggagaatgccgttccctggcaccagctgtgatcaattattactttagggagacagttaacaaccacctgactatcacctgagggttgcccagcactcctggtgtgtggtggggggggaagccctctcctgccctgttcatacttgactagctacctactgtaacagtaggcgttttatgttttaatttcttccctggatttagtttatttttcctatatctattttcattttagtaaatggtttttatcatatgtattaattagctgttagtgcataacaaaccatgccaaaactcatcaacttaaaacaagtatttaatgtcctcaataatctataggccatctgctagttcttctggtctaggcctgaaytgggtgatctcaactaagtttgcccatgcatctgaggtcagctggaatgctttgtggtttctggctagagtacctgtggtttaatatgaaatatatgtgatttttgtccctggttcttgtcacagagctcctaacatccttggaatttcctgataggagtatcttttatattcacaataa

SEQ ID NO: 261907 - DNA, 593 bp, Homo sapiens
tatcactgttcctgggattctcagtatgcagatcttgacccaccaaagtatgcattctccacagcactgtgctgggtccagagggccttttttctatttctttttacttgaaagagtaagtaggtgttccctacccccttgctgtgggctaaattttgtcctccccaaaattcatatgttgaagtcctaacctccagtacctcaggagacaggatctttgaagagttaattacattaaagtgaggtcattagagtgatcccaaattcaatggggttggtatccttataagaagaggaaattaggaaacagacacagagaaaagatcatgtgcacatacagggaaccatctgcaaaccaaggataaaggcctcagggaaaccaacacttccaacgcctacaccttggacttctagtctccaagactgtgatacaataaagttctcttgtttaagccagacagtctgaaatactttattatggcagccctagcaaaccaatagacccatttcagaccaacayccaagtgtggagctcacattaggagggatttcctccctcttaaggtgctcttagctgcatgttcaggctgctg

SEQ ID NO: 261908 - DNA, 585 bp, Homo sapiens
atatactctaagcttgggctacttcttttttcatgcaacgtgaatgataaagtgtgcctcacaaagttctcccctttaattttcctttattgccacttttcagaactacatcagaccgaggctcctgggcagcagcagtccattttcattttgtacaaaattacagcaccaacctatccataaacaatattgggctattttcctgcctagttagatgctcttaagacacccttcctgcagctccagatgtgggctaagcaggtgagctcarggagaagcacctgtgcaacagtggcagctaatatgggaaatggggatccttgcacacatacctcacttgtgccttttgacatagcttgtacatgattcaggatgcattgctttgacattactcttattaatatttattgctacacatgtacagtcttagaacttgatgagtttgatagaacccagtttattatgggcacctctagacaaatgttcactcagtgtcacatgacaagttgttttagttctaccaggactcagtagcaaacaaaaagcttggaagggtgcatacttctctgatgagaaatgcaaggt

SEQ ID NO: 261909 - DNA, 610 bp, Homo sapiens
gtttcactatggcttttcccctttgcttctatttgtttcctatggcagtgctctggatgctgaagtaatgcttgtcccgtgtccagcttctgaattaggatagcatgagttctgaaaacctgatgaaaatgtctatggacaattaacaaaggaactttatattgtaattggtgatttttttaattgcttccacaagaaaggaacaccgactttttgggataaaacagaaatatacaataaaggaaaatataacacatgaaaaattgaagattaattgaagaagtcacagaactyattctcctctctttttttttaatagcttgagataacagttgtgaaacattttgaaaagcatgaagtgataacactctgttttattaaacatggtataatgtagtaattagagataataaaatagtcatcatcccacattttacctctgaggaataaacttgcaaaccacatcagaattctcagtctgtgtttaccctttttcagcaggggaaatgattagccagaacaaatagctgaatgatttgttggtgttctcatctgcttagaatttcaaagtgtggcctgggcccaagtctttgcagtcacttggctgaat

SEQ ID NO: 261910 - DNA, 603 bp, Homo sapiens
aacaaatctgactgggttgttctataggtacaccctctgtatttctttgtacatggtaaaacacttgggaacacaaagccatccagcaggaccatcaccaccactttattttgactgagccccagctccagagaagaagcttagagccagggcatcttcctcctggagacaccctctcactggcctcctctgttccctgagctgtgcatgaagaaagggctgtaaccaggaagtgagtttttgtccaaaagggttgaatttcaatgggtcaagacttggatgtcatagtgtgtgatggttaatatttagtatcaacttgattggattgaaagatgtaaagtattgttcttgggtgtgtctgtgaaggtgttgccaaaggagattaacatttgagtaagtggcctgggagaggcagacccaccttcaatctgtgtgggcacaatctaatcagctgccagtatggccagaataaaagtaggcagaagaatatggaaagactagactggtttagtctcccagcctgtatctttctcctgtgctggatgattcctgcctatgaacatgggactccmatttcttcagctttggggctcttgggacttc

SEQ ID NO: 261911 - DNA, 644 bp, Homo sapiens
cagactttgagctggagtttatccctgatctgaagattggcttcaagagttgttcatcaagaggagtgaatcacaggcaaggagtttaccacwtcagacaagatgtgatttctattaaatatactcttggttgaatcttggcaggaaagcttttggatggtcgatacatttgtaacttaatttaacacagtgattattcttacgtatttatgttaaagcttccctgtgtacctctaaattaatgcatgttttatgtttttctgaatactttgatttaaatgagaaaatccaggcacccaactctcactaatagacacaaaaagatatggcttccacttttttgtctgtcttttctattcacaagacaaggaaaatactgtttccttttatgtaattgttgaacctgtcaccaactattgttgattctcccattctgatttcttccagattgtctctctctgctgctactacaataaactgaggtcaggtgctcattacctcctgtttggttgtccctggaataaggacagaattgccccacagggaagaggaggatttaatcatagtataaactaatgacaaaggcctgacctactccctttctctatctctccccccattcttccctccctctcttcatcctt

SEQ ID NO: 261912 - DNA, 313 bp, Homo sapiens
gaatatcttcacatttcttgaaatctttgatttctctcatcagagattttgtattccacctaaagatcctatatatatattttaaaacttatactttttaaaattttttggtgttatggaaaatgttactatttctaaaaaattttaattccaattgttttttggaaatgagcaattgagttttatatattagctgtttatcctgaaaccttgytatttgttcacttactagttccaaaaggttttcttcatcaattctttgagattttccatgtagaaaaaaatcacataatctgaaagtaatggcagattt

SEQ ID NO: 261913 - DNA, 554 bp, Homo sapiens
tttctaaaaaattttaattccaattgttttttggaaatgagcaattgagttttatatattagctgtttatcctgaaaccttgttatttgttcacttactagttccaaaaggttttcttcatcaattctttgagattttccatgtagaaaaaaatcacataatctgaaagtaatggcagatttacttttttctttccagtttctatatcttattttctcttcttgttttgatgcattagccaggacttccagtgagttgtagagggggaatgggagatcgcatctttgccttattcacaatcttatggcaacagcatccagtttctcataaagtatgatgttagctataggttgtctgtagaaattctttatcaaattaggcaagctccactttattcctgctttatggagagtatttgtcatgaatgagtgttgtcttttgtccaatcacctatctttacaactaatatggttagaacacgttttttgtttgttgctgtggytgattaaattgattagtattttaatgttaaattagccttgcataactaatcc

SEQ ID NO: 261914 - DNA, 568 bp, Homo sapiens
aaaataaagagagaaattagaaacgaaagcccgtttagactgacaaaggatggagagggagaattcagaggaaacaaagggaaattatacattgtacacatacacacttaggatcggggactacaaggtcacactgttactatgaaagcagactgttaagttttatgatgctgggagacaaatgccttccaagaaaaagtaaaaaatcccgctrggtttatacagtcctagccagcaaagtttatgctttcagaaaaatgtgtctgaaaacaggggattacaatacaaaccattgtgtaccaccccctcctgcccttgagttccatgatggctttcacagatagacataggagatattgagctcgaattctgcggtggacgggggtttctttgcctctggtggaattcctttccctctgaaatgcccttattctcaaggacaattttctttctccgtggtttattgtctgagcaagactttcttgtaggcaaggaatctttggctacactgagcagtgccaagaacagtcaacaataaacaaatagtcataacattcagcagcatgtc

SEQ ID NO: 261915 - DNA, 548 bp, Homo sapiens
gcacttgtcatttcttcattagtagatgagaaatataaaaatacaatgtgttttggaattgaacagtgttattcctcttcagggagttcactgcaatgagcgtgcagttgcagacctggaaatatgatattgaacattctattttggctcctagcctttcagaagtcagaggaaagacagtaaaatagaatcgattcattcctcagaaaaaacgggaaaaagtatattttaaatcagattatggagagctaaaataagttagtcctgttgataataagaaatattcttgttagtacagtagtgttctagaagtctggggactcaagctgttattgaggaaggggcctcactgaggttttatgctgyttgggaaacacagggaagcaccttggtcccttggttgagtcatgaggatgtcttgtgctgtgacttctgtcatggtcactgggtgggagtgtcctcagcataacaaaggcagagcattgggtcaatgtggtcacctttaaagagaagattaaccactcatgtcttctacacactcaaaaggg

SEQ ID NO: 261916 - DNA, 572 bp, Homo sapiens
cgtcaaaggccttacaatactgaggtctcccaaagaagaaggaatttggcctcaagattgcaacagaggaaccctgcctgagtttccagcctgctgccctgaggattttggactcaagaagttcacatcgaatcgcacctgcatccgcaggctgttggcctgcccatgggatttcagacttgccagctcccacrattgcatgagatgattctttaaaacaattcctctctttctttctctgtttctacatacacatacacacacacacacactctctctctctctctcacacacacacacacacacatatgtgagggatacatctatatatcactcacgggatatatatatatgtatatatatatcactcacagggatatatatatatatgtatatatatatcactcacagggatatatatatcactcacaggcatatatgtgtgtgtgtgtgtgtgtgtgtatatatatatatatatagagagagagagagagagagagagtacatactccgtcatttatgtatatatcctattggttctctctggagaattctacctaacagctaatgca

SEQ ID NO: 261917 - DNA, 572 bp, Homo sapiens
cgtcaaaggccttacaatactgaggtctcccaaagaagaaggaatttggcctcaagattgcaacagaggaaccctgcctgagtttccagcctgctgccctgaggattttggactcaagaagttcacatcgaatcgcacctgcatccgcaggctgttggcctgcccatgggatttcagacttgccagctcccacgattgcatgagatgattctttaaaacaattcctctctttctttctctgtttctacatacacatacacacacacacacactctctctctctctctcacacacacacacacacacatatgtgagggatacatmtatatatcactcacgggatatatatatatgtatatatatatcactcacagggatatatatatatatgtatatatatatcactcacagggatatatatatcactcacaggcatatatgtgtgtgtgtgtgtgtgtgtgtatatatatatatatatagagagagagagagagagagagagtacatactccgtcatttatgtatatatcctattggttctctctggagaattctacctaacagctaatgca

SEQ ID NO: 261918 - DNA, 539 bp, Homo sapiens
ggtgtttaaatagtaactaatttccttttgtctctagaagttccataggcagattgccagctgccttaggtctgcagctcttgactttgccaacctttaagacattgactaagcatattagattaaaaaggaaaactctctcttcccattatttataattactatgtttccaattcagtttctgtaaatatgtgtcattaatattgaacaaattctacattaaattaaaatgaacatatttcattttacttataatttacaaccatgcttatttcttaattattttactttgaattactagatcaggtttccaagtttagccccgtgttaatttgcacaaatggctggaggtggtctggggartttataaaaagctcaaccgttttgctatccacaaggtgaacatgttctttgcagtagaagaaaccgaactcttctatttttggtcactgaaacatccatattaaaaaaacaattttaaaggaaaccgtttaaatgcaagtcagcaaacacatgaaaagagtctccccaaaaggata

SEQ ID NO: 261919 - DNA, 563 bp, Homo sapiens
accatcctttgctggaacacccatgtggcacagcaggactgccccagcagaggaacaccgagctgtgggcacagcccctgtagataacactgagagcgctgggcctgggtgctatggctggcctggcagagtaggtctccgcccttaccctcaccacaatggatgctgcaaagcacctgctttttagattctctggactctgaacagaagcctcactcatgcctattcaaatatgcttattgttggagccaaggtcacatgcttgcaccttagctgcaagggaggatgcgaagtgagagctggtttcttcyttatgagggcagagcatcatctcacaacatgaggaattcacaaccactggagagaaatgttaggaagatttaaaaacttgataatttttagcagtaaagcttttctcttccttccttcttctttcttctttttctttctttccttattttttctaatattaccttatatgatattaaaacagttttttaaattctcttttactttctttaagtttattcatacttacataaataggatttattctaaatttt

SEQ ID NO: 261920 - DNA, 533 bp, Homo sapiens
tgttaataattatcgagtacttgcttattgggccatcctttgacccagcagagggaatctagggtccatttgccatcctgctgttgctgtctaaagcaaatattgagaatgcttggatgcraaatggggagagttgttagactttaggtaaggaatcaacaacatttgaacttaataagaaattaattaataaataataaaactatatttctcacctgagctccccttttctctttactgaatggtgcaaaaggttcagatatgctaggatcaagaataaaacagcatgtgtcactgacaagaaaaaacaagaaggaaaacgtagccaaatgcaccagagaaagctctttatctgtttacagtaaagctaataaagggttatacagggtgggggtgaaggagatctgctcctgattcccgtcatgagggagagggaaagatgagaatgagtactgagtcacccaggatcaggccaggaattactgtgtcaagttctgtcttaagcttcaaaacagaggaaagaggcagtgagg

SEQ ID NO: 261921 - DNA, 533 bp, Homo sapiens
tgttaataattatcgagtacttgcttattgggccatcctttgacccagcagagggaatctagggtccatttgccatcctgctgttgctgtctaaagcaaatattgagaatgcttggatgcgaaatggggagagttgttagactttaggtaaggaatcaacaacatttgaacttaataagaaattaattaataaataataaaactatatttctcacctgagctccccttttctctttactgaatggtgcaaaaggttcagatatgctaggatcaagaataaaacagcatgtgtcactgacaagaaaaaacaagaaggaaaacgtagccaaatgcaccagagaaagctctttatctgtttacagtaaagctaataaagggttatacagggtgggggtgaaggagatctgctcctgattcccrtcatgagggagagggaaagatgagaatgagtactgagtcacccaggatcaggccaggaattactgtgtcaagttctgtcttaagcttcaaaacagaggaaagaggcagtgagg

SEQ ID NO: 261922 - DNA, 567 bp, Homo sapiens
taatgaggcagccattccgcatatccttgcccattccacggataagtccaggtatatgctaaaactcattgcaaatgctcatggtctccatgcgcgccctaagctagctcaacaagctctaattaggtgatagtctactgatagggcactaggatcccttctacatagyataagaagagaaaagggaaagggttttaattcagggtccaccttcacataatccctgcactaggcattctaggagggtctcatagagctggctctgtacacggtgctgtgatgtttcagataaataactacaacacatggcaacacgctgctcctgctgccgttgagggactggatgagagttcatcagtaaagggatgatgcgtccagtgaaggagggatgttggatgagggtcattaagggtcttggcaggcagggggatctggtcacatttctttctagggaactaagggatggtgtggaggcggatggagggcagtatgttccaaggtgagttaggggtaaagcttgaccacagattaagaaaccagagaggagagaaagaggaacatatttac

SEQ ID NO: 261923 - DNA, 447 bp, Homo sapiens
atgatgatgttagcttcttgcttttcctattttccctttattgcattgaagaaagtttcttctattcctaatttgttggaatttttttttactataaaagagtgttgaattttgtcaaaatgatttgagatcacatgattatgggactttttatccttcattctgttaatctagtgtattgcactgtttaatatgcacacattgaactayctatatatcacagggataagtcctacttcatcatggtgtttgattttttaaaatatactataaaatttgcccatgcttttgtcctgaatggtattgcctaggttttcttctaggatttttatggttttagctcttacatttaaggctttaatccatcttgagttaatttttgtctaagatgtaagaaaagggtccagtttcagttttctgcatatggctagccagttttcccaacac

SEQ ID NO: 261924 - DNA, 550 bp, Homo sapiens
ctattcaaccttcaaaaagaagaaaatgctgtcatttataataacacttggaggacatcatgctaagagaaataaggtaggcacaggaagacaaatactatgtaatctcacttatatgtggaattttaaaaagtgaaactcatgcaaatagtacaatggtggtaccagaaattggtggtgggggttatggggggagaatggtgacatgttggtcaaagtgtacaaagtttygattagacaggaaatatatttcaagtttttgaaatctatcacacaacatagtgactataggcaataacaatgtactgtgtatttcaaaattaccaagagatagacttcaaatgttttcaccacaaaaaatgataagtatgtgtggtgatagaactgttaattggcttgatttaatcattccacaatgtataaaggtatcaaaacattacattaaacctcataaataagtacaattattgtcaattaaaaacaaaaaatttaaaaaatatttttaaaaaatgacaacacttcctaaattcatctatgaatttaacatgcc

SEQ ID NO: 261925 - DNA, 584 bp, Homo sapiens
ccatggggcattcgccttgccccaccccttcacccacctygctctcaaaatatcatcatcaatgagacacatttgaggtaggctaagacttcttaagaaatctggtttgaaatccaaagagtgggaagaacaccttcagactagataagaatagatctggcttctacccccggtcctgaccacaaggccctggaagtaggcctctgccacacttcttcagtcctaatttcttcctctgcaaaacgagatcgaagcttccagccttaacaccagaggtttcatgagtctgtcccaagcttccccttttttttaacaccctccccgaaggaggcgggtcgctgcttgtgagatgctttgaagctaaaaaacccaaggcctcagagcgatgtgaccagaggcgcacagcttggcacatgacctgatatgactgatgttcaaagcagctgtcagtgaatagaggcagcacgcacaaaggagccagccaaaaataatgagagcggtgaaaagaaaaaaaaaagaaaagaaaagaaagaaacacagcagggcaaggctccagggtcacttgtgtttcctctggtctaacc

SEQ ID NO: 261926 - DNA, 533 bp, Homo sapiens
ttttctgcttctttcgctgaggttttttttaaccacccattaggaacctatagatttcaggatcgaacactgggattccctcagcactaaaggaggaaaattgcaaacagagctgaaagtgcaatgtgcaaaggtgaggctaaggaaggttcttagccagtagaccaagggcaggaaggacactgcctcctcagtctcccactagggaacttgtgattcgtctcccctgacctcagaattccttgtcatgtttgttttgtctccaagggaagggtttgaattacagaatttaaggctagagtgagcctcgtgcagttaacattaaccctctctctccttcgctggccgaggtraagtccgggaacatgtagttctgacgtccagtctctcgggggatcaccagttcacccatctcacctggcaagctgggccctagtttggcgacaggcatcttccaaccacctgggaggcagggttcaacactctgcctctgaccttgtttccttcttctgccatctgcttaagcagccaga

SEQ ID NO: 261927 - DNA, 556 bp, Homo sapiens
ttttttcctaggctgtcaaatgtatgagcataaaatttttatagcatttttcatagatgcagcctcttttgtgatatttcttgtttcattcctgatattgctgatttgtgtgttatctccttttatctttgttgatcatgctagaggattatcagttttattaattttttgaagaacctgttttttatttccttaatgttctgcattgctttcctgtttttaatttcatcaatttctgctcttcgctttccgtcctatttgccttaactttattttactattcctcttttagttttttgactactggtttgagaactttccatattactaatataaggatttagtgctataaatttctctctcagctctgctatagctgaatccctcaattgttttttaagacagggtctcattctgtcaccgaagctggagtgcagtagcacaatctccactcgytgcagcctcaaccttctgggctcaagcaatcctccctatctcagcctcccaagtaactgggactacaggtgcatgccaccacacctggataattttttgc

SEQ ID NO: 261928 - DNA, 606 bp, Homo sapiens
accatttaatattgcttgtatagtttagtatttttaagactcaaaaaggtttacagaaagaagaaaaagatcaacatgttattaatcatttaaagatcattttaaaatctttgacctttatattttcatgaataaaatgttagtagttattagtataaaataatttatgtcttttggacttagcatccagtatttcttttttaataaagaaaataattattctcttgcaatgtactatgtttatctgggttttgaaaagtgatgtttcctaatatgagaaagccatttacatttttaaatctacaaaggcaaatggaatggtactaaattatttacataataatgtttagatggtggcccttataacattctttctatacttcctacagagttggggatatgcaatcctagaatatttctgggagctaatcattttgcttgatgaatgaaacaagacttttaaataaaattaaactttcaaattatccacgtaatgggcctgtcttttaattcaatgratatggagcataatgaattatcccctgttcattgggtaataagttctcattcttaacttataatactcaaaatgtcctttaattttta

SEQ ID NO: 261929 - DNA, 514 bp, Homo sapiens
gttatttcactctttaaattcagttagtaatgcagaacctagcacttagtagatactcaaaaattatttgctgaataaaaaaaggttaaacataatatatacaaaatgtactggaaaaaatgcaycaaacaattttgttataccagtttaatgtaaatattgcctttaaaagataatatagttttcaggtgtctacagtgattttgtaatatttgtgcacatataaaataatatttccaaaaatgtaatccagtggggaaatatactttctaaattctagatttataatttagggtttaaattataaaatcattaaataagacacaagtgaaatatagtcaaatatccccttggaaaaaaattaagtggcctctaaagtgaggtattaatatatgtaattttacaatcctctagtgatagaattaaatacaccaccaaattgattatctcctacagtgttaaaagagaagcactaacaatgccagtgaccatgtaacatggatttaagctacaa

SEQ ID NO: 261930 - DNA, 565 bp, Homo sapiens
cctagctactcactactcaggaggctgaggcaggagaatcgcttgaacccaggaagcrgaggttgcagtgagctgagattgtgccattgcactccagcctgggcaacaagagtgaaactgtctaaaaaaaaaaacaaacagaaagacacaacagcaaaaaacacaggtgctgcaagagaggagtcttacattggggggctatgtgagaatagactgagggaatgcaccatggaaatgtgtgctgtaaattacctattttattacacccaacgtgggcttaatagctgtcaggaagtgttagtattatctcccccaaaccctcaatttacagaggagaaaacagaggctcaggcaggtgatgtgacttgccaaggctgcatagctaaggagcagtgatgaacccaccgtacttaagtttgtctgtttccagaatctaaggtcttagcctcgctacagttagaaagtcctaggtttgagtctcgactctgtccattatagctgtgtgaccttgggcaagtcacttttctctctgggcctcatttttttcttcgtctaaagaaattag

SEQ ID NO: 261931 - DNA, 565 bp, Homo sapiens
cctagctactcactactcaggaggctgaggcaggagaatcgcttgaacccaggaagcggaggttgcagtgagctgagattgtgccattgcactccagcctgggcaacaagagtgaaactgtctaaaaaaaaaaacaaacagaaagacacaacagcaaaaaacacaggtgctgcaagagaggagtcttacattggggggctatgtgagaatagactgagggaatgcaccatggaaatgtgtgctgtaaattacctattttattacacccaacgtgggcttaatagctgtcaggaagtgttagtattatctcccccaaaccctcaatttacagaggagaaaacagaggctcaggcaggtgatgtgacttgccaaggctgcatagctaaggagcagtgatgaacccaccgtacttaagtttgtctgtttccagaatctaaggtcttagcctygctacagttagaaagtcctaggtttgagtctcgactctgtccattatagctgtgtgaccttgggcaagtcacttttctctctgggcctcatttttttcttcgtctaaagaaattag

SEQ ID NO: 261932 - DNA, 482 bp, Homo sapiens
ccatccacttctagggactccattctccagcctcacctgcctgtctgttgcccaacaaggtcctcacaatcctacttccgttcctttgctaatgctgttcccatctccagaatgacagtgctgtcctggggagagaggcttagagagcccaaggcacagctcctccattgtgcatatgagcaagttgaggctccaagagggccaacccttacctagggtggagccaggggtaagacacccatcacccttcttgcctcctgacccaagcctgggttttccctgcaggacmctgactgggtggagggttagccaggtgacttagggatgcaatgcagacagcttggtaaaatagtcattctcagacttgggctctggagcaaaatattacccctagcctctgagctgctccagccacttcccattctgcctttctggggttgaacctggaagaacctagagtagaccctttctgtgacagcccc

SEQ ID NO: 261933 - DNA, 536 bp, Homo sapiens
tgtctcatcattcacctgtgctgaagtatccaattttagccacattcagtagcactgtcattcatcttccctcrgtgttattgtgatttaaatccaagctctataaaagagagcagttcttttaaaatgattgagagggaataagggcaaattcagtgtttagaaaaagcttatgacatcacaatattatactttactgatggaggcaatatttcacagtttaggatgaaaaactaataattttctatttggtgtgagtcactgcatcattataaaagggaaaaataagtagttttgtgcattcccaatcttgttcagtaagacattgtggtttaagtataatgcctctgatatatagtatttaagtattagtctgactacatattaattatgtgtgttttttgatgtaagctgttttaatgtatgatggaaattaaatatcatgcttttggggctgggaagaataaatgcatgactggcaaaatgttgtctttgtgctgaaattaggctgtttccaatgattaggagctgtgttt

SEQ ID NO: 261934 - DNA, 570 bp, Homo sapiens
ttgaactcatttctggattgtgtcacattgtcttctctcccctggggctgtcatcataaggccccaatgctttgaaatttagagtgaaagaaaagttctttatttctcttgatgaacttgtatattttctctgttttgaaaataagaagtatgcattgggaaaagggactttggaaacaacaacgacaacaacaaaataagaacataaagtaacagtgtcttctttccctgctttggctaccaggaagctcacagaccaaactcaattatatgttagctgcctgggctatatgttaaatgcttttatttctgtagaaaaatttgattttctatgtctatttcatggtctttgaatttgcttctctattcatatttaaattatgattgattttattgcatatgggctaaaaaaaaaaatttggattttcaactgatgttttgtgctctccctacatttctttgtcccccttccccatcctrccctcattcattcaagaccaggtggcatctttgcctcagggaagggatgtcacagtagaaggatgaaaaaaatcttttgagtttcaaagc

SEQ ID NO: 261935 - DNA, 554 bp, Homo sapiens
gaaatggggcagtatgtagaagagatatctgcactccaatgtttattgcaacactattcacaatagcgaagatatgaatgcaaattaagtgtccatcagtggatgggagggcatcatgttaagtgaaataaggcaggcatagaaagacaaatatcacatagtatcacttatatgcataattttaaaatgttgaacccatagaagcagagagtagaatggtgattaccaggagcytgagtttggggatacggggtgaaaagttagaggagaggttggtcaaaatatgcaaaatttcagttaggtgggagtaataaatttaaacaagctattgtacaagatggtgactgtagttaataacaatatattgcattctcaaacatttctgagagtagattttaagttctctcactacatatacacacaaacacacacacacacacacacacaaaacacaggcaacttcaatgtaaccattcctcaatgtaaatacattccaaactacattcgtacacagtaaatacatgcaacttttatttatcaattttaaatgtatt

SEQ ID NO: 261936 - DNA, 568 bp, Homo sapiens
tacctccctgttactaccccattcactcttttgttcccatgcttaagcacccactaatacgttttatttctatataggttaccctattctggactttcayatcagtggactcatataatttttgaacttttgtgactagtgttttttgtttagcataatgtcttaaaaggatgatccaagttgtagcatgtagcagcccttcatttctttgtgtgactgaatgatattacattttatgaatatacgatactttatcccttcatcttttgatgaatagaaaattgtcgtaactcacttttttcaatatttaattttcttatttctacagttgttatgattcaaagtaaaattccattaagcaatttaatataatcgaatattttataagatttctaggttgatatttgttggttgttttgtttgtttttacattttacttcatactggatctgaattcattttgccataggctgttacaattatcctaatagatatgatttttaatagttttctttactatttgattcttacatctttccatttttcacatgaatgattttcattttac

SEQ ID NO: 261937 - DNA, 594 bp, Homo sapiens
aaattagaatgtgactatatatgctcagggaaaggtatgaacccacaaaaaactgagaagcataaatttacaccacaggctgatatttgacatatagaccctacaacaatcaagaaacagaaacgataaagataataacagaaaacaacaacctctggggaaagagaaaggcaaatttcagagttaccacattattagattcagatgtcagttttcaacaaaaaaaattacaagacattaaacaattacaagagagagccaggcatgctggctcatgcctgtaatcctagcacttcgggaggctgaggtgggtaggtctacttgtagttcaaaacctagcctgggcaaacatggcaaatccccatctctaccaaaaatataaaaattagccartctcataacccagtctctaagtacaataaattaaatagagttaataaattaagaaataaaatgattaaaaatatacaaaagacagaaaattatgaccattgaaataaaggcaatcaattaacataacagtttctgaaaatgaaatttaaaaaaaattgacaacagggatctaaagacagattcaagcaggcagaggaaaga

SEQ ID NO: 261938 - DNA, 594 bp, Homo sapiens
aaattagaatgtgactatatatgctcagggaaaggtatgaacccacaaaaaactgagaagcataaatttacaccacaggctgatatttgacatatagaccctacaacaatcaagaaacagaaacgataaagataataacagaaaacaacaacctctggggaaagagaaaggcaaatttcagagttaccacattattagattcagatgtcagttttcaacaaaaaaaattacaagacattaaacaattacaagagagagccaggcatgctggctcatgcctgtaatcctagcacttcgggaggctgaggtgggtaggtctacttgtagttcaaaacctagcctgggcaaacatggcaaatccccatctctaccaaaaatataaaaattagccaatctcataacccagtctctaagtacaataaattaaatagagttaataaattaagaaataaaatgattaaaaatatacaaaagacagaaaattatgaccattgaaataaaggcaatcaattaacataacagtttctgaaaatgaaatttwaaaaaaattgacaacagggatctaaagacagattcaagcaggcagaggaaaga

SEQ ID NO: 261939 - DNA, 614 bp, Homo sapiens
ggaaaggacaatggaaaatgttcatggatgcagattgtcttagggtgatgaaaatgttctaaaaccatggcgatggttgtacaactctgaatatactaaaaattattgattaaataatggatggtggtatggcatgtggattatatctcaatcaagatgtttttaaaatttaaaatgaacatgtttcagtttatactttattccacagaacacagttcttaaggatattagtaattaagcaagccaattaaaatatctgaatttagcaaagtcaaacagcctttttackgtacggctgaacagaactattaaaattctaatgtgcactacaattcttgtggattttatgtaggaagtaaagataactattgaccttgaagcgttttattctgctcttctactgttaacaagtagtacttatttcagggaaacaacctttggaaaacggtattctacgactggtcttttctttcctagtctggtataaaatgttgtgcacaacttttattgttcttcttttaagagtcattttgtatttgaaaagattattagattatatattttcactggttcaacttaaataaggctttaaattatgcacaaattgattactt

SEQ ID NO: 261940 - DNA, 614 bp, Homo sapiens
ggaaaggacaatggaaaatgttcatggatgcagattgtcttagggtgatgaaaatgttctaaaaccatggcgatggttgtacaactctgaatatactaaaaattattgattaaataatggatggtggtatggcatgtggattatatctcaatcaagatgtttttaaaatttaaaatgaacatgtttcagtttatactttattccacagaacacagttcttaaggatattagtaattaagcaagccaattaaaatatctgaatttagcaaagtcaaacagcctttttacggtacggctgaacagaactattaaaattctaatgtgcactacaattcttgtggattttatgtaggaagtaaagataactattgaccttgaarcgttttattctgctcttctactgttaacaagtagtacttatttcagggaaacaacctttggaaaacggtattctacgactggtcttttctttcctagtctggtataaaatgttgtgcacaacttttattgttcttcttttaagagtcattttgtatttgaaaagattattagattatatattttcactggttcaacttaaataaggctttaaattatgcacaaattgattactt

SEQ ID NO: 261941 - DNA, 477 bp, Homo sapiens
ataatatacttttatacatgagtattatataaattaaattaatatttaatgttttatattcttcaaggaagggcattatgcttggtgtgaagatacctttaaaatggagtgagatacaatttatatatatccaaaaactataattgcatttttttagtgtggtaagaacacttaacatgagatcgcccctcttaaatttttaagagcacaatacagtattattatctataggcaccatgttgtacggtagatttctaggatttattcatcttgcataactrgaatgttaacccctttaaatagcatctcaccaaattcccctcatgccagtccctggcgagcaccaatgaatactggataattatttttatcaatgaaagcaacattaatggctaatcttgtcacttcccggattgacttgatcaatttcacagacagtattctcatctaggtcttgtatttgaaatctatgctccc

SEQ ID NO: 261942 - DNA, 628 bp, Homo sapiens
ttgcttttcaaatgctagctaacagctggtctaaaggttttcgtatttccttttcatggtccaaaatttgtatgttgccttttaaactgaattatctgtttgaaataataaaaataaaatcacacaatgctgagctatagtagtaattttgtacattatcttgtagataggtgttaattttatatgatttatctagattaatataacaaaaaaagtatattgttgtaccttcattcaggctttaaataaaccagaccaaaaaacatataattgccgtatcatatatatagatatttcaaatgtgccatgatcaaagttgatattattaatatgtcaaacttcataaagatttgataaaaactttgtatgaattyagatattcttaaggatttttttcttcaacaagaagatatgcaataaaataatttaatgtgttttaaaatatgtctttgccttttttaaaactctgatcttaggcaaaaatgttaaaagtgtttttcaggttataaaatgttcatgcattatgaattatagatacttgttagaaatgccttttttagaaatgcctttcctagattttctaacatatataaagttaataataatttcataaagtatgctagtgatt

SEQ ID NO: 261943 - DNA, 593 bp, Homo sapiens
ttttgtcataatgtctattgaaattttctcttgcttccatatattttgaggaggccaagttatagtcagaagggcttaacgtggtcagatggttttgcagatgggcttataatacttgaagtatttagttggctgttgctaatgattatggctgagatttgccttttgttcttcttccatgagtaaccaacccttcccaaacttcggggtgtcactccttactgacatttattaatacattcaattaggtttcacttaagtttaacccagcaggtgacattcagctctttcagatgactttgaataactgtgtttccactcactaatgttggtttttgaagtttaattttcatggcaataatttcaagaagagacttgtaaaggaaaacactagcaaagtgaaaaataattgatattaataagtttctagttgcaaaaattggagaaaaacacaaaatccaatatctcaccacctatttacatttgtaaattatttcacagaaatgattaatagcatttttactatgaaatttaaaggcamtgtcatttgatgagtgtagcagaaattaattcagggttggaattgttttgtg

SEQ ID NO: 261944 - DNA, 551 bp, Homo sapiens
ctgaaaagtatagatttattttctttatcatggatgcatatactctttgagatttggcattgtaaaacctctgaaatttttatatgactgcacacatacacacatttacagatcatgaaaatgcctttgtacttaaagtawcttcacccttaaaaacaaatgagtcatcatcttggtcctctgtattacagtacatttgagtcagtttcaataattaaggtgatcaaaatataaatttgataaaatagttgtatcacattaaaataataaacattcttaacaattggtatattaaactgaaattcacattataaaaagacatgcacgtgtgtgtaagttaatatgcattatacatggtcacatatactacagatttgatctatccatgtgtacacatacataaagtattctttttcaattttctttaaactaatcattactgtgccaaaataaaagcgtaagctttacccttcaagaaaatcaggaagacaagcttttctatcatgaatctctacaactccccctaccatatgtgcgatatttacacaagg

SEQ ID NO: 261945 - DNA, 487 bp, Homo sapiens
gttggcaatattattttattggaataccttatggttccttttattttttaaattttttgaaaaagttgtgggtgggagcatgaaaagagctaccagtgcttatcaattggtaaaacacaaatatctagtgataataggtggctatcagagatgattaactgtttaactccttttctatctggtctttttttttttttttttttttttttgagacatagtctcactctgttgcccaggctgaagtgcagtggcatgatctcagctcactgcaacatccacctcccaggttgaaacgatactcctacctcagmctcccaagtagctgggattacaggcaggtgccaccatgtccagttaatttttgtatttttagtagagacacagtttcaccatgttggtcagagtggtctcgaactcctggcctcaaatgatccctctgctttggtctcccaaagtgctgggattacagtcgtgagccattgcacct

SEQ ID NO: 261946 - DNA, 477 bp, Homo sapiens
gccattttaagtacatgcattttgtttttaagtgttgtaacttagtttactaggggttgtcattcatctgacataccttagaagaaacacacacacacacgcacacacacacacaagaatgtgcatgttcatattccatwatatagccatatctgttccattgtataaatgtgttagatttttctcatccattccatatactcagttttgccttatattaataaagctgctattaaaagttcttgaacaatttttagagtatgtgtttccattaatctagaataaacattaaatgtgaaattcaggagtcatgtaatagtgtttactttttaaaatatgaaactctcagaaatttttatgactgttgttataatagtcaatattgtgttgctccagattctcaccaacattttgggttctcagactttataatttttgttactgaggtgggagtacactgaggccgcattattgctt

SEQ ID NO: 261947 - DNA, 548 bp, Homo sapiens
tgctccctccagaatctatgggagagaatctgttccttactttatcttctctagtttcatcctgtcaccatgtaagaagtgtcttttgccttgtgccatgaggccacctcagccacatggaactgtgagtccattaaacaaacatgtttttctttataaattrcccagtcttgggtatatctttatcagaagaatacaaacacactaatacagcaattttaaagatactgattcttcaaatccatgagcatgggatgttttcccatttattggtgccatctctgatttctttcagcagtgttttgtagttcaccttgtacagatctttcacttccttgtttatcagtatttctaggtatttcattgtctttgtggttattgtaagtaggattgtgttcttgatttgatcctcagcttggatgttgttggtgtatggaaatgctactggcttttatacattgatttttgtatcctgaaacctcactaaattatttatcagttctagtagccttttggcaaggtcttcaggattttctaggtatagaatc

SEQ ID NO: 261948 - DNA, 404 bp, Homo sapiens
tcatagaaattgtctgaacaaaccttaccagcttttaataagtttttgtaatacaaaattattttcagttttactggactgttttctcaattgctaatgwttttttttaataggtaaagtttacttttcattacttaagatttgtagtacttgttattttatgtacttgtctaaacaggcagagaaataatgattcttggtttaatttgtatttgtttggtgatataaagccagaactctagaaaataagaaagcaaacggcccatgatggcttttatcctatagatatgttttggacgtaaatttttaaattcttttcatattttaaaagttgaagattttatttcatatgtgaatttctagcttcttttaaaaataaattcaactcatctggcaatagtgga

SEQ ID NO: 261949 - DNA, 605 bp, Homo sapiens
cctgtctatactttcgttatttcatcaggaaaggagtaacatggatctacatactttacagagttgttgcaatgataaatttagtgtagtaaattactttgaacatgttaagtgtgcaataaatattattttataatgtttcaataactcattattatttaaaatacataaactcatgtatgagtaaatatcttatctagtttgcttttatgggtagatmatcatcatattaactttcagaattattttttagctagcagtctagatcttagcatggtttatgctatagtatgaataaatgtgtctcctcaaaattcatgttttgaacttctaacccccaatgtgatggtattagaatgtgaattctttaattgataattaggccgtgtgggtgaaggcatcataaatgggattagtgtccttataaaagaggcccaagatagctttcttgccccttctaccatgtgacgttacaattagaagacagccatctataaggaagtgggccctcaccagacgctgaatctgctggcaccctaatcctggacttccacactccagcaatagtgagaaatagatttctgttgtttataagccacctagtc

SEQ ID NO: 261950 - DNA, 637 bp, Homo sapiens
ttatataagttgaaattgtttctgtcttctttagttcatcttttgcagtcaaatgttcatcatgttgacgaggggtcaagaagctatacttaaaatgttataacacctcccttatctactgtgtatactttcaggctagatgtcttttgggtcaagaagccgtacttgaaatgttataacaacttccttatctgctgtttatactttcaggttagatgtcttttggatacttctgtgaattctgaacatgggatcaactgatatcatcagggatygtgtagcgaaattgatgacagtgagaatattgaggcaaagactcccccatcctacaggtacttttttaaaaggtattttggattaaaagtatgataagggccaggcacattgtgcacacctaaaatcctagtactttaggaggccaaggcaggaggatcacttgagaccaggagttcaagagcagcctgggcaacatagcaagaccccaatgccagaaaaagcaaaaataattagccatgtatggtagcacacgcctgtagccctggcgtcctagctacctggaaggctgaggcaagagaaaagcttgagtccaggagttcaaggctacagtaagctatgatcatgccacttgtaatagtca

SEQ ID NO: 261951 - DNA, 637 bp, Homo sapiens
ttatataagttgaaattgtttctgtcttctttagttcatcttttgcagtcaaatgttcatcatgttgacgaggggtcaagaagctatacttaaaatgttataacacctcccttatctactgtgtatactttcaggctagatgtcttttgggtcaagaagccgtacttgaaatgttataacaacttccttatctgctgtttatactttcaggttagatgtcttttggatacttctgtgaattctgaacatgggatcaactgatatcatcagggattgtgtagcgaaattgatgacagtgagaatattgaggcaaagactcccccatcctacaggtacttttttaaaaggtattttggattaaaagtatgataagggccaggcacattgtgcacacctaaaatcctagtactttaggaggccaaggcaggaggatcacttgagaccaggagttcaagagcagcctgggcaacatagcaagaccccaatgccagaaaaagsaaaaataattagccatgtatggtagcacacgcctgtagccctggcgtcctagctacctggaaggctgaggcaagagaaaagcttgagtccaggagttcaaggctacagtaagctatgatcatgccacttgtaatagtca

SEQ ID NO: 261952 - DNA, 637 bp, Homo sapiens
ttatataagttgaaattgtttctgtcttctttagttcatcttttgcagtcaaatgttcatcatgttgacgaggggtcaagaagctatacttaaaatgttataacacctcccttatctactgtgtatactttcaggctagatgtcttttgggtcaagaagccgtacttgaaatgttataacaacttccttatctgctgtttatactttcaggttagatgtcttttggatacttctgtgaattctgaacatgggatcaactgatatcatcagggattgtgtagcgaaattgatgacagtgagaatattgaggcaaagactcccccatcctacaggtacttttttaaaaggtattttggattaaaagtatgataagggccaggcacattgtgcacacctaaaatcctagtactttaggaggccaaggcaggaggatcacttgagaccaggagttcaagagcagcctgggcaacatagcaagaccccaatgccagaaaaagcaaaaataattagccatgtatggtagcacrcgcctgtagccctggcgtcctagctacctggaaggctgaggcaagagaaaagcttgagtccaggagttcaaggctacagtaagctatgatcatgccacttgtaatagtca

SEQ ID NO: 261953 - DNA, 637 bp, Homo sapiens
ttatataagttgaaattgtttctgtcttctttagttcatcttttgcagtcaaatgttcatcatgttgacgaggggtcaagaagctatacttaaaatgttataacacctcccttatctactgtgtatactttcaggctagatgtcttttgggtcaagaagccgtacttgaaatgttataacaacttccttatctgctgtttatactttcaggttagatgtcttttggatacttctgtgaattctgaacatgggatcaactgatatcatcagggattgtgtagcgaaattgatgacagtgagaatattgaggcaaagactcccccatcctacaggtacttttttaaaaggtattttggattaaaagtatgataagggccaggcacattgtgcacacctaaaatcctagtactttaggaggccaaggcaggaggatcacttgagaccaggagttcaagagcagcctgggcaacatagcaagaccccaatgccagaaaaagcaaaaataattagccatgtatggtagcacacgcctgtagccctggcgtcctagctacctggmaggctgaggcaagagaaaagcttgagtccaggagttcaaggctacagtaagctatgatcatgccacttgtaatagtca

SEQ ID NO: 261954 - DNA, 531 bp, Homo sapiens
ccacccttgtttctcataagcgatgtctggagtgattgtggttcttggaaaagcagaaggaaaaactaaaaagtgtatcttgtattttccctgccctcaggttgcctatgtattttaccttttcatatttaaggcaaaagtacttgaaaattttaagtgtccgaataagatatgtcttttttgtttgttttttttggttgtttgtttgttttttatcatctgagattctgtaatgtatttgcaaataatggatcaattaattttttttgaagctcatattgtatstttttaaaaaccatgttgtggaaaaaagccagagtgacaagtgacaaaatctatttaggttctctgtgtatgaatcctgattttaactgctaggattcagctaaatttctgagctttatgatctgtggaaatttggaatgaaatgcaattcattttgtacatacatagtatattaaaactatataatagttcatagaaatgttcagtaatgaaaaatatatccaatcagagccatccctaaagagt

SEQ ID NO: 261955 - DNA, 569 bp, Homo sapiens
ctgtacctaaaatcatgtttaatcgtataaggaaacatttcaatacacttatacaggaagaaaactatagatgaagtacatgtgtgtgattcagtctgattcacagaattctgagagtaatatggaataaaacaactccacttagatgataactgaagcatttcctgccttgtgaaaatttggattttaaattgctgttagaatgggaaatttggacactttatatcattgtataatttcagaatttagtttctgtatcttttggaaaacatgattatagcaaaaacatagaaaataatctattactaaaacaccataaatgtaaaactagtatgcttggctgttaactctaaagatgttacttatgtctgtttttaaaacatgcatgtatttaacaattttatcatagtattgtcatggaaaaaataaatatattttcttacatcttacactgacagacttgggcattattgggtttttccccatgttacacacttaggagaagtggctctgctttgttgttgtatttttttgttctatcccgtaaraaatacagtggttgtaaagca

SEQ ID NO: 261956 - DNA, 548 bp, Homo sapiens
aggcctgcatccctgggtcattgcatttttctctggataacactttcgtggaacaacaactcattagcaacagctcttctagcttcaattcagctgaatggcctaagatcacratgatatgtatggctggagggaatccatcaaaatggcctgtaaaagcaactccatgacatcttgggaagcactggccccagcagtatcaaaggaagaggtgttgaggcaagggtgtctgggaagtggaggacccactttctaccatgtggcctttctccggactgcactcatataagattatgtgtctaggagtggatgatgatgatgatgatgatgataaccatgattcctctgggagaaaggatcctggccatcaaagcttcccaaagacaggagattggggcacaaagtgaacctctctagtttattcatcttttagaattacattatgtgcttaaaactgtgccttgcacaaaccccaaaagtctttgctgaatgaatgctgcacaaacaaatgtagagtcgagactgggactaattataggctcttgcat

SEQ ID NO: 261957 - DNA, 643 bp, Homo sapiens
tgtatgctttcacttgaggggattggatgttaatagaaagagggatgtggatagaaagaggccagattagggtggggcagtatgaggagagggtggtatgtaggtatcaatatattcttcctgaccctaaccctaacctcgtgtggcagaaaggtacggggacagcaggctgaagcctcaggtataggaacagaaagtgagcaacagacaaaatccagaatgcctaggtggctcctgactcatgtgtaaattctgcrccaattgccaaatactgactagcaggaagggaatagtcatgtggctaagagcacatgttctagagtcacactcatctgagtatgaccccaatttttctatttactactcatatgacctcgagcaagttatttatcctccctatgtcttctcctcagacaaatagagataacagtgacaccttactcataagacaatccatcatgaggattaaataacacaaaaccttcaacatttttagagcaatgcttagaacacaggaagtgctcactaagagccgctattatcaccatcatcaataatattatcatttgccctgctcttctatttcctggaccgtctcagcagcaacaaactcttttcttacagatatgcaaaccagctacac

SEQ ID NO: 261958 - DNA, 591 bp, Homo sapiens
cttgggagctggcaagctctgattggtgagtgacagcagtaggtaaaactagtttagaatcacagcaggccatgtcagcagctgctagttagaactggtcttagggggtacagcaggccatttcagcagctgggcttgtggataatttaactcttaggagcagatgctgtgtgcccaagtacttttcaccccctggcctctcgactctgatttagttgagtatgacaagaatgacccaattcatattaattaatttaattactatattacttttaattgtaaaaaccrcaattacttttgcaccaacctaacagagtaaactttcacaagaaaaagcctcaaaaggccgagtggcctcatcaggagtgtaccagggttttctttcaaccatgttagcttagaagagtcactatctgcttgcattatgctcttagaacattctccagcaccaagactcttcctgtagaattccatcaaatgtcccctggaagtaaaagtaaatgtataatactactgtttccattcatggccaatcattttgtagatgggctaggaaatgatttctttagaacatattgctgagctttatag

SEQ ID NO: 261959 - DNA, 587 bp, Homo sapiens
tggttgatatggtttggatctgtgtcctcacccaaatctcatgtcaaattgtaattcccagtgttggaggtggggcctggtggcaggtcactggatcatgggggtggatttctcatgaatggtttakcaccatcttttttgtgctgtgcttgtgatagtgagtaaattcatgtgaaatctggttgtttaaaagtggtagcacctcctctctttctctctctttcttgctcctgctctgaccatgtaatgtgtctgctctcccttcaccttcccccacaattgaagcttcctgaggccttcccagaagctgagtgtatgacaccaccatgcttcctgtacaggctgcagaaccatgaaccaactaaacctcttttctttataaattattgtctcaggtatttctttatagcaatgcaagaacaagctaatacagtggctaatcacatttatagattgtgtatgttgaatcattcttgcatcctagaaataagtcctgtttaatcatgtctatggttctttcaatgtgttgttgaatttgttttgctagtgttttgttgataatttttgcatctctgttcatgaaggat

SEQ ID NO: 261960 - DNA, 509 bp, Homo sapiens
aaggccgtttcttgctgtctgatatttaacrttattctttacttttccacttttcatagcagaccaaattcaaatttactgaattctaatttatcaaataaactcccctgagaatttaaagatgaggtcaagtattggataacacttaatgtttggtttttgtttttgtattcttgttttcataccctagactgcaactatcccttctacctagtcatttcagaaatctaagtgtttccagggtgggtacaagtagagaagacaaaaactgagcttcagatccatgaaaaagaaaaaacaattctaaatttcgctactcaggtacatgctaggactcctacaaggccataggaagataagctattgattctcaaggaatttctcttctggttgccattcctgatcttacagtaactgtgattctaattttgcaagaagagaagatatggcatggtaaaatcttcattctcatagaaggatatgttacttagtaggtataatacaagcag

SEQ ID NO: 261961 - DNA, 509 bp, Homo sapiens
aaggccgtttcttgctgtctgatatttaacattattctttmcttttccacttttcatagcagaccaaattcaaatttactgaattctaatttatcaaataaactcccctgagaatttaaagatgaggtcaagtattggataacacttaatgtttggtttttgtttttgtattcttgttttcataccctagactgcaactatcccttctacctagtcatttcagaaatctaagtgtttccagggtgggtacaagtagagaagacaaaaactgagcttcagatccatgaaaaagaaaaaacaattctaaatttcgctactcaggtacatgctaggactcctacaaggccataggaagataagctattgattctcaaggaatttctcttctggttgccattcctgatcttacagtaactgtgattctaattttgcaagaagagaagatatggcatggtaaaatcttcattctcatagaaggatatgttacttagtaggtataatacaagcag

SEQ ID NO: 261962 - DNA, 509 bp, Homo sapiens
aaggccgtttcttgctgtctgatatttaacattattctttacttttccacttttcatagcagaccaaattcaaatttactgaattctaatttatcaaataaactcccctgagaatttaaagatgagrtcaagtattggataacacttaatgtttggtttttgtttttgtattcttgttttcataccctagactgcaactatcccttctacctagtcatttcagaaatctaagtgtttccagggtgggtacaagtagagaagacaaaaactgagcttcagatccatgaaaaagaaaaaacaattctaaatttcgctactcaggtacatgctaggactcctacaaggccataggaagataagctattgattctcaaggaatttctcttctggttgccattcctgatcttacagtaactgtgattctaattttgcaagaagagaagatatggcatggtaaaatcttcattctcatagaaggatatgttacttagtaggtataatacaagcag

SEQ ID NO: 261963 - DNA, 451 bp, Homo sapiens
gcaaaagtcagttaaacaacaaagacaatgacattgttttcagaaagcttcttttgcaatacaggaattactccacagcagagaagacaagtcttattcccttacccaakataataattctaaggatgctttggcttcaagtagcaaaaaacacagatgcaactgccttaatcagttagacaatttaaattttcacatatcaagaagtgtacattcagaggagttctagacacataccaaactgggttctggtttgcagctctgcaaactacaacccgcaggccaaatctggcctactacttttctttgtaaataatattttattggaacacagccaagaccattcattaatttattgtttatgtaatacacagccaaggacattaatttatgtattgttctgtgctgcaacaagagagatgagtagttgtgacacagatcacatagccca

SEQ ID NO: 261964 - DNA, 520 bp, Homo sapiens
caacatatgctggaataaatcatcaggatgtggggattgagggagaaagagatgtcaaagaagacttccaacttctggcttatrcaactgggttgatagaagtgccatttatggagagaaggaaagctaaggagcatctttggagaaaagattatctttgagatgccaatggtacattgaaatgaattttagaatagacttttgaatatgtggtctggtctccgtgtgaatctgaaattgaaatttgggatttatctatagagagctagtatttaaaccatgatatagatgaaaatgcctagaggaagagtatgagttgaaccagaaaggggcccaggacgcagtctgtagctccagttattggctggtaagaaaaggagacaccatcaaaggagactgggaaagagcagtcagaagacaaggaaggattcaaaaaagagtggtattatgaagacaaagaaaaaattttcaaagaaagggaataggtaaccattgagaggtcacagaaagtgactaaaat

SEQ ID NO: 261965 - DNA, 520 bp, Homo sapiens
caacatatgctggaataaatcatcaggatgtggggattgagggagaaagagatgtcaaagaagacttccaacttctggcttatacaactgggttgatagaagtgccatttatggagagaaggaaagctaaggagcatctttggagaaaagattatctttgagatgccaatggtmcattgaaatgaattttagaatagacttttgaatatgtggtctggtctccgtgtgaatctgaaattgaaatttgggatttatctatagagagctagtatttaaaccatgatatagatgaaaatgcctagaggaagagtatgagttgaaccagaaaggggcccaggacgcagtctgtagctccagttattggctggtaagaaaaggagacaccatcaaaggagactgggaaagagcagtcagaagacaaggaaggattcaaaaaagagtggtattatgaagacaaagaaaaaattttcaaagaaagggaataggtaaccattgagaggtcacagaaagtgactaaaat

SEQ ID NO: 261966 - DNA, 520 bp, Homo sapiens
caacatatgctggaataaatcatcaggatgtggggattgagggagaaagagatgtcaaagaagacttccaacttctggcttatacaactgggttgatagaagtgccatttatggagagaaggaaagctaaggagcatctttggagaaaagattatctttgagatgccaatggtacattgaaatgaattttagaatagacttttgaatatgtggtctggtctccgtgtgaatctgaaattgaaayttgggatttatctatagagagctagtatttaaaccatgatatagatgaaaatgcctagaggaagagtatgagttgaaccagaaaggggcccaggacgcagtctgtagctccagttattggctggtaagaaaaggagacaccatcaaaggagactgggaaagagcagtcagaagacaaggaaggattcaaaaaagagtggtattatgaagacaaagaaaaaattttcaaagaaagggaataggtaaccattgagaggtcacagaaagtgactaaaat

SEQ ID NO: 261967 - DNA, 500 bp, Homo sapiens
ttttcctgtcatcaaacaaacaagcaagtaagcagcaatgaataaattggaaattgttgtgctcaacacatgcattttgctaagtcaaaatataaatgaatgaatgatttagtgaattataattaattaattaaagtaggtccagaactgggaaaaggagaggggaactcaaatctctgatttaaaaaaaaamagaaaaaaagaaaaaaaaggccttccttgatccaatctccttctctaattgtcatctcctttctctcttccttatagtgctttggttcagatctggcatccatagaatttactagctgtaggttcatggcaagttacttaaatactctgccctttatttcaccatctgtaaaaagagaataatgatagcacatacctcacggaacttttgcaaggattaactaaatacctacaaggaatgctgaactgatgagcagcactaagaggccatggcaagtctgggtctgcacatgtctgcaggacaggaa

SEQ ID NO: 261968 - DNA, 555 bp, Homo sapiens
ttacacatatattttattctgcytctgccacccctcagtcagcaagactgcttcctcatttttctccttcttctcagtctactcaacttgaggacaaccaggatgaaaacctttacaaagatccatttccacttaatgaatagtaaatatattttctattccttatgatctttgcaagagcatttattttctctagcttactttgttataagagcacggtaatggctgcacgtggtggctcacacctgtaatcccagcactttgggaggccaaggcaggtggatcacaaggtcaggaggtagaacaatcctagccaacatggtgaagccccatctctactaaaaatacaaaattagccgggcttggtggcgggtagcctcagctactcaggaggccgaggcaggagaatggtgtgaaccctggaggcggaggttgcagtgagccaagatcacaccactgcactccagcctggacaacagagcaagactcggtctcaaaaaaaaaaaaaaaaaaaaaaaaaaagagcacagtaaattaagtggaattatatataac

SEQ ID NO: 261969 - DNA, 555 bp, Homo sapiens
ttacacatatattttattctgcttctgccacccctcagtcagcaagactgcttcctcatttttctccttcttctcagtctactcaacttgaggacaaccaggatgaaaacctttacaaagatccatttccacttaatgaatagtaaatatattttctattccttatgatctttgcaagagcatttattttctctagcttactttgttataagagcacggtaatggctgcacgtggtggctcacacctgtaatcccagcactttgggaggccaaggcaggtggatcacaaggtcaggaggtagaacaatcctagccaacatggtgaagccccatctctactaraaatacaaaattagccgggcttggtggcgggtagcctcagctactcaggaggccgaggcaggagaatggtgtgaaccctggaggcggaggttgcagtgagccaagatcacaccactgcactccagcctggacaacagagcaagactcggtctcaaaaaaaaaaaaaaaaaaaaaaaaaaagagcacagtaaattaagtggaattatatataac

SEQ ID NO: 261970 - DNA, 555 bp, Homo sapiens
ttacacatatattttattctgcttctgccacccctcagtcagcaagactgcttcctcatttttctccttcttctcagtctactcaacttgaggacaaccaggatgaaaacctttacaaagatccatttccacttaatgaatagtaaatatattttctattccttatgatctttgcaagagcatttattttctctagcttactttgttataagagcacggtaatggctgcacgtggtggctcacacctgtaatcccagcactttgggaggccaaggcaggtggatcacaaggtcaggaggtagaacaatcctagccaacatggtgaagccccatctctactaaaaatacaaaattagccgggcttggtggcgggtagcctcagctactcaggaggcygaggcaggagaatggtgtgaaccctggaggcggaggttgcagtgagccaagatcacaccactgcactccagcctggacaacagagcaagactcggtctcaaaaaaaaaaaaaaaaaaaaaaaaaaagagcacagtaaattaagtggaattatatataac

SEQ ID NO: 261971 - DNA, 487 bp, Homo sapiens
gaacaaatgtgctacaaaactctatgaagtttcagggctgtcacatttataaaatgtatagaaatccaatagtctggagcatgaagttcaatgtaaaaaaatgaatcaatcattgtatctcaacttccaccgtttaaaagaatcacaatgtcctgtgagacacattgagttgttaagacagtatattctacatgggaatattgtttcaacccatataaaaatgtaataaaagttgctagagttgagtaaggctcagagtaggaaagggctgagacaagtgtgggctgtartataaatgatattggagatactagtaatggtaaaatatgctcaatgtgacttatgcaaaaggtagacaccccagagtgctgaacaaggctatgttaagtggcagagtatttattatatatgtcaagtggcatagtatatgttatatctgttaagtggcatatgttaagtggcatatatgttatacatatgttattta

SEQ ID NO: 261972 - DNA, 601 bp, Homo sapiens
aaattatcattttttactcatctatgcaaatttgcaagtctaggcagaatactattataaatttatgttcaayatgaaattttatttttctgaacaaaaataatagagattcttatattttaatgtaattggcaacattagttgagtttcttcaaacacattgcaaataattatataatacctgttttttctattattttccaattagtgaattctagcaataaggttttttaaaatggttcattataatacatgtaattatagtcgggtaaagaaacactactttcactagctattaatattactttgacttgcaaaaaagcagctatgctaattaaaggagagcaattaaaatttttagtttagtagttcaagtatctttggcacaaaatggaaacagatatagcttacagagaatttggggccggaagtagtaaaagtatgctttagttccacagttctgatcctgggttaatactgtatagaaccactaacaaaaaggcagaaaaaaaaatcaactttattatcctctgggaaaaaaaattcatgctgtgtttacatcatgacaagccactactactgcatagtaattgggagccaa

SEQ ID NO: 261973 - DNA, 601 bp, Homo sapiens
aaattatcattttttactcatctatgcaaatttgcaagtctaggcagaatactattataaatttatgttcaacatgaaattttatttttctgaacaaaaataatagagattcttatattttaatgtaattggcaacattagttgagtttcttcaaacacattgcaaataattatataatacctgttttttctattattttccaattagtgaattctagcaataaggttttttaaaatggttcattataatacatgtaattatagtcgggtaaagaaacactactttcactagctattaatattactttgacttgcaaaaaagcagctatgctaattaaaggagagcaattaaaatttttagtttagtagttcaagtatctttggcacaaaatggaaacagrtatagcttacagagaatttggggccggaagtagtaaaagtatgctttagttccacagttctgatcctgggttaatactgtatagaaccactaacaaaaaggcagaaaaaaaaatcaactttattatcctctgggaaaaaaaattcatgctgtgtttacatcatgacaagccactactactgcatagtaattgggagccaa

SEQ ID NO: 261974 - DNA, 601 bp, Homo sapiens
aaattatcattttttactcatctatgcaaatttgcaagtctaggcagaatactattataaatttatgttcaacatgaaattttatttttctgaacaaaaataatagagattcttatattttaatgtaattggcaacattagttgagtttcttcaaacacattgcaaataattatataatacctgttttttctattattttccaattagtgaattctagcaataaggttttttaaaatggttcattataatacatgtaattatagtcgggtaaagaaacactactttcactagctattaatattactttgacttgcaaaaaagcagctatgctaattaaaggagagcaattaaaatttttagtttagtagttcaagtatctttggcacaaaatggaaacagatatagcttacagagaatttggggccggaagtagtaaaagtatgctttagttccacagttctgatcctgggttaatactgtatagaaccwctaacaaaaaggcagaaaaaaaaatcaactttattatcctctgggaaaaaaaattcatgctgtgtttacatcatgacaagccactactactgcatagtaattgggagccaa

SEQ ID NO: 261975 - DNA, 614 bp, Homo sapiens
taggagaaggcagagttatagcttaatagatacagagtttctatttggaataatgaaattttgaaagtaaatatgcacaacacaatgaatgtaattaatgctgttaaattatacacttaaaataattaaaatggaaaatgtcatgttgtatgtatwttaccataataaaaattttttaaaaatcaagcaagtgtaccgagatttaactatcaaaatgttcataacaaatagcagagaaaaaaattataacagtctaaactgtcagcaattggaggtaggttaaatacattttagcacaaacactcaatgaaagattacgagaccattcaaaatcatataggaaagaatatttaatggcaagaaatatattcacatatactataaaactaaatatacatcatgcaatcactgttttgttttaaaaattatatgtgtatgattagaaaagaagcatctataccaaaatttgtctctgggcagtgacattttttcttcttttttaacctttattctttcaatttttgatgtcacaaatatgtattacaaatagacaaataacacaagttttagtttatatgagcaaagaaacaaaacatattcttagaaattcagaa

SEQ ID NO: 261976 - DNA, 614 bp, Homo sapiens
taggagaaggcagagttatagcttaatagatacagagtttctatttggaataatgaaattttgaaagtaaatatgcacaacacaatgaatgtaattaatgctgttaaattatacacttaaaataattaaaatggaaaatgtcatgttgtatgtattttaccataataaaaattttttaaaaatcaagcaagtgtaccgagatttaactatcaaaatgttcataacaaatagcagagaaaaaaattataacagtctaaactgtcagcaattggaggtaggttaaatacattttagcacaaacactcaatgaaagattacragaccattcaaaatcatataggaaagaatatttaatggcaagaaatatattcacatatactataaaactaaatatacatcatgcaatcactgttttgttttaaaaattatatgtgtatgattagaaaagaagcatctataccaaaatttgtctctgggcagtgacattttttcttcttttttaacctttattctttcaatttttgatgtcacaaatatgtattacaaatagacaaataacacaagttttagtttatatgagcaaagaaacaaaacatattcttagaaattcagaa

SEQ ID NO: 261977 - DNA, 557 bp, Homo sapiens
tcaatttccaaatggaaagttctctataatactgtggggaactcattatgcttcattttcctaatttacatatttaatgtaaatagggttgayatataatggacagcaactatatcaagcatgggacacaaaagttgaacaatttgcttcaacatagtctttaatggaccctctcagaaaaaaaaaaaaagtggagcttatagttcaaaagccaaaagagatgaaaattcagattagtgtaaagaaagcaaatcctggtatgttgaaagagactactgaggttaagggtgttggtgcattagcaagaaagattttttttgttttagtcacttcagctatgttttgaagattcataattttttgacatgaaaagaatgtcatgagagtggggacatgaaggtaaagatatttcatatggtcaagcgtgacaaaaatggaaatgaactggaggtggttatgactggcagttcaaggcagaggcagaaaaacatttgtagatctcattaaggagtttaaattgtatgggaagacctgtgaagtttttaaaagactaatta

SEQ ID NO: 261978 - DNA, 557 bp, Homo sapiens
tcaatttccaaatggaaagttctctataatactgtggggaactcattatgcttcattttcctaatttacatatttaatgtaaatagggttgatatataatggacagcaactatatcaagcatgggacacaaaagttgaacaatttgcttcaacatagtctttaatggaccctctcagaaaaaaaaaaaaagtggagcttatagttcaaaagccaaaagagatgaaaattcagattagtgtaaagaaagcaaatcctggtatgttgaaagagactactgaggttaagggtgttggtgcattagcaagaaagattttttttgttttagtcacttcagctatgttttgaagattcataattttttgacatgaaaagaatgtcatgagartggggacatgaaggtaaagatatttcatatggtcaagcgtgacaaaaatggaaatgaactggaggtggttatgactggcagttcaaggcagaggcagaaaaacatttgtagatctcattaaggagtttaaattgtatgggaagacctgtgaagtttttaaaagactaatta

SEQ ID NO: 261979 - DNA, 599 bp, Homo sapiens
ttggcaatattagattatgagatatagtaggtaattttcctctttgtaattaacataaaatgaaatgacataatttctatcattaaaacatctcgatttcactkgtaataaagctttaattgtataataataatattatcaatgttaaagtattcaaatggaggcaggtctctgtgggagagaaagacaaagcatagaacattactttcttttttaaaatgacctcttaatgtagaaaatttattttctcatttatttatggatctgtgcacctattttcagaaagtgcagtttgtttctgtgtgaatgttagcacagacaatgccaagtttatattaagtcctccaaaagggtagaaacacaaatatgaagtataattttttatctaagatcacctgtattacaaatttagtttggcttccagttaattaatttctcaaatctctcctacatgcagttagcacttcatggctacatatatttctacatacaagtgcaaaatgatgaaaaacattgagaccatgaaaacacaagaagcagccacaaaagcctcagctctttctactttcaggtagatggattatgagctataatatgtc

SEQ ID NO: 261980 - DNA, 599 bp, Homo sapiens
ttggcaatattagattatgagatatagtaggtaattttcctctttgtaattaacataaaatgaaatgacataatttctatcattaaaacatctcgatttcactggtaataaagctttaattgtataataataatattatcaatgttaaagtattcaaatggaggcaggtctctgtgggagagaaagacaaagcatagaacattactttcttttttaaaatgacctcttaatgtagaaaatttattttctcatttatttatggatctgtgcacctattttcagaaagtgcagtttgtttctgtgtgaatgttagcacagacaatgccaagtttatattaagtcctccaaaagggtagaaacacaaatatgaagtataattttttatctaagatcacctgtattacaaatttagtttggcttccagttaattaatttctcaaatctctcctacatgcagttagcacttcatggctacatatatttctacatacaagtgcaaaatgatgaaaaacattgagaccatgaaaacacaagaagcagccacaaaagcctcagctcyttctactttcaggtagatggattatgagctataatatgtc

SEQ ID NO: 261981 - DNA, 498 bp, Homo sapiens
aaagctaaagggaagtgagttcaacttgtagcaatgggacagaacttgactggtaaaaactaaaaatgggatccaattttatagtttggttttattttatgtayttatgtatttatagttcaattgatttggggggaacaggaaggtgttcggttacatgaataagttctttagtggtgatttctgaggttttggtgcacccatcaccctgtacccaatgtgtaatcctttattcctcgccacccaccaccctttcctccaaatccctcatgtccaacctatcattcttatgcctttgcgtcttcatagtttagcccccacatgtgagtgagaacataagtttggtttcccattcctgcattacctcgcttagagtaacagtccccaattccatccaggttgctgggaatgccattattttgttccttttttatggatgagtagtattccatggtatatatataccacattttctttattcatccattgattgatggg

SEQ ID NO: 261982 - DNA, 498 bp, Homo sapiens
aaagctaaagggaagtgagttcaacttgtagcaatgggacagaacttgactggtaaaaactaaaaatgggatccaattttatagtttggttttattttatgtacttatgtatttatagttcaattgatttggggggaacaggaaggtgttcggttacatgaataagttctttagtggtgatttctgaggttttggtgcacccatcaccctgtacccaatgtgtaatcctttattcctcgccacccaccaccctttcctccaaatccctcatgtccaacctatcattcttatgcctttgcgtcttcatagtttagcccccacatgtgagtgagaacataagtttggtttcccattcctgcattacctcgcttagartaacagtccccaattccatccaggttgctgggaatgccattattttgttccttttttatggatgagtagtattccatggtatatatataccacattttctttattcatccattgattgatggg

SEQ ID NO: 261983 - DNA, 586 bp, Homo sapiens
gaatgatggtggtattttgatgggaattgaattgaatttgtagatagcttttggcagtatggtcatttttacaatattgattcgactcatccatgaacatggcaagtgtttctgtatgtttgtgtcatctatgatttctttgagcagtgttttatagttttccttgtagagatcttttacctccttggttaggtatatttctcttttatttttgagatgaagttttgctcttgttgcccaggctggaatgcaatggtgcgatctcggctcactgcaacctccatctcctgggttcaagtgattctcctggctcagcctagtgagtagctgggattacaggcatgcaccactatgcccagctaattttgtatttttggtagagacggggtttctccatgttggtcaggctggtctcgaactcccaaccttaggtgatctgcacacctcagcctcccaaagtgctgggattacagacgagagccaccgcacccagcctggttaggtatatttctgttttttgttttttttkttgttgttgttgttgttgttgtttttcgcagctattgtgaaaggggttgagttcttc

SEQ ID NO: 261984 - DNA, 597 bp, Homo sapiens
tctttggctaccagcataggtagagaaagacctaccaggtcgggggcacggataggcatatctgagctcagcctctccttgggaagggcttcctgtggctattgtgggggatggggcgtggttcccagttcaatggagttatattcccagggggattatggctgcctctgctgactcatacaggtcaccagggaggtggggaaaagccaggagtcattggtttcactctgctcctctgcagtcggtagtcctaaaggtcaatttcactcccacttgtggtcccctaagagtaccatgtctatttccaggcaactgctgactagggcagagaatttgcctcagaacacaaacctcgccattgagaaagcaagcagactcaggtttttggcatctcaggtagcctgcatgggtgatmcagttccttcaaagagtctgtggattctctcacctttcctagtatgttcctgtggtagttcttggagcaaaggactcacaaaaatgtgagtcttcacgtgctgctctgtctgaccaaatgggagctgcagactttagtcctgtcttctatccatcatcttaatcttcagtatccaattttag

SEQ ID NO: 261985 - DNA, 597 bp, Homo sapiens
tctttggctaccagcataggtagagaaagacctaccaggtcgggggcacggataggcatatctgagctcagcctctccttgggaagggcttcctgtggctattgtgggggatggggcgtggttcccagttcaatggagttatattcccagggggattatggctgcctctgctgactcatacaggtcaccagggaggtggggaaaagccaggagtcattggtttcactctgctcctctgcagtcggtagtcctaaaggtcaatttcactcccacttgtggtcccctaagagtaccatgtctatttccaggcaactgctgactagggcagagaatttgcctcagaacacaaacctcgccattgagaaagcaagcagactcaggtttttggcatctcaggtagcctgcatgggtgatccagttccttcaaagagtctgtggattctctcacctttcctagtatgttcctgtggtagttcttggagcaaargactcacaaaaatgtgagtcttcacgtgctgctctgtctgaccaaatgggagctgcagactttagtcctgtcttctatccatcatcttaatcttcagtatccaattttag

SEQ ID NO: 261986 - DNA, 583 bp, Homo sapiens
gtattagaaccttaagggtagccacttaaaatttttaaaaattactatgaatgatatactaagaacaaacamaatgaatagaaaacagttacacacatggtagacagtaaatcacctatatcaataatggctttaaaatgactagtttagatgaaccattaaaagacagagatgcaactctttgttgtcaaaaagaatctcatctgaagcatataaactaaggttaaaattttaaaaaggatgaaaaagatatcatgctaacactaatacaaagaaagcagaagtaactgtattaattttggataaagcagacatcagaagaagaaaatttattacagatagagagcaacacaacataacgagaaaggaaacaattatccaaatatgtataatatataacaaccctaaacctaataataaagaatcgaagtgctctattagacctgaagaagaaatagagaaatacactattatacttagtgtgctataaaatttcaacatttcttttcacaagtgatatatcagtaagcagaaaatcagtaaggacattgttgacctgaacaatactaaaaatcaacttggt

SEQ ID NO: 261987 - DNA, 583 bp, Homo sapiens
gtattagaaccttaagggtagccacttaaaatttttaaaaattactatgaatgatatactaagaacaaacaaaatgaatagaaaacagttacacacatggtagacagtaaatcacctatatcaataatggctttaaartgactagtttagatgaaccattaaaagacagagatgcaactctttgttgtcaaaaagaatctcatctgaagcatataaactaaggttaaaattttaaaaaggatgaaaaagatatcatgctaacactaatacaaagaaagcagaagtaactgtattaattttggataaagcagacatcagaagaagaaaatttattacagatagagagcaacacaacataacgagaaaggaaacaattatccaaatatgtataatatataacaaccctaaacctaataataaagaatcgaagtgctctattagacctgaagaagaaatagagaaatacactattatacttagtgtgctataaaatttcaacatttcttttcacaagtgatatatcagtaagcagaaaatcagtaaggacattgttgacctgaacaatactaaaaatcaacttggt

SEQ ID NO: 261988 - DNA, 381 bp, Homo sapiens
gtattttcagcaatttatgatggaatacaattggacttccatatgcaaaaaaaaagtgtagacagagacattatattgtaccccaaaattaacttgaaatggatcattgtataaaaggcaaaatgtaaagtctgaggtaaatatgtaaatatacattttcatcctaaatgtaaaatgtgaaactatgaaacctcttgaaaaaaattwaaaaaaatgtggagttggatattgtgatgcgttaaattcagtaacagtggcataattcagcaattaaaaaagtcataagttgcattttattaaaaccaaaaattgtctgccctgcaaaagtcactattaagaaaatgaaaatttaagccacatactgtgaatgaatatttgata

SEQ ID NO: 261989 - DNA, 381 bp, Homo sapiens
gtattttcagcaatttatgatggaatacaattggacttccatatgcaaaaaaaaagtgtagacagagacattatattgtaccccaaaattaacttgaaatggatcattgtataaaaggcaaaatgtaaagtctgaggtaaatatgtaaatatacattttcatcctaaatgtaaaatgtgaaactatgaaacctcttgaaaaaaatttaaaaaaatgtggagttggatattgtgatgcgttaaattcagtaacagtggcataattcagcaaytaaaaaagtcataagttgcattttattaaaaccaaaaattgtctgccctgcaaaagtcactattaagaaaatgaaaatttaagccacatactgtgaatgaatatttgata

SEQ ID NO: 261990 - DNA, 560 bp, Homo sapiens
aacttaaattatcaaataaatatccttcggtgcatactgatataaayacattattagctatataaacaaatgggaaaaaatagacaaataatgccctgaatagaaattttccaagtaatttatagagatagttcaacctcaattagaggatgcatatctccccattccttaagtgcaggctgtgcataatgacttcattccaaataacacattattaaaaggagggaagaataataattttacaatagaggttcctgagtgacactacctcagctgagtgataaaagtcaccatcaacagataaatcatgctgtcagtatgtacttgtctaagtgtgttttgtgttgctataacagaataccacaggctgggtaatttatttttttaaaaaagtagtttatttggcgcatagttctgaaggctgggaagtcaaagagcatggtaccagcatctggtgagggcctttgtgctgtgtcattccatggcagaaaggagaaaagcaaaagcagattatggaaagagtgagagcaagagagggctgaacccactttcataacaac

SEQ ID NO: 261991 - DNA, 560 bp, Homo sapiens
aacttaaattatcaaataaatatccttcggtgcatactgatataaacacattattagctatataaacaaatgggaaaaaatagacaaataatgccctgaatagaaattttccaagtaatttatagagatagttcaacctcaattagaggatgcatatctccycattccttaagtgcaggctgtgcataatgacttcattccaaataacacattattaaaaggagggaagaataataattttacaatagaggttcctgagtgacactacctcagctgagtgataaaagtcaccatcaacagataaatcatgctgtcagtatgtacttgtctaagtgtgttttgtgttgctataacagaataccacaggctgggtaatttatttttttaaaaaagtagtttatttggcgcatagttctgaaggctgggaagtcaaagagcatggtaccagcatctggtgagggcctttgtgctgtgtcattccatggcagaaaggagaaaagcaaaagcagattatggaaagagtgagagcaagagagggctgaacccactttcataacaac

SEQ ID NO: 261992 - DNA, 560 bp, Homo sapiens
aacttaaattatcaaataaatatccttcggtgcatactgatataaacacattattagctatataaacaaatgggaaaaaatagacaaataatgccctgaatagaaattttccaagtaatttatagagatagttcaacctcaattagaggatgcatatctccccattccttaagtgcaggctgtgcataatgacttcattccaaataacacattattaaaaggagggaagaataataattttacaatrgaggttcctgagtgacactacctcagctgagtgataaaagtcaccatcaacagataaatcatgctgtcagtatgtacttgtctaagtgtgttttgtgttgctataacagaataccacaggctgggtaatttatttttttaaaaaagtagtttatttggcgcatagttctgaaggctgggaagtcaaagagcatggtaccagcatctggtgagggcctttgtgctgtgtcattccatggcagaaaggagaaaagcaaaagcagattatggaaagagtgagagcaagagagggctgaacccactttcataacaac

SEQ ID NO: 261993 - DNA, 642 bp, Homo sapiens
aatttaaatttttataatatcctttttatttctctgaagtcatatttgaaaacgttttttgattattcttcttgccattctgccacatttactgaggtattcagataattttctattactgggactataaatgcaatttcctcaactattttgaagagataatattttcaatcagattgctatttcttgctttttctcaattttcataaaattcttattaccctggtaaggtggcaagaatttcaaacaggttttcaaatgtggcttcaattatttgtcacctatgtggttttgagtgaatttccaataaagtatattaattgtytgctttttaaatttatcatcaaatttcatttgattatattcattgcattaaaaaaatgaagatggaagtggattttaaaaggtatactaccttatagatgcacttcttaaatcagcttattgataatagtaggaaagctgcaatatttaaaaaataattgcttaaaatcatcttagaaagatcagggatgtagaatgatagagaaacacaaattgtaattttcagtgtgtgtatgtgtgtacattttaattacttgtacataattaaatttatcttttaagttttagaaagttatagcaaaatgtcatgacagtaat

SEQ ID NO: 261994 - DNA, 576 bp, Homo sapiens
attatcaaatggaaaggacaattctcttggactaaaaacctattaaagttatcrtttttacttagttctcaaatattttgtgggctgacttcttgggtatatcaatcatttcataaataaaatgcctaagagttaacttttccattacgattcaggttcctacattaatggatcatagtggttctgaaaagaggaaaacacagtaaacaaatatttgacattgtatttcagcaagtaaaacaatatggctccttccagttggtttcttttttatccgctttaaaatgtttgttccaaatgtgtgttgatattttgtctgagtggaacaaaattgatggtgtttgtaaactgtattaggtccttactatttcaaaaactggcagattagctaaatgagattataaaataaaatattcaaacaatattcttttcactacattgcttcatcactgtaattgatgtttatacaactccaggtactcactatgcacaaataaggcgatgaagacagctcttaccttcacaggtctctgtctcagtcctgaacacataccctggtgggcacgtacagctgta

SEQ ID NO: 261995 - DNA, 632 bp, Homo sapiens
atcttgatactttaaaaattaacattatattttaaggactagactaccatagcttttcccataatagtgtaatatgtgtacaaattgtgactgcatyacaattttctttctctctttctttctccactccccttccctcccttcccttccttttctcttttcttttttctgagatggagtctcggtctgtcaccacggctggagtgcagtggcgaggtctccgctcactgcagcctccgcatcccgggttccagcgattctcctgcttcagcctcctgggtgctgggattacaggcacgtgccaccatgcccagctaatttttgtattttttagtagaggggggtttcaccatgttggccaggctggtctcaaactcctaacctcaggtgatccacccacctcagcctcccaaagtactaggattacaggagtgagccactgcatccagcttgcatcacaattttttaacccatttttctaagctatggattgaattgtgtcccttaaaaaagatatgttgaaatcttaaaacccagtatctcagaatgtgactttatttggaaataggatttttatagaagtaatcaagttataatgaggttgttagggtaggttgtgagtcaacatgacc

SEQ ID NO: 261996 - DNA, 603 bp, Homo sapiens
aatactgtttatttttctaaccctatctgcaccattacttaatgttttatcataaaattgacttattcttctttttttaacttaaatgtcacattattcttttcttaagcaatgactgmctgaaatcaggagagtagtttgttagtgacatttttaacaatgcatatttaacagataaatatttatccaagatgaaaatgtgtatctacatatcacttaatatcatctagcttataaccactgctctaggagataatcttattattttataatactacattttcatattaaatatactcatattaatattagaattataaagctatacgattatgtcacgtgattattataaagttgagattaactagagttacctcttccatccacagtgatacctactccactactacaaaggccgtggaattcagctgtatgacaaaaagaaatagaagaattaaaaacttaactatacctattccatatacaagtcatttcataactccaaaactaccattaggaagaattatttgtgcattagtttttaaagtgaaaaaaattaccattttctagcaaacaattattataaaattctgaacttataaa

SEQ ID NO: 261997 - DNA, 552 bp, Homo sapiens
aataaaacctcattttactgagaataatctacattttaaaaatttgctcagtccattaatttcattctgatgaggcttactataaaatcaaatatatgagtatagtattgaaactattttaatgatctaatttagcttgataaataattacttttgatactacctaagcaaaaaatttaaatttacctatccattttcacttttccacagtaaacctgtaataaaggtagcttagagaaataaaagcttagataagcaacaacaacaaatatcttatttcagtgatttgtttcgatctcttcccataccaaaacttttgttttattttattttttaawatttatgcagttttctataagaagcaaactgttttaacttgggttttaatcctctctgcttcctgcaatgagcatattggtagagtttttctatgagcaataacatggccactaggatgggaccttttaatgaaggtgatgcacatggcataattcctgataatctaatatttaaatttgaaagaaaagatacagactagggtcacgattgtca

SEQ ID NO: 261998 - DNA, 500 bp, Homo sapiens
aactggttagaatcaaagagaaatgaagaaatggagatgasataactaactgcaaacattcctaatagcactggagcacctgttcatcattcaggtgaacagcaacatggatgtgatggaaaaataatctcaagtgatgggaggggataaagggagactctggtgaaagccctgtttaagactacccattttgcaatctaagcatgaatgattttggggggaatctagaaagctaccccctcaaagtccatcccttaaaaagtgtgtgatcttgggaaaattacttattgttaccttagctttgtgcttcattttcctcatctgttaaaatgggaataatacattctaccccttaggtctgatacgaagattaactcctaaaatctctaaagcattagcaaagattattctttctatatacatatatatgaaaacacacatcaaatataaatatcaaggtataaacattttagctactcttttgattgtatcaatttttc

SEQ ID NO: 261999 - DNA, 627 bp, Homo sapiens
tagtctcagaattaaaggagaccactaaatgtaggtgtcttaatcactgaatataaaagatgctgattatctaatatgtgaaaattcttagcctttatggcaggggaagaacgtagatacgataaataaattctcagtaacttggctacataagatgtaactataactgctattttatttctatatacaagagactggaattctgccataaagcctcatctgcttttataattagatctgacattcctatgcaggtttctctcctaacagggaatctaaattagattacaatttaataaaatgatcctgccatgaatataccattagacatgtgttaggaagaaaaattaccaggcaaaaataattaactgaataaattatatttaaacatatcacttacaagaatatttaaaaatatgtaacattttgcaagcaccagatatacctcatatttatattctataaatgtatrtcatgattaaaatttatagacttaaataaatatgttcctgtctgacacatactttgaactgattcaagcctcactcaactatgtgtgaattattgtgaacaggctacagaagcaactggaagttactaaaacacaaagtcttcatatatgaagac

SEQ ID NO: 262000 - DNA, 529 bp, Homo sapiens
ttctacttccaagtatatttttgtataggtaacattttaaagtaaagatgcaaccgtatggagaaaagagtagcctaactaacttttatttttaatttttgtaggctccaagaggacttggaaaattcatgatcctaataaaacaagttcttccctagaaacaactktcagccactttccagtagaagagagagagacacagcagtgttgctccctggcaggtatgtgtattatcctggggccttcttccctgcccagattcagacacaacaccataaagaggacattcgattacagatcaagagaaatcttatttccaataatagatggtgctattccttcctattgatatttattacatatttttcatgaagataagaatctaactttttaaaaaaagtaatagtttattctctttaaaattacatgatcatttgtcatttaaaaaatcaatataaatattttacagaatttaaaaaaaactattcatttaggtgtatatttttatttcttctacttatttgagatt

SEQ ID NO: 262001 - DNA, 590 bp, Homo sapiens
gagcattcattaatatctataaaagatacacagaagtaatgctttacacaatgtccactcactaaagccatcagaaaggtgcttcaccagagcagtggtctccaaaggggtttgtgtacttcacgaggaagtaaratgttctcctgggggattgaaagaaaatgctggattctctatttccatctacaacaatactgttgagtaaagctttctacaatgatgcaactgctcccaaatctatgcggtctaatacacagctgcatgtgctactgagtactggaaatatggacagtataactaaggaatatttaatgttatttaattttaactgaatttacatagccacatatggctagtgactatcatgttagaccacacagatttcacatatgccagaactgaagctaaatactacttaatatatgaacttacactggcacgctcacctggtctatattagatggtgaagtgttgcctacatgatttgaagtatactgatggaagactgatggttccacaagagagaggcatgacaatagggccctcatgtatttaattgtttacactgtgttatgttttgtgtgtcggga

SEQ ID NO: 262002 - DNA, 630 bp, Homo sapiens
gcaatgtagggagaccccatctctacaaaaaaaaaattattggggaggctgaggtgggaggattgcttgagcccaagaggtcaaggctgcacggagttacgatgtatgatggcaccactgtactccagcctgggtgacagagggacaacctgtctcaaaaaagaaaagaaaaagaaaaagaaagaaatgttaacagaaggatgaaccctgcaactgtggtatgggctgaatgaggcasgtggtaaatgaggcagccaggcccccatggaatgaaacctcatgtgtgactggaagacagtgctggtctactacactagcccatgccaccccaggtcgcagcatgtgaaggcagggcccctgtctctgtgcaggagggactggcaaaccccagagagacaggcagccacgacggaccaaccctgagccagagagcacacatagggcagggccatggtgtgtgccccaatttgtgtttttgtgtcatattcagatgtaaagagcttattgatttagtaagccctttggtgacatgagctgtcaccaacacctgaggactgtgtgggtgagtttgtttcctctttttatatattacagtaaataatcttcagcaactatattctcaaacacagg

SEQ ID NO: 262003 - DNA, 554 bp, Homo sapiens
tggtcacagccatatatccatgcaagttgaagacagagcgcagacccaagccaaagatgagggaaactggtctggattatatagaaccatcaaaccacagcagtataatgcaggaaatattaatcaaatgcattgttctattacatttaaccatattcaaccagaacaccatagtctttttaagcagtttgcagaatagttgaagattaatttatatttagaaagcttgaaaaatagattctaaatctttaaatattcatagtatccaactaattcatatataatctaatgtaattttaaattagtartcacatcatgaaatttcaaaatgtaatgacctggacctgtggaagagaaagttgcaggctaaccactgatgagagccactgacagtcctattatacattcatgacttgtcctgtgtatattttactatttgttattttctttttcaactagattctctttttaataaaaaagtacatgaaataatgtctaaactttaaaaatattagggaaatctcattttgagctgctctacactgggatattca

SEQ ID NO: 262004 - DNA, 573 bp, Homo sapiens
aagattaatttatatttagaaagcttgaaaaatagattctaaatctttaaatattcatagtatccaactaattcatatataatctaatgtaattttaaattagtagtcacatcatgaaatttcaaaatgtaatgacctggacctgtggaagagaaagttgcaggctaaccactgatgagagccactgacagtcctattatacattcatgacttgtcctgtgtatattttactatttgttattttctttttcaactagattctctttttaataaaaaagtacatgaaataatgtctaaactttaaaaatattagggaaatctcattttgagctgctctacactgggatattcaaatttaatcacaataaatgaaagcacacaatacactggctgagaaaaatatggtggtggttagttgytggcaattggaagaatgacataaagacttgggggtaaaaaagtctttgttcttgtttagttaataaatataagggcaaaaggccaaaataatggaagtctacatgatgaggcaaaaactatctttgatgctcaagtggcatgcagatttagttt

SEQ ID NO: 262005 - DNA, 583 bp, Homo sapiens
gattatattgctgcccaaggcatttttagggtaacggatatacatatgtgtgtggtatggaaatgattataagttatagcataatatatctacttatataaaaggaagatttctagaatctaacaaaaattgaataggctgcctaattaatgctattatgttttacctctrtattgatattgagtaaaaacaactaacataatgtgtaattctttgctttttggaatcatattctgtttttatccgtagtaaggcctgagatctgtgcttatcttggcagtgaaattgaagcatcagtattgtgtatgaatcttaccaatacagatcaatcctgtggagctgagtttgctgccgggcgaacattcacaattgaaagatccaaggttgtttctgcaggccccattgacacatgggttgctttcacattcatttatatctacaatccagaaggaaaagattctgttagaactgccatgtgtttctggaaaatattattccaacaagccatgcaatgccagaatgtctggtaaacttggctctggtaattttaatatggatctatgaagcataaagtgaatgggga

SEQ ID NO: 262006 - DNA, 562 bp, Homo sapiens
ccttcaatacatcatcacaactttacataaattggattwttttttcccacataataagatgcaattccaggtgcaacatcctgtgcacaaacaaaggttgattgctttgatgatttcatgaggctctgaaaaacttaaaaagtctatcttagatgcaaaatatcacaatgctgctttaattccaagctcttgggtatgaatcaggaaataaggactgaaacattcatggtgggtacataactctcctctagtccctatccaccttctctgtctttagctgttcacatttacatgtttagtttgcttagtttttttttaatacaactaattttggtaaaataaaaattagaaatacttgatcaagtagaaataattgctttaaatgggactctaccatttatttgatttgagtcctaaatgaaatcatataccataatctaaacaattcctgttgatggtcagaagtaagcagaactgcactatgcctatgttctcaaatggtgattacagaaaatgtcaagcctgtaatgtgaaatagtttaacacatgagttaatgaaaaa

SEQ ID NO: 262007 - DNA, 614 bp, Homo sapiens
tgtttctgcaggccccattgacacatgggttgctttcacattcatttatatctacaatccagaaggaaaagattctgttagaactgccatgtgtttctggaaaatattattccaacaagccatgcaatgccagaatgtctggtaaacttggctctggtaattttaatatggatctatgaagcataaagtgaatggggaatggagacatgcattttacatcgtggatacacatctataggactgggaactcagtaggaccacagtgatcagcctattgggaaagagttcagttacatgctccttcaatacatcatcacaactttacataaattggatttttttttcccacataataagatgcaattccaggtgcaacatcctgtgcacaaacaaaggttgattgctttgatgatttcatgaggctctgaaaaacttaaaaagtctatcttagatgcaaaatatcacaatgctgctttaattccaagctcktgggtatgaatcaggaaataaggactgaaacattcatggtgggtacataactctcctctagtccctatccaccttctctgtctttagctgttcacatttacatgtttagtttgcttagttttttt

SEQ ID NO: 262008 - DNA, 608 bp, Homo sapiens
ctgaggaaagcacataaacaaataactagaggactttaaactaaactaatcctgaaagagcaaggctcgcagcggaatatccaggtgctaatttaattcttgaaatagaaattgtttgaagaaatatgaatgtattttgcttttcagattgtttatactgagaaaacctcttaaaaatacaagaagagattttgtaaatatagcacagatttctaatgaaaacatcaatccgagtagagaaactttttcataaaaacacaatgtaaaaaagaaactagctaaccataaaagmagcagataacaaatctaagaacagaccacatataattctcctattaatttcatttgtaagaagcctgaaaaaagaagaatttcaatattgtgtgtttttaaaatttctattttaaattaagcaattatgaattcagaaactataaacatatgcgctgacaactacaaatatcaactatttagttttcctttaaataatatgttgttatgttataaatgtcatggaaccaggaattgaaacagttcactgtacattcctggaaataaacttcaaagcacatctggtttacatttaactagttatgtcactggaaaca

SEQ ID NO: 262009 - DNA, 422 bp, Homo sapiens
gcatttactatccacatttttaccaacattttaatcatgactacttargccatctctaagaaaactggggctttctctgcagttatcttcttctgaggcctcaccacaattgcccttaatgctccgttcatggcggtgtaggctttttctagcatgtatgccaaattcttccagactctccccattatccagttccgaacctgcctccacatttttagttatttgttacaacagcaccccacttctcagcaccaattttcatctcagtccattcaagctactataacaaaataccttaggctgggtaattaaacaacagaagtttattgttcacagttcgggagcagagtctgagaagtccaagatcaaggcaccagcagatctggtgtctggtaagggcttgcttctcagaaatggcacct

SEQ ID NO: 262010 - DNA, 534 bp, Homo sapiens
ctgttgaagcctaaaatattaactatctaatactttacagagaaagtttgccaatccctgtcctacagcatggaacttaggaagagcacctgacattctttcttaagatttggrcatcaaagtcataaaatcacctgtggcgattgtaaaaatgaagattgctgggttccaatgttatagtctctattgaatagaaatctttggagccttgcagagtatggagtctgcatttttaactaatgccccaggtggtttttctgcacatcatgaaatgagaatctctgttttgtgcagggaaaggacactggactgctggattcctagagctcagtctaggcagactacgtggttcaatatgaaaggtctttcatgcattatttgagatttctggagtattctctctgtattctctttctatgaccccttctcagttacagagctcctacaaagtcttgctgttgaaataggttcttatttgtcatattgtttaaaatggtggtctccaaagtagagtatacacacagtttagttcac

SEQ ID NO: 262011 - DNA, 574 bp, Homo sapiens
ccccaacagtgtagaagtgttccttttcctctacaaccttgctagcatctgttattttttgactttttaataataaccattttgattggtgtgagatggcatctcattgtgcttttgatttgcatttctctaatgatcagtgatattgagctttctttcatatgactgttggccacatgtatgtcttcttttgaagtgttcatatcctttatccactttttaataggatttttttttcttgtgaatttgtttaatagatagcattccttttttggatgcataatttgcaaaaattttctcacattctgtagattgtctgtttgctctgatgatagtttcttttactatgcagaaactcttcagtttaattagatcccatttgtcaatttttgcttttgttgcaattgcttttgacattgtcaacaaagatttttgttatgaaatytctgcctgtgcctgtgtcctgaatggttgtctttcagggtttttatagttttgagttttacagttaagtttttaattcatcttgagttaattttttatatggtataatgaaggggtccagtatcaatct

SEQ ID NO: 262012 - DNA, 535 bp, Homo sapiens
atgaaaaataggtggagggagtttggcccttgcattttgcaaaaggcaaatgtgtactttttagttttaaggacctcaagaaaagctgtctaatcttggagactatgtttcatgaatgaacaagtggtttctttcagctattctgttaagaacaatttttcaaatgatcgaataaatttgctgagtgaatgcatgtgcattttgctgttgtcagaaagatgtgaaatacagcagcagtgggtgggcctggctctcagttgaactgtcatgtagatgaggtttgccttcagggccctcacacattcccttctgttaccaatctcctgtttcctgggcttcatcctccacctgtcctggctcccagmtacctaggattctcaggccactcagcagtctgggctcctttttgctctgctctgcctgcaaaggtcttctcgccctaggcagtgcataatgccctcgtttggccctcccagccagtcatctaagctaaacaaagcagattcctaatctacttggatcccagctagctgcc

SEQ ID NO: 262013 - DNA, 563 bp, Homo sapiens
attcagcagcggcacataatatggtagtgatttaacaggtcaggtatgctctagtgtaatttgtctgaataagtatttctgaactgtttgaacctgattccatttttgctgggtctcctatgggttcaagtgggaagaggmgagagagaggccaggggaggcactgatccctgtcctgcctcagtttcctcgggtggccacacctctatcttgaaggtcagagaggcttactctgtcgtagtgctgcagacggaaattcacctatttctgtctctatggtgtgcagttttatgaagcattccctgcagaggtggaggcaagaactgccatgccctccttgttaaagagtagaacagcaacacacaagcttattcaagtctctcatcaaaggagattacaaatcatgcatgtaaagtaattgtgtataaattatttaagacgtttatagcaaattggatatactaatctctcagtcaatgcatttctagatctctttattatcaatgtagattcattatcaaaatgaataaaaatcatatggtgttgtaatgaaattgatgtga

SEQ ID NO: 262014 - DNA, 491 bp, Homo sapiens
aaacagacaactcacagaatggaagaaaacatttgcaaactatgcatctgacaaaggactaatatccagactctacaaagaactccaacaaatcaacaagaaaaaaacaaataacctcataaaaaagtggacaaatggcatgaacagatatttctcaaaagaagatatacaaatggacaacaaacataaaaaaatgctcaacatcactaatcatcagagaaatgcaaattaaaaccacagtgagmtaccaccttattctggcaagaatggccatcattaaaaagtcaaaaaacaatagatgttgggatggatgcggtgaaaagagaacacttatacactgccggtgggaatgtaaattggtaaaaccactatggaaaacaatatagagattccttaaagaactaaaagcaatctaccattcaacccagcaatcccactactagacatctacccaaaggaaaaaaaatcattctattaaaaagacacctgca

SEQ ID NO: 262015 - DNA, 468 bp, Homo sapiens
catcaggaatgaacagtctattcttgtttacatttccagcaccctaaaggagaaagtagagaaaaatatgaatgaagattatggactaccatataatatttaaacaaaacagtatcagcaataatttcacaaacataaaaccaagatgtaaatactggcaacttttacatgttatatataatatgtcacatagcccaaggagaatagattttttttttttttttttttttaggaaragcagggtacatggtatgtatcaaggagaatttcagaaagcccaccaactgcaatctattgctttaaggtcatcaaatagatctatctcccagctgtgtgtagtacatggtggtgaatatccgttgggtttgtgtacccaacaactactttccatacttctgacaacagtaatcccttcctttgggaaaactttctcacattaaactccagagctcaccaattagagttttc

SEQ ID NO: 262016 - DNA, 378 bp, Homo sapiens
acttgaaatatgagtagtccaaactcagatgtactatgggtataaaattcacactggatttcaaagactgggtacagaaaaaaatataaaatatcttgttaataatgtttatactrtttattgattacatgatagtattttggactttttgggttaaataaaatatattattaaaattaatttcacccatttctttttatgttttcaaattactgctgtggtttgaatatttttttcttctccaaagctcatgttgaaaattaatccctaatagtgctgggagatagggcctaatggacaatgtttaggttatgatggctccaccctcatgaatggatgaatgctactataaaaagggcttgtgggaatgggttggta

SEQ ID NO: 262017 - DNA, 588 bp, Homo sapiens
gctgtaaaacctaaatatcccaaccaatgtgtggcgcggttctcccacctttctttttttgatctctttgctctttcagcrcatcaactcggacattgcgggacgtaaggaatctgggaaactcaggttgcaggggcggggatgagagggacagctaacaggatgagctctgtctttaacggcgcttctcgcgcacacccgcacgtgggtgccagacacaggcccagacctgcagccctggagaccagccgttagggcaacgcttcccacagcgcctgcaccgcacgaggtcccgccccaaacccgccctgtgtatctgtgtcctacatgcatatgcaaaaataaatgctgttctagaaatgcggatatcgctgaaagcacactcactcattttccagtgtgcttctccagccccaggagctgaagtgctgaggaaatattcaatgcatgactttggagtcaagaaattaaaaaaaataatgacggtttcaaactggagtgaaagagacaaaaatttttaacatttattgcatactggatatcattctaaatgcgtttcacatatgaatgcataaaatcacaaaagat

SEQ ID NO: 262018 - DNA, 588 bp, Homo sapiens
gctgtaaaacctaaatatcccaaccaatgtgtggcgcggttctcccacctttctttttttgatctctttgctctttcagcgcatcaactcggacattgcgggacgtaaggaatctgggaaactcaggttgcaggggcggggatgagagggacagctaacaggatgagctctgtctttaacggcgcttctcgcgcacacccgcacgtgggtgccagacacaggcccagacctgcagccctggagaccagccgttagggcaacgcttcccacagcgcctgcaccgcacgaggtcccgccccaarcccgccctgtgtatctgtgtcctacatgcatatgcaaaaataaatgctgttctagaaatgcggatatcgctgaaagcacactcactcattttccagtgtgcttctccagccccaggagctgaagtgctgaggaaatattcaatgcatgactttggagtcaagaaattaaaaaaaataatgacggtttcaaactggagtgaaagagacaaaaatttttaacatttattgcatactggatatcattctaaatgcgtttcacatatgaatgcataaaatcacaaaagat

SEQ ID NO: 262019 - DNA, 581 bp, Homo sapiens
cacttgtcttggcttcttcagctgacttgagtggggactctgattgttggctgctgtagtatcatccgtgcctagagatacagggctcttgctgtaaataggatggcataaccataaaccatggggtgagtaccttcttatacatttttgtttagtatggagaagtgtggaggaacacaaagaaaactgcattcttccttgggcttttatgatatgaccagcattttcttacatattttctatagatcctttctcctaaccacctttaaatttaaacatacttttggggaacttgtggttgctggtagagttagtgtaaaaaatatcctatgagtcttataggtcccaaaaggacttacacgtaatactcartttaagaactctacaatgatattcttagcagtaagctggtaactaacatagtaataataatactacaaaacaagttaatcataatgtaatgttaaccaaaagaacttgtaagaaaaactttgactctattatttgtgactcactacatttttcctggagaaattattttatccgtgatcctacagattttcaaaataagggctagataa

SEQ ID NO: 262020 - DNA, 507 bp, Homo sapiens
tttctattgtttataagccacccagtttattttgttatagcagcctgcacatactaagacacccagaaaacctccaaaaattttaaaccacttaaataatatgattatttaaacaaagaaaagcatgagcaaaaagtctgaaaattttattcattcacttattaggcaaacatttaataaaaatctgatatatactagctattgcagtaaggatacagagttaaaagagtcatagattccacctgatatggttcagctgtgtccccacccgaatctcatcttgaattgcaattctcatagtccccatgtgtcaggggaggaacccagtggaaggtaattgaatcatggaagtgcttacccccatacttctgttttcatgatagtgaatgagttctcacaagatctgaatggttttaaagggactttaccccgctttacttggctcttcctcctgcygccatgtgaataaggacaagtttgcttccccttctgccatgattgtaagtt

SEQ ID NO: 262021 - DNA, 510 bp, Homo sapiens
agggagacaaggatgtcagattgaagggtgcttaatggagtctttcagggatttcctcctggaaggtcaaagaacactytacatctgtggcagcccaacctacctacacacaggctctgaatgaataatagatgttttatatgcagcctccttgaccttgaatttattatttccattctataggtaaagaataaatggctcatggaacttcaatgacttggaacactgtattctgaatttatcaaggtctctaaatcctgatctttttccacctaacctcattaaaatgttgattaatgataagaggtagcagatgctaaaaggaatcatcatagggagtgtcaagtgaagactgaattctaataccagccctgccactgtccagctagttgggtcaccttcgggcagtcactcagtttgttacaggctttagttttattatttatattaggttgaagtctatcaagttgctgtttttgcaggttacaaaaggttcgcagttccaacaat

SEQ ID NO: 262022 - DNA, 510 bp, Homo sapiens
agggagacaaggatgtcagattgaagggtgcttaatggagtctttcagggatttcctcctggaaggtcaaagaacactctacatmtgtggcagcccaacctacctacacacaggctctgaatgaataatagatgttttatatgcagcctccttgaccttgaatttattatttccattctataggtaaagaataaatggctcatggaacttcaatgacttggaacactgtattctgaatttatcaaggtctctaaatcctgatctttttccacctaacctcattaaaatgttgattaatgataagaggtagcagatgctaaaaggaatcatcatagggagtgtcaagtgaagactgaattctaataccagccctgccactgtccagctagttgggtcaccttcgggcagtcactcagtttgttacaggctttagttttattatttatattaggttgaagtctatcaagttgctgtttttgcaggttacaaaaggttcgcagttccaacaat

SEQ ID NO: 262023 - DNA, 510 bp, Homo sapiens
agggagacaaggatgtcagattgaagggtgcttaatggagtctttcagggatttcctcctggaaggtcaaagaacactctacatctgtggcagcccaacctacctacacacaggctctgaatgaataatagatgttttatatgcagcctccttgaccttgaatttattatttccattctataggtaaagaataaatggctcatggaacttcaatgacttggaacactgtattctgaatttatcaaggtctctaaatcctgatctttttccacctaacctcattaaaatgttgattaatgataagaggtagcagatgytaaaaggaatcatcatagggagtgtcaagtgaagactgaattctaataccagccctgccactgtccagctagttgggtcaccttcgggcagtcactcagtttgttacaggctttagttttattatttatattaggttgaagtctatcaagttgctgtttttgcaggttacaaaaggttcgcagttccaacaat

SEQ ID NO: 262024 - DNA, 226 bp, Homo sapiens
ggtgaaataattcttggcaaagtgtaaggtaaaggttgcctcttggaagcacgtgggctgagcttgatgtggatggttttgttgagtttgcacagtggttactttttattttttattaaagactgaaatggttgtaaatatttgaaaattaagagatattatgtttgaaagtgtgactttttttttttttttttcatttcccygggccctgacattctggcatggc

SEQ ID NO: 262025 - DNA, 551 bp, Homo sapiens
tatagggcagcaacaataagaataaccgctaacttttgattaaaagtaatataattcacaatacaatgtaacaacaattttaagtgctaaaaggaaaataaactgtcagattaatccatggttctatatccagttaaaatatttttcaaaaatgaaaatraaataaagatatttctattaacgaaaagctaagaaaacttgtttccagcagacccacactacaagtaatgctgaaagaatccttcaagttgaagggaaatgatgtcacacagaaattctgaactatagataagaataaaaagcactgactagacatatttatataaattaatagaaaagattatctttatttctaaaagttttaaaataaataatgaattgtttaataataaacattaacaatgcattatgcagtttacaatatatataagaaaaatatatgacaaaaatagaacaaagtcttgcaagataaattatactattgtaagatgagtgtattatatgctaaaatatacactattaattcaatttatactgtaacaaattaataa

SEQ ID NO: 262026 - DNA, 524 bp, Homo sapiens
tacacgcaattctaccttcttagatttgtccacatgcacatatttatgaaaatatttctagctcttcttgtccctaatggcaggcctttccaaaatcttagaaaagaccagaaatttggagttaaagaaatcttaatgacaatgtaaatcaacccaacaagaatctgagggttgtcaartttaaacagcttctaaattataatatttactacgtgtcacaattaagactaaatcttataagttgcatgtttgtgtgtatacatgtatataatttattaaatttttctgcactattttatttttctaaaactgcttcctctcaattcaggatcaaaccctcgttttaacctttaaaaatatatcttcccaatttcatgcaattttacagcacctgtaaattaatatgttgtctatcattttctatgattcccagcttctataaaactataaagaaaccatgtaaatttcttcccattagaagctacttagcctttcccaatcctggtccgtggtgaatacgacag

SEQ ID NO: 262027 - DNA, 524 bp, Homo sapiens
tacacgcaattctaccttcttagatttgtccacatgcacatatttatgaaaatatttctagctcttcttgtccctaatggcaggcctttccaaaatcttagaaaagaccagaaatttggagttaaagaaatcttaatgacaatgtaaatcaacccaacaagaatctgagggttgtcaaatttaaacarcttctaaattataatatttactacgtgtcacaattaagactaaatcttataagttgcatgtttgtgtgtatacatgtatataatttattaaatttttctgcactattttatttttctaaaactgcttcctctcaattcaggatcaaaccctcgttttaacctttaaaaatatatcttcccaatttcatgcaattttacagcacctgtaaattaatatgttgtctatcattttctatgattcccagcttctataaaactataaagaaaccatgtaaatttcttcccattagaagctacttagcctttcccaatcctggtccgtggtgaatacgacag

SEQ ID NO: 262028 - DNA, 524 bp, Homo sapiens
tacacgcaattctaccttcttagatttgtccacatgcacatatttatgaaaatatttctagctcttcttgtccctaatggcaggcctttccaaaatcttagaaaagaccagaaatttggagttaaagaaatcttaatgacaatgtaaatcaacccaacaagaatctgagggttgtcaaatttaaacagcttctaaattataatatttactacgtgtcacaattaagactaaatcttataagttgcatgtttgtgtgtatacatgtatataatttattaaattttkctgcactattttatttttctaaaactgcttcctctcaattcaggatcaaaccctcgttttaacctttaaaaatatatcttcccaatttcatgcaattttacagcacctgtaaattaatatgttgtctatcattttctatgattcccagcttctataaaactataaagaaaccatgtaaatttcttcccattagaagctacttagcctttcccaatcctggtccgtggtgaatacgacag

SEQ ID NO: 262029 - DNA, 524 bp, Homo sapiens
tacacgcaattctaccttcttagatttgtccacatgcacatatttatgaaaatatttctagctcttcttgtccctaatggcaggcctttccaaaatcttagaaaagaccagaaatttggagttaaagaaatcttaatgacaatgtaaatcaacccaacaagaatctgagggttgtcaaatttaaacagcttctaaattataatatttactacgtgtcacaattaagactaaatcttataagttgcatgtttgtgtgtatacatgtatataatttattaaatttttctgcactattttatttttctaaaactgcttcctctcaattcaggatcaaaccctcgttttaacctttaaaaatatatcttcccaatttcatgcaattttacagcacctgtaaattaatatgttgyctatcattttctatgattcccagcttctataaaactataaagaaaccatgtaaatttcttcccattagaagctacttagcctttcccaatcctggtccgtggtgaatacgacag

SEQ ID NO: 262030 - DNA, 468 bp, Homo sapiens
tcacatccttagacaaaaaacatttgctagctgaacttgaatttcctgatgttagttattaactgtagtgtgaaaagtgatgttaaatgagggatgcctgaggatgccatatgactaacctgagaagaaataacaggcaaaaaggaaccagcaagggaactgaatggggcggaatgagcatgacctatggaaccagaaaagagaaatgtcmaaagaagagaaaataataggcttctgataaaggaggctgcttttgattggcccacacacagaaagaagaattagatcaaaattttggcaatttcacagagcaaatgtattcctgttttaaaagctacaagcatgacatttgtgatattaggcacttgtattcttttttttttttttttttttttcatttttggcctgatctaatttatgtgcctggtgctgtcagtgagtcaaacaatatgcaaaccattacagtct

SEQ ID NO: 262031 - DNA, 517 bp, Homo sapiens
ggacagtaaatgccattctagtgaacttccagatggaaatggggaacacattgttggaaatttgagaaaagggtatccttgttataaagtagaaaagaccttggctaaattgtgtttatgttccagtgttttacagaatgtagaatttgggagcagtgaaatagaatacatagctaaagagatttctaagaaaattgttgaaggagcatattggcttctctttatagtaaaatgtgagacacaaaaattacttaaaatgaaattgtttagcaagaataaaacmaagtttaaagatctgaaaaattttcaggctattcatattgcaaaaatgagaaagtatttgagagtgaatactaaagatgtggctaaatgtcttttgataaaggggttagtaggggtgtgaaccatagacttaatatgacagcccaggaggaaagctgccagtttgaagtgaagaagaaggatatgggaaggaatgaaagaaggctggtggatttcttggattttataggccagc

SEQ ID NO: 262032 - DNA, 620 bp, Homo sapiens
ttgaagtaacacaaaatggatcctagatataaatgtaaaattacaaattttatttttttccaactgtataggaggctttttcagaggacaaaaggactttgtcttcccagaaaacaaatcctatcctttgctttatgatgcagataaaaatattacaaaatttctcgaagaaaatgctgaagaatatcttaatgaccttgggtttggcaatgagttttagaaaaaactcaaaatgccaaaagtatcttgggtctgacgatgaattttagatacaacactaaaagtatgattcattaaaaaaatgataacatggattctgttaaaattgaaaacttatttttttgtgtaaaacagtgttaagagaatggaaagataaggcagactggaagaaaatatttgtaacacatatctgataaggacttttatctaaaatataaaaagaacattgaaaactctacaataagaatacaaaaatatcatcaaaagttcygcaaagatatctaaccaaagaagatatacatatgagaaataagcataaaaatggccaaaattttttgcagttagtgaattgcaaattaaaacaagatgctatgacatacctattatatctgaatggtgaa

SEQ ID NO: 262033 - DNA, 612 bp, Homo sapiens
ataatgtccacaggaaaacttacgtattaatgtttatagaatctttattcttaatctccaaaaattggtggaaaaaacctagatttttaatagatgaatagataaacagattgtgatagattcctataattgaacattactcagtaattaaatgaaattagctaccaagtcacccaaagacaaaaggaaatttaaattcaaaaatgctaagggagagcatcttttctgaaaaggctacatattgaatgatttaagttatatgacattctgcaataggcaaaactttgcatrtagtaaaagatgagtggtttccagtggtttgaaaagacaagaaggatgaacaggtgaagcaaaggagacattttgggcagtgacaccattttgtataatactgcaatggtagatacatgacattatgcacttaccaaacccacagaactttatataaaggcttattatgaatgaaccttaatgtatacaaattaaaagaaaaaaacatttagtaggtaggagctggaaagatggcttcaggaaagaattcaggctgtaacaagataatctaactgtattataaatgtatgaaacaacctcagtgaagagagtgggaggaaa

SEQ ID NO: 262034 - DNA, 518 bp, Homo sapiens
tagaatttctatagttgttttcttactctggctccatagactttgctgtgtctattaaattatgggtcccttggccttattgagctttgttaggtgagacayagctttaacgtgaggcattttgtccaattaaaaggatttactgggaactgaacccttggcggagtccttaatcttccttatataatcattcagaagtttaaaaatagatgaacagccattcacttgatatgagatctatcctgttaacaaattgttaaatgcacagtatattattgttaactataaggacaatattatactgcagctctctagaattttgtttttcatttgaaataactgaaacattacactctttgaacagcacttatatcaatgtttccctcccctcagtcactggtaacccccattctactttgtgctgttattagtttactttagatcctcacgtaagtggaatgatgatgtatttgtctttgtaacaaatgatattagccagttacacacaaaggtgtatc

SEQ ID NO: 262035 - DNA, 502 bp, Homo sapiens
atgtaaagtctaggctttttaatatgcccccattttaattatcttgcatagtatgttttaaaacttacttttttcctactctgctctatttgttaagatcatttattcatgttaagaaaaggctgtctatagctgggtgtgatggctcacgtctgtaatcctaacactttgggaggccaaggcaggcagatcacctgagatcaggagttcaagaccagcctagctaacatggtgaaacctcgtctctactaaaacacaaaaattagccgggcatgatrgtgggtgcctgtattcccagctactcaggaggctgagactagagaatcgcttgaacctgggagacagtggttgcagagatgagattgcgccactgcacttcagccagggcagctgagtgagactccatctaaaaaaataatagaaaagaaagaagttaaaaaaggccatctatagcaagcaaaataatgagcttgtacttatgaagacaaataactaaaagaaa

SEQ ID NO: 262036 - DNA, 515 bp, Homo sapiens
attatagggcagtagccctcaggtttttgtgatcaagaatttctaggccaggcatggtggctcacgcctgtaatcctagcactttgggaagctgaagtggacagatcacttgtgctcaggaattcaagaccagcctggccaacgtggtgaaacccatctctaccaaaaaatacaaaagttagctgggaatgktggcacgcacctgtagtcccagatacttgggaggttgaatcacaataatcacttgaacccaagaggcagacgttgcagtgagccaagatcctgccactacactccagcctgggcgacagaatgagacctgtctcaaaaaaaaaaaaaaattccttggtaacaataaataccctagactcctctttctgaatttactgtatactgcatagggcttgatatagtctttaataattgataggtactgttgtaatggactggtagttgagaatgatatttgaataacagaaaatcatatgaaaaagggcatgaagtcaggcaaggac

SEQ ID NO: 262037 - DNA, 515 bp, Homo sapiens
attatagggcagtagccctcaggtttttgtgatcaagaatttctaggccaggcatggtggctcacgcctgtaatcctagcactttgggaagctgaagtggacagatcacttgtgctcaggaattcaagaccagcctggccaacgtggtgaaacccatctctaccaaaaaatacaaaagttagctgggaatgttggcacgcacctgtagwcccagatacttgggaggttgaatcacaataatcacttgaacccaagaggcagacgttgcagtgagccaagatcctgccactacactccagcctgggcgacagaatgagacctgtctcaaaaaaaaaaaaaaattccttggtaacaataaataccctagactcctctttctgaatttactgtatactgcatagggcttgatatagtctttaataattgataggtactgttgtaatggactggtagttgagaatgatatttgaataacagaaaatcatatgaaaaagggcatgaagtcaggcaaggac

SEQ ID NO: 262038 - DNA, 587 bp, Homo sapiens
ataacatatatatgggaatatttttaaacatatttctagaaattatgtaataatactacagtaacctgctttggtagaaaaaaatacaaatacattttagagytggctgattgtctggggaaaactcccttagacaacttttaagactgaattcccagttttataaaagcagtatattttatataatgtcttttgacccaggaagtgaattactgttgctcttttgcctggattacactttgttatatgcattatttgttgtctcccctgttatacagcttccggtgtatatgctttattttttatatgactttccaaagatgttcttttactaaatatgaggaaaaagcttattacactttggaaactgtgttaataatatataaagtatgtcgactgcagcatattccaatataaattctgttagataaatgtttctttcaacatcgaatacattaatgaacatgttaaatctttcatattcaaatttaaataataattattagttactactatttccactgtaaattgaattagtgtttggagtagaaattaaaatgaagtcatctatgctcttcagaattgta

SEQ ID NO: 262039 - DNA, 579 bp, Homo sapiens
cttgtggctttcatctatctagtcatcattacattaagacatatttgcctacaataatagaaagcaattatagctcacagatgtatacattcagagtgtcgacctgagtgggagccacaaatacgtgaagaaacctcttttaccaggtaargtgatcaccttaatcctgacatccaatatgcatctgtggcatttttactattcatatattgtttcatttataatattgaaaataaagaaagcatttcttattcaattattaataaagatgcccttatttttgacaattttgactcaagtgatttaaacaaaagttatgagaagaccaggagtccatttcaaattaatataataatcacatacatgaacacataaatatgtgaataattgaaagccaccacaatcaactgatacaattttaagtttagttttatttttacgacaatattccatatgcaaatatgaggactataaaaagagcttgagtaggtatcagctttgcaaaagtaaaataagaagcaaatgttgcaagttttgtcactgagcatgtaaacattttactcaaatactactaaaatg

SEQ ID NO: 262040 - DNA, 579 bp, Homo sapiens
cttgtggctttcatctatctagtcatcattacattaagacatatttgcctacaataatagaaagcaattatagctcacagatgtatacattcagagtgtcgacctgagtgggagccacaaatacgtgaagaaacctcttttaccaggtaaagtgatcaccttaatcctgacatccaatatgcatctgtggcatttttactattcatatattgtttcatttataatattgaaaataaagaaagcatttcttattcaattattaataaagatgcccttatttttgacaattttgactcaagtgatttaaacaaaagttatgagaagaccaggartccatttcaaattaatataataatcacatacatgaacacataaatatgtgaataattgaaagccaccacaatcaactgatacaattttaagtttagttttatttttacgacaatattccatatgcaaatatgaggactataaaaagagcttgagtaggtatcagctttgcaaaagtaaaataagaagcaaatgttgcaagttttgtcactgagcatgtaaacattttactcaaatactactaaaatg

SEQ ID NO: 262041 - DNA, 510 bp, Homo sapiens
tggtgtgtatatgccatggaatactacgcacctataagaaagaactagattgtgtccttcacaggaacacaaatggagctggtggccattatcctgtgaactaacacaggaacagaaaaccaaatactgcatgttcttacttataaktgggagctaaacatggagtacacatagacacaaagaggggaacaatagacaccggggcctacttgaggggggagggtagaaggagggtgaggattgaaaactgcctattgggtactgtgcttatcacctgagcaatgaaatagtctatacataaaacccctgtgacactcaatttatatactcaattatataacaaacccgtacatgtaaccctgaatctaaaagtcaaaaataactaaatcaaatggtattgttttaagctgctaagtttgtggttatttattatgtagcacaggaaatgaaaacagaagctccatgaccaagagtaaccagggccagcactgtcccacaagcttctgtagc

SEQ ID NO: 262042 - DNA, 510 bp, Homo sapiens
tggtgtgtatatgccatggaatactacgcacctataagaaagaactagattgtgtccttcacaggaacacaaatggagctggtggccattatcctgtgaactaacacaggaacagaaaaccaaatactgcatgttcttacttataagtgggagctaaacatggagtacacatagacacaaagaggggaacaatagacaccggggcctacttgaggggggagggtagaaggagggtgaggattgaaaactgcctattgggtactgtgcttatcacctgagcaatgaaatagtctatacataaaacccctgtgacactcaatttatatactcaattatataacaaacccgtacatgtaaccctgaatctaaaagtcaaaaataactaaatcaawtggtattgttttaagctgctaagtttgtggttatttattatgtagcacaggaaatgaaaacagaagctccatgaccaagagtaaccagggccagcactgtcccacaagcttctgtagc

SEQ ID NO: 262043 - DNA, 656 bp, Homo sapiens
tttggagtggggtactgctataaagagaactgaaaatgtggaaatgacttgggaatttgcaactgggtatgggcagaggttggaatagtttggagggctcagaagaagacaggaggatgtaggaaagtttggaactttgtaragacttgttgaatggttttgaccaaaatggttttagtgatatgggcaatgaaatccaggccgaggtggtcttagatggagttgaggaacttatggggaactggagtaaaggttactcttgctgtgctttagcaaagagactggcaacattttgcccctgccctagagatctgtgaaactttgaacttgagagagatgatttagggtatgtgacagaagaagtttctcagcagcaaagcattcaagatgtgatctggctgtttctaaaagcatatagtcatatgcattcacaaggagataatcagaaattggaacttatgtttaaaagggaagcagagcacaaaagtttgggaaatttgcagcctaatcatgtggtagaacagaaaaacccattttctggggagaactgtaaacttttggctgcagaaatttgcgtaactaaaatgaaactgaatgttaatagccaagataatggggaaaaagtctccagggcatttcagagatcttcacagcaa

SEQ ID NO: 262044 - DNA, 656 bp, Homo sapiens
tttggagtggggtactgctataaagagaactgaaaatgtggaaatgacttgggaatttgcaactgggtatgggcagaggttggaatagtttggagggctcagaagaagacaggaggatgtaggaaagtttggaactttgtagagacttgttgaatggttttgaccaaaatggttttagtgatatgggcaatgaaatccaggcygaggtggtcttagatggagttgaggaacttatggggaactggagtaaaggttactcttgctgtgctttagcaaagagactggcaacattttgcccctgccctagagatctgtgaaactttgaacttgagagagatgatttagggtatgtgacagaagaagtttctcagcagcaaagcattcaagatgtgatctggctgtttctaaaagcatatagtcatatgcattcacaaggagataatcagaaattggaacttatgtttaaaagggaagcagagcacaaaagtttgggaaatttgcagcctaatcatgtggtagaacagaaaaacccattttctggggagaactgtaaacttttggctgcagaaatttgcgtaactaaaatgaaactgaatgttaatagccaagataatggggaaaaagtctccagggcatttcagagatcttcacagcaa

SEQ ID NO: 262045 - DNA, 604 bp, Homo sapiens
tgccctggatgtgaggcatggagtcacaggagattatttcagacctttaagatttaatggctgtcctgatgggtttcagatttgcatgaggactgtagtccctttgtgttggcaaatttctcccatttggaatgggaacatttacccaatgcctgtatctccattatgtcttggaagtaactaacttgcttttgattttacaggctcctaggtggaagggacttgccttatctcagatgagactgtggacttttgggttaatcctggaatgaattaagactttggaggactgttgggaaggcatgattgtgttttgaaatrtgagaaggacatgaaatttggaggcacgggcagaatgatatggtttggttctgtgtctccacccaaatctcatcttgaattgtaatgcccagggagggccctggtgggaggtgactggatcatgcgggtgggtttccccatgttgttcttgtgatagtgaaggatttctcttaagatctgatcgtttaaaagtgtgtggcagttcttctctctttctctctctctcctgatgccatgtaagacatgccttgtttaccttttgccttctgccatgattgtaagt

SEQ ID NO: 262046 - DNA, 604 bp, Homo sapiens
tgccctggatgtgaggcatggagtcacaggagattatttcagacctttaagatttaatggctgtcctgatgggtttcagatttgcatgaggactgtagtccctttgtgttggcaaatttctcccatttggaatgggaacatttacccaatgcctgtatctccattatgtcttggaagtaactaacttgcttttgattttacaggctcctaggtggaagggacttgccttatctcagatgagactgtggacttttgggttaatcctggaatgaattaagactttggaggactgttgggaaggcatgattgtgttttgaaatgtgagaaggacatgaaatttggaggcacgggcagaatgatatggtttggttctgtgtctccacccaaatctcatcttgaattgtaatgcccagggagggccctggtgggaggtgactggatcatgmgggtgggtttccccatgttgttcttgtgatagtgaaggatttctcttaagatctgatcgtttaaaagtgtgtggcagttcttctctctttctctctctctcctgatgccatgtaagacatgccttgtttaccttttgccttctgccatgattgtaagt

SEQ ID NO: 262047 - DNA, 591 bp, Homo sapiens
ttttttttttttttttttgagacagagttttgctcttgtcacctaggctggagtgcaatgggacatctcgactcactgcagcctccacctcccaggttcaagtgattctcctgcctcagcctcccaagtagctgggattacaggcatgtgccaccatgcccagctaattctttgtatttttagtagagatggggtttcaccacattggccaggctgcactcctgacctcaggtgatcctcccgccttggcctcccaaagtgctaggattacaggcgtgagccaccgtacccagcccaacatccacttytttagctcatgattcaaggtgttgtcagtttgagctggctcacctgggcagcctctccctgctgggcccgctcatggctcttcagttcaactatagcgaggtgaacaaagttaaccttgtctgactttctcattttggggaccttggatgagagagttgagctccactccacatgttcgctcatcctccagttacctagccttggccagtttatggggcattttgcaaggtcccaagaaaatgaatgggaacaggcaagtcctcttgagattaaaattcaaaa

SEQ ID NO: 262048 - DNA, 591 bp, Homo sapiens
ttttttttttttttttttgagacagagttttgctcttgtcacctaggctggagtgcaatgggacatctcgactcactgcagcctccacctcccaggttcaagtgattctcctgcctcagcctcccaagtagctgggattacaggcatgtgccaccatgcccagctaattctttgtatttttagtagagatggggtttcaccacattggccaggctgcactcctgacctcaggtgatcctcccgccttggcctcccaaagtgctaggattacaggcgtgagccaccgtacccagcccaacatccacttctttagctcatgattcaaggtgttgtcagtttgagctggctcacctgggcagcctctccctgctgggcccgctcatggctcttcagttcaactatagcgaggtgaacaaagttaaccttgtctgactttctcattttggggaccttggatgagagagttgagctccactccacatgttcgctcatcctccagttacctarccttggccagtttatggggcattttgcaaggtcccaagaaaatgaatgggaacaggcaagtcctcttgagattaaaattcaaaa

SEQ ID NO: 262049 - DNA, 509 bp, Homo sapiens
aacaaacaacagaagatattaataaaagtgtgatttggtttcttagaacataaaattgacaaatctttagctagactgactaaaaaaagagacaatactcaaataaacataattataaatgaacggggagacattaaaaatgatttcacagaaagacaaaggattatgggcaatactatgaacaattatatgccaacaatttggataacctaggaaaaatagaaaaaatkttaaacacatacaatctaccaagactaaatcatgaagaaatacaaatctgaacagaccaattgtattagtctgttttcatgctgctgataaagacatacccgaaagtaggaacaaaaagaggtttaattggactttcacttccacatagctggagagggctcagaatcatggtggggggcaaaaggcacttcttaaatggtgccagcaagagaaaaatgaggaagaagcaaaagtggaaacccctgataaacccattagatctcatgaaacttattcac

SEQ ID NO: 262050 - DNA, 509 bp, Homo sapiens
aacaaacaacagaagatattaataaaagtgtgatttggtttcttagaacataaaattgacaaatctttagctagactgactaaaaaaagagacaatactcaaataaacataattataaatgaacggggagacattaaaaatgatttcacagaaagacaaaggattatgggcaatactatgaacaattatatgccaacaatttggataacctaggaaaaatagaaaaaattttaaacacatacaatctaccaagactaaatcatgaagaaatacaaatctgaacagaccaattgtattagtctgttttcatgctgctgataaagacatacccgaaagtaggaacaaaaagaggtttaattggacttwcacttccacatagctggagagggctcagaatcatggtggggggcaaaaggcacttcttaaatggtgccagcaagagaaaaatgaggaagaagcaaaagtggaaacccctgataaacccattagatctcatgaaacttattcac

SEQ ID NO: 262051 - DNA, 509 bp, Homo sapiens
aacaaacaacagaagatattaataaaagtgtgatttggtttcttagaacataaaattgacaaatctttagctagactgactaaaaaaagagacaatactcaaataaacataattataaatgaacggggagacattaaaaatgatttcacagaaagacaaaggattatgggcaatactatgaacaattatatgccaacaatttggataacctaggaaaaatagaaaaaattttaaacacatacaatctaccaagactaaatcatgaagaaatacaaatctgaacagaccaattgtattagtctgttttcatgctgctgataaagacatacccgaaagtaggaacaaaaagaggtttaattggactttcacttccacatagctggagagggctcagaatcatggtgsggggcaaaaggcacttcttaaatggtgccagcaagagaaaaatgaggaagaagcaaaagtggaaacccctgataaacccattagatctcatgaaacttattcac

SEQ ID NO: 262052 - DNA, 603 bp, Homo sapiens
aaatttattagtatgtggatatacacatttttggtaagaaagtttataaaataattttatttaagaaataatcttgtatggtcaaatggtaaagaaaaaaggagagtaaatttttgttctaaggtagaatgaaaaacaattggttattttgatatgaaaaagaagaaagtgtaggacagaactgaatgctttagcaagttataaaatgtttgagataattgcaaaaggtttataaaagatgactcttatgaaaggaatgttgtgcacaatgaagttgactgaaattaaaaactagaagcaaattgtatataactagttctaaaaattaagaattaattcactgatggataaccaaatctacttctctatgtttaaagaaagaaggctttgctttaggtatttctatgttcttggtaaaaataaaaakaaattgcaaaaggctttgattttttaattatgaatttttctatgaatgtttatcttctgaactgcagactttttgattttgacaggtttcatttaatttctcaagttttaggttaaaaatagtaattttatttctcaaaatagtttttcttttccagtttttcacgttcatatctc

SEQ ID NO: 262053 - DNA, 542 bp, Homo sapiens
  misc_feature (1)...(542): n = A,T,C or G
caactacctccccctgggtccctcccactacacgagggaattctgggagataaaattcaagttgagatttggatggggacacagccaaaccatatcaccaataatgagaaagaaaattaaatcactaattaaaaagaccagtacctgatggcttcattggttaattaccacaacccaaccatttaagaaagagttaatgccartccttctgaaattcttccaaaacagtgaagaagaagaaacacattcaaacttagtttacaagatgagagttaccgtgatatcaaagctaggcaaagacactacaagaaaaaaataggttacaggccaatatgaacataggtacaaaaatccttaacaaaatagtaacaaattatattcaacttcacattaaaagaataatacacataatcaagggggatttatcccntaggtacaaggatgatttgccataaataaattaatatgatatatcataataacagaatacagaataaaaatcatataatcatttcaatagataataaaacagtattagacaa

SEQ ID NO: 262054 - DNA, 542 bp, Homo sapiens
  misc_feature (1)...(542): n = A,T,C or G
caactacctccccctgggtccctcccactacacgagggaattctgggagataaaattcaagttgagatttggatggggacacagccaaaccatatcaccaataatgagaaagaaaattaaatcactaattaaaaagaccagtacctgatggcttcattggttaattaccacaacccaaccatttaagaaagagttaatgccaatccttctgaaattcttccaaaacagtgaagaagaagaaacacattcaaacttagtttacaagatgagagttaccrtgatatcaaagctaggcaaagacactacaagaaaaaaataggttacaggccaatatgaacataggtacaaaaatccttaacaaaatagtaacaaattatattcaacttcacattaaaagaataatacacataatcaagggggatttatcccntaggtacaaggatgatttgccataaataaattaatatgatatatcataataacagaatacagaataaaaatcatataatcatttcaatagataataaaacagtattagacaa

SEQ ID NO: 262055 - DNA, 542 bp, Homo sapiens
  misc_feature (1)...(542): n = A,T,C or G
caactacctccccctgggtccctcccactacacgagggaattctgggagataaaattcaagttgagatttggatggggacacagccaaaccatatcaccaataatgagaaagaaaattaaatcactaattaaaaagaccagtacctgatggcttcattggttaattaccacaacccaaccatttaagaaagagttaatgccaatccttctgaaattcttccaaaacagtgaagaagaagaaacacattcaaacttagtttacaagatgagagttaccgtgatatcaaagctaggcaargacactacaagaaaaaaataggttacaggccaatatgaacataggtacaaaaatccttaacaaaatagtaacaaattatattcaacttcacattaaaagaataatacacataatcaagggggatttatcccntaggtacaaggatgatttgccataaataaattaatatgatatatcataataacagaatacagaataaaaatcatataatcatttcaatagataataaaacagtattagacaa

SEQ ID NO: 262056 - DNA, 525 bp, Homo sapiens
ctctgtcctcactgtctgctattctttgtggcatttgtcaaccaagagaggcaaaagatcagattgcaatgcaataagacaaggcctttattgtggtatttggaattgcaatttgggagatagtgactcaactagaagtctaattgtattcttaagagagagaggggagaagagtatttttaagagaaaataaaaaggagggtgagggcgattgcagtttttttgaaagaattatcatttggcgagatggccagcttagttcatgagttcatagttcattgattgttgctgttcagatgttgcagcactggcaaaattccactgtttccagtgtgttcgggttactgtgatttgacccaggtcaatggttcaaggcgagttcctagattttttgcaagtttgcaggacatgcaggcaatccttcttagaacggcttcccaaytccgttttagagctctgaaccagagtgatgccattttctatatcatattgcacatactcactctcatgacttgatgttccatt

SEQ ID NO: 262057 - DNA, 541 bp, Homo sapiens
aagccacaattatgaatcccgaattcacatgaattggataaacattatatattgaaaaacagtggttttatatgtatgtataaaatatatacgtatgtgtacatgtatacataatgtacataaattatgtattatacataacacaataaatatgttgttatatgtattatatattatattattacatatatatgtatattacatcacctatgtgtaacatataacctatatcatattatgtatatattacatatatttacatgtattatataaatatgtatttaacatatcatatgtattgacatgttatatataatatgtacacatatacatatgatatatgtatattaaattacttgacatgytccaaaaagccatgtaaatatattgagtaaaggatttagatctttttaattgtgaggtaaataatgctgatggaaaatgagtctgggcagaatgttatatattcattaaatgttggatagcattatggaatcatgattttaggtggagtaaatactaagagaaatgttttagttta

SEQ ID NO: 262058 - DNA, 602 bp, Homo sapiens
acctgtgctcttctaaaatgttacatgttgccattgctctgagaatggtgatttgcaagcagataaaaagagcctggagaattttgatcaatattttgctttattttgttttttaaagctcagagaccagtcagaagatttgaatttttaacaatatagttcaattatactgtaagacatgcttagaacaaatatgagatagaggttggtagatacaataaagtttgtcacataggtttattatatccatckccaccaagacagcatcctaggattttggaaggttgtttcttcattttggcttaaactagccagcagaacagtgttggatttttttgtttgtttgtttgtttttgtttttgtttttttgttttctcttgtaatgggttcagagaaggcctgtaggatttattcaataaattaagtgggaattagtggccggccagggtagagacactcaactatttagaacaccttattgggcattctgcattaccttcctcacttcaacattagatgtttcaggagctcttaaaagtgcttctgtggttaagtttcatcttctgctaccgctagattttcttttctctgctattgccaaa

SEQ ID NO: 262059 - DNA, 557 bp, Homo sapiens
gtgatccatgcaatcttactaagtacyttactatcaaaagcaaatcaccagtgcacactggtggaataatttatatgttctatttgtgtgagaacacggactgagatctctaatctctgagcctcatcagatcttgattaggaagtgttactatggaccagatatctatgatcaaaacacagggtcaaaaaacaaaaaagaggccaggtgtggtggctggctgatgcctgtaatcccagcactttgggaggcagaggcgggcggatcacctgaggtcaggagttcaacaccagcctggccaacatggtgaaaccccgtctataataaaaatacaaaaattagctgggtgtggtggcaggcatctgtaatcccaggtactccggaggctgaggcagaagaatcgctggaaccagggaggcagaggttgtggtgagccaagatcgcgccattgcactccagcctgggggagaagagtgagacttcatttcaaaaacaaaaacaaacaaacaaaaaaagagtaaaaaaaaacaaaaaagaatatgtaagtccccaaaata

SEQ ID NO: 262060 - DNA, 557 bp, Homo sapiens
gtgatccatgcaatcttactaagtaccttactatcaaaagcaaatcaccagtgcacactggtggaataatttatatgttctatttgtgtgagaacacggactgagatckctaatctctgagcctcatcagatcttgattaggaagtgttactatggaccagatatctatgatcaaaacacagggtcaaaaaacaaaaaagaggccaggtgtggtggctggctgatgcctgtaatcccagcactttgggaggcagaggcgggcggatcacctgaggtcaggagttcaacaccagcctggccaacatggtgaaaccccgtctataataaaaatacaaaaattagctgggtgtggtggcaggcatctgtaatcccaggtactccggaggctgaggcagaagaatcgctggaaccagggaggcagaggttgtggtgagccaagatcgcgccattgcactccagcctgggggagaagagtgagacttcatttcaaaaacaaaaacaaacaaacaaaaaaagagtaaaaaaaaacaaaaaagaatatgtaagtccccaaaata

SEQ ID NO: 262061 - DNA, 557 bp, Homo sapiens
gtgatccatgcaatcttactaagtaccttactatcaaaagcaaatcaccagtgcacactggtggaataatttatatgttctatttgtgtgagaacacggactgagatctctaatctctgagcctcatcagatcttgattaggaagtgttactatggaccagatatctatgatcaaaacacagggtcaaaaaacaaaaaagaggccaggtgtggtggctggctgatgcctgtaatcccagcactttgggaggcagaggcgggcggatcacctgaggtcaggagttcaasaccagcctggccaacatggtgaaaccccgtctataataaaaatacaaaaattagctgggtgtggtggcaggcatctgtaatcccaggtactccggaggctgaggcagaagaatcgctggaaccagggaggcagaggttgtggtgagccaagatcgcgccattgcactccagcctgggggagaagagtgagacttcatttcaaaaacaaaaacaaacaaacaaaaaaagagtaaaaaaaaacaaaaaagaatatgtaagtccccaaaata

SEQ ID NO: 262062 - DNA, 557 bp, Homo sapiens
gtgatccatgcaatcttactaagtaccttactatcaaaagcaaatcaccagtgcacactggtggaataatttatatgttctatttgtgtgagaacacggactgagatctctaatctctgagcctcatcagatcttgattaggaagtgttactatggaccagatatctatgatcaaaacacagggtcaaaaaacaaaaaagaggccaggtgtggtggctggctgatgcctgtaatcccagcactttgggaggcagaggcgggcggatcacctgaggtcaggagttcaacaccagcctggccaacatggtgaaaccccgtctataataaaaatacaaaaattagctgggtgtggtggcaggcatctgtaatcccaggtactccggaggctgaggcagaagaatcgctggaaccagggaggcagaggttgtggtgagccaagatcgcgccattgcactccagcctgggggagaagagtgagacttcatytcaaaaacaaaaacaaacaaacaaaaaaagagtaaaaaaaaacaaaaaagaatatgtaagtccccaaaata

SEQ ID NO: 262063 - DNA, 559 bp, Homo sapiens
tcattcaatatctcaggcctcccacaaaaatcagaagtctggtcctggaacagcttgggactaaggttgaaaaccagctacatccctacaatctgatagtacgctcttttggataacaacmggtcaaacaagagctatacaacttgaaacccaaatatgtaaccaattttggcgtctgcttcataatctggacatgggaaatttggttttaaattccaagtgtccatgagacaacatgtagtaagtataacaatagatgtagcaatgtactagtccattctcatgctgctaataaagacatacccgagactgggtaatttgtaaagtaaagaggtttaattgatttacagttcagcatggctggaggggcctcagacacatatcatcatggcagaaggggaagcaaacacatctttcttcacatggtggcagcaagaagtgttgagcaaaaagggggaaagccgcttttaaaagcatcagatctcttgagaactcactcactatcatgagaatagcatgtgggtaacggctccatgattcaattacctctcaccaggtc

SEQ ID NO: 262064 - DNA, 444 bp, Homo sapiens
tgacggttaatattcagtgcccagaacagtgcataccatattgtacatataatgtagttgtttattaaatgcaaggataaatgtcaaaactttgttagcatcttgcataaacttgggctcatctgagggcttttagttatcactggcttggcaatgaagcaaagcagtaggttagagaatttaccccagagttcagttgcatggttttctttttcatatccactatttattagctatgcaaatttgggaggtacttttaaatttgtgtgtcttgattttctcttctataacatagaaatattattttttgggttcattgttaatattaaattgtgaagtgtctaatatatgccgtgcaatcaaagttagctattgaaaaaattaaggtrtataaaggatatgctataataacaaaacagctgccacagctggaacaacataaaa

SEQ ID NO: 262065 - DNA, 540 bp, Homo sapiens
agtattctccttgaaaacctgcacaaggtaaggatgtcttctctcactactcctgttcaacatagtattggaagtcctagccacagcaatcaggcaagagaaagaaagaaagagcatccaagtgtgaagagaggaagtaaaattatctgtcttcagatgatatgattctatatctagaaaacgccatattctcaaccctaatgcttctccagctgataaacaaattcagcaaagtarcaggatacaaaatcaatgtacaaaaattactagcatttccatatatcaacaacagccaaaccaagagtcaaatcttgcataaactcccattcgcaattgccacaaaagaataaaatacctagaaatataactaaccagagagttgaaagatttctacaaagagaattacaaaatactgcttaaagaaatgagagaagacacaaaccaatggaaaaataccccatgcttatggatagggaaaatcagtatcattaaaatggctatactgcccaaagcaatatacagattcaattttatccctat

SEQ ID NO: 262066 - DNA, 540 bp, Homo sapiens
agtattctccttgaaaacctgcacaaggtaaggatgtcttctctcactactcctgttcaacatagtattggaagtcctagccacagcaatcaggcaagagaaagaaagaaagagcatccaagtgtgaagagaggaagtaaaattatctgtcttcagatgatatgattctatatctagaaaacgccatattctcaaccctaatgcttctccagctgataaacaaattcagcaaagtagcaggatacaaaatcaatgtacaaaaattactagcatttccatatatcaacaacagccaaaccaagagtcaaatcttgcataaactcccattcgcaattgccacaaaagaataaaatacctaraaatataactaaccagagagttgaaagatttctacaaagagaattacaaaatactgcttaaagaaatgagagaagacacaaaccaatggaaaaataccccatgcttatggatagggaaaatcagtatcattaaaatggctatactgcccaaagcaatatacagattcaattttatccctat

SEQ ID NO: 262067 - DNA, 418 bp, Homo sapiens
aaatctaccattctagataatagttgttcacctgggaatcaaagagcacagcctgtcaatctataaaatgagagaaaatatttgcaaaccatctctctgttaaagaggtaatattcaaaatatataatctataatatatacacaattcgatagtaaaaacayaacaaaataaaaagtaacagcaaagaaaaaatcacaaataattttcccaattaaaaaatgggcaaataacaggaatagacatttttccagagaagacatgcgaatggtcaatatgtaagtgtaaagatgctcaacatcactaatattcagagaaatgcaaatcaaatcacaatgaggtatcatctcacacctggtaggagggctattataaaaaagacatgtgattacaagtgttggtgagggtacggagaaaacg

SEQ ID NO: 262068 - DNA, 548 bp, Homo sapiens
gattagtgtttcccacttaaaatccctgtcatctagatattttgttaggtctatctatgagctatgacytaaaacaaacagggacttcattcccagcaaaaagttatctgtattttgtacattgtgcaaagactaggggatgaagaaattacatcttctaaaaacttatcgcttgtataataaatatattgtttttcttttcttttcttttcttttttttttttttttttttttgagacagagtctcacccttgttacccaggctggagtgcagtggtgcgatctcggctcactgcaacctctgcctcccaggttcaagccattcttctgcctcagcctcctgagtagctgggattacaggtgcctgccaccacgcctggctaatttttgtatttttagtagagacagggttttgccatgttggccaggctggtcttgaattcctgacctcaggtgatccacccaccttggcctcccaatatattgtttttctaattagtataatggggtgtgtgggatgtagtttttttgaggaccaatatagtgtt

SEQ ID NO: 262069 - DNA, 548 bp, Homo sapiens
gattagtgtttcccacttaaaatccctgtcatctagatattttgttaggtctatctatgagctatgacctaaaacaaacagggacttcattcccagcaaaaagttatctgtattttgtacattgtgcaaagactaggggatgaagaaattacatcttctaaaaacttatcrcttgtataataaatatattgtttttcttttcttttcttttcttttttttttttttttttttttgagacagagtctcacccttgttacccaggctggagtgcagtggtgcgatctcggctcactgcaacctctgcctcccaggttcaagccattcttctgcctcagcctcctgagtagctgggattacaggtgcctgccaccacgcctggctaatttttgtatttttagtagagacagggttttgccatgttggccaggctggtcttgaattcctgacctcaggtgatccacccaccttggcctcccaatatattgtttttctaattagtataatggggtgtgtgggatgtagtttttttgaggaccaatatagtgtt

SEQ ID NO: 262070 - DNA, 548 bp, Homo sapiens
gattagtgtttcccacttaaaatccctgtcatctagatattttgttaggtctatctatgagctatgacctaaaacaaacagggacttcattcccagcaaaaagttatctgtattttgtacattgtgcaaagactaggggatgaagaaattacatcttctaaaaacttatcgcttgtataataaatatattgtttttcttttcttttcttttcttttttttttttttttttttttgagacagagtctcacccttgttacccaggctggagtgcagtggtgcgatctcggctcactgcaacctctgcctcccaggttcaagccattcttctgcytcagcctcctgagtagctgggattacaggtgcctgccaccacgcctggctaatttttgtatttttagtagagacagggttttgccatgttggccaggctggtcttgaattcctgacctcaggtgatccacccaccttggcctcccaatatattgtttttctaattagtataatggggtgtgtgggatgtagtttttttgaggaccaatatagtgtt

SEQ ID NO: 262071 - DNA, 548 bp, Homo sapiens
gattagtgtttcccacttaaaatccctgtcatctagatattttgttaggtctatctatgagctatgacctaaaacaaacagggacttcattcccagcaaaaagttatctgtattttgtacattgtgcaaagactaggggatgaagaaattacatcttctaaaaacttatcgcttgtataataaatatattgtttttcttttcttttcttttcttttttttttttttttttttttgagacagagtctcacccttgttacccaggctggagtgcagtggtgcgatctcggctcactgcaacctctgcctcccaggttcaagccattcttctgcctcagcctcytgagtagctgggattacaggtgcctgccaccacgcctggctaatttttgtatttttagtagagacagggttttgccatgttggccaggctggtcttgaattcctgacctcaggtgatccacccaccttggcctcccaatatattgtttttctaattagtataatggggtgtgtgggatgtagtttttttgaggaccaatatagtgtt

SEQ ID NO: 262072 - DNA, 602 bp, Homo sapiens
tttgcttccttcttcttttattttgtgcatctggtgcaaatttataacactttagcagctaattcccactttccatgcagggaatagctgtgagcatttctgctgaagggttttgatcagtccaactcagtgggaatgtaaacatcaaacagttttgtttgtcttcaacaactccgaacaaacatgaatagtcagatacccattcccacatcttcgtgatatctttagctgatcccattacttttagtttattttgattattaaaagtaagtctaacataaaagatcacgcagcttctgccttgctcgttggaacacttagagttccaaagtgtcatgtaagaagtctgactacccagaggctgccatactagagaggccacgttgcggtgctcaggttgacaattccagctcagctctgccttccaaccatacctcccagtgttctggaaatgtgagtgatgctgtcttkgagcttctagtccagtccactgtactagtgggataccacagtgtaaagttcatcaatgccatgtgaaatggaatattagcccagtcaaatcctgcccaaattcttacccacaaaattgtaataaatatgaa

SEQ ID NO: 262073 - DNA, 598 bp, Homo sapiens
gcttaaaagtaaactttattcatattctaatgcctaagactgtcttccttgatcacactagccagctgaacagggaatatcatcaccgtgaataaatgagaaatgaatagcccacacttgccctgccaagaagaatgaaattgcttaagtataccttattgcaaattgaactagcatatgttttggctctgacccttttataaaaactctcaggtgaaatgaaatggcacgatgattgaacaacttycaattaattaaaaagcagtcattaatcagtgttgctatagttggaggtccaaataattttattagacttctaataattcttttatgcattactgctttgctgtttttattatattaaccttgagtattttcaatgagacagagactccaaactttacttcattcaaattatcagaaagtttcaacaggcaaatgtttctaggatttttgtgttactttaacaaatgtcattaattaaagataactagccagacaggatggcttgcaactgtagtcccagctactcaagaggctgaggtgggaggatcacttgaggccaggagttcaagaccagtctgagcaacatactgag

SEQ ID NO: 262074 - DNA, 606 bp, Homo sapiens
aaatcaaaattcagagtgctcccagaaagaatataataagtaattatttttttwaaaaaaattactttgaagacctaaacatagtgtcacataggaagctccatatgagttaaggatttaaaatattaaaaaaaagaaaatcatcatggaaggaaggatgccattctaggttgaagaaacattttaagcaaaggcatagctatgaaaagtcatgttgaggtcagatattgcaagcagtgtggtatagttgctgtcaaggagtagacattcagagaggaggctgaggcttcattcaacagagccttaaaagacttgtgagaatctgcagtttttcaggtgcgactaagagtctgccctccttctcattctatctcctctacctgtgtgcccccagcttactatggatccaaagaagcatttcacttctccaacttttcctatctgttcctaggcctgcatttctgtgaacaagcactgattggcttacagtgtattcacctgggtgactatatagttaaccttacgagaaacaaagtgacaaagaggtgtggattctttgtggtgtttgggcagaaatattctccttaatttggccagacttgtttt

SEQ ID NO: 262075 - DNA, 501 bp, Homo sapiens
atttagacatgtagataaaattctttttaatatcacatgcaagagagaattcacaattagaaaatgtttttacatggaattgttatcttgttgacatcatatactatatcatattgaatcaattactataggaatagattcaatatgatatagtatatgatgatacttacaagttcatacttcttagtataaacttcttagtatcaaagattmtatttgggccaggcacggtggctcacacctataatcccagcactttggaaggccaaggtcggtggatcaatagtaagaaggtaaaaagatattttcgttggcagaaatagcatacatcaagctctagaaatggaataaagcataaaatattccgaaaaatatgcaggatttcagaataggaaagagaaaagaaaccaaggataagtacaaggtaaaactctctctgtggtctctgtgcctctgtctctcactatcccctttgcctcccaataatgaagaaaatccaga

SEQ ID NO: 262076 - DNA, 566 bp, Homo sapiens
gatagccttgtaacattttgttcttccttgtattaatatggagattgttcttggatgttaaatcaacctcgtgtccccaggataaacacccattcatcataatatattatctgtataacttgctgctggaattaattcgttaatattttgttaaggagtgtttgtatttatgtttataagaaacaatagtcagtgattttggcttttgtgattttttaattggttttcgtatcaaggcacataggattcagcggtaagtgcttcctcctctatttctgaaagagactgtaagaaaatgatattatttgttccttaaatatttgatagaattcctcatgaagccacctgggtgtgggctttacttgatgaggagatttttcattacaagttcatttcttaactgttttaactatgttaagattttctgtttattcttgagtcagttttggtaatttgcattttgttggaatttgtcaatttcacctgttaactatgttcttgcataaagcaatttaaaagattcctttatcattttytatttcatttataatgagaagtagttaatt

SEQ ID NO: 262077 - DNA, 608 bp, Homo sapiens
tacatacagatcttttgtagagatgggggtctcactgtgttgcccaggctggtcttgaacctgggctcaaacgattctcccactttggccttccaaagtgctgggattataagtgtgagccactgtgcctgacttctgytatctctctctctctctcatgtgtgtttatctatctatctatctatctatctatctatctatctatctatctatcatctatctatcatcatctatctatctgttggctctgtctccttggagaaccccgaccagcatagtggcatcagccctggagaggagatctgggtggagcaacacagtgtccactattggggaattgagaagtcccttcttggggctcctggctgcagtgactctccaaatagaggggctgatgggaggcccagggagccacaggtccaaggccatcaggatgggtccacctccaaagaggacataacctcttctggagccctggggtgaggggattggtgggctttgggggatctggcagaactgcctatgggagagacagcagagaagactgtcttagtccattttgtgttgctgtaacagaataccacagactgggtaatttataatgaaca

SEQ ID NO: 262078 - DNA, 519 bp, Homo sapiens
tgccgttgtagctcactgcagcctcgaccttctgtgcttaagcgatcctccctccttagcctgtcaagtagctgggctacagatgcacaccattacacatagctgattttaatttaatttwattttattttattttattgtagagatgggggtttcactatgttgcccaggatggtcttaaattcctgacctcaagcaatcctcccgcctcagcctccccaagagctgggattacaggcatgagccactgcacctggctgggctgggttcctgatgacgtctgcaagttgacttgctgcaggaggactatctgaatttcggatgtagtgacacttggcgttccaccctcaatcactcctggctccccttttcagggcctgtagcagccgggttttctagaaggggtcttggtgaggtggagcatggtggggaagtcttactggaagtgaagaatatttccagtgactgccagggcctcattcagcaactggggcaggtggagaaggttgcacatgcctg

SEQ ID NO: 262079 - DNA, 519 bp, Homo sapiens
tgccgttgtagctcactgcagcctcgaccttctgtgcttaagcgatcctccctccttagcctgtcaagtagctgggctacagatgcacaccattacacatagctgattttaatttaattttattttattttattttattgtagagatgggggtttcactatgttgcccaggatggtcttaaattcctgacctcaagcaatcctcccgcctcagcctccccaagagctgggattacaggcatgagccactgcacctggctgggctgggttcctgatgacgtctgcaagttgacttgctgcaggaggactatctgaatttcggaygtagtgacacttggcgttccaccctcaatcactcctggctccccttttcagggcctgtagcagccgggttttctagaaggggtcttggtgaggtggagcatggtggggaagtcttactggaagtgaagaatatttccagtgactgccagggcctcattcagcaactggggcaggtggagaaggttgcacatgcctg

SEQ ID NO: 262080 - DNA, 566 bp, Homo sapiens
ggttgtttacacctttttggctattttgaaaaatgcagctattgaggcaggagaatagagtctggaggcagagaaccttaggctgatccatgctgacttcctagaactgaatcaagaggaaaaccctacctttaagtaacaaaaggatcagtggctactccctttgcaactcccaaccccttttctgcattgcagatgaaagacraaagtacctctgattggtcccctcttgcaaccaatcagactggtcacagaccaagtcttcatctgtaactttgtaacttcacttcggcttctggttggccaccttctgcaaccaattagactggttgcaaaccactactttatttacatagggtgtaaaccaagtaaccaataaaaaaaatctctagagggtatttaaaccccagaaaattctgcaagggggctcttgaactgcttgctcaagcctgctcccactctatggagtgtacttttatttcaataaatctctgctttcattgcttcattctttccttgctttgtttctgcattttgtccaattctttgttcaaaatgccaagaac

SEQ ID NO: 262081 - DNA, 550 bp, Homo sapiens
ttacattcccactagccatgcacaagtttttcaatttctctacatcctcatcaacacttgttattttctggtgtgcttttaaacttttttttcttttttgtaaattatagctattctaattggtgttaggtgatatctcattgtggtcttgatttgcgtttctccaatgactaatgatattgagcatattggactcttggacgctgaaccatataactaatgatattagccaatcatcttgtattggctatttgtatatcttttttggagagacttctattcaaattctttgcccatttttaaaattgagttgtttggggattttcgttgttgtattgtccatttgcaggagtttttatatattctagataaagaaggatttacttctgccatttagctatttgttttctgtatgtcttayatgatttttgttgtataattcccccattgctgcctttttaaaaatttagttgatttgttttgtagtgtatcattttgattccatttttctttccttttctatatgtgtttaggttattctcttagtggt

SEQ ID NO: 262082 - DNA, 550 bp, Homo sapiens
ttacattcccactagccatgcacaagtttttcaatttctctacatcctcatcaacacttgttattttctggtgtgcttttaaacttttttttcttttttgtaaattatagctattctaattggtgttaggtgatatctcattgtggtcttgatttgcgtttctccaatgactaatgatattgagcatattggactcttggacgctgaaccatataactaatgatattagccaatcatcttgtattggctatttgtatatcttttttggagagacttctattcaaattctttgcccatttttaaaattgagttgtttggggattttcgttgttgtattgtccatttgcaggagtttttatatattctagataaagaaggatttacttctgccatttagctatttgttttctgtatgtcttacatgatttttgttgtataattcccccattgctgcctttttaaaaatttagttgatttkttttgtagtgtatcattttgattccatttttctttccttttctatatgtgtttaggttattctcttagtggt

SEQ ID NO: 262083 - DNA, 593 bp, Homo sapiens
acgcagaagttttgttattttattgccgtattttccaacgtttgcaaaaaactgagtgaagatattaccccagagcaaaaaaaagagtttcagattttctgagagtaacttaagttaattttctcaagtttttttttaayatcccatttgtctcttaggtaaaatccaacatcccttcaacagagtgctctgatgttcatttctgataatgtgtgtaaaataaccacacatattaaatatctctgtccccagagacactttaggtattcaatggagcttagttttatcttggataagatttattggaattaaagggaagtacaaggcaattctaaaataattgagccaaatataaatatggtatgcacttttaaacaagaaatcccagtggaagtgtaattattcagtgcatggaaagaggtagaaaaaaagaagccttcacttgggacacgagtataattttaacagtacaacagtaatattaatgacaccaaacactgcctttattctaaataaataaagatgaatactaaatgtcttgaaagacccccagtaaccacctgtgctattataaaggtttagctgtcaaatca

SEQ ID NO: 262084 - DNA, 593 bp, Homo sapiens
acgcagaagttttgttattttattgccgtattttccaacgtttgcaaaaaactgagtgaagatattaccccagagcaaaaaaaagagtttcagattttctgagagtaacttaagttaattttctcaagtttttttttaatatcccatttgtctcttaggtaaaatccaacatcccttcaacagagtgctctgatgttcatttctgataatgtgtgtaaaataaccacacatattaaatatctctgtccccagagacactttaggtattcaatggagcttagttttatcttggataagatttattggaattaaagggaagtacaaggcaattctaaaataattgagccaaatataaatatggtatgcacttttaaacaagaaatcccagtggaagtgtaattattcagtgcatggaaagaggtagaaaaaaagaagccttcacttgggacacgagtataattttaacagtayaacagtaatattaatgacaccaaacactgcctttattctaaataaataaagatgaatactaaatgtcttgaaagacccccagtaaccacctgtgctattataaaggtttagctgtcaaatca

SEQ ID NO: 262085 - DNA, 295 bp, Homo sapiens
actatattcctcaagtagctcatttgtgcaactacaaaatatatttccaaaaagcagttctatagaggaagcagctacttgtgctgctgtttgatagtcagcatgatctaacaatcagatttagaatatctttaccaatagctctaaaaktttagtgtgagttagattcactttgacagttttaaagtgcagattatcctcccacaatctccaaccacaattctgcttagtaggtttgacatgtaatcaagaaatacgactgtttaatagctaacaagatgaacttgatgcttat

SEQ ID NO: 262086 - DNA, 613 bp, Homo sapiens
cctactctatacagtttttttttaaaaagagtaagaaatagaataacatcttcacagataatgaaaaacatgccaaaagatatgcctgcaaaacaaaaaactataacctactgttttaagacaagctagaagcaattatttaaacaaaataagatgcaaaaaaacccaacataaatcagaaatagaaaaactcagaaattaacaaatttagggggggaaatgagtttaaaagaaaaaagtttcagaaattaagactaacctagaaagattgcaagagtgaataaacacaagagataattcctcagaagaaacagaaaatgaaacaaatggaaatttttwaaaatctaagaaatgagcaaggatataaaggcttcaggagaaagtgacaaatctcgaagttgggtaaagaggatccaacatacagagaacagggttccctgaagaaaaacccaaagcagggatcagaacaaatactagaagctatagttcaaaaaggtactatgttatttagaaataaaaagttttcaaactacatattgaaaagtcacaccatgttcctgagagtactgacccagaatgactaacaccaaggcatgaatttagtgaaatgata

SEQ ID NO: 262087 - DNA, 536 bp, Homo sapiens
attactttttaggtcaagaaatattaacaggatgaagaaattgtgggtcattttccattttccttatttttttaaagcttkggatttttttaataaataaagaagtacttaataaaaaaattaagataaaatatacacacaaacatatctggaaatacaggggagagatgagaaattaagataaaataaggacataaatctggaaatgatacagacaggagacaaggaaatactgggtagaagtgggcagttccctggaaaaggtcccaccctcaagcctggatactcacagccctaagtgagaatgggcactcctgttttggcacccaaaaagttgccttttggcctgccactcccacctatcctgtacccatataaaccctgaaccccaggctccagaagcaggagaggaacagatgaggagatgggcggcagaacggcgtggcagaggagaaaacagaaagtgaacgttgggaggagttcagctggggacggtcagagaatcagcagctggatagccaaattccagaggaaga

SEQ ID NO: 262088 - DNA, 442 bp, Homo sapiens
gcattttttgacagagttgttgcaaggaatgagataatgcaaacttyagtcattggcatactccttcccaatctttgccaaatctgcataaaacctgaaatattagttagataatattttttatttaaatcaattcatgttttcagttaaatttatgtgctttaatcggaagctttatactgctaccataaatggaaaacaagtactaccgtaaattggtagtaaccataagaataatactaataaaaactgtactgaaatttttatctcaataaataacaattaaagtgttgttaaattctagctaaatgctgtttcctgctgcaggctctgtgcctgaggctgccctctctttgttaaaatggagattcacatgtataaaacgaagttaaaaacaccgaggcttcaaaccgcagctttgtccttgaagtaatcaggaaac

SEQ ID NO: 262089 - DNA, 604 bp, Homo sapiens
ggggtctaattctcaatgaggaaacaccacagacactggcaggattcccagtggaatggtccagcttcattctgaacttcataccaactgtgcaactctcaactcttcaagggcaaaactttgggaacaaggtcactctgagccagagcttgtctagtgtgttgtggtcattttggaaggatttttcaagtaatttttagtagcaccaacactgctaccagtgcattgaatgcatgctatgtagcaagcttgttgcaaagaaccttgtaggtattatcttctttaattctcttacaggttcctatgagatgggtgttatcatctctaatttacagatgagaaaacaggctcagggaggtaattaaacttgctcgatctcacatacstagttagaaacgatatttgaagccatgctccatctgtcactaaaggttattcttagcctctgtgcaaaactgcttctcatgctaataattgtgaaaataccaaagtattcaaatgatttactcaccttctggcttatttgtgctgtagggtgcttacctggctaggtgagaaagtcatgctgtcttgtgggcaggaactgtgtggttttccatgaagg

SEQ ID NO: 262090 - DNA, 578 bp, Homo sapiens
ccatctggcgttatatcacctatgcctgaagaactttttttgtagcacaggtctgctgataatacattctttcaacttttgtttatcttgacatttttaaattttaccttcaggtttgtttgtttgtttgttttgagactgatctcagctcactgcaattccgcctcccaggttcaagcgattctcctgcctcagactccaaagtagctgggatcacaggtgtgcaccaccatgcccagctaattttgtatttttagtagcaacagggtttcaccatgatggtcctgatggtctcaaactcccgacctcaggtgatctgcccacctcaacctcccagaatgctggggttacaggtgtaagccacagcgcccatcctactctcagttctgaaagctattttcactgggtgtaaaattctgggtggtcatggtttgttttccacttaaagrtgtcacactctattgcctactgatttgcatatcttctgaaagaagtcagctataattcttacctttaatgtatggtatgtgtctttttttctgtgggtgttttcactattttcttgttgttactggttt

SEQ ID NO: 262091 - DNA, 557 bp, Homo sapiens
ttgacttgttcttatactttccattgctcctgaaattctccatatgttcatgtatcttgtccacctatatatgtgatataaaattatattgtaaatataattattttaaagttcctgactgatctaaagttctgaaatcctggtcatctcggagtctggttctgttgattgctttttcttttggcaagagttttctttaaatgttttgtgtgtcccataacatcttattgaatcccagatattttatgtagagcagtaagagtaacagtacttctgccttgaaatgggcatgccttttctttggtaaggctattagtacaggggttaagtcaatctaacaaatttaacgcaggagaggctagaagtgcattcatacagttggacttgatctcttgggcctctgcctttccctgtagcaacaatgagtctttacctagtccctgtaagttatagggtgctgcccttccccagcaatttaaaagtktggctatgtaggaaatatggttcagggtaagagggtgggctttgtgcctttctttctcacagtgaccagcccc

SEQ ID NO: 262092 - DNA, 558 bp, Homo sapiens
gcacatctcagatttctgtttttaaaaatctctagccatgatgatgggatatgtgtttgttggtacattttttttcagagcccagtgtcattgctgggctgggtggcagccgaggccttcagggactaaacctcttgtcttaagatcctgaaaatggtccagaaagtcttcagctgggttgggagataattcgcaggtggggtkggggaggtgaggaagtggagttccagctagatagggcttgatgctggcaaattatgaagacattctggtggctctgccatttttttttcctcactaccagttctatcttcctaaacagaagccaaaggaagccagctggtagctaagagcatgggatttaggaagtaacatttcagccatttgctaaccatgtgaaccaggactggctcttgaaccagctttaccttttggaacctcagttttgccttttataaaatggagacagttattcctgccaaatggggttctttaaaaatcatgtgcaaacatgtgtagtgtagtgcctggcacataaaaaatgctcagtaagtggtg

SEQ ID NO: 262093 - DNA, 452 bp, Homo sapiens
agaaaaactgtgctgtatcctgattgtgtggtggtcacacaaatctataaatgtgctaaaacttatagaacaccaataaagtaagttttactgtatgttaatgttttttaaaagtctgaaacaggaggcaaattaaatattataaacatttttactctaataaattcaataacaaaaacttatacttctgaactaatcaaaaaatggccaaaggatatgaacagacaatttacagaaaaggaaacacaaattgacttaaacatatgaagaaatgttcaaccccctttttcattcactagattggcaaagatctaagactaaraatatatcatgttggtatttggggtcaatagtcactctaacacatttctggtagaaggtaaattggtataactctaatgaagggaaaattggcaagatctaacaaaatgtttaaaaaatgatatgccatt

SEQ ID NO: 262094 - DNA, 582 bp, Homo sapiens
tgttatgctttgcagactgaatagagatgtgtgtgctatctttgtgtgtgttctttctgtagaaaagagactagaggtgaaagaagacaggtacaggaaataggaatctatttcttcaaagccctctctgatacagatgcttcagttctaacccttctagtcagtgccccaagaagatcacagctcacagagctccaataaagactgagagttcctcctaagagaagcgattgcatttatggaagggcaattgacctatcaaaaacatagatcatccatatcccaagttatcttgccacaggtgcaaaactgggcaaaactgccatcaacagtagcttgaggcaaccaaaacagtgagggcaatattgtgggaaacaggaagaaattgtagatggttaacccaggagagacaaaattcagaagaggtgtaatagctgacttcaaataccagaatggccatggtacagaaaaaaaggtgatactagagacagaaataccatttgactcagcaatcccattattgggcataatacccaaaaatatrtaaatcatcctattataaagacacatacatgcgtatat

SEQ ID NO: 262095 - DNA, 579 bp, Homo sapiens
gcctcaacaaatttcaaagaattgaagccattcagagtatgttacsactggtggaattaagctggaaacaacaaaaactaaaaggttggccaggcgcggtggctcacacctgtaatcccagcactttgggaggccaaggcgggtggatctcctgaggtcaggagttcgagaccagcctggccaacgtggtagaaccctgtctctactaaaaacacaaaaattagctggtcctggtggtaggtgcctgtaatcccagctacttgggaggctgaggcaggagaatcgcttgaacctagaagacggaggttgccctgagctgagattgcggcattgcactccagcctggacgacaagagtgaaactccatctcaaaaaaaaaaacttacaaaaggcaaaaaaaaattaaacatatacttctaaataatctatggatcaaggaagaaacatgaagaaaataatattttgaacttaataataataaaaatgcaatatttcaaaaaagaatacagccaaaacaatacttagaaattcatggctttaaaatatttgtgttaaaaatgaagcaagactaaaagtaaa

SEQ ID NO: 262096 - DNA, 579 bp, Homo sapiens
gcctcaacaaatttcaaagaattgaagccattcagagtatgttaccactggtggaattaagctggaaacaacaaaaactaaaaggttggccaggcgcggtggctcacacctgtaatcccagcactttgggaggccaaggcgggtggatcwcctgaggtcaggagttcgagaccagcctggccaacgtggtagaaccctgtctctactaaaaacacaaaaattagctggtcctggtggtaggtgcctgtaatcccagctacttgggaggctgaggcaggagaatcgcttgaacctagaagacggaggttgccctgagctgagattgcggcattgcactccagcctggacgacaagagtgaaactccatctcaaaaaaaaaaacttacaaaaggcaaaaaaaaattaaacatatacttctaaataatctatggatcaaggaagaaacatgaagaaaataatattttgaacttaataataataaaaatgcaatatttcaaaaaagaatacagccaaaacaatacttagaaattcatggctttaaaatatttgtgttaaaaatgaagcaagactaaaagtaaa

SEQ ID NO: 262097 - DNA, 589 bp, Homo sapiens
atactcactgaccctcctgcatgcattcatttgtatcaatattagcagtgatttcaatatacaagcagatgatcccactccctagccactcaattgcataatctcctttatgttctctgcccaacttcatcccaacattcccaagttcaacttcccaacttcacccatcaacattcccaagagtttgtcattacctatcacttaaacacatcactatggtttgaatatgtgtcccctccacatctcaygttgaaatttaatccccaatacggcagtattgagaagtggggcctttgagaggagattgggtcatgagaactttgtcctcatgaatggagaaatccattcatgggttaatcagttaaggggttaatggagaagtgggcaatcatgggaattgaactggctttataaaaagaggaagaaagacctgagctagcatgctcatcccacccaccatgtgatgccctgtatgcctcaagaatctgcagagggtctccaccagcaggaaagaccctcaccagatgcagcctgttgatgctggacttttcttcctccaaagctatgtgacataaattccttttcttta

SEQ ID NO: 262098 - DNA, 599 bp, Homo sapiens
tgatacattacattaacaaaaccaagaacaaaaaacttatgatcatttcaatagatgttgaaaattatttgataaaatttaacattactttatgattaaaaccttcaacaaactagataaagaaggaacacacttcaaactaataaaggccatctatgagaaacccatagctaacatcatactgaatgggaaaaattgaaarcctttccttcaagatatggaacaagacacggtacccactgtcatcacttttattcaacataatacttgaagtcctgggcagacaaatcagagtagagaaggaaataaagggcattcaaattagtaaggaagaagtcaaattagctttgtttgctgatgacctgactttatacttagacaaacataaagactccaccaataacaggttagttaattccataaaggaattcagcaaagttgcaagatacaaaatcaacctacaaaaatcagtggcatttaaatctgtgaacagctaacactctgaaaaaaatgaagatattaatcccatgtataatagctacaaataatatgaaatatctagaaatcaatttaatctaagaagaggaagctctataaaa

SEQ ID NO: 262099 - DNA, 559 bp, Homo sapiens
acgtgatttatgactccttggcctctataaatttcttatgtatcaygtagttatacctttctcaaaattcaaggagagttttttgtttgaatgttctgagatttgtgaataagcaaatgtaatgtatgctaatgcgccacattctctttaagaagaataccatataatatgttctttctgggtaatttctgaatgttgtttcatatcgagtgggttctggctgcagtgttagcatgttcaaggaatttggattggtaacttttgtggaatcatttgtatagtcaaattatttaataggaaatatattagagttctacagtcaatattttacaggcaacttgagaaagacattttctagtaaaatttagtaaagttaataagctgtttttattagttttattgagttttaaataggtaagacatacgcattgctcaaaacttacaaggtagaaaatggcattgagtgaaaagtaagtttccatctctcttttgaccacccaaccacccactattccatctagggcaaacattttgccaatttcttgactatcattttgga

SEQ ID NO: 262100 - DNA, 559 bp, Homo sapiens
acgtgatttatgactccttggcctctataaatttcttatgtatcacgtagttatacctttctcaaaattcaaggagagttttttgtttgaatgttctgagatttgtgaataagcaaatgtaatgtatgctaatgygccacattctctttaagaagaataccatataatatgttctttctgggtaatttctgaatgttgtttcatatcgagtgggttctggctgcagtgttagcatgttcaaggaatttggattggtaacttttgtggaatcatttgtatagtcaaattatttaataggaaatatattagagttctacagtcaatattttacaggcaacttgagaaagacattttctagtaaaatttagtaaagttaataagctgtttttattagttttattgagttttaaataggtaagacatacgcattgctcaaaacttacaaggtagaaaatggcattgagtgaaaagtaagtttccatctctcttttgaccacccaaccacccactattccatctagggcaaacattttgccaatttcttgactatcattttgga

SEQ ID NO: 262101 - DNA, 559 bp, Homo sapiens
acgtgatttatgactccttggcctctataaatttcttatgtatcacgtagttatacctttctcaaaattcaaggagagttttttgtttgaatgttctgagatttgtgaataagcaaatgtaatgtatgctaatgcgccacattctctttaagaagaataccatataatatgttctttctgggtaatttctgaatgttgtttcatatcgagtgggttctggctgcagtgttagcatgttcaaggaatttggattggtaacttttgtggaatcatttgtatagtcawattatttaataggaaatatattagagttctacagtcaatattttacaggcaacttgagaaagacattttctagtaaaatttagtaaagttaataagctgtttttattagttttattgagttttaaataggtaagacatacgcattgctcaaaacttacaaggtagaaaatggcattgagtgaaaagtaagtttccatctctcttttgaccacccaaccacccactattccatctagggcaaacattttgccaatttcttgactatcattttgga

SEQ ID NO: 262102 - DNA, 632 bp, Homo sapiens
aatcacagccctgtgtatttacctccacagtgtgtgctgataagtgcaaaaggtttgtgcaaattcttttgaagttatattgtaaccatggtatatgtattgaaaacttggccattttaccccattcctatgaatgaaaactatttggtgaatcagaggatagtctgaattgggatatgaaggccagtataagtgtcagttagcaaagtcagctctagtttattatttttttttttttcttttaaggcgtagcattactagaagtatagctttgggaaccttgtagcatcttaaagacttttaaagggttgacagctattggcaaattgactaatacagagaactaaactttggttcatgtattcaatgtctaaatgaaaaatgggaagataaaagagctaagaatgaaatgtgatttcatgtgcttctcctttttagctcttataatagattgaacagatttgatatttgtggtaaatmcactcaggcagagtgacagaggcttggttgtcatttagcctttagggccttagtggagttaatgagaactgcaaatggtcatcaagtcttggtgcttcatggagaagcaacacttttacagtgagtgtgttagcttagtggttatggtatta

SEQ ID NO: 262103 - DNA, 632 bp, Homo sapiens
aatcacagccctgtgtatttacctccacagtgtgtgctgataagtgcaaaaggtttgtgcaaattcttttgaagttatattgtaaccatggtatatgtattgaaaacttggccattttaccccattcctatgaatgaaaactatttggtgaatcagaggatagtctgaattgggatatgaaggccagtataagtgtcagttagcaaagtcagctctagtttattatttttttttttttcttttaaggcgtagcattactagaagtatagctttgggaaccttgtagcatcttaaagacttttaaagggttgacagctattggcaaattgactaatacagagaactaaactttggttcatgtattcaatgtctaaatgaaaaatgggaagataaaagagctaagaatgaaatgtgatttcatgtgcttctcctttttagctcttataatagattgaacagatttgatatttgtggtaaatacactcaggcagagtgacagaggcttggttgtcatttagcctttagggycttagtggagttaatgagaactgcaaatggtcatcaagtcttggtgcttcatggagaagcaacacttttacagtgagtgtgttagcttagtggttatggtatta

SEQ ID NO: 262104 - DNA, 543 bp, Homo sapiens
tcttttctcttttatattgccttagatttcttttcctttccttactacactggctaagacctgcaataccaggttgaatgaagtggtgagagcagattgcttgtcttcttcctgaccttaggaaagaagcactcagcctttcacaaatatgtcaactgtgyatggtttttttttttgtagatgctttttgttagatttttatcatgaatgggtattggattttgtgacatgctttttctgtgtttgttaagatggctatattgtttttcttctttattctctaatatagtatattatgttagttttttgaatatcaaagcaactttttatccctggggtatatacttagtcatggagtattatactttttatattaattggatttggtttgctaatattttattaaggatttttacatctgtgtttatgagttattggtctgtagttttcttgtaaagtttttgtctagctttagtgtcaaaagtttggtattaaatgttgaattcatcagtgaagtcatttgggcctagaagtttctttgtg

SEQ ID NO: 262105 - DNA, 543 bp, Homo sapiens
tcttttctcttttatattgccttagatttcttttcctttccttactacactggctaagacctgcaataccaggttgaatgaagtggtgagagcagattgcttgtcttcttcctgaccttaggaaagaagcactcagcctttcacaaatatgtcaactgtgcrtggtttttttttttgtagatgctttttgttagatttttatcatgaatgggtattggattttgtgacatgctttttctgtgtttgttaagatggctatattgtttttcttctttattctctaatatagtatattatgttagttttttgaatatcaaagcaactttttatccctggggtatatacttagtcatggagtattatactttttatattaattggatttggtttgctaatattttattaaggatttttacatctgtgtttatgagttattggtctgtagttttcttgtaaagtttttgtctagctttagtgtcaaaagtttggtattaaatgttgaattcatcagtgaagtcatttgggcctagaagtttctttgtg

SEQ ID NO: 262106 - DNA, 582 bp, Homo sapiens
gaaatagaattcagacagcccctaagtcctttcttcttatggtttgtggtttgttattgtgctgcttacgtttgttttgagcatgtttttaagacttgaattttctttttttttgagacagagtcttgctctgttggccagagtggagtgcagtggcatgatctcagctcactgcaacttccacctcctgggttcaagcgattctcctgcctcagcctcctgagaagctgggatyataggtgtgtgccactgcacccggctaatttttgtatttttagtagaaatggggtttcaccatgttggacaggttgttctcaaactcctgaactcaggtgatcctccagccttggcctcccaaattgctaggattacaggtgggagccaacggtatccggcctaagacttgaattttaaaaaatttataacaggatacatctgtatttaatcattatgaatattatttactcagttaatctgactgcctttgaccataatggaaaaagaaatttgaggcattttgcacacattattccaatacttgccagatgtgttggggaagatgcattaagttctgcttgttta

SEQ ID NO: 262107 - DNA, 553 bp, Homo sapiens
actataatcttattgctgtaacacaaccacttawagttttcctttcagtcttttctggtgtattttatatttttgctaaatagtaatcatagtccacttcaatttcagatccttttttcatgttatgcttatgcatgagctttcttacatgttattgcagagtctccataacaactttatttagccagtcccttcagccagacaaggtctttttcagtatatttgagcagctcagataatgccttcaaaccacctccaaggatgctttccaatcattcaatcacgctcaagtctacctgttcttgtgttgtgaaaacataaggccgaccctggtggccatggagggactgacagcagggagagagctgctgcaatggtcctggttaagagatgaacaggtgagaatcacaactggatatctgtgtaagtaatgaaagtttgttgtgtcccagtttcctcatcttgagaagtacctggcaagcttcctgcctagcagcacttgaaggtgggtcagagcatagatgtgttcactgagcatgcagccagtattgtg

SEQ ID NO: 262108 - DNA, 553 bp, Homo sapiens
actataatcttattgctgtaacacaaccacttaaagttttcctttcagtcttttctggtgtattttatatttttgctaaatagtaatcatagtccacttcaatttcagatccttttttcatgttatgcttatgcatgagctttcttacatgttattgcagagtctccataacaactttatttagccagtcccttcagccagacaaggtctttttcagtatatttgagcagctcagataatgccttcaaaccacctccaaggatgctttccaatcattcaatcaygctcaagtctacctgttcttgtgttgtgaaaacataaggccgaccctggtggccatggagggactgacagcagggagagagctgctgcaatggtcctggttaagagatgaacaggtgagaatcacaactggatatctgtgtaagtaatgaaagtttgttgtgtcccagtttcctcatcttgagaagtacctggcaagcttcctgcctagcagcacttgaaggtgggtcagagcatagatgtgttcactgagcatgcagccagtattgtg

SEQ ID NO: 262109 - DNA, 523 bp, Homo sapiens
aactgatgaatgggtaaacaaaatatggcatatccacataacaaaatataatttagccaggccaggtgcggtggctcatgcctgtaatcccggcactttgggaggctgaggcaagyggataatatgaggtcaggagttcaagaccagcctggccaacatggcgaaaccccgtctctaataaaaatacaaaaattagctgggcatggtggtgcgtgcctgtaatcccagctactagggaggctgaggcagaagaatcacttgaacccgggaggcagaggttgcagtgagccataatcatgccactggactgaagcctgggtgacggagcaggactctgtctcacacacacacacgcatgcacggacgcacgcacacacacaagatttggccttaaaaggaatgaagtactgatttatgctatgacaggcataaaccctgaagacatgctaactgaaagacagcagacacaaacatcatatattacatgattctatttataagaaatatccagaataggcaaaac

SEQ ID NO: 262110 - DNA, 523 bp, Homo sapiens
aactgatgaatgggtaaacaaaatatggcatatccacataacaaaatataatttagccaggccaggtgcggtggctcatgcctgtaatcccggcactttgggaggctgaggcaagtggataatmtgaggtcaggagttcaagaccagcctggccaacatggcgaaaccccgtctctaataaaaatacaaaaattagctgggcatggtggtgcgtgcctgtaatcccagctactagggaggctgaggcagaagaatcacttgaacccgggaggcagaggttgcagtgagccataatcatgccactggactgaagcctgggtgacggagcaggactctgtctcacacacacacacgcatgcacggacgcacgcacacacacaagatttggccttaaaaggaatgaagtactgatttatgctatgacaggcataaaccctgaagacatgctaactgaaagacagcagacacaaacatcatatattacatgattctatttataagaaatatccagaataggcaaaac

SEQ ID NO: 262111 - DNA, 523 bp, Homo sapiens
aactgatgaatgggtaaacaaaatatggcatatccacataacaaaatataatttagccaggccaggtgcggtggctcatgcctgtaatcccggcactttgggaggctgaggcaagtggataatatgaggtcaggagttcaagaccagcctggccaacatggcgaaaccccgtctctaataaaaatacaaaaattagctgggcatggtggtgcgtgcctgtaatcccagctactagggaggctgaggcagaagaatcacttgaacccgggaggcagaggttgcagtgagccataatcatgccactggactgaagcctgggtgacggagcaggactctgtctcacacacacacacgcatgcacgsacgcacgcacacacacaagatttggccttaaaaggaatgaagtactgatttatgctatgacaggcataaaccctgaagacatgctaactgaaagacagcagacacaaacatcatatattacatgattctatttataagaaatatccagaataggcaaaac

SEQ ID NO: 262112 - DNA, 591 bp, Homo sapiens
cgggaggtaggagaggcacaatggtggggctgcctggtatccccagacttcaaggcatagcccagcggacgcgcaggcccagctttcgtgtggtttgtttttctcgctcctttaatcgagtcgagaggaaaactcctacaacaggcccagcctcgcggtgtgggcggcggctgtcccgcgtgaacggctctcatgctgcccgacccacttctctccttgtggtccccaggtgtcatcggactggtggccttgtacctggtgttcggttatggagcctctctcctctgcaacctgataggatttggctacccagcctacatctcgtaagtgacacaccctgcagccgtccccttcccttcctccattccyccccgcagggctgctgcagtagactgcacatccgcaattcccgggagaaaagtgaaagctcggcggggagggatgaggttggacataaggggtggggatagtattcaccattttggaaccttaacttaatccctatctcttgacgattagcccagaggtattttcattagattatcctggtgaccagtgtcccctctctttggcacactaacaggaaagcgc

SEQ ID NO: 262113 - DNA, 571 bp, Homo sapiens
ctgcctcaaaaaaaaaaaaaagatatatatatatatatcttctccatgcacttcaagatttggctcagcatgaaatgaacatttgaaataggatagaagtttttttgttgtttttagtttaagcactcggccataaataagcacactgtcagaggaaattttacggaagttcagtatttgatgcagtccattctcttacaaaaccaaaaatcaaataaagcaacaaygacaacaaaaatcattttccaaaaacaggactagtgtttgatatagcccatgccacccaagtctcataagagccctgtgtctttacctggctgaatcaaactttcctgtggaaaagtcaccagattcttagatttaggtggggtttgtttgttttgtttttgaggtagggtcttactcttccccccaggctggagtagagtagcacaatcatggctcactgcagcctcgacctctgagctcaagcaatcctcccatctcagcctcccaagtagctggaactacaggtgcacaccaacatgactgaatactttttgtatttttggtagagacagggttttgccat

SEQ ID NO: 262114 - DNA, 543 bp, Homo sapiens
cattggacagggtggaggaagagtaagcatttgtcttcagtraattccatcatatgtaaggagaaatacgtaggttttggcattagaaagacataaaattctgtttggggaaatgatgggtgggaaaattcttacaaactctttgaagcaacctaaaaacaccagattatatataaaataaaacatcataaaaacatcatctaactaacaagatagtgaaaagatatttgagaagaaaaaagtccagagagatgaatgaataaggtgttttgcaccacttttgcacagtgggaattagctgatgcagcagaggtggtctagaaaccctgcatcgctttggacagtgtctcagacacaggaggagatcatttggagttcatgtcctaccaagggtgaggactagattgtcaaatcccagacaagtacacgtttgagattttacacagtatcaaggtatactaaggtatacttcccatattttaagaatatgggaagacataggtctcagtaacagcaggaagtacttgagatcctcaacacaca

SEQ ID NO: 262115 - DNA, 543 bp, Homo sapiens
cattggacagggtggaggaagagtaagcatttgtcttcagtgaattccatcatatgtaaggagaaatacgtrggttttggcattagaaagacataaaattctgtttggggaaatgatgggtgggaaaattcttacaaactctttgaagcaacctaaaaacaccagattatatataaaataaaacatcataaaaacatcatctaactaacaagatagtgaaaagatatttgagaagaaaaaagtccagagagatgaatgaataaggtgttttgcaccacttttgcacagtgggaattagctgatgcagcagaggtggtctagaaaccctgcatcgctttggacagtgtctcagacacaggaggagatcatttggagttcatgtcctaccaagggtgaggactagattgtcaaatcccagacaagtacacgtttgagattttacacagtatcaaggtatactaaggtatacttcccatattttaagaatatgggaagacataggtctcagtaacagcaggaagtacttgagatcctcaacacaca

SEQ ID NO: 262116 - DNA, 536 bp, Homo sapiens
cctaactaaaaataaagctgataaaatttaccttcccatcttccaatgttgtttctggctacaatgggactaaataagacatagacaaaagggaggtatctaaaaaattcttctatatttaaaattaaatagcacacttatgtatcacacatgggtccacaaagaaaccacaaaaggtattatcaaaagttttagttgaatctatattatgtccttactatgaatactaatctktgtgtgtgtgtgtgtgtgtgtgtgtgtgtgtacttgaaaataatttgtttgattcagggcttgcatttttgctctttatttttcttaattatattatacttctatttcccagtcatctcatttatgagttatgcttttctgtattcattaacagatttccttttatcccacttgcatttttctttcccagcccactttatgttggaaacctcctccttccatggccttcctgatagcagatgatagaaaagtaaatgttttagttaaccataacaaaaattatgttatccttaaccatgctc

SEQ ID NO: 262117 - DNA, 641 bp, Homo sapiens
ttgaccatttatgcagccaayattaatttaactttaagcttaactgattactagtagaaaagtgattttgtggcatatcatgcaaacacaatcttattcaaaaagatttttctacttccatattgacatgcatttggtgaaatagtttttaaaaacctaatggttttgattggatatattgatattatggttaataacattttttctcactcaattttctataagcttgaacagttctttacaatttaaaatacttttacaatgatgtgcttccaagtcagtctttggtgttaagctctgagctttttattattattattattattattattattattattaaggcagggactgtatctaatccagctttgtattctcaaggcatagaagcagtttctgataggtattagatacacaaacaacgttgcaatgcaaattataaacctggagtacaagatctttgcctctctcaggacctgttttcctggaaagtaaaccatttcccagctgcttgtaggttagatgctattggcagactttttgcagataatcctttaagatgtaaaagttctgtgatgtgatttacacttcagagactgatggtggataaggatacctaagatgacatttgtgcttgggtc

SEQ ID NO: 262118 - DNA, 568 bp, Homo sapiens
gtgtgagagaacctttttgcagcatattctatattcggagggaagttgtaataagactaagaaagatccacaccaatttcaaaattagatgtcaaacagctttacaactgcttatcatagaaaactgaacacatataaataaattctaaatcaacatgtgactcagtcwattgtataaaatattttcatagcaaaccacaaagagatcacctgcacaccctgatggaaggggatggcacaggacattaaatgaagaaatgcccccaggagaaagttctcagatgagatgggtaagtgtaataaaagggcatatatgaacacatttcttcataatttataattaagatatttctgaagtttattaaccctgaaattattaataaaataattaaaaagttataagcataaatactcatactacccaaagcaatctacagattcaaaacacaatataagcaaaagaaaagaaataccaaagagcaggaatcaatgacattaagaaaagatagagaaaatcaatgaatacaaaagttggcactgtacattgataaacctttagtaacattta

SEQ ID NO: 262119 - DNA, 568 bp, Homo sapiens
gtgtgagagaacctttttgcagcatattctatattcggagggaagttgtaataagactaagaaagatccacaccaatttcaaaattagatgtcaaacagctttacaactgcttatcatagaaaactgaacacatataaataaattctaaatcaacatgtgactcagtcaattgtataaaatattttcatagcaaaccacaaagagatcacctgcacacccygatggaaggggatggcacaggacattaaatgaagaaatgcccccaggagaaagttctcagatgagatgggtaagtgtaataaaagggcatatatgaacacatttcttcataatttataattaagatatttctgaagtttattaaccctgaaattattaataaaataattaaaaagttataagcataaatactcatactacccaaagcaatctacagattcaaaacacaatataagcaaaagaaaagaaataccaaagagcaggaatcaatgacattaagaaaagatagagaaaatcaatgaatacaaaagttggcactgtacattgataaacctttagtaacattta

SEQ ID NO: 262120 - DNA, 568 bp, Homo sapiens
gtgtgagagaacctttttgcagcatattctatattcggagggaagttgtaataagactaagaaagatccacaccaatttcaaaattagatgtcaaacagctttacaactgcttatcatagaaaactgaacacatataaataaattctaaatcaacatgtgactcagtcaattgtataaaatattttcatagcaaaccacaaagagatcacctgcacaccctgatggaaggggatggcacaggacattaaatgaagaaatgccccyaggagaaagttctcagatgagatgggtaagtgtaataaaagggcatatatgaacacatttcttcataatttataattaagatatttctgaagtttattaaccctgaaattattaataaaataattaaaaagttataagcataaatactcatactacccaaagcaatctacagattcaaaacacaatataagcaaaagaaaagaaataccaaagagcaggaatcaatgacattaagaaaagatagagaaaatcaatgaatacaaaagttggcactgtacattgataaacctttagtaacattta

SEQ ID NO: 262121 - DNA, 553 bp, Homo sapiens
tcatggcagcccctctcatcacaggccttgatgcctatggggacaaaatggtttagtgggccaggccaagggctcccctgctatgtgcagcctagagatttggtgccctgtgttcyagctgctccagtcctgtctaaaagagaccaaaatacagctcaggccattgcttcagagagcgcaagccccaagcattggcagcttccacatggtgttgagcttgaacatgcaagaagtcaagaattgaggtttaggaacctctgcctatattccagaggatgtatggaacacctagatgtcaaggcagaagtctgctgcaggggcagaactctcataaaaactatctctgctagggcagtgcagaagggaaatgtggggttggggcccacacacaaagtccccactggggcactgcctagtggagctatgagaagagggccactacccgcaatggtagatccacctactgcttgcaccgagctcctggaaaagccacagacactcaacaccagcccatgaaaaaagccaggagggtggctgtaccctgcaaagccac

SEQ ID NO: 262122 - DNA, 533 bp, Homo sapiens
aaaatacagctcaggccattgcttcagagagcgcaagccccaagcattggcagcttccacatggtgttgagcttgaacatgcaagaagtcaagaattgaggtttaggaacctctgcctatattccagaggatgtatggaacacctagatgtcaaggcagaagtctgctgcaggggcagaactctcataaaaacwatctctgctagggcagtgcagaagggaaatgtggggttggggcccacacacaaagtccccactggggcactgcctagtggagctatgagaagagggccactacccgcaatggtagatccacctactgcttgcaccgagctcctggaaaagccacagacactcaacaccagcccatgaaaaaagccaggagggtggctgtaccctgcaaagccacagggacggagctgcccaaggccatgggagcccacctcttgcatcagcatgacctggatgtgagacatggcgtcaaaggatatcattttggatttttaaggtttaacgattgcgctactggatttc

SEQ ID NO: 262123 - DNA, 537 bp, Homo sapiens
aataccactatttatcaaatttattgttgatacctgttttgattgttttgagtgttttactgctaataacctttaacttagtttactgctaagttctactgctgctataaattttcttgtacaagtctcagtactcaagtgcaagagcttactcaaggtacattctaagatgtagaattgctgggtatcaggatatgcaaatgtctaactacactatataatgtaaaactgttttccaaagaagtttaacaaaattatattcatataaacagcttctggaaaactctacttttcctaatcctcaacaayggatagctttatcatatttacttgagtaaaatcatgtgaatctgctgggcatttaatggcatctcatttagttttactgtccattttcttaactactaatgaaattatggataatttgatacatttatttgccattttgttattctctttcctaagctacctgattcatctactgttgtttttctcttaagatagtcttcatttagtctgtatacaaacattttcctc

SEQ ID NO: 262124 - DNA, 500 bp, Homo sapiens
ttaaacttttttctgtttgaacctctaaatttattctaattgctagaaattttgatttatcttcttcaatgaaagtggttattttaccaattgttagctttaataaaataacaaggccggacgtggtgactcaggcctgtaatcccakcactttgggaagccgaggtgggcagatcgtgagatcaggagatcaagaccatcctggccaatatggtgaaaccccgtctctgctaaaaaaaaaaaaaaaaacctaggcatggtggctcaggcctgtagtcccagctactcaggaggctgaggcaagggaatcgcttaaacctgggaggcggaggtttcagtgacctgagatcgcaacactgcactccaccctggcgacagagcgagactccatctcaaaaataaatgaataaataaaaataaaatatttaataagtttgttaaacaatacagtatgaagtaataatatctgaagtatctcattcaagtttttccttcaaagt

SEQ ID NO: 262125 - DNA, 595 bp, Homo sapiens
gtttattaaggagtattaactcacatgatcacaaggtgaggcccccattaggctgcaagctgaggagcaaggaagcacgtatgatccccaaagctgaaaaacctggagactgacattcaagggcaggaagcatccagcacggaagaaagatgtaggctcagaaggtaagctagtctgatctctccacgttcttctgcctgcttttattctggccttgctggctgatgactagatgatactcccccagattgagggtaggtctgcctttccccagtccatggactcaaatgttaatctcctttggcagtaccctcacagacacacccaggaacaatactttgcatccttcaatcccatcaagttgacatttaatattaaccctcacagtacttgataaatataaaacatttttattgaattaaagacctttttcagttcttatacgcctagaaagtaaaaggccttaasaatttcttgacaaattgcctctatcctaatagttaaatatctcccacctctgaaaggaatgccatgcaactgtttttcaatttttttcttaaatgaaaagctaaataacaaaatgtagagtttatgc

SEQ ID NO: 262126 - DNA, 597 bp, Homo sapiens
ggtttatatgtaccacatttttaaaaaattcagtctactgttgatggggatttaagttgattccatgtctttgctrttgtaaagagtgctgtgatgaacatacatgtccatgtgtctttgtggtataatagaattatttatattcccttgggtatacacccagtaatgggattgctgggttgaattgtaattctgttttaagttctttaagaaatctccaagatgttttccacagttactgaacttattaacattctcactggcagtgtatgtgttctcttttctctgcaacctcactagcatctgttattttttgatttttaaataatagccattttgactggtgtgagatggtatctcattgtggttttgatctgcatttctctaatgattagtgatgtcgagcatttttttgtatatatgttggccacatatatgtcttctttctaaaagtgtctgtttttgtcctttgtcccactttttaatggggttgatttttttgcctgtaaatttgcttacgtttcgtatagattccagatattagatctttgtcagaagcatagtttgcaaatattttccccattctatatgttgtgt

SEQ ID NO: 262127 - DNA, 537 bp, Homo sapiens
tctgtaagttgctttgggtagtatggccattttcacaatattgattcttcctaaccaagagcatggaatgttttctatttgtgttgtctctgaattctttcggcagtgtttcagaattctcattgtagacatctttcacttccctggttagctgtattgctcaatattttattcattttgcggctattgggaatggaattgcatcctttgatttggctctcagcttggacattcttggtatatagaagtgctactgacttttgtacactgatttttgtatgctaaaattttatggaagttgttgatcagttataggaacctttgtgcaggggcttggggttttctaggtagagaatcatatcrtatgtgaagagacatagttttactgcctcttttcctgttggatactttttatttcttcctctgattagtacaatattggcagtgtgcgatagatggctcttattattttgaggtattttccttcaactctttgttgagggtttttaatatgaaggaatgttgaattttatcaac

SEQ ID NO: 262128 - DNA, 597 bp, Homo sapiens
tggatttacatttaggatagttaagtcatctcgttgaattgaacagtttatcattttataatgctcttctaatgcttttctttgtcctttttgatcattattggtttaaaytttttttttcctgaaaaaagaatagcaacctctgttctcttttattttccttttgcttgatagatctttctccatccctttactttgagcctatggttgtcattgcatgtgagatgaatctcttgaagacagcatacagttgggtattagttctttagtcagcttgccactctgtgcctttttacttggggcatttatcttgtttatgtgcaatgtcagtattatgtgagtttgtaatcccgtcatcatgttgttagctggttgtgacgtacactgtagagttgttttatagcgtcagtgggctatgtacttaagtgtgtttttgcagtttcaggtaagagtcttttgtttccatgtttagcactctcttaaggacctcttataaggcaggtctggtagaaaaaaattcgtttagcatttgcctgtctaaataggattttatttctctttgcttataaaacttaatttagctgaataggatattct

SEQ ID NO: 262129 - DNA, 597 bp, Homo sapiens
tggatttacatttaggatagttaagtcatctcgttgaattgaacagtttatcattttataatgctcttctaatgcttttctttgtcctttttgatcattattggtttaaactttttttttcctgaaaaaagaatagcaacctctgttctcttttattttccwtttgcttgatagatctttctccatccctttactttgagcctatggttgtcattgcatgtgagatgaatctcttgaagacagcatacagttgggtattagttctttagtcagcttgccactctgtgcctttttacttggggcatttatcttgtttatgtgcaatgtcagtattatgtgagtttgtaatcccgtcatcatgttgttagctggttgtgacgtacactgtagagttgttttatagcgtcagtgggctatgtacttaagtgtgtttttgcagtttcaggtaagagtcttttgtttccatgtttagcactctcttaaggacctcttataaggcaggtctggtagaaaaaaattcgtttagcatttgcctgtctaaataggattttatttctctttgcttataaaacttaatttagctgaataggatattct

SEQ ID NO: 262130 - DNA, 569 bp, Homo sapiens
atttctttttgtccttaggcaccatgttgacttacattatcttctgtttattgaaaaaaattagatctccacatgcattttcaaagcctatatcaytcacaagtgtgcttatataaaagagaaattacacataaaataatttagttaagctacttttaaatccttctatattcctagtcttgttattctgaatcatttttaaacttagtcatcaaaggctatattgttcctgttctgttctatgctgtcctttctgttatgtggggaaaacaacgtttctttctttctttctttctttctttctttttttttttgaaatggagtcttactccatcgccaggctgaagtgcagtggtgcaatctcagcttactgcaaccttcgcctcccaggttcaagcaattctcctgcctcagcctcctgagtagctgggattacaggtgtataccaccacgcctggctaatttttgtatttttagtagacatggggtttcaccacgtgggcccagctggtctcaaactcctgatttcacatgatccacccgcctcagcatccccaaagtactgggat

SEQ ID NO: 262131 - DNA, 600 bp, Homo sapiens
aggtatacatagtcagttattcccacaactataaatagtaagtttatacctatctttaytgatgtattaaatttagtctgaatcaagtaatccatcattgaaatatcagaaacacatttcccatgaatgacctacccatatttatatcctgactcatgttaatactactttttagatattctaggaagtatcagattgttttcttccagacaaaattctttatcttttgtacatacacgtaagtcctataaagacaaacaaaaattaaaaataaaaggctgaattctgcttgttcaaaataaggaaagaaacttctcccctttcattaggaggatttaccttagaaaataggccttttgtcgactttatgacccaggaatgtctttctccagagcccggcagccatctctttgaaatgtaaacatcaagaaatagcaccttttacccagtttttgctggagagcaggaatctgactttggtgggcaacatgtttaaagttctaaaattaccttctgttataaacatatgacaagcttatttctcctctaataaagccaataagctaatacagatggtcactccaattgctatgtaaggtt

SEQ ID NO: 262132 - DNA, 600 bp, Homo sapiens
aggtatacatagtcagttattcccacaactataaatagtaagtttatacctatctttattgatgtattaaatttagtctgaatcaagtaatccatcattgaaatatcagaaacacatttcccatgaatgacctacccatatttatatcctgactcatgttaatactactttttagatattctaggaagtatcagattgttttcttccagacaaaattctttatcttttgtacatacacgtaagtcctataaagacaaacaaaaattaaaaataaaaggctgaattctgcttgttcaaaataaggaaagaaacttctcccctttcattaggaggatttaccttagaaaataggccttttgtcgactttatgacccaggaatgtctttctccagagcccggcagccatctctttgaaatgtaaacatcaagaaatagcaccttttacccagtttttgctggagagcaggaatctgactttggtgggcaacatgtttmaagttctaaaattaccttctgttataaacatatgacaagcttatttctcctctaataaagccaataagctaatacagatggtcactccaattgctatgtaaggtt

SEQ ID NO: 262133 - DNA, 601 bp, Homo sapiens
tgcagatgctcaagtcccttatataaaatggcataggatttgcatataacctatgcatatcctcttgtatactttaaatcatccctagattgcttgtgaatccctaatacaatgtaaatgctatgtaaatacttgttataggccaggcactgtggctcattcctataatcccagtgttttaggacgctgaggcaggaggattgctggaggcctggagtttgagaccaacctggamaacatactaagacccctgtctctacaaaaattttaaaagaacataagtaggcatggtggttcatacctgtggtcccagctacttgggagactgaggagggaggatccctcaagaccaggagtttgaggctgcagtgatttatcattgcaccactgcactacagccttggcaacagagtaagagcctgtctctaaaaacaaaaataaacaaagtagttgttatattttattttttgtttatttttatgttattgtattgttattttattttctgaatactttttttagctgttagttgaatctgtgcaggtagagtgcatagatatggtggaccaactgtatttttcttcacatttcacagatgtat

SEQ ID NO: 262134 - DNA, 601 bp, Homo sapiens
tgcagatgctcaagtcccttatataaaatggcataggatttgcatataacctatgcatatcctcttgtatactttaaatcatccctagattgcttgtgaatccctaatacaatgtaaatgctatgtaaatacttgttataggccaggcactgtggctcattcctataatcccagtgttttaggacgctgaggcaggaggattgctggaggcctggagtttgagaccaacctggaaaacatactaagacccctgtctctacaaaaattttaaaagaacataagtaggcatggtggttcatacctgtggtcccagctacttgggagactgaggagggaggatccctcaagaccaggagtttgaggctgcagtgatttatcattgcaccactgcactacagccttggcaacagagtaagagcctgtctctaaaaacaaaaataaacaaagtagttgttatattttattttttgtttatttttatgttattgtattgttattttattttctgaatactttttttagctgttagttgaatctgtgcakgtagagtgcatagatatggtggaccaactgtatttttcttcacatttcacagatgtat

SEQ ID NO: 262135 - DNA, 645 bp, Homo sapiens
tatatgtcactggtttttgtaatgaacttaaaatatcagtcaaataattaacttggaaaaatgtaaatgcaaataccttatggccatttaaagttaggtttaattcatcaatttcayaagcagagatagatatgagatgacaatctggtcttgtccaagtcaggccacccttcccccacatctatcactcaaactcgcctcaactttatcacagggttgaagtggtagtattgggtttatgtatctctaattcccatgaaatattttttacttaacagaccccactaaatatattctcattcacccactcaacaaatactgattaactacttatttaatcaggtcaccactgactatatgaaggtgaactcaggaaacacagcttacagtttaataggatagacaaatctaagatatagtaaaacaaatacaatatatatttttaaatttttaaaatactttttaaaagaaaatttacaaaaatgcagtctgagagaagtgtgagggacacaaatttagattgtgggccaggaatagtctttcttcagaggacattatgaggctcaaagaaagagtagagagtgccccatatgaagagtggtagggataccaacacgtatgaagcaatagactataaagggtttg

SEQ ID NO: 262136 - DNA, 593 bp, Homo sapiens
tataaatattttgagatggagtgtcactctgttgccaaggacggagtacagtgatatgattaagactcactgaagcctcaacttcttgtgctcaagtgatcctcttacctcagcctcccaagcagctgggcctataggtatgtgccaccgtgcccagcttatttttgtatttttttttatagagatggggtttcaccatattgcccagtctggcctagaattcctgggctcaagtgatcaacctgcctcaacctcttaaagtgctgggattacaagtgtgagccaccacatctggcctattttatcaatattgatgctatattgattgtttatgataagttagttgccatgcattagggacaaagcaaatgatccaagtgtggtaaatattataggtgatgtacagataggtagaaactcaggaaaatgggtctacacattataattctacagagaaccagggagttctaktttgcatggtggtctaggctattcttgcattgctatcaataaatacctgaaactgggtaatttgtaaagaatataagtttaatttttgcacagttctgcaagctgtacaggaagcatggcac

SEQ ID NO: 262137 - DNA, 628 bp, Homo sapiens
tctcttctcttgtctgctgtcatgtgagatgtgccttttaccktcgccatgattgtgagtcctccccaaccacgtggagctgtatgtccactaaacctctttcttttgtaaattgcccaggcttgggcaagtctttatcagcagcatgaaaatggactaatacagtgtctattgaaaaaattgtattaaactttagttaagtctggtaatttaatttgattatttaggtaacttaggctctaattgtctgacccatatgaattctttcacaggttttcacctactcatgttcatttttcttctgtgtatgcgtaaattagatgtctaatattacctttgtgatagagggtaagtggtgttctctgattcctgaggagaggtctggtcctgtgcttgtggatagataagctgaccttctaattggaatgatggccactaagctgtgactgatgccgcctctgggtgagggttgcagaatgctaagactagaataactttcttttttcagcaaaaaccctcccttgtcccctgatgacttggctgcatcttagccatttcatttctacaacatgtatgccctcaggcaagcatgccagactacagtcttcccctcaggggcagctggtgt

SEQ ID NO: 262138 - DNA, 628 bp, Homo sapiens
tctcttctcttgtctgctgtcatgtgagatgtgccttttaccgtcgccatgattgtgagtcctccccaaccacgtggagctgtatgtccactaaacctctttcttttgtaaattgcccaggcttgggcaagtctttatcagcagcatgaaaatggactaatacagtgtctattgaaaaaattrtattaaactttagttaagtctggtaatttaatttgattatttaggtaacttaggctctaattgtctgacccatatgaattctttcacaggttttcacctactcatgttcatttttcttctgtgtatgcgtaaattagatgtctaatattacctttgtgatagagggtaagtggtgttctctgattcctgaggagaggtctggtcctgtgcttgtggatagataagctgaccttctaattggaatgatggccactaagctgtgactgatgccgcctctgggtgagggttgcagaatgctaagactagaataactttcttttttcagcaaaaaccctcccttgtcccctgatgacttggctgcatcttagccatttcatttctacaacatgtatgccctcaggcaagcatgccagactacagtcttcccctcaggggcagctggtgt

SEQ ID NO: 262139 - DNA, 628 bp, Homo sapiens
tctcttctcttgtctgctgtcatgtgagatgtgccttttaccgtcgccatgattgtgagtcctccccaaccacgtggagctgtatgtccactaaacctctttcttttgtaaattgcccaggcttgggcaagtctttatcagcagcatgaaaatggactaatacagtgtctattgaaaaaattgtattaaactttagttaagtctggtaatttaatwtgattatttaggtaacttaggctctaattgtctgacccatatgaattctttcacaggttttcacctactcatgttcatttttcttctgtgtatgcgtaaattagatgtctaatattacctttgtgatagagggtaagtggtgttctctgattcctgaggagaggtctggtcctgtgcttgtggatagataagctgaccttctaattggaatgatggccactaagctgtgactgatgccgcctctgggtgagggttgcagaatgctaagactagaataactttcttttttcagcaaaaaccctcccttgtcccctgatgacttggctgcatcttagccatttcatttctacaacatgtatgccctcaggcaagcatgccagactacagtcttcccctcaggggcagctggtgt

SEQ ID NO: 262140 - DNA, 628 bp, Homo sapiens
tctcttctcttgtctgctgtcatgtgagatgtgccttttaccgtcgccatgattgtgagtcctccccaaccacgtggagctgtatgtccactaaacctctttcttttgtaaattgcccaggcttgggcaagtctttatcagcagcatgaaaatggactaatacagtgtctattgaaaaaattgtattaaactttagttaagtctggtaatttaatttgattatttaggtaacttaggctctaattgtctgacccatatgaattctttcacaggttttcacctactcatgttcatttttcttctgtgtatgcgtaaattagatgtctaatattacctttgtgatagagggtaagtggtgttctctgattcctgaggagaggtctggtcctgtgcttgtggatagataagctgaccttctaattggawtgatggccactaagctgtgactgatgccgcctctgggtgagggttgcagaatgctaagactagaataactttcttttttcagcaaaaaccctcccttgtcccctgatgacttggctgcatcttagccatttcatttctacaacatgtatgccctcaggcaagcatgccagactacagtcttcccctcaggggcagctggtgt

SEQ ID NO: 262141 - DNA, 371 bp, Homo sapiens
ccattgtgattcaggaagggctattcatatgagttaatattatccaataatagcccagcttaacaaacacaaaatctttgcatcarattaacataatgcaggactgaatcaaaactatctgcttctactttatatttatgctaagagcaaaagaatgatcctctctggaatcagacagtatcatctagagtttcaaatgatccctacaatttttataatgtctgacattcaataaaaacttgacatttttgaactcaagagtaagtacctgaaaaaaaatagcgaaaaaagaaacaataaaaacagactcacaggaaatctattcattttaagttttagaaatgtacttaaatgtactcataaaaaataga

SEQ ID NO: 262142 - DNA, 484 bp, Homo sapiens
gttttcacccgtgccctgagaaagacaagggctaccttaaggcttttgcctgtaaggaaagggtctaagcatggtttcagcatttccttcactggcagctgacatcctcctgtaggtctgcccaccgaggaaaattttctccagtgcccagccctgccctcaatctcaggaagcaccttcctcaacacccaggaaagtccatagccttgtaattgagtgcaaattcccctttatctgctctactttgtcttgagtaagcccacatttggcctttagtatttagttaaaaattttatctgaattgctttttacccacttgtattmcagccacaatttcccctttgctctgccaagggtaagcccgtgtgtgcatcctggttctttttgaagacatctgtcatttctccagtttcagattagttgtgtgctctggagcctaatctctctgaaggatttgagaaaaatatgaccttccagattacct

SEQ ID NO: 262143 - DNA, 561 bp, Homo sapiens
tctgaaaatgttagatgaaaaatttcagaaataagttataagttttaaattgtgcatcaccrttctgagtagtgtgatgaaatcttgcaccatcctgctctctcccacccaagatgtgaatccctcctttgtccgctatatccatactgtctatactacctactcattagtcattaagtagctgtctagggtatcagatcaactaccttggtatggcagttgtgttcaagtaatccttatctgacttactaatggccccaaagcccatgagtagtgatgctggcaatttggaagcaaagagaagtaataaagttcttcctttaagtgaaaaggtgactttggccttccttagccatagtttggcacatctgtaatttcaggcattcactagggcccttggaatgcatcccctgttgataagtggggactactatatatccaaaagtgggattgctggatcaaatggaaattctgtttttaatttttttgaaaaccaccaaaggtgttaaacggctgttaaagccattaagtttttcaattcagttattttattattcagtt

SEQ ID NO: 262144 - DNA, 561 bp, Homo sapiens
tctgaaaatgttagatgaaaaatttcagaaataagttataagttttaaattgtgcatcaccattctgagtagtgtgatgaaatcttgcaccatcctgctctctcccacccaagatgtgaatccctcctttgtccgctatatccatactgtctatactacctactcattagtcattaagtagctgtctagggtatcagatcaactaccttggtatkgcagttgtgttcaagtaatccttatctgacttactaatggccccaaagcccatgagtagtgatgctggcaatttggaagcaaagagaagtaataaagttcttcctttaagtgaaaaggtgactttggccttccttagccatagtttggcacatctgtaatttcaggcattcactagggcccttggaatgcatcccctgttgataagtggggactactatatatccaaaagtgggattgctggatcaaatggaaattctgtttttaatttttttgaaaaccaccaaaggtgttaaacggctgttaaagccattaagtttttcaattcagttattttattattcagtt

SEQ ID NO: 262145 - DNA, 486 bp, Homo sapiens
agataagaaatcaaaataataaaaaattcaattcaaaaaatttcaaagggaaaacacttctacaatattccaaaaaagtccagaagcctttgatgaaaaaactgaaagcactaaaacctaatgttcatataaatgttattaaggtttaaaatatatttggtgcttaattaaagttgagcagtgatgttctgaatacaaaagcgtgaaaccataaaaaaaaggrtgaaatatttgttacacattacacattaaagtcaaacagcttttataaaaagaaaaaaaaaagaattaaaaacaaatgaaacaaaaacccccaaaatacaagatgatcaaagattaatgtcctaaatatataatctatagtaatcaaaacatgatctaaaaataaatacaatgtaaaagaaaaaatatccagacagcataccaaatatatgttcaaaatcactagcaatccaagaaatgcatctcaatgttgtcctgtcatgc

SEQ ID NO: 262146 - DNA, 486 bp, Homo sapiens
agataagaaatcaaaataataaaaaattcaattcaaaaaatttcaaagggaaaacacttctacaatattccaaaaaagtccagaagcctttgatgaaaaaactgaaagcactaaaacctaatgttcatataaatgttattaaggtttaaaatatatttggtgcttaattaaagttgagcagtgatgttctgaatacaaaagcgtgaaaccataaaaaaaagggtgaaatatttgttacacattacacattaaagtcaaacagcttttataaaaagaaaaaaaaaagaattaaaaacaaatgaaacaaaaacccccaaaatacaagatgatcaaagattaatgycctaaatatataatctatagtaatcaaaacatgatctaaaaataaatacaatgtaaaagaaaaaatatccagacagcataccaaatatatgttcaaaatcactagcaatccaagaaatgcatctcaatgttgtcctgtcatgc

SEQ ID NO: 262147 - DNA, 626 bp, Homo sapiens
atctgcatttctctgatgctcaataatattgagcacctttcaacatgtctaagtgacatttgtatgtcttctgagaaatgtttattcaaatgttttgcctattgtttgactggattattagactatttcctataaagctgtttgaattccttatattttctggttattaatcccttgtaaaataggtagtttgcaaatattttctcccaacctgtgggtggtttcttgactttgttgattgacttatttgctgtccagaagctttttaccttagtgtgatcccatttgtccattttttctttggttgcttttgcttttggggtattaataaaaaaatctctgcccagaccagtatcttggagagttgtcccaaagttttcttttagcagttccatagtttgaggtcttagatttatgtctttaatttattttgatttgatttttatatatggtgagagayaggggtctagtatcattcttctgtatatggatatctagtttccccagtacaatttatgaaaaggactgctctttccttaatacatgtttttggcacatttgttgaaaattagttcactgaaaatgtatggatttattattatattctctattctgttccattggtc

SEQ ID NO: 262148 - DNA, 563 bp, Homo sapiens
gcccactgctcaagccatttatttcgtgactccagacagctgagtaggaaactaaactaatataatcaaatcgatcactttaaacagtgtaaatctggtcacttttggttagttattagattctttttcaattactgcctaggggaaaagggaatatattttacttcttgaaatagataatcgtgcatagaataaaaagacatcaaaatcgtgaaatgacataacatatttctgcttatgcgaacagatggaaatctatacattctaacatatacagtctctaaaaaacttactttaaagcataggccacctaattagtgtgggtaggggaaggtgtcaagtttgaaagttttaaattttagactcacatgtgtttatatacatttatttaccatggtattactttacaattatactttcttttaactcaaaacactataatttatttayatctaattattgaagtcagcaattagggctggttttcagcttgactcactcaggtatctttagtcagaagcaaggtgacaagagacaacagcatattagatttcttgaggcct

SEQ ID NO: 262149 - DNA, 657 bp, Homo sapiens
tgtggtactaaatgtacccagacaaatatttaagataattataaatgggggatattaaagggacataaaaggaagtaagttttcttcacttcactcaaaccgataaaatgacatccccaggagacaatgataagctatatatacataacaaatacttataacaaccattaataaaaatatacaaagtgatacaatcaagagacctatagatacatcaaaaagaaattgtaaaaagtgtttaagtaacccaaggaatgacagaaaaaataaaacagagaagtaaaaaacataataaacgggaaacaaaagaaaacaaaaaggtggacttaatcatgaatatatcaataactagagtatatgtaaatggtctaaagacacaaattaacagacagcaattagcagagaaaactatataacataacccactatatgwtgtctataaaaaattctcatcaaatataacaatgtagacacacttaaagtaaaaggatgcaaaaagatgtattatacataatccaataatattagaagttgctatattaatatcagataatgaagaaagaaaaaagttattagatacagaatggggcattatgtaatttttgaaggttattcaacaagaaaacatagctatcctgtgtgtataccaaacaacag

SEQ ID NO: 262150 - DNA, 657 bp, Homo sapiens
tgtggtactaaatgtacccagacaaatatttaagataattataaatgggggatattaaagggacataaaaggaagtaagttttcttcacttcactcaaaccgataaaatgacatccccaggagacaatgataagctatatatacataacaaatacttataacaaccattaataaaaatatacaaagtgatacaatcaagagacctatagatacatcaaaaagaaattgtaaaaagtgtttaagtaacccaaggaatgacagaaaaaataaaacagagaagtaaaaaacataataaacgggaaacaaaagaaaacaaaaaggtggacttaatcatgaatatatcaataactagagtatatgtaaatggtctaaagacacaaattaacagacagcaattagcagagaaaactatataacataacccactatatgatgtctataaaaaattctcatcaaatataacaatgtagacacacttaaagtaaaaggatgcaaaaagatgtattatacataatccaataatattagaagttgctatattaatatcagataatgaagaaagaaaaaagttattagatacagaatggggcattatgtaatttttgaaggttattcaacaagaaaayatagctatcctgtgtgtataccaaacaacag

SEQ ID NO: 262151 - DNA, 570 bp, Homo sapiens
tcctaggtaaacttgacaggcagtctagaatgtaaggattgcaattcctagtcaacttcttgtgctgggccgggcttagagccagtggactaggaagcacgtgacctagaaggtcaccagccagagaggctaaaggagtgcttgtgctattcctcccccaacctcaggcagtgcagcctgaagcaaaaaaaaaaaaagaaaagagaagaataaaagaaaaaaatagggacaacttccttctgctctaggagaggatagcaaagagtaaaaaccattttgtattgcaccttgaatagcagcccagccacaataagataggaaactgggcaaagtcatgaggcccccattccaggcccaaggtcactgacatttcaagayacatcctggaacgaaagagaaaccagtgccttgatgagaaggaccaagtcctagcaggattcatcacctactgactaaagagcccttggacccctaataaccatcagcgatacccaggtattatgccatgggccttgggctctgagatgtgctggctttaggggtgacctagcatatgcccagctgtggtgg

SEQ ID NO: 262152 - DNA, 473 bp, Homo sapiens
aaccattttgtattgcaccttgaatagcagcccagccacaataagataggaaactgggcaaagtcatgaggcccccattccaggcccaaggtcactgacatttcaagacacatcctggaacgaaagagaaaccagtgccttgatgagaaggaccaagtcctagcaggattcatcacctactgactaaagagcccttggacccctaataaccatcagcratacccaggtattatgccatgggccttgggctctgagatgtgctggctttaggggtgacctagcatatgcccagctgtggtggctatgccgaaagactccttctgtttgaaagaagcaaaagaaaaagtaaaggggactttgtcttgcaccttaggtaccagcctgaacacagtggatagggcaacaagcaggcccttggggtccttaagtccaggcctaggctcttggatagtatttctggacctgcgatgggc

SEQ ID NO: 262153 - DNA, 493 bp, Homo sapiens
ttgtcttgcaccttaggtaccagcctgaacacagtggatagggcaacaagcaggcccttggggtccttaagtccaggcctaggctcttggatagtatttctggacctgcgatgggccagaggagggccaactgcmctgaatggggagcccttggctttaagtgaacaacagtggtgacctggtaaaaccctctgtgggacagtagtggctgtggccacaaagagaggctcctctgcctgcaaaaaggggaggcaaaagcagacaggggctttgtattctggtttgagtgccagcttagctgcagtagaatagaatatcaagtacatttctaagatttttgacgctaatccctgactcccagacagcatttctggacctgccttggtcctgggggaactcactgctctgaagggtatgatgtaaacctggctggcctcgctacctgctaattgtaggggcctaggtagtagccagatagtaaacacaggtggta

SEQ ID NO: 262154 - DNA, 578 bp, Homo sapiens
agctgtggtggctatgccgaaagactccttctgtttgaaagaagcaaaagaaaaagtaaaggggactttgtcttgcaccttaggtaccagcctgaacacagtggatagggcaacaagcaggcccttggggtccttaagtccaggcctaggctcttggatagtatttctggacctgcgatgggccagaggagggccaactgcactgaatggggagcccttggctttaagtgaacaacagtggtgacctggtaaaaccctctgtgggacagtagtggctgtggccacaaagagaggctcctctgcctgcaaaaaggggaggcaaaagcagacaggggctttgtattctggtttgagtgccagcttagctgcagtagaatagaatatcaagtacatttstaagatttttgacgctaatccctgactcccagacagcatttctggacctgccttggtcctgggggaactcactgctctgaagggtatgatgtaaacctggctggcctcgctacctgctaattgtaggggcctaggtagtagccagatagtaaacacaggtggtagcagatagtggttacagt

SEQ ID NO: 262155 - DNA, 578 bp, Homo sapiens
agctgtggtggctatgccgaaagactccttctgtttgaaagaagcaaaagaaaaagtaaaggggactttgtcttgcaccttaggtaccagcctgaacacagtggatagggcaacaagcaggcccttggggtccttaagtccaggcctaggctcttggatagtatttctggacctgcgatgggccagaggagggccaactgcactgaatggggagcccttggctttaagtgaacaacagtggtgacctggtaaaaccctctgtgggacagtagtggctgtggccacaaagagaggctcctctgcctgcaaaaaggggaggcaaaagcagacaggggctttgtattctggtttgagtgccagcttagctgcagtagaatagaatatcaagtacatttctaagatttttgacrctaatccctgactcccagacagcatttctggacctgccttggtcctgggggaactcactgctctgaagggtatgatgtaaacctggctggcctcgctacctgctaattgtaggggcctaggtagtagccagatagtaaacacaggtggtagcagatagtggttacagt

SEQ ID NO: 262156 - DNA, 488 bp, Homo sapiens
acaatgatgtgttgtctacaagaaacacacttcacttataaagagacaaacagactgaaaataaagggatagaaaaagatatccatgccaagggaaatgaaaaagagagcatgaatgtctataattatattaaaaaaatagatttcaggacgaaaactataagaagagacaaaataggtcatcatataatgataaaggtgtcaagcaataggatataatgattttatatatatatatatatatatatatatatatatatatatatatatccaacactggatcacccagatatataaagcaaatattgytagagctataaagaggaattgatctcaatactacaataactagagacaacaccccactttcagcattgaacagaactcccagacagaaaataaacactggacttagaatgaagggactaatagatatttacagaacatttcattcaacagctgcagaatccacattcttcttagtacatg

SEQ ID NO: 262157 - DNA, 641 bp, Homo sapiens
ttgtatttttagtagagatggggtttcaccatgctggccaggctggtctggaacttgtgaccttaagtgacccacccaccttggcctcccaaagtgctgggattacaggtgtgagccaccctggcccatgccattattattaattacagtcaccctgccgacaatagatctccagaactattccctatgtctaactgaaatgtttaactgtttacccaacatctttgccctcccaagcagcccgttaaccaccattccacttcytgtttctatgagctagattattaaattccacatataaaggagatcatgaacaattcggctttctgtgactgggtagttcactagatataatgtcctccagatttattcatatttttgcaaatgacaaaatttctttttcttttttaagctgaataataccattgtgcatatgtaccacaattactttatccattcatccgttgatgaaccctttggttaattccatatcttgactattgtgaataatgctgcaatgaacatcagagtgaagatacctttttgacatactacttttatttcctttagatacatattcaaaagaggaattggtgggttatatggtagttctatttttaagttttttgaggaacccccat

SEQ ID NO: 262158 - DNA, 641 bp, Homo sapiens
ttgtatttttagtagagatggggtttcaccatgctggccaggctggtctggaacttgtgaccttaagtgacccacccaccttggcctcccaaagtgctgggattacaggtgtgagccaccctggcccatgccattattattaattacagtcaccctgccgacaatagatctccagaactattccctatgtctaactgaaatgtttaactgtttacccaacatctttgccctcccaagcagcccgttaaccaccattccacttcctgtttctatgagctagaytattaaattccacatataaaggagatcatgaacaattcggctttctgtgactgggtagttcactagatataatgtcctccagatttattcatatttttgcaaatgacaaaatttctttttcttttttaagctgaataataccattgtgcatatgtaccacaattactttatccattcatccgttgatgaaccctttggttaattccatatcttgactattgtgaataatgctgcaatgaacatcagagtgaagatacctttttgacatactacttttatttcctttagatacatattcaaaagaggaattggtgggttatatggtagttctatttttaagttttttgaggaacccccat

SEQ ID NO: 262159 - DNA, 538 bp, Homo sapiens
aaatgattagataacaaaaataaactgtatcttctcattagtttggtctataccttcctataagttgacctatatttgggcaatttttctgactttgtcttcatatcatggcataaaacttctgtcctgctctagttctcaaactggctatattaagatagaagtggtaaaacaagaaatggggtaggccatggtgaactcccagaattttatgggatgttccataatcagamtctaagagaataatataaattagtgttaaggaacaataaccagcatttaaggataaataaaaaatcagagttcagagagggcaatgaggggctgactaaattcttacgaacatttgtagccagtatctcaggtgattttaaatgtgtaaaatatataaagcacagttttctcttccctaaaagtagatcaacaatgtccacattaggacagttttttagaaatttttaaatctatttttaattgaaaaataatcatgtatatttataaggtataatgtgatattttcatctaagtatacattgta

SEQ ID NO: 262160 - DNA, 603 bp, Homo sapiens
aaagaggagtcttaactttaaaatacacctttgtatttattctcaaatagtgtgtaatttatacatataaatgtttttattagaataggaaaaaaacagacattgaatgtgacagcagattgttttcwtgagcaaagtaggtgagaatggtgaaaggctatgagaagaaagtgctgagaacatgccttagagccagattgagtcattaaacatattctgagttatgataactgtgacatgccattttctatactaaattattagtattaagctaccttactgaacccattaagaattttaatagtaaaaatgaaagaaaaataagtagcttggaaatataggaacgatagagaaagtggactgaatcatgtaacgtttagtgggatcagtgctatgattcctgacagagagagataagagcaaagaaaaagcccttataatcatctcttctttcatccagatgtgtattggttgcatagtctcatgatgggtatctattgggtttactattgattttttttatgggaaaagaagatgggttgatttcagtagaaactaattcccttctttgagtaactcttagtagctatagctgccataaca

SEQ ID NO: 262161 - DNA, 608 bp, Homo sapiens
agacaggcaataactaatgctcacgagaatgtggaggaaagagaatccttgtcctctctttgttataaggtacaaccactaygaagaacagttaggagtttcctcaacaaactaaaaacagagccaccactgctggatatatgctcaaaattaagaaaatcagtatttcaaagagatatctgcactcccatgcttgctgcagcactgtccacaacagctgcgataatggaaacaacctaagtgttcatcaatagatgtatggataaagcaaatgtggtacttatatgcaatggagtactattcagccataagaaagaatgagatcttgtcatttgcagcaacatggatggaactggaggacattataagtgaaataagctaggcacagaaagacaaacgtgcatgttctcatttatttgtgaaatctaaaaatcaaaacaattacgctcatggtgatagagagcagactgatggttaccagagactaggtagggtagttgtgggtggagatggggggtaatatctgggcacaaatataataattagaaagcataaataagacagtatttgatagcacaacagggtgactatagtcaataataattata

SEQ ID NO: 262162 - DNA, 608 bp, Homo sapiens
agacaggcaataactaatgctcacgagaatgtggaggaaagagaatccttgtcctctctttgttataaggtacaaccactacgaagaacagttaggagtttcctcaacaaactaaaaacagagccaccactgctggatatatgctcaaaattaagaaaatcagtatttcaaagagatatctgcactcccatgcttgctgcagcactgtccacaacagctgcgataatggaaacaacctaagtgttcatcaatagatgtatggataaagcaaatgtggtacttatatgcaatggagtactattcagccataagaaagaatgagatcttgtcatttgcagcaacatggatggaactggaggacattataagtgaaataagctaggcacagaaagacaaacgtgcatgttctcatttatttgtgaaatctaaaaatcaaaacaattamgctcatggtgatagagagcagactgatggttaccagagactaggtagggtagttgtgggtggagatggggggtaatatctgggcacaaatataataattagaaagcataaataagacagtatttgatagcacaacagggtgactatagtcaataataattata

SEQ ID NO: 262163 - DNA, 608 bp, Homo sapiens
agacaggcaataactaatgctcacgagaatgtggaggaaagagaatccttgtcctctctttgttataaggtacaaccactacgaagaacagttaggagtttcctcaacaaactaaaaacagagccaccactgctggatatatgctcaaaattaagaaaatcagtatttcaaagagatatctgcactcccatgcttgctgcagcactgtccacaacagctgcgataatggaaacaacctaagtgttcatcaatagatgtatggataaagcaaatgtggtacttatatgcaatggagtactattcagccataagaaagaatgagatcttgtcatttgcagcaacatggatggaactggaggacattataagtgaaataagctaggcacagaaagacaaacgtgcatgttctcatttatttgtgaaatctaaaaatcaaaacaattacgctcatggtgatagagagcagactgatggttaccagagactaggtagggtagttgtgggtggagatggsgggtaatatctgggcacaaatataataattagaaagcataaataagacagtatttgatagcacaacagggtgactatagtcaataataattata

SEQ ID NO: 262164 - DNA, 487 bp, Homo sapiens
tcttgttctaaaagaaactgataatacttatgcaatctctgtgctttaatttatatttgatacatgccttcatgtaacaacaacttatttcataattaatatttgctaggctgtgcgtatacaatgggaagcaaaaaggttcctgttccggctctcaatatattacatcctatgaggaaagtcaatatgatcaagtactacacaatatccacattcagagcatatgagcaccatakaaacacaccaacaaaaagtgtagggatctaggaaagtgtgtaaataccaactgagattaactaaggaaactaagaaagccttttctcaaaaaatcagcattggagttgagatccgaacagtgaatgtgaattaataagttgtgagcgtgggtattctcatgcactcatgcagcgtattatacaaaggtcctggggcaaaaccagtgttaacacctgtgccgatggagcaagtcagaaggatccagtgatgc

SEQ ID NO: 262165 - DNA, 608 bp, Homo sapiens
ctcttccttcatttttcattaacttcattggctcagcctgaatacgcatccatgcagagtagattcaaacagccgatcagttcagctggtaggwaactctgtctggtgccctgtctctgggccctatgatattctttaagtcttctaagtactttctttccctttgctacaccttgtggggaatggaggcctgtggtcttttctgacatcaatctattcaagcgtgcaagcctacctactctcagtgctgtctttgtaaagagaaaattgagagcacatgggtccgaagatttcatcactcacaccctgatccattttcacttgtctgtatctaatttgacatcgtatttccccctgaagcccactgagcagcatcttgcaaaaatgagaggcttttgcctaagggttcatgaaacagaaaaggatgattttcctttgtaatgtggcttggaccccacagctatggtatagcaaacaggatcatcaaaactgctctgctcttccaaaagctatagacaaaggaaactcagtaacctggcatgccagcaaaagcgtaagaatttcctaccagccaggcttctggactctgtctctctgtgcagactggc

SEQ ID NO: 262166 - DNA, 578 bp, Homo sapiens
tgatggtttaggtatgaaatgatgtgaactttgcttawtgctcttgcggcagtgggaatggaacgagagaagcattaaggtttaaaaaaggtattctgtggggtatagagcacatgctagaattaccagaatttatagttaatacctctggtgttttatagactaaacaactgtatttaaatacaaaataagaaggagaagaagaaaggaaaattagaaatcagaaactgtcaaatccaatgttagggaggtcccgccacaattcctctgtgggttttttgactctatcattgacttgcctcatggaagctgaccaggtcttataaataccttcagtatttgactgcatagcataaattgcacgttaatctctgcattgctcattccagagagatggaaagcatgacttaaaattggattaaactggctgcgatatggattagtttgccggaaactacactgaattccatgtaaaattaagaaggcatggcaaatagatgctacagaagcaaacagaaagattcagcttcagcatggctgagcctctgaagaatgcggtggaaaggaaatgtgatgtt

SEQ ID NO: 262167 - DNA, 578 bp, Homo sapiens
tgatggtttaggtatgaaatgatgtgaactttgcttattgctcttgcggcagtgggaatggaacgagagaagcattaaggtttaaaaaaggtattctgtggggtatagagcacatgctagaattaccagaatttatagttaatacctctggtgttttatagactaaacaactgtatttaaatacaaaataagaaggagaagaagaaaggaaaattagaaatcagaaactgtcaaatccaatgttagggaggtcccgccacaattcctctgtgggttttttgactctatcattgacttgcctcatggaagctgaccaggtcttataaataccttcagtatttgaytgcatagcataaattgcacgttaatctctgcattgctcattccagagagatggaaagcatgacttaaaattggattaaactggctgcgatatggattagtttgccggaaactacactgaattccatgtaaaattaagaaggcatggcaaatagatgctacagaagcaaacagaaagattcagcttcagcatggctgagcctctgaagaatgcggtggaaaggaaatgtgatgtt

SEQ ID NO: 262168 - DNA, 578 bp, Homo sapiens
tgatggtttaggtatgaaatgatgtgaactttgcttattgctcttgcggcagtgggaatggaacgagagaagcattaaggtttaaaaaaggtattctgtggggtatagagcacatgctagaattaccagaatttatagttaatacctctggtgttttatagactaaacaactgtatttaaatacaaaataagaaggagaagaagaaaggaaaattagaaatcagaaactgtcaaatccaatgttagggaggtcccgccacaattcctctgtgggttttttgactctatcattgacttgcctcatggaagctgaccaggtcttataaataccttcagtatttgactgcatarcataaattgcacgttaatctctgcattgctcattccagagagatggaaagcatgacttaaaattggattaaactggctgcgatatggattagtttgccggaaactacactgaattccatgtaaaattaagaaggcatggcaaatagatgctacagaagcaaacagaaagattcagcttcagcatggctgagcctctgaagaatgcggtggaaaggaaatgtgatgtt

SEQ ID NO: 262169 - DNA, 578 bp, Homo sapiens
tgatggtttaggtatgaaatgatgtgaactttgcttattgctcttgcggcagtgggaatggaacgagagaagcattaaggtttaaaaaaggtattctgtggggtatagagcacatgctagaattaccagaatttatagttaatacctctggtgttttatagactaaacaactgtatttaaatacaaaataagaaggagaagaagaaaggaaaattagaaatcagaaactgtcaaatccaatgttagggaggtcccgccacaattcctctgtgggttttttgactctatcattgacttgcctcatggaagctgaccaggtcttataaataccttcagtatttgactgcatagcataaattgcaygttaatctctgcattgctcattccagagagatggaaagcatgacttaaaattggattaaactggctgcgatatggattagtttgccggaaactacactgaattccatgtaaaattaagaaggcatggcaaatagatgctacagaagcaaacagaaagattcagcttcagcatggctgagcctctgaagaatgcggtggaaaggaaatgtgatgtt

SEQ ID NO: 262170 - DNA, 376 bp, Homo sapiens
ataaaattattctccactctcctcatccttcaattggcagcatatccacattcttcttggatgtgggacgagaactcgggagctgccaaatgcaggtatgagctataacacaggtgggttggggcatgcccagctcagccacgggmtgagccagtgcacaagtcaggtgtgtccccagcaggccaggtgaacaggccatctcctgcagctggtagtgtggccgagcaagtggggaacattgttgtccagaggttcccaattggcaaaatgactgagaaaaaccttgcatttgtagaaatatccagagagagagagagagagagagttcagattgtagagatggggtagagtctctaatagtgcataataattcaca

SEQ ID NO: 262171 - DNA, 376 bp, Homo sapiens
ataaaattattctccactctcctcatccttcaattggcagcatatccacattcttcttggatgtgggacgagaactcgggagctgccaaatgcaggtatgagctataacacaggtgggttggggcatgcccagctcagccacgggctgagccagtgcacaagtcaggtgtgtccccagcaggccaggtgaacaggccatctcctgcagctggtagtgtggccgagcaagtgggkaacattgttgtccagaggttcccaattggcaaaatgactgagaaaaaccttgcatttgtagaaatatccagagagagagagagagagagagttcagattgtagagatggggtagagtctctaatagtgcataataattcaca

SEQ ID NO: 262172 - DNA, 591 bp, Homo sapiens
gagtaataattgtagaagggtttgaatttaaaaaaaaaagataaggaaaagactttttttctttgctatagaaggcacttcaacaagtttacaaccaagggagtagggaaaaatgaatacagaaaaatgataatatttgtggatatagaacctcaatcacagaggtagatgttggccttaaattgtatgggaracatgggttttcataaggtctgtgaaggatatgaggacgatgtttacaaaagtaactgtaatggtgttttactaattatttttattttaatttatccatttggagaattctgtttcttttttatactgtcattatttggcaaaatgcaaaaagaagaaccacatagaaataattacttcttcacctgtatccaatgataatcattgctactgaatgcattcatacacatatagacatttttaattgatgatacatgcaattttttagacaatgtagattttatttataagtaattttttctacaaattgtaatataaattattttactattggattagatatttttcaaaaggattactttcatggctgtttcatatgctattgaatttatattacat

SEQ ID NO: 262173 - DNA, 591 bp, Homo sapiens
gagtaataattgtagaagggtttgaatttaaaaaaaaaagataaggaaaagactttttttctttgctatagaaggcacttcaacaagtttacaaccaagggagtagggaaaaatgaatacagaaaaatgataatatttgtggatatagaacctcaatcacagaggtagatgttggccttaaattgtatgggaaacatgggttttcataaggtctgtgaaggatatgaggaygatgtttacaaaagtaactgtaatggtgttttactaattatttttattttaatttatccatttggagaattctgtttcttttttatactgtcattatttggcaaaatgcaaaaagaagaaccacatagaaataattacttcttcacctgtatccaatgataatcattgctactgaatgcattcatacacatatagacatttttaattgatgatacatgcaattttttagacaatgtagattttatttataagtaattttttctacaaattgtaatataaattattttactattggattagatatttttcaaaaggattactttcatggctgtttcatatgctattgaatttatattacat

SEQ ID NO: 262174 - DNA, 591 bp, Homo sapiens
gagtaataattgtagaagggtttgaatttaaaaaaaaaagataaggaaaagactttttttctttgctatagaaggcacttcaacaagtttacaaccaagggagtagggaaaaatgaatacagaaaaatgataatatttgtggatatagaacctcaatcacagaggtagatgttggccttaaattgtatgggaaacatgggttttcataaggtctgtgaaggatatgaggacgatgtttacaaaagtaactgtaatggtgttttactaattatttttattttaatttrtccatttggagaattctgtttcttttttatactgtcattatttggcaaaatgcaaaaagaagaaccacatagaaataattacttcttcacctgtatccaatgataatcattgctactgaatgcattcatacacatatagacatttttaattgatgatacatgcaattttttagacaatgtagattttatttataagtaattttttctacaaattgtaatataaattattttactattggattagatatttttcaaaaggattactttcatggctgtttcatatgctattgaatttatattacat

SEQ ID NO: 262175 - DNA, 591 bp, Homo sapiens
gagtaataattgtagaagggtttgaatttaaaaaaaaaagataaggaaaagactttttttctttgctatagaaggcacttcaacaagtttacaaccaagggagtagggaaaaatgaatacagaaaaatgataatatttgtggatatagaacctcaatcacagaggtagatgttggccttaaattgtatgggaaacatgggttttcataaggtctgtgaaggatatgaggacgatgtttacaaaagtaactgtaatggtgttttactaattatttttattttaatttatccatttggagaattctgtttcttttttatactgtcattatttggcaaaatgcaaaaagaagaaccacatagaaataattacttcttcacctgtatccaatgataatcattgctactgaatgcattcatacacatatagacatttttaattgatgatacatgcaattttttagacaatgtagattttatttataagtaattttttctacaaattgtaatatarattattttactattggattagatatttttcaaaaggattactttcatggctgtttcatatgctattgaatttatattacat

SEQ ID NO: 262176 - DNA, 602 bp, Homo sapiens
aattttcttacagttgtggagtcttaaaaaccaagatcgaggtaccagcaaagttcctttctcctgaggcctctcctcttggcttgtagatgggcatcttctcactgtgtcttcacatggtctttattctgtttgcatacatcactggtatcttattctattcttacaaatacaccagtcctgttggattagggccccacctttatgatctcatgtcactgttattaccgtcttaaaagccctgtctccagatacagtcacactaggagttaggtcttcagcaaataggctttggggggagatagggcactactaagtccataccagctgttatatcttagcattaatcagtcaatgcatttggtttgtcytgggaagtgataaagcctttagtctgaatgacactctttagctcaattggttattcctcgaattcatgaatatataaatggagtgaagaatgttagcaattggcaaagtcctcatattgatatatttgccctttagaatatgatgtattgtggtaggaaaatccaaataaaataatttaaggctacgttgtcaccattggggtagaaaatcaaaaccaaaattatgtctca

SEQ ID NO: 262177 - DNA, 602 bp, Homo sapiens
aattttcttacagttgtggagtcttaaaaaccaagatcgaggtaccagcaaagttcctttctcctgaggcctctcctcttggcttgtagatgggcatcttctcactgtgtcttcacatggtctttattctgtttgcatacatcactggtatcttattctattcttacaaatacaccagtcctgttggattagggccccacctttatgatctcatgtcactgttattaccgtcttaaaagccctgtctccagatacagtcacactaggagttaggtcttcagcaaataggctttggggggagatagggcactactaagtccataccagctgttatatcttagcattaatcagtcaatgcatttggtttgtcctgggaagtgataaagcctttagtctgaatgacactctttagctcaattggttattcctcgaattcatgaatatataaatggagtgaagaatgttagcaattggcaaagtcctcatattgatatatttgccctttagaatatgatgtattgtggtaggaaaatccaaataaaataatttaaggctaygttgtcaccattggggtagaaaatcaaaaccaaaattatgtctca

SEQ ID NO: 262178 - DNA, 555 bp, Homo sapiens
cagcatggaggaaacctccgccataatccaaytgcttccttccaggtctctccctaaacacctgggaattacaattctagatgagatttgggtggggacacaaagcctaaccatattaatgcccttctaaccttaggatatagatccagatatagaagcaacagtcctacctaaactttgtagtcatccctcatgatgtctgtagtaaatcctttcatatgtactctatagtgagttttgcttttctaattaatgcactgatatggaatttagaaccagaagtgtgtctagaggaacagaaccttaagaatggcttattggatttggatatgatttatctgaaatgacttatcttgtatgattcaattttaagacattatgacagtatttctgagggtaaagggagtgctagtagttcacagaatggcaaaacttagaaagtgtcaaaacaatgacttaaaatactactttttgacattggtaattacttgtgcataaaaggcaagttatcaggtgataagttgataggttatataaaaggatatggtgctgggt

SEQ ID NO: 262179 - DNA, 559 bp, Homo sapiens
cttaatctcctttcttttacctgcatctcctgaagtatgtgtgcattctactttttctctctcctccccactgtcttgtagtttttgatcttcatctcaaccaaacattagagtttctcttttaaaacttatctcaactttttctattgcatgatctgtttttcctgtgaatgaatgaagtcttgtaatcctttcagttctatttcttttccattttaacaaaacataattgtactttgtcttttgagaaggtaaagatctaaatatgtggataataaaatacttataaatatgttgaccttgtaaaacaatcatttgatcttgctgtacaatacagattgtttttgtcagaaagatcagcagaaaaaaatgtgtaagaacagctttatatattgtaagttaaaatacatctcatattgagatgcaaaaatgataaaaaagtatatttttttcttargaaaacaaggttaagatatctctgtacattttcagaagaggtaaaatgcagaaaaggaactaatctgatggtagacatgaaggtgtgtatcataaatgttat

SEQ ID NO: 262180 - DNA, 531 bp, Homo sapiens
tgcatgttaagtttcttaccgcaaaattgataactatgtgaagtaaagtataggtaaattagcgagatttaaccattccacaatgtatatatatttaaaacataatgtggcacacaataaatgcatacaattttatgtgtccattttaaaaagaaataaatttgaaaataaagtatttcaaaattttcttgattctcaaaaatctcaaaaggctgaaaactaaagttgtatagctttttcctctaagaaacagcactaaaactacaatatataatataaaataagttgacaaaaacagttcttacttgtaatttcaaaataataatttctayatatttgtttttattggcatgtattcataaaataatgagagtctggataaacaataaataaagtaataagctggagcaattttcccttgtgtgcaatatgaatcattgaagatcaaggcctctcagcatctccatgactcactactgcaggatgctacacttattcagaaagcccagtcaagcgtgcaccaaagactgt

SEQ ID NO: 262181 - DNA, 564 bp, Homo sapiens
ccatggaaaatgggttagggaaaatatgagaactggctaagggtatctgtatgctctcagcccccgtctccaaaagttggtctctgcccatgaccatctgtgtaaaatgacacaaggatcctagttgggtcatcttcactgtgccaaaggcaaracaagttctttaaatttactgcaaacgctcattggggatggaccagagtgtttgttaactccaaacaccaataaatgctgataaataatgctattaaaaacgtgttattgctctgacactttgttataacatctttcctcttacgttttccccatgtaacatttactttaaaaggccccagccaaaagccgaacgccaataaaactgcaccaagtctcccagaacatcttcatttatgaaacagtcaaagactcagcttcagggagaagccagtgagatattccactgttttgtaaactttgaaaaatctgtagctcctgtagctgaggcctaactgcacattgcatttgaaattttgaagcttcaattgcttaaaaatattgtaactgcttctcaaacaggaaaattgc

SEQ ID NO: 262182 - DNA, 624 bp, Homo sapiens
ccctagttgtgccatgaacataatatctacagtgaccagtcattcaatcaataagcattgattatttggatgtgtaatgagtgtttattattatcatcagtaagctggtatagcatagagctcagattctggagtcagagaaacacagttcaactctcagcttggctactaaatattggacttttcttttttttctttttttttttttttagacagtgtctcactctgtcactcagggtggagtggtaagcagcacaatcacaggtcactgcagcctcgacttctctagctcaggtgatcttcccagctcagcctcctgaataggtaggaccacaggcacatgtcaccatacccagctaattttttgtgttttttgttttgttttgtttttgtttgtttgttttttgtagagatggggtcttgccatgttgcccaggctggttttgaactcttggactcaagcaatccaccctcttcggtctcccaaattgttgggatttcaggcgtgagctaccatgctcaggcactggactttgttcaaagttytgatttctccatctctaagaaggaagtgataatagaacccatgtcagatgttgtgaagattaaatgggatagtgcttg

SEQ ID NO: 262183 - DNA, 573 bp, Homo sapiens
ggaaggctatttgggtcttcatcactcactctccctccctgtgttcrgctgctgttcctgggccccttccctcccctgctcctcccttgggtacctgcatacctcaaacattgcagctgatgggcagaccttatcgagcggtgccttctattctgggcagggtggcatggggacctgcacgtggaggctgcaagcctcttcatgtcactgggaactcacatcaagtcataccagtgtccctagagaggaggtacctgtgctttcaatggagccatgatttatggatccaactccaggagctgaagaaaccaattaggcttccttgcttctctatctggaggcaggataattctaggaaagttcttcctccagggcagaggctccatctgcttggacctaatccctgaggtttgcccatccagccttttacccacctttatcgcctactccttggtcagtagctccaaacctcctgggccggctttccctgcataaaaattgtgcctctaacacttgaaatgtgggaagtgagagccagatttccattctttcctaaatctcatttcctcatta

SEQ ID NO: 262184 - DNA, 622 bp, Homo sapiens
ttcatgtcactgggaactcacatcaagtcataccagtgtccctagagaggaggtacctgtgctttcaatggagccatgatttatggatccaactccaggagctgaagaaaccaattaggcttccttgcttctctatctggaggcaggataattctaggaamgttcttcctccagggcagaggctccatctgcttggacctaatccctgaggtttgcccatccagccttttacccacctttatcgcctactccttggtcagtagctccaaacctcctgggccggctttccctgcataaaaattgtgcctctaacacttgaaatgtgggaagtgagagccagatttccattctttcctaaatctcatttcctcattataataataggataaaagtccttgtctacctaggttgctcattcatttatgaatgtatgtatcattcattcactcacatattcccttccatgaagatttaatagacatctactgtgggctaggtgctggattaatcactaaggatgcagacatgaaccagaaaacatggcccctatcctcagggagcagcttacagtctatggggaatatcaacctcaaagtgctttgaggtaaaagtacagactatt

SEQ ID NO: 262185 - DNA, 622 bp, Homo sapiens
ttcatgtcactgggaactcacatcaagtcataccagtgtccctagagaggaggtacctgtgctttcaatggagccatgatttatggatccaactccaggagctgaagaaaccaattaggcttccttgcttctctatctggaggcaggataattctaggaaagttcttcctccagggcagaggctccatctgcttggacctaatccctgaggtttgcccatccagccttttacccacctttatcgcctactccttggtcagtagctccaaacctcctgggccggctttccctgcataaaaatygtgcctctaacacttgaaatgtgggaagtgagagccagatttccattctttcctaaatctcatttcctcattataataataggataaaagtccttgtctacctaggttgctcattcatttatgaatgtatgtatcattcattcactcacatattcccttccatgaagatttaatagacatctactgtgggctaggtgctggattaatcactaaggatgcagacatgaaccagaaaacatggcccctatcctcagggagcagcttacagtctatggggaatatcaacctcaaagtgctttgaggtaaaagtacagactatt

SEQ ID NO: 262186 - DNA, 577 bp, Homo sapiens
gtattggattcggaccaactgtaaaggacttcttgggggtcatttggggaaatttttataggttctgggcattaaaagggatgaaaatttactgaaatagaaaaggtagagattgttggttaaaaaacagatcataaagcagtatgtataattcaatcacattttggtaaaaagatacttgtatgtaagaaaaagatctggagggacatgcattaaggtgttaatggtggtaggaatatgatgtttttatttttatatttttgctttctgtacttttaaaattttgcacaattcatatttattacttcrgtaataataaaatgctatttaacaaataaaatgggaataataactgtgtaccttgtagggctgtaatgatgcagtgagataatgccgtgaagaacaaggcctggcataagcacatgctcaatagctaggtgctgctaagatgtttatgctgttccacccccagccaccattagacagagcaggcttattagagatgttctctctgtccccaggttctggcacagagcagggctctactgatgttttctgaagaaattatttccattgg

SEQ ID NO: 262187 - DNA, 531 bp, Homo sapiens
atagctaggtgctgctaagatgtttatgctgttccacccccagccaccattagacagagcaggcttattagagatgttctctctgtccccaggttctggcacagagcagggctctactgatgttttctgaagaaattatttccattggtccagcatttgttggacatcaagggaagcatgttggaaattgtggcctcgtgctcgcataggtgtaggtccccagagccccctccaccccctcccatgaaactagagtgtgccctcagctaggtccctgcaataagcaagacctcttgcaataagcaagaggaggtgaccctctgccagtgaagtaaagctgtagtgaactgagccaaagggaacaaacagtttttccccctcccyagaccatactcacccaactatttttgccattggcttccaaaagcttccaccttcttgactaccctaaattctgggactgggctaggggctggaggttgagtctgaggctattccacaaatatggactgggattaaggctagccctac

SEQ ID NO: 262188 - DNA, 612 bp, Homo sapiens
ctttaacttagtttatgcctttgggcaagccacttgcccctatttgtgaaggggaatcataattcagagaaaagaggagagggcctactgaaactgcaaccgtgtggcagagtgtctggtgtagatgctgacttggaggcatggtcagkgtgctctgatccttgtgcctgggctgggactcaccgggaatccacaggaacaagccagaattcagcctccttccgtggagctggcagctgtgcgatgggggacagtgcagtatggtggctcatagcctgcctccgcctcttactaactctggggcctggggctctgctaataatagttacaatctattgtactcttaatatgttccagatgtaggcagccctgccttgtttaattctcctgacaattctgtggaatagaaattatctccaatttacacaaagaaaccgagtcttaaagaggcttaagtgactttctcaaggccaaggggaagggaagcaaaatactttgagtctcagtttccccatccataaagtaggtacgataatgcccatctctcacagttgtggtggggattcactgaactaatgtaagcaaattaaactggcatagccacagacacat

SEQ ID NO: 262189 - DNA, 612 bp, Homo sapiens
ctttaacttagtttatgcctttgggcaagccacttgcccctatttgtgaaggggaatcataattcagagaaaagaggagagggcctactgaaactgcaaccgtgtggcagagtgtctggtgtagatgctgacttggaggcatggtcagtgtgctctgatccttgtgcctgggctgggactcaccgggaatccacaggaacaagccagaattcagcctccttccgtggagctggcagctgtgcgatgggggacagtgcagtatggtggctcatagcctgcctccgcctcttactaactctggggcctggggctctgctaataatagttacaatctattgtactcttaatatgttccagatgtaggcagccctgccttgtttaattctcctgacaattctrtggaatagaaattatctccaatttacacaaagaaaccgagtcttaaagaggcttaagtgactttctcaaggccaaggggaagggaagcaaaatactttgagtctcagtttccccatccataaagtaggtacgataatgcccatctctcacagttgtggtggggattcactgaactaatgtaagcaaattaaactggcatagccacagacacat

SEQ ID NO: 262190 - DNA, 609 bp, Homo sapiens
aatgatactagctccatagcatcttgaagaactgaacgttttggaatttcttaattattttttagaaatatgtattaataatagttctcatctagtgagtatttactgcgtctcatttccatagaatgagagaactacaagggcctccttgtcttgcattctctctccaccctccacagcttctctgtcttctctccagctcactgttcttcctctgcaatctgcctttcagactccagtctatagaactaccttcacctcctaatgtcctcccttgggcccctcagcaaggcccctgacaccagccaaagcagagggggaaccacaggccttttctagaggctgggctcatgatgcaactctagcaccaggcatggctgcaggggaagatagggcagtggaaaaggcagtgaagagaattaggataacagccatgatctggtggtcctggtgcagggagaggataaagaatagatgyctcagaggccatcatgccaggtcttcagccctgcctcacccttcccacctgaatccccagcctgctaatttcccctgaatcttaccagggctgtcccagcccttcagggaggacaggtgtttagaagaaac

SEQ ID NO: 262191 - DNA, 464 bp, Homo sapiens
tggcctttgtacagttcttggcatcagtttctgggaaagtctcttgtttgggtaagatatcactggaaagtaagaacacatagtttcaaagaagtcagccrgtaggagtgggatttgggaaacttttccttttgcctttgttgtttgctactgatcacctgcgtgcgagggaggcttcttggagtcaagtgggtgcatgttagcttgaaagaagcactccgtctgcctccggccactgcctcttaggagctcagcagtagcaagaagctattacatagggttaggattcgaacctgtgctgaagccttataaggggtcacatggagccctcccttcttttccctgcagacacctgtggtgacttgctggtgactctacagtccctgagccgccagggtgagaagcggagcctccagctctccggcaaggtcaacgccatgactttcacctttgacaacgtgctc

SEQ ID NO: 262192 - DNA, 464 bp, Homo sapiens
tggcctttgtacagttcttggcatcagtttctgggaaagtctcttgtttgggtaagatatcactggaaagtaagaacacatagtttcaaagaagtcagccagtaggagtgggatttgggaaacttttccttttgcctttgttgtttgctactgatcacctgcgtgcgagggaggcttcttggagtcaagtgggtgcatgttagcttgaaagaagcactccgtctgcctccggccactgcctcttaggagctcagcagtagcaagaagctattacatagggttaggattcraacctgtgctgaagccttataaggggtcacatggagccctcccttcttttccctgcagacacctgtggtgacttgctggtgactctacagtccctgagccgccagggtgagaagcggagcctccagctctccggcaaggtcaacgccatgactttcacctttgacaacgtgctc

SEQ ID NO: 262193 - DNA, 546 bp, Homo sapiens
atttggataataatactggactcactgtgagagagaaatgtttaagaataaatgttgcaacccaaaatcagatctgagaggttattgatgctaactgaacccacctaagaaaggtcatgcatgtctatgaaaatgagtaccgtggaaaattttaatgcgtattctctactgcctctcctctcttttcatgaatcttggaggattatcccttcctgctcccactgccaacagttaaggattgcttaattctcgcaaatggattgtgagaacaagtgacttatgtcatatctgagctgaagcatttaatgaacactgtgagatcctcctgctcaaacttcctgttgtgttataactgaggaagccatgtgctccaaaatgtgtagctgcagaataatggaacttcatcaacctggaaaactgtcatcacatacattacttgggayctggaatgttgctgtgagcttcaggaattttaacaagaaaggaataagcttttgctgtgttaaagcattggaatcttgggattctttttactgcaataattct

SEQ ID NO: 262194 - DNA, 546 bp, Homo sapiens
atttggataataatactggactcactgtgagagagaaatgtttaagaataaatgttgcaacccaaaatcagatctgagaggttattgatgctaactgaacccacctaagaaaggtcatgcatgtctatgaaaatgagtaccgtggaaaattttaatgcgtattctctactgcctctcctctcttttcatgaatcttggaggattatcccttcctgctcccactgccaacagttaaggattgcttaattctcgcaaatggattgtgagaacaagtgacttatgtcatatctgagctgaagcatttaatgaacactgtgagatcctcctgctcaaacttcctgttgtgttataactgaggaagccatgtgctccaaaatgtgtagctgcagaataatggaacttcatcaacctggaaaactgtcatcacatacattacttgggatctggaatgttgctgtgagcttcaggaattttaacaagaaaggaataagcttttgctgtgttraagcattggaatcttgggattctttttactgcaataattct

SEQ ID NO: 262195 - DNA, 595 bp, Homo sapiens
attcatgtcccaaagtgacaacttgaaagactgcaaatgttgcccaggtggttgattatcagagaagttattgaaatacaagaagttaagtattcagtgggtggtaccagtaggtcaaacacaattcatcacacccgatacaaatgcccttggctagatctggttgtatttgtaacattatcaaatgaattacatattgcagtaaaaacagattgaaggagctatttctctgcttttgaccttgactctctgctgacttaaatatcatttggtgggattactgtactctcttctttatttcagataaaaaatgttgcctcgtgaaattttcaatacatttctcaaaatttttcataatcatcaaaaaattatcaaccttgaggcgaatatgtgagggaggtttgggaacraaatgatgaggtgaaaatttgatgtaaatagttgttcattttacttttacagttttaacggtgaaaaactattttgggtcatggctgtatgttcattaattcataagagggggttatgcacacatcttcatgagaaaacatggtatcagtatcaggagatgtccaggctgaatatttaaataata

SEQ ID NO: 262196 - DNA, 645 bp, Homo sapiens
gcattatatacaattggttttgatagatcttcagtaatgaagggaaggttatgttttcactgttttttttttttcttttttctttttttttagacagaatcttgctctattgccgggctagagtatagtggtgcgatctcagctcaatgcaacctccacctcctgggttcaagcaattctyctgcctcagcctcctgagtagctgggactacaagcacacgcctccatgcccagctaagttttgtaattttagtagagacggcgtttcaccatgttggccaggatggtctcgacttcttgacctcatgatctgcctgcctcagcctcccaaagtgctgggattacaggcataaaccaccatacctggccatgttttcactgttataaatagtgcctctgttactgttgttttgctttagctctactttaagttaataatgatgcaccatgtatagatgacataactggaatctataccatctagcctttggtaatataaaattggaatataaatccaaaatatttctcattatcatttaagctatagaatattctttactatgagtggcattttatgcaagcaaagacttacaaattattgtaagtttgttaacattatacaggaaataagacattgaccttaaa

SEQ ID NO: 262197 - DNA, 508 bp, Homo sapiens
taggacaagtatccatgggaatgaatacacacacacaaacacacaagacaacatatattactgaataaaaatcaatgactagcaaagttattataataatctctataaaagcctcatccctaatagttataacattatataaaataaatgtaatcyattataacacattgtttttatcaaaacacaaattgttcttgaaagaagaaagcctctatcttttttgatgatagttaacaaaaaattatctgttgccaaaaggagccctcataataaaaattcataaatttgcaacactccaacagactgttaaacaatgatggatgctgttagaaataaaccaatattagcaaatgaaatcattgacttaaaatgttctaacattaataacataaaagagctggcttaaagaaatgacatgtaagctttgtaacaaaacattattagaattgaaggagtgctattaaattaatcatagccactgattccttaaaataaaagtatatttaaa

SEQ ID NO: 262198 - DNA, 653 bp, Homo sapiens
caactttaagcgctaagctcttagggttgaaaataccttatatctgtaagtcataaaaaactcaaagtcttactattcaaacactgaacagctacaatttaactggcacaaagatcatctggcaaaataaaaccattgtcaaatactgcttagtgtatacaaaaaaaactagaggaaaaaaagttataaagaataaaaatgaaaatatttgtataaaatttctatctttgggaaatgtactttgtcgtcctctgtgttatcaaaacctggctgcatttgcctgtagcaattggaagttgtgtgggcttcataatcccacacaggtgaggattatgaagtcatatttagcacaaatcaattttaaatttataggtatttcccaacagagcgtagaattaatcttctctttgtattttagagagytaaatttgcagcccattctattttttgataggaaatacaccttcaattttgacccataagctcagaattacgagtttacttgccaatagaaaagggaagtgcagagacaccgaagagacaaatgtcccattctccaaaaatgcagagcacatcactatgaatgtaagaaatgggcagaaagtcaaaatccacaattcacaaaacagaatgatctaaaatgagaaaggggg

SEQ ID NO: 262199 - DNA, 597 bp, Homo sapiens
gtactttgtcgtcctctgtgttatcaaaacctggctgcatttgcctgtagcaattggaagttgtgtgggcttcataatcccacacaggtgaggattatgaagtcatatttagcacaaatcaattttaaatttataggtatttcccaacagagcgtagaattaatcttctctttgtattttagagagctaaatttgcagcccattctattttttgataggaaatacaccttcaattttgacccataagctcagaattaygagtttacttgccaatagaaaagggaagtgcagagacaccgaagagacaaatgtcccattctccaaaaatgcagagcacatcactatgaatgtaagaaatgggcagaaagtcaaaatccacaattcacaaaacagaatgatctaaaatgagaaagggggatgcagacgtgggcagggtgtaagaattgctttcaaaactactcctaattaaattgatcaaagctggttttctaaagcatttctcatgaggatatgctggatgcttcaaaaataaatggtgatttcatctatttatcttatgattcttcacaatagaatccactgcataacccaatatgt

SEQ ID NO: 262200 - DNA, 653 bp, Homo sapiens
caactttaagcgctaagctcttagggttgaaaataccttatatctgtaagtcataaaaaactcaaagtcttactattcaaacactgaacagctacaatttaactggcacaaagatcatctggcaaaataaaaccattgtcaaatactgcttagtgtatacaaaaaaaactagaggaaaaaaagttataaagaataaaaatgaaaatatttgtataaaatttctatctttgggaaatgtactttgtcgtcctctgtgttatcaaaacctggctgcatttgcctgtagcaattggaagttgtgtgggcttcataatcccacacaggtgaggattatgaagtcatatttagcacaaatcaattttaaatttataggtatttcccaacagagcgtagaattaatcttctctttgtattttagagagctaaatttgcagcccattctattttttgataggaaatacaccttcaattttgacccataagctcagaattacgagtttacttgccaatagaaaagggaagtgcagagacaccgaagagacaaatgtcccattctccaaaaatgcagarcacatcactatgaatgtaagaaatgggcagaaagtcaaaatccacaattcacaaaacagaatgatctaaaatgagaaaggggg

SEQ ID NO: 262201 - DNA, 476 bp, Homo sapiens
aattggggcagtaattataaaacatccccatcatggtcttgtggtaagggtttctattagcattatagtatataaatacatagcaatgtgtgtgtgtatacacatacacatatgtatacacacacatacaatgctatattgtgtgtatatatattgtgcgtatgcatatatatgctatatatgcatatggatatayatacatatatatacacacatgctaaaaagaattatagttgcatttctatacaaatttttaatgcaactagatttcaactttatatatgtggtaggataaaaagacaactttattattttccatacaaaagacatttttctccacatcattttacaatataatgtattctgtcttcattgatttatgacacctccaatattatattctaactccatatttacatggctgtggttcagagtcttttatttgtccatggatttatttatacattattgtacta

SEQ ID NO: 262202 - DNA, 476 bp, Homo sapiens
aattggggcagtaattataaaacatccccatcatggtcttgtggtaagggtttctattagcattatagtatataaatacatagcaatgtgtgtgtgtatacacatacacatatgtatacacacacatacaatgctatattgtgtgtatatatattgtgcgtatgcatatatatgctatatatgcatatggatatacatacatatatatacacacatgctaaaaagaattatagttgcatttctatacaaatttttaatgcaactagatttcaactttatatatgtggtaggataaaaagacaactttattattttccatacraaagacatttttctccacatcattttacaatataatgtattctgtcttcattgatttatgacacctccaatattatattctaactccatatttacatggctgtggttcagagtcttttatttgtccatggatttatttatacattattgtacta

SEQ ID NO: 262203 - DNA, 585 bp, Homo sapiens
gtttagtttacttagttgattaacattttttgtcatagaatcccagatacttttattagtacctatattcaatttcatctctttacagatataaaatataaaataagaaaaaagctctcagtttgaatataggtattaaatcttatatatatttgaatatgttgatactgcaaaatagatttgtattcagtaagyagaaaatatataatactgatttaatgcatgctttaagactaaaaaaaacaaaatatgttcatactatatagggccattagtttttccttttaaattaggtcaccaactaatgatctatattactatattaactactatttctgataatagccagcttaatgtgaaagacagttatattaaaatattttataatataaatattaataaattattttaaagacaggtatattggacatgtcaaaaataaaatgtcatctatgtagtcattactcatctttccaaagtaattttatttattcaagataagtctgccagttgcaaaaccgacattttattgtatgtgtatatgtgttcataaaatatgtccctggatacttattaaggaagtaa

SEQ ID NO: 262204 - DNA, 585 bp, Homo sapiens
gtttagtttacttagttgattaacattttttgtcatagaatcccagatacttttattagtacctatattcaatttcatctctttacagatataaaatataaaataagaaaaaagctctcagtttgaatataggtattaaatcttatatatatttgaatatgttgatactgcaaaatagatttgtattcagtaagcagaaaatatataatactgatttaatgcatgctttaagactaaaaaaaacaaaatatgttcatactatatagggccattagtttttccttttaaattaggtcaccaactaatgatctatattactatattaactactatttctgataatagccagcttaatgtgaaagayagttatattaaaatattttataatataaatattaataaattattttaaagacaggtatattggacatgtcaaaaataaaatgtcatctatgtagtcattactcatctttccaaagtaattttatttattcaagataagtctgccagttgcaaaaccgacattttattgtatgtgtatatgtgttcataaaatatgtccctggatacttattaaggaagtaa

SEQ ID NO: 262205 - DNA, 585 bp, Homo sapiens
gtttagtttacttagttgattaacattttttgtcatagaatcccagatacttttattagtacctatattcaatttcatctctttacagatataaaatataaaataagaaaaaagctctcagtttgaatataggtattaaatcttatatatatttgaatatgttgatactgcaaaatagatttgtattcagtaagcagaaaatatataatactgatttaatgcatgctttaagactaaaaaaaacaaaatatgttcatactatatagggccattagtttttccttttaaattaggtcaccaactaatgatctatattactatattaactactatttctgataatagccagcttaatgtgaaagacagttatattaaaatattttataatataaatattaataaattattttaaagacaggtatattggacatgtcaaaaataaaakgtcatctatgtagtcattactcatctttccaaagtaattttatttattcaagataagtctgccagttgcaaaaccgacattttattgtatgtgtatatgtgttcataaaatatgtccctggatacttattaaggaagtaa

SEQ ID NO: 262206 - DNA, 585 bp, Homo sapiens
gtttagtttacttagttgattaacattttttgtcatagaatcccagatacttttattagtacctatattcaatttcatctctttacagatataaaatataaaataagaaaaaagctctcagtttgaatataggtattaaatcttatatatatttgaatatgttgatactgcaaaatagatttgtattcagtaagcagaaaatatataatactgatttaatgcatgctttaagactaaaaaaaacaaaatatgttcatactatatagggccattagtttttccttttaaattaggtcaccaactaatgatctatattactatattaactactatttctgataatagccagcttaatgtgaaagacagttatattaaaatattttataatataaatattaataaattattttaaagacaggtatattggacatgtcaaaaataaaatgtcatctatgtagtcattactcatctttccaaagtaattttatttattcaagataagtctgccagttgcaawaccgacattttattgtatgtgtatatgtgttcataaaatatgtccctggatacttattaaggaagtaa

SEQ ID NO: 262207 - DNA, 591 bp, Homo sapiens
cggctaatttttgtatttttagtagagacagggtttcaccatgttggccaggctggtcttgaactcctgacctcgtgatacgcccgcctgggcctcccaaagtgctgggattacaggagkgagccaccatgcctggcttatcttaggatttttctaacatcaagattcttgtccaagttttctaaaaataaattttaattgttaatatatttttattttagaaatatgctatcatatttgcaggatttataaaacagctaactttagtctgtggaaagattccaattcatacggtgatttgaaaatattcctcaaagttaatctgggcatgttttatctttatttacaagggtcatttcaatatttattatttttggtgctacgtagtctttcttaacatcataattgttggttatattggcctgactgaggttagcattctttagcattgttaccaaatagcattagcactcttctgtccttataactaaaacaaattgtcctttcccaacatatacaaaacaaacaacaacaaaacagaaacaacgctaacatttattgggctaattatagaatatataatttaattct

SEQ ID NO: 262208 - DNA, 591 bp, Homo sapiens
cggctaatttttgtatttttagtagagacagggtttcaccatgttggccaggctggtcttgaactcctgacctcgtgatacgcccgcctgggcctcccaaagtgctgggattacaggagggagccaccatgcctggcttatcttaggatttttctaacatcaagattcttgtccaagttttctaaaaataaattttaattgttaatatatttttattttagaaatatgctatcatatttgcaggatttataaaacagctaactttagtctgtggaaagattccaattcatacggtgatttgaaaatattcctcaaagttaatctgggcatgttttatctttatttacaagggtcatttyaatatttattatttttggtgctacgtagtctttcttaacatcataattgttggttatattggcctgactgaggttagcattctttagcattgttaccaaatagcattagcactcttctgtccttataactaaaacaaattgtcctttcccaacatatacaaaacaaacaacaacaaaacagaaacaacgctaacatttattgggctaattatagaatatataatttaattct

SEQ ID NO: 262209 - DNA, 534 bp, Homo sapiens
  misc_feature (1)...(534): n = A,T,C or G
aacacatgagggtgggagactgccatacaagctgggaaggaggaatcagatgatattgtcatgaattcctcaagagtcagtgtttgctggcctccaagaggcaaggatctctgggaacttaagacagagaagcacttcacactcacccatgagctcttttccgtgggtctcaactgggcattcacaacatagattggaagtaaggtggagacccaaaatttgtgmtcagacatgattaccttccacagtgtgtggcctgaaatctcaccccctgcccagatacttctcccatgtgtagaaaaagactgaagtcattgagagaggttcagaaaaaccagccaatctcaggccccaggtaaaaacccattgtggatatagaaggtagatttaaaagtccctctatccctaggagtactgcagaaaattcctgaaaccataatcccagatatcaaatgtcaggcaagggacaggaaattcctgcccaagtcaaccaaagctaccaagtacnnnnnnnnnnnnnnnnnnnnnnnnnnn

SEQ ID NO: 262210 - DNA, 572 bp, Homo sapiens
catcattttcccagaattcttggcctactctattctttttcaaagccatttttggaggtagtagaatgtaccaagagaagagaagacaggagatttccctttacctacaacattctacattatttacatataaaaatatgatgcaaaatgatacaatattaatatttgttagtcctgggcagtgactagtctcctgtttgttatattcatcttgcctcctttttaatattgtgactttttttttttttcaaaataatarcaatgaaagctctgctgataactcagggtaaacagacctggaggcacagagcagtttccctttgacttgtctttcttgcctccacttgccttcaatcagaaatcatgtcaagagatgaaacaagtactcatgaacttttgcaccttaatttaaaactacttttggatatgatttttaacacttttttaaaattaatttccatgcaataaaattcactctttttgatgttcagttcaatgcattttggtgaatgcagtctgtagccaccacggtcaagttacaagatggctccatcaccttttgtactcaactc

SEQ ID NO: 262211 - DNA, 572 bp, Homo sapiens
catcattttcccagaattcttggcctactctattctttttcaaagccatttttggaggtagtagaatgtaccaagagaagagaagacaggagatttccctttacctacaacattctacattatttacatataaaaatatgatgcaaaatgatacaatattaatatttgttagtcctgggcagtgactagtctcctgtttgttatattcatcttgcctcctttttaatattgtgactttttttttttttcaaaataataacaatgaaagctctgctgataactcagggtaaacagacctggaggcacagagcagtttccctttgacttgtctttcttgcctccacttgccttcaatcagaaatcatgtcaagagatgaaacaagtactcatgaacttttgcaccttaatttaaaactacttttggatatgatttttaacactttttwaaaattaatttccatgcaataaaattcactctttttgatgttcagttcaatgcattttggtgaatgcagtctgtagccaccacggtcaagttacaagatggctccatcaccttttgtactcaactc

SEQ ID NO: 262212 - DNA, 601 bp, Homo sapiens
ttgttatcaacacctggcagaaaaaaaagcatcatgaatgaatatattcaacctccctcttgacaagaccacttacatcttctcttatgaaagcgcaatatagattgtttctgtctgctttttatgcatatcattttcataacctacctaggtgtctaaaccattctagggatttctgagaaaactgacttcattctacaaatgctgtggagggaaaaaaatagaaatgaggagtggaaagaatcactccacctttgtgctcccttagaagtaactttgagtttttgccagaagcaattagaagacacatttctgtttgggaaatacatatgctctatcaatggaagtcaggaagcaagcatgattattttctttagtaatttagaaaagacagttttacatcatgctttaggaattaaaaaagccccaaacmgtccagaaattcagaaatcataagaggtagcatacaaacagacagagaaatgactttgtaaggactttcatcattttagcacacattattttaaagtgcttaatgtacatatcacatgatagttttaatttaccataatgtttttatgatatcaaatgaacagaaact

SEQ ID NO: 262213 - DNA, 543 bp, Homo sapiens
tttttaaccatgcaagtggcatttggtgactgattctaggagaagccatattgttttaggatgtcagttaagtaatacttttgccaagaagttactgctatatgatgccacgatctcaccctttccctggcttattcaaaatttgaatttgtccaaggagccaatwagagtcactgccccatttgtcgtgctctaacctggacatctgtacaataattggggcatatctgaggcttttccttaaaatatgtgtttaccaacatcagcctgggcttatgccagatcacactgggcctatgtttttcagcagaacagatgaacattcgcctttcactctgaactatggcatttcctattcaatttctcagttttgttcctgtatctcatactcatttaagaggatttcacaggacccacaggatttgtgaaaatcaatgggcagtaaatttacctctcagacaacctcagaatggccctcatttacatcagaaattgaaacaaggagatggaagtagtagaaatgggattactatagtccagcac

SEQ ID NO: 262214 - DNA, 519 bp, Homo sapiens
agttaaaaattcaaaaaagaaaatttaagattaaacaagaaatagagaaagctctttgtgtygtgtaatgttagaggctttgagaaggctcccatcccaactcctctcatcctcaaaattagggattagttgatagaattatagagtgctagacagagtcagattcaccttgaggttaatggagcataagcttgcacaggtccctttcaaagtcttgaaaggggctctatagaagttgttcatttagaaatacacatataaaaacagtttccatgctcgcacgcacacacaaacacacacattaaagcaggtcgtttgcagaaataaagtattttcaaccaaaattgttaagaattttgtctctttctaccctggcttcccttccatcacatatctagagttgagtaccattagagtagaagtcattttgggaatctgaataaggggaattttaattgtggatacatttagttttgctttagtgggaaatatttatatagctcacagtcactttgtaca

SEQ ID NO: 262215 - DNA, 569 bp, Homo sapiens
tttctacttctctccatctatagagccctactctactcctagctatgtcatctcaaacttgtgtgtctcctggcatctgttctttcttccttttatgccattcttcatacagtggacacatttttgcaaaacgtaggttgagtcatgccatttccccatttaaaactcttgatgatttattgttgctcttttataaaaatcctcaaatcagcaaagaagcggctgacatgttcagtaaagaagkatgtatattaaataagaaccaatatagaaacaatacagaaatattagagaaatgagtgacaataaaaatgagtgaaaggatagaaacttagcctctgttctaatgtcaactggttatacaacccacttaaccttttaaaagagactccaatatctagggcctgttcagtttcaaaattctaaggatttatgttttgtcttttcggatgctgaacaattaaaggagaaaaatacgtcaatttctaaataaacaatacctttagtttgcgtaatgctgtatggtttaaaaaatgtttgtacatgagttaccccatataatgtcttta

SEQ ID NO: 262216 - DNA, 531 bp, Homo sapiens
agcaaatgtctttaatatctaataaccaagctgcagatacatctcaagacattagttagaaactcttgtattattttatgctgaatatctatctacctctcctttcaaatgaccccagctagaacagcaactagccaaatggctggaacayataaagaacttaataaatattggttgggtgaattaactcaataatctcaacaatgcatctatctgaaatatcttaacagctaaaattttttatagttagcttacagagttaacatagcaacttaatttatagtcaacaatttgttacttgtgaaaaaaattttgtcataaagattgtatatgtataatcaccccaagttagtaatagtataaattttaagcataaggattgtggggaaaaatggtattaccttattaattgataataaagtatctaggatttgaaatacattatttctgttcaagttgcaattagaaaaatatatactggcagttattaaaacaaaaattgttcttgattagtaaccatattttatagaa

SEQ ID NO: 262217 - DNA, 462 bp, Homo sapiens
tagactcttgtttggttctgtggctcccctatgttttctcacagtttggccatgttccctcttaatgttctgacagtgtgggttcttctccccctcgagtgctggctgtagatcatgacttggcactcctggactacccactgcagctctggggtgatctcagtgtttatgttccttccccgatttgtaggcagcagagaaagagatcttagtaatagttgtggccaaggattctttgcttgtctcctgggggctccacaccagaatgatgcaggtcagcaattgcttagtgcagtcagatcaggatggaaggtctgtgctgtgggcccaagccaggggttcgctgtctggtgatgagcagcggggtgtgtatgggacccatgggagatggactggcctcctctccttgggtcaactgcagcttgttggaggtrtggataaggtacttagggtttttgctcc

SEQ ID NO: 262218 - DNA, 513 bp, Homo sapiens
tgtgaccacaggcacacgccaccatgcccagctaatttgtatttttagtattgatggggttttgccatgttggccagcctggtcttgaactcctgacctcaagtgatctgcccactttggcctcccaaagtgctgagatkacaggcatgagccacagcgcctggctgctgtcttgcttttcttcattctccatgggtcaagttgtttgcttgattattcccagtgtgagtacctggatgtttctgttgaaggtattgtatttactcacttgttccattcctcttcatgagagtcatgcacactagctgcttctagtcaaccatcttggcctctccctcaagtgatacttctcttgctgagggttttgggcttcctcttgggtctggcccctgttgccaactcccagaatttcttgtggagtaggttcctctgcaggcagtgctcatgcttgccatttgtggatgtgtgcctgctcccactgcagcactcttctcaccctgggtcagttgtaaa

SEQ ID NO: 262219 - DNA, 513 bp, Homo sapiens
tgtgaccacaggcacacgccaccatgcccagctaatttgtatttttagtattgatggggttttgccatgttggccagcctggtcttgaactcctgacctcaagtgatctgcccactttggcctcccaaagtgctgagattacaggcatgagccacagcgcctggctgctgtcttgcttttcttcattctccatgggtcaagttgtttgcttgattattcccagtgtgagtacctggatgtttctgttgaaggtattgtatttactcacttgttccattcctcttcatgagagtcatgcacactagctrcttctagtcaaccatcttggcctctccctcaagtgatacttctcttgctgagggttttgggcttcctcttgggtctggcccctgttgccaactcccagaatttcttgtggagtaggttcctctgcaggcagtgctcatgcttgccatttgtggatgtgtgcctgctcccactgcagcactcttctcaccctgggtcagttgtaaa

SEQ ID NO: 262220 - DNA, 579 bp, Homo sapiens
caccatgcatcctgaacttcctattatgaactgtgtggtttctgacccatcttgccatgaagtagggcatgcacagcagcatttcatcataaaatggaagtggtgtatatgtgattgggtttgaggaggtcctgaaggcacaaataagttaatgaggaagtggttcaaatgcccatggtctcctctcctgccaccctgccttctctccccaagcctgcactgatggtctcctggggagttccctatgatcagttgacagaggaagagaagactagggcctggttcacagatggttctgcacaatatgcaggcaccaccccaaagtggacagctccagcaccacagcacctttacaggacatccctgaaggacagcagtgaaggaaaatcttcccagtgggcagaactttgagcagtgcacctggttgtacactttgcrtggaaggagaaatggccagatatgtgattatatactgattgctgggctgtagccaatggtttggctggatggtcaggcacttggaagaagtatgattgaaaaattggtgacaaagaaatttggggaagaggtatgtagatg

SEQ ID NO: 262221 - DNA, 587 bp, Homo sapiens
agggacggggcagagttcagcccgctgtcagatgtgaacagcatgacaggagagatacctcctgggttagggaaattggggttcacttctgactgacagcaggaagttcgtctatcagtggaatgtgctggatgatttgtcatccatttatttattttaaaaagtggcaccttcctctgcaaatcgttaaatatggggaaaatatggtctgtgatttatactttattttgctggtaattgggactttggtggttttctaaaaatattggataatagtttaggcaaactctgtgtcaaaatgagaatttctaagtgagatttgagggtcactactttttttgaaagttcattttttatcaatyatttatttggagggatgtttactttctgtaggagggagaggctgatggaacagagatgagacggaagcctgacaggagagagtgccgggagtgtgacagggtggagggctctgcttctgggggagccacatgccttcctgacatctgtcttgggaggagaggctgtgcaaggcagctgatgcctggggcaggatgtcagtcgggcaccttctctccttcaattat

SEQ ID NO: 262222 - DNA, 440 bp, Homo sapiens
ttgacttaacattgttttttcttctcctgttgcttagtctagtaggtggaaaaacacagctctgaaaaacctcaggaaaatcatggctagaggtgagtatgttgactaaataggatgaatgagacaggatgacaccaattgccaatgtcgttttctgtttattttttcttgacataacctaggaaggtgcttgctttctaagcatggactagccaatgggcgacgattagttttttggtgatgaccgtggtgtgacctaaacagaagtggggaggagtgatatgctcaaaaacaccactgcaaggctgagctacttgaatgactgctgccaacractgtgactgagttttgctgtgaagaccactgtctgtctctgtattcctaatccttcaaacaaccctgtctgccactgtgtgcatgatttcccagtgtgcaatctc

SEQ ID NO: 262223 - DNA, 480 bp, Homo sapiens
ccagaatgaagaaagaacagcagaaatggtaaatgttaagtaagtgtaatatattatttttctcttaagatctttaaaatatattttatgcttgcaaaaattataaagtttttctggtgggattattaatatatgaaaacaactataatataaaggcagaagttatagtctttattgttgtaaggcaaaatattgattctaaatagacagtgaaaaattcagtacatatattgcagtccccagagaaaccctaaaaaattacacacacrcacacacacacacatacatacacacacacatatgtgtatgtatatatgtatatattcatatatatgtgtacatgtatttacagagagaaaaagaaaaaaattgcaatagatgaactaaaatgaaatattaaaataatgcagataacccaataaaagcaaaaaggcaaaagcagacaggacaaagaagaaataaataataaaatgatagacc

SEQ ID NO: 262224 - DNA, 480 bp, Homo sapiens
ccagaatgaagaaagaacagcagaaatggtaaatgttaagtaagtgtaatatattatttttctcttaagatctttaaaatatattttatgcttgcaaaaattataaagtttttctggtgggattattaatatatgaaaacaactataatataaaggcagaagttatagtctttattgttgtaaggcaaaatattgattctaaatagacagtgaaaaattcagtacatatattgcagtccccagagaaaccctaaaaaattacacacacgcacacacacacacatacatacacacacacatatgtgtatgtatatatgtatatattcatatatatgtgtacatgtatttacagagagaaaaagaaaaaaattgcaatagatgaactaaaatgaaatattaaaataatgcagataacccaataaaagcaaaaaggcaaaagcagacaggacaaagaagaaayaaataataaaatgatagacc

SEQ ID NO: 262225 - DNA, 606 bp, Homo sapiens
tatgataattttcatatctataaattctgttctatctgaaatttgtatagctaattccactttcttctgccttatattagaatagtatatatttctccaatcatttattatttatttatttatttgtgtgtgtgtgtgtgttgtggcagtggataagtcagcttttattgtaaaagtgtttacggagaacttcagttcttttttaaaaaaattcctaaattttatttaagttcaggggtacatgtgcaggatgtgcaggcttgttacataactaaatgtakgccatggtcctttgctgcacagatcagcccatcacctaggtgttaagcccagcattcattagctattcatctttatcctctccctcctctcaggccccgccctccaacaggcccaatgtgtgttgtcttcttcccatgtgtttatcagttctcatcattcaactcccacatataaatgagaacatgcggcatttggttttctgttcctgagttagtttgctaaggataatggcctccagctccattcatgtctctgaaaaggacatgatctcattccttattatggctgcatagtattcaattgtgtatatacatacatatatca

SEQ ID NO: 262226 - DNA, 606 bp, Homo sapiens
tatgataattttcatatctataaattctgttctatctgaaatttgtatagctaattccactttcttctgccttatattagaatagtatatatttctccaatcatttattatttatttatttatttgtgtgtgtgtgtgtgttgtggcagtggataagtcagcttttattgtaaaagtgtttacggagaacttcagttcttttttaaaaaaattcctaaattttatttaagttcaggggtacatgtgcaggatgtgcaggcttgttacataactaaatgtatgccatggtcctttgctgcacagatcagcccatcacctaggtgttaagcccagcattcattagctattcatctttatcctctccctcctctcaggccccgccctccaacaggcccaatgtgtgttgtcttcttcccatgtgtttatcagttctcatcattcaactcccacatataaatgagaacatgcggcatttggttttctgttcctgagttagtttgctaaggataatggcctccagctccattcatgtctctgaaaaggacatgatctcattccttattatggctgcatagtattcrattgtgtatatacatacatatatca

SEQ ID NO: 262227 - DNA, 597 bp, Homo sapiens
tgaattccaccaaacatttaaaaaagaaattatatcaattcttcacaatctcctctataaaatagaagtacagggattacttcctaacctatgctgtgaagcaagcattgtcctaatattaaaaccatctaaaaatatgacaagtaaagaaaccacagagtgatatctcttayaaatatagctggaaaaaatcctcaacaaaatattagcaagttgaatccaacaatgtattaaaatagttatataccatgactaagtgtgatgtagctcaggaatgaccaggaattcaaggctggatcaacatttgaaaataaattaatttaatctatcacatttacagcctagataagaaaaaaaaatcactttatcatatgaacagatgtagaaaaggcatttgacaaaatccaacacccattaaattttataataaaaaagtttgaataaactgggattagaagtttaatttcttcaatttaataaagtatattaacaaaaaccctacagctaatatcatacttaatggtgagaaactaggagcttttccactaagatcaggaatgaggcaaacacttcttctctcatgactccttttcaata

SEQ ID NO: 262228 - DNA, 598 bp, Homo sapiens
ggggggagctggaaagacaccccagtgaaagccaacgaaaacctaaaataaattacagacactaaagccaagaagcccttgatgaatgtaataggatatagaaagttactttgataactgtgytcattattctcaggaatttataacatattttgaataaaaataattaaactagaaaaatgttgttcaacggtaccacctgcatttagcccccactctccaaattacttctatggaaaattcctcgcttctatttgtaattaattaatacatgttgtctctcattttaagtgattggaaaattacttgtctcccatctcagaagacggttattcacattagtttgaagaacatgaaacggcctatatttggccctgtttgacccataagaaaggtcaatttcatctggttcatggtaatgcatatgctgatgccttctttagtaaagaaatatgcatcctcctccaaagtacttctatgcataatcttctcttgcaaaaattacccacttgcaaggcaaaggcagtgacccaaagcttgaaccacttatgatattgggacaaaaccctttctccatgcacagtttgcaaaagaaaat

SEQ ID NO: 262229 - DNA, 598 bp, Homo sapiens
ggggggagctggaaagacaccccagtgaaagccaacgaaaacctaaaataaattacagacactaaagccaagaagcccttgatgaatgtaataggatatagaaagttactttgataactgtgctcattattctcaggaatttataacatattttgaataaaaataattaaactagaaaaatgttgttcaacrgtaccacctgcatttagcccccactctccaaattacttctatggaaaattcctcgcttctatttgtaattaattaatacatgttgtctctcattttaagtgattggaaaattacttgtctcccatctcagaagacggttattcacattagtttgaagaacatgaaacggcctatatttggccctgtttgacccataagaaaggtcaatttcatctggttcatggtaatgcatatgctgatgccttctttagtaaagaaatatgcatcctcctccaaagtacttctatgcataatcttctcttgcaaaaattacccacttgcaaggcaaaggcagtgacccaaagcttgaaccacttatgatattgggacaaaaccctttctccatgcacagtttgcaaaagaaaat

SEQ ID NO: 262230 - DNA, 598 bp, Homo sapiens
ggggggagctggaaagacaccccagtgaaagccaacgaaaacctaaaataaattacagacactaaagccaagaagcccttgatgaatgtaataggatatagaaagttactttgataactgtgctcattattctcaggaatttataacatattttgaataaaaataattaaactagaaaaatgttgttcaacggtaccacctscatttagcccccactctccaaattacttctatggaaaattcctcgcttctatttgtaattaattaatacatgttgtctctcattttaagtgattggaaaattacttgtctcccatctcagaagacggttattcacattagtttgaagaacatgaaacggcctatatttggccctgtttgacccataagaaaggtcaatttcatctggttcatggtaatgcatatgctgatgccttctttagtaaagaaatatgcatcctcctccaaagtacttctatgcataatcttctcttgcaaaaattacccacttgcaaggcaaaggcagtgacccaaagcttgaaccacttatgatattgggacaaaaccctttctccatgcacagtttgcaaaagaaaat

SEQ ID NO: 262231 - DNA, 546 bp, Homo sapiens
tgaatgcactgatatttaaaaatacccaaagctatttggatcaaaatcaacaaatatttaataagtaccttcaatgtgcacaatgttgcctaaacaagccatttctaatgaggattttacacatatatgtttcatactttttttctggtgtataacaactaatctaaaattatgttagtgaaagggtagtcagtctttgttttaaatgtttttctcagaaacaaaaatkatctctttctctccctcacccctctaacttctcagcctttcacacattctctcatttgagttctgttttacgccgagacatctgggtaggtggtatgttctggccagagtactctctctcataccttccccagatggattggctcaaggatctaatattccccaaagaaataaaacatcccccaactggccattgaagaagagctgcagtgctttctattctaaacacacatgtgttgaaggatgagagacggtcatgacagagccagtgtccccacccatgacttgtctgcagagggggagacttccagtctgtag

SEQ ID NO: 262232 - DNA, 424 bp, Homo sapiens
ttttttctgggtgtactgctttaagtcttaggggcccagagagctagatcaatgtaaaggcacactgccttgaactcctgacttgtatgaataatgcaatggcattgagttaatgataggggctttattagatatcatgtgtgaaatgtgaatttgtatcaaatcaacaacttcttcatgctaaatggcttcctacttatggctgaaatagattatcaaggataaggtgtgaartgttgattccaaaattgttggaaagaccgcaacaaacagaaacataatccttgagttaggagttgagcaggtgggcctcctcttggcctgacagcaggccttgataagtccctttattgctcctgacaaataggctttcagtatctcctgtgaagagaaacagggtggcccagttataaaaggccccttg

SEQ ID NO: 262233 - DNA, 501 bp, Homo sapiens
tgaactcaggtaatccgcccgcctcagcctcccaaaatgctaggattacaggcgtgagtcaccgcgcccrgccccggggatatataattttcatttaagaatttattgaatatatttttccttaaccttaagctttttggttttacgataattaaatatttacaattttgttatgaccaggaatattgtttctttatttaaatggtcttttatttagtataaaaatgactctcaaaaataaatgttctcacacactttccctataaggagggaatatccctgaaacttcatacaaactaataaaatccttctaagttagattgccatctgaaattgaagctattaaacttacgtaagaatattggcatatagtatcatgctataaatgcctattaagttgaattttggttttggatgcattattactgttgagctgtcttagctgtatcctagacattggtgaaatgaaaggatgagaatatttaggcttaaaagaatttt

SEQ ID NO: 262234 - DNA, 501 bp, Homo sapiens
tgaactcaggtaatccgcccgcctcagcctcccaaaatgctaggattacaggcgtgagtcaccgcgcccagccccggggatatataaktttcatttaagaatttattgaatatatttttccttaaccttaagctttttggttttacgataattaaatatttacaattttgttatgaccaggaatattgtttctttatttaaatggtcttttatttagtataaaaatgactctcaaaaataaatgttctcacacactttccctataaggagggaatatccctgaaacttcatacaaactaataaaatccttctaagttagattgccatctgaaattgaagctattaaacttacgtaagaatattggcatatagtatcatgctataaatgcctattaagttgaattttggttttggatgcattattactgttgagctgtcttagctgtatcctagacattggtgaaatgaaaggatgagaatatttaggcttaaaagaatttt

SEQ ID NO: 262235 - DNA, 487 bp, Homo sapiens
ggttagctgtgtagtgatggctttgatatgactcacttctggggmcctactgtcctcttccaattattagaatcgttcaggaggaatgcttggtactaggctgtataatgagtccacaccaagataatgtattcacaagcattactggtggtggcttgggtagtccaggttttttcttctatcatactttgcacctctgatttcattttcttcctatttgtgcttgttttgcttatccaaactcatggcctccttccctaatctaaatcagtgtcttatgcacatctgtgtcttctgaggaagggtaactcagatttagagttttagcgagagatctatttggtggggtatagtagctaactgccctccaactccaccccagctgctagatgccaatccatttctaacctacctgaggctgtgatgcagctaaagcctccctaggcagaggagtaggagcttcataccagtcttgagagatcccaag

SEQ ID NO: 262236 - DNA, 399 bp, Homo sapiens
ctggtaggttggcccgactcactcctcaattgggatcgctcaggtgcattaatgagcaccccatacagaatcctgctttatttgaaactgccttcagggtccccagttaagacctgttaagatttcggacatgtcctactttatctaaataaatagaattgcacaattactacaaaagcactcctccccggcaccatcagccatccctcagacattttgcgtttatgaataaaaggtttggggagtggtyttagggatttcttacacaccttgtcgtgtgactgaggcttatcaccaagccttcaggtgcttctcttgatggtcacttggtagagacttcaaaacggataatgaaaggttaatgagcacttgctctgtgcaaggcacagtgctcagcat

SEQ ID NO: 262237 - DNA, 327 bp, Homo sapiens
tgagagtgctgaccagtggcatattcatgtttgaatggaaataaactgaaacatgttcacttcatgggraagagaaacctggaaagcaggaatgctaaaggggaactggggtgatggtggacagataaggtgaagccagactgcaatgagagaaggcagcatgaaaggccagacctattttgggaccataccctgagtcacagagtaacagagagcagaggtgacagctggtctctcagttcctcagtgagcaagcatctggaatatcactctgattttgtaaagcttgagttaggggcatagaatcttaaggaatttggagaagga

SEQ ID NO: 262238 - DNA, 327 bp, Homo sapiens
tgagagtgctgaccagtggcatattcatgtttgaatggaaataaactgaaacatgttcacttcatgggaaagagaaacctggaaagcaggaatgctaaaggggaactggggtgatggtggacagrtaaggtgaagccagactgcaatgagagaaggcagcatgaaaggccagacctattttgggaccataccctgagtcacagagtaacagagagcagaggtgacagctggtctctcagttcctcagtgagcaagcatctggaatatcactctgattttgtaaagcttgagttaggggcatagaatcttaaggaatttggagaagga

SEQ ID NO: 262239 - DNA, 583 bp, Homo sapiens
tataatcattaacaataatcaatattttataaaaatttatgcatatcatttatgtacacacacatacacatctcaaatccctcatttacagrtgaattctgtcaaacatacaaatgttccaaataataaaaggagtgaatgctctcctattcattttatgggatagtataaaaaaatcagataaacctgatattagaaacagaaaatgtcaatataaaaaagaaaacttgcagaccaatagtcagtaatgaacaaaggaccaaaaatcataaataaaatatttgcaactcagaatccagttatatcattatgagcattatatgtatgtatgtgcatgtgtgttgtgtaaaccaaataggacttactaagtaatataaagatgatttaacaatggggcctcttttaatgtaattaagcatattaatgaaggaagaaatatcataatcatctcaatagaagggtaaaaagcccttgaaaaatttaacatattttgataataaaaattttttagcaaaaatagaaaaggggagtatttgataaaggatagctagcaaaatttaagagcaaacattatactctatgg

SEQ ID NO: 262240 - DNA, 569 bp, Homo sapiens
aaggacttgactgtttctttctgcctgcaggatccctgttaacagcatctaaaggttaacgtagctggacatataattaaattcatttatcaaaatgcaataatggttgggttaaagagtctgggctctggggtcagatgaacccggatttcaacctcttttctcccacttataagtgtgatcttgagcaaagtacttatccaaacctgtttatttatctgtaaggtggggataattatgcttctcttaacactacagttgtgaagactcaatgagacgatgcaaataagaaggtcaacagagttcttggtgcaaaataagtgctcaagaaatgtttgccatctatcattattattactactgctactgttaayaattttttcaaattaagcacttactatatactagtgccaggccctagataaattaaatccagtccctgccatcaaagagttcatgacttatggcaaaaaggtattccagagtctttttttaggaaaaatgacccggttcgggtaggttgtgtgtggattcattctgggagatcttaatcagtaagagaaacatca

SEQ ID NO: 262241 - DNA, 617 bp, Homo sapiens
gggcagtgtgagtctgtagtgacagggtcagcactatgcttgtgaaatttgctctttatccaatttatgactgctgttccttgtgcttcctggtccctggggacacctggcatggctttgagctcaaagtcctcagggcatcccagctaggctgcttcatggctcctgtcatccactatcagatgcctatgctcacagcaaatgtcaactgtaccactcactgcacaaaggagtgattctctctgcaaaggcaaagaggaaacatctgatgttgcagccagctatctggctatctttggggaatgaacatgcatattaatttactcttttgtttattaccttgctcaccctccaacacttaggtggcactaattgcaatgtttgctaagcaggcktcccactgcaatccatcctttcagtcccaatccgttgggcaattaccaccacaaatatacttctagttgagtgtaacagcaagcaaagtggactgccccttggatgatgatcagtcagctttgctggctctttaaaatgcaaagatgaaatacattatagaaagatttaattttctaaagttaagaaatccaaaagggttgccttgggaaagtagagtgcat

SEQ ID NO: 262242 - DNA, 569 bp, Homo sapiens
aaggacttgactgtttctttctgcctgcaggatccctgttaacagcatctaaaggttaacgtagctggacatataattaaattcatttatcaaaatgcaataatggttgggttaaagagtctgggctctggggtcagatgaacccggatttcaacctcttttctcccacttataagtgtgatcttgagcaaagtacttatccaaacctgtttatttatctgtaaggtggggataattatgcttctcttaacactacagttgtgaagactcaatgagacgatgcaaataagaaggtcaacagagttcttggtgcaaaataagtgctcaagaaatgtttgccatctatcattattattactactgctactgttaataattttttcaaattaagcacttactatatactagtgccaggccctagataaattaaatccagtccctgccatcaaagagttcatgacttatggcaaaaaggtattccagagtctttttttaggaaaaatgacccggttygggtaggttgtgtgtggattcattctgggagatcttaatcagtaagagaaacatca

SEQ ID NO: 262243 - DNA, 572 bp, Homo sapiens
caggcagggaggtggtcactgacaatcccacattggaagaagaggccagacatgcagtccatccctaaagaactgagaatcttggggatttaaccatgtcaatgcagtctttcttacattattaactgaagaaaaattattgccctttagagatttttttttttttaataatggaaaagaagaagtcaaaataagccaaatcagggttgggcgtggcgtctcacacctgtaatcccagcactttgggaggctgacacgggtgggtcacttgaggccaggaattcaagaccagcttggccaacatggtgaaaccctgtctctactaaaaatacaaaaattagccagacatggtggtgcatgcctggaatcccagctactcaggaggctgaggtgggagratcgcttgaaccctagaggcggaggttgcagtgagccgagattgcgccactgcactccagcctgggcagcagaacaagactctgcctcaattaaaacaaaaatcaggagccaaatcaagactgttaagctggatacctaatgatttcccatcaaaactttttaaaaattgccat

SEQ ID NO: 262244 - DNA, 480 bp, Homo sapiens
ggctgaatggacgtagatggaatacatttgtttgaatccactccaatattctgagccttggtttgagtactgcttgaaagaatcagatgtgatatttccatgacattatcatacagggaagttctcagtatggtacctcagaaattggtggcmtgctttcatttaacacagacgtttattttcctcatgtacccagagttaaaaaacagtacatgtaaattgtaaaaatgcacaaaaacacagtcttctcatttctgcatataaactaaaggaattttgtgaagctggatcttgtaggcattatcagagaacaagccagtatgctgatgtcgagtggaagacagcaagtataagtgcagcactgtgaggtgccatggtagatttgatgttggatcttcctgagtcacagtttcaggaacttaagagatggaagagtgcagtgtctcaggcatggactcagtaaccagcatgattgattcc

SEQ ID NO: 262245 - DNA, 480 bp, Homo sapiens
ggctgaatggacgtagatggaatacatttgtttgaatccactccaatattctgagccttggtttgagtactgcttgaaagaatcagatgtgatatttccatgacattatcatacagggaagttctcagtatggtacctcagaaattggtggcatgctttcatttaacacagacgtttattttcctcatgtacccagagttaaaaaacagtacatgtaaattgtaaaaatgcacaaaaacacagtcttctcatttctgcatataaactaaaggaattttgtgaagctggatcttgtaggcattatcagagaacaagccagtatgctgatgtcgagtggaagacagcaagtataagtgcagcactgtgaggwgccatggtagatttgatgttggatcttcctgagtcacagtttcaggaacttaagagatggaagagtgcagtgtctcaggcatggactcagtaaccagcatgattgattcc

SEQ ID NO: 262246 - DNA, 500 bp, Homo sapiens
gggtggtcctgagaacgtgtacccaagatggttgggttacagcttggttttatacattttagggagacagaagttaaagacaaagatataatcaatacatatwaggtatacactggtttggcctggaaagatggtacatctcaaaatggggatctcacaggtcataggtagattcaaagattttctgattggaaattagttgaaagagttaagttttgacttaagaattaaagtcagcagaaagcaatgcttgagttaacctaacgggggttgtggaagccacggttcttgttatgtagatgaagcctctgtgtagcaggtttcagaggtaatagatgataaatgtctcttttgggaacttggaaggtgtcagattctctggagaagacctactaaggtgagaagattatctacagaatgcaatttctcctacaatagatggctttgcagggccattccaaaatatgtcaaagaaatatattccttcaggtcctgttatc

SEQ ID NO: 262247 - DNA, 473 bp, Homo sapiens
caagtctgagcttattttgtcctctttttctagttatttgaggtggaacattaggttttttgagatttctcttctcttttgacttagatgtttattgctaaaagcttcctctcaggactgctttactgcatcccataaattttaatatgcctccattttcatttgtctcaatatattttttaatttctcttttaattgctttcttgatgccttggctattcagaaacaatttgtttaatttccacatatttgtgagttttccaacattctttctggttttgatttctagttttatgtaattgtgctcaatatgatttcagtcttcytaaatttattaagtcttgttttgtggcttaacgtatgatctatcctggataatacttcttgtgtacttgagaaggatatgtattctgttgctgttggacggaatgtgctgtatatttcagtcaggtccatttggtctaaagtgcagt

SEQ ID NO: 262248 - DNA, 474 bp, Homo sapiens
tattttttaatttctcttttaattgctttcttgatgccttggctattcagaaacaatttgtttaatttccacatatttgtgagttttccaacattctttctggttttgatttctagttttatgtaattgtgctcaatatgatttcagtcttcttaaatttattaagtcttgttttgtggcttaacgtatgatctatcctggataatacttcttgtgtacttgagaaggatatgtattctgttgctgttggayggaatgtgctgtatatttcagtcaggtccatttggtctaaagtgcagtcaactctaatggtttcttattgattttctgtctagatgatttgcttaatgttgaagttggggtattgaagtcttctattattatcgtactgtagtttctctcttcagatctattaatatttgttttatatatttaggcgctctgattttaggtgcatatatatttacaattgtt

SEQ ID NO: 262249 - DNA, 504 bp, Homo sapiens
agctctaggagacctcaaaaccaggaaatgatttcctaggaaatgctttaggagggatagcttccgaggtgggtttagaagtatggaaaatattttgcacaccacatgccctgggtgggtagtgtttaactggagatgtcaaaaccttgaaagtctgtgagacaagtttggacaagagtcaggagctgttctgtctggtcasaaagcagagacgggatagtggaagagcaagagatactcagggagagacaggctgagacctattctggaaaggcataagaagtaggctcagtttctgggctttcttcttaaaactaccaatgtttctcactaagaatgaagtgatcagagcagggctgagcctttgggcagccatttaagtgagtctggagagtgagaggtaggaaggcctatgaactagtggttccccaaacccaggtgaagatacacttagtataactgagctagactgggttgaaaagagggatgagggtttcaaatgcc

SEQ ID NO: 262250 - DNA, 588 bp, Homo sapiens
aagacactaggctcttagctttgaagatagaggaagaggtcacaagccaaggactgcaggtggcctctaggatctggaaaaagcaaggaaggaatttctcccttataaccacyagcaggaacacagacagccctgccacccccttggtgttagcccagaaagatccttgttgaacttctaacctacaaaagggtaaaatatcaaattcacattgttttaagccactaagtttgtggtgatttttcacagcggaataggaaattaatgcagggagtcactatgagagaaagagtggccagggaacccgggcagaacagcacccataagattgtttatgtcccacaaatccatgggggaaactatttctagaagaaaggagcagagctctgtgccagactttgctgaaagataccactgatgtagagaatgaactttgcacaggatttgttaaggtagaggtaaccttcacagagcagcttcatgaagtataggcttccaacctgcattgattggagaggattagagagtgaggcatctcagcagaggtctcctgtaaggagcttgagaggcacaggaggtcaaacaagg

SEQ ID NO: 262251 - DNA, 551 bp, Homo sapiens
gcaatggcaccaccttggctcactacaacctccctccacctcccaggttcaagtgattctcctgcctcagcctgccgagtagctgggactacaggcatgtgccaccatgccctgctaattttttgtatttttggtagaaacagggtctcactgtgttgcctaggttggtcttgaactcctgagtgtgagcaatctgccctccttggtctcccaaagtrctgggatcataggtgtgaaccactgcgcccaacaatcctgtaccttcaaagaatattcctctgcagcacccccagacattacataccattgtccctgagtggactgagccctggaaggaccttcccactctctctttttctttctttttttttctttttcttttttgagacaaggtctcaccgtgtcacacaggctggagtgcatggcacaatcacggcttactgcaacctcaacctcccaggcttaagcaaacctcccacctcagcctcccaagtggctgggactacaggtgaatgccaccatgcccagctaatttttaaatttcttataga

SEQ ID NO: 262252 - DNA, 551 bp, Homo sapiens
tttctcacaaactgctttgtgaagtgtgcattcttctcacagagttaaacctttcttttgatcaaacaaattggaaacactgtttttgtagaacctgtgaagggatattttggagcacttataggcctacgctgaaaatggaaatatcttcagataaacactagaaagacgttttctcagaactactttggatgtgtgcattcttctcatagatttaagcctttcttttgattgagcagtttggaaacactgtttttgtaggatctatgcagggatatttgggagrgcattgaggcctatggtgaaaaactaaatatcttcagataaaaaagaaaaacaagctttctgggaaacggctttgtgatgtgtgcattcacctcacagaattaaacttttttttgattgaacagtttgaatatactgtttttgtagaatctgtgaaggtatatctgggagcagttggaggcctactgtgaaaaaggaaatgtcttcagacaaaaagtagaaggaagatttgccaaaaactgctttgtgatgtgtgcattcttctc

SEQ ID NO: 262253 - DNA, 551 bp, Homo sapiens
tttctcacaaactgctttgtgaagtgtgcattcttctcacagagttaaacctttcttttgatcaaacaaattggaaacactgtttttgtagaacctgtgaagggatattttggagcacttataggcctacgctgaaaatggaaatatcttcagataaacactagaaagacgttttctcagaactactttggatgtgtgcattcttctcatagatttaagcctttcttttgattgagcagtttggaaacactgtttttgtaggatctatgcagggatatttgggagagcattgaggcctatggtgaaaaactaaatatcttcagataaaaaagaaaaacaagctttctgggaaacggctttgtgatgtgtgcattcacctcacagaattaaacttttttttgattgaacagtttgaatatactgtttttgtagaatctgtgaaggkatatctgggagcagttggaggcctactgtgaaaaaggaaatgtcttcagacaaaaagtagaaggaagatttgccaaaaactgctttgtgatgtgtgcattcttctc

SEQ ID NO: 262254 - DNA, 591 bp, Homo sapiens
ctgagaaactgctttgtgatgaatgcatttgactcgcagagataaacctttcttttgattgagcagtttggtaacactgtttttgtagactcctcgaaggcatatatttgagctcattaaagyttattttaaaggaggaaatatcttcagggaaaaactataaagaagcttcctcagaaactgttttgtgatatgctcattcttctcacagagttaaaactttctttttattaagcaatctggaaacaatgtttttttagaatctgcgaagggatatttgggagctccttgaggcttttggagttaaaggaaatatcttcagagaaaaactaaaaagaagctttctgagaaagtgctttgtgatgagagcactcatctcacagagttaaaacgttcttttgattgagcagtgtggaaacactgtttttgtagaatctgtgatggaatatttgggagtgcaatgaggcctatgctgaaaaaggaaacatcttcagataaaaacctgaaagaaactttttcagaaactgttttgtgatacatgcattcttctcaaagaattaaacctttctttttattgagcagtttggaaac

SEQ ID NO: 262255 - DNA, 584 bp, Homo sapiens
atgttctaagctcatgagcctgtctcccatccaaatgacagtttgtctaagatcattaatttgatttgccaatttttgatcaatactagattgtgaattccacaatcttgtagaatttttttgccaatcattaacaaagtttactgactgaacagaagagtgcaatgcaactcctgctacagcagccgtagctgtgactgcaattaatcccataatcactgcwattaaagtaaaaatgaatcttttggatctatttaaaacaccttttaatacttcagtcaaagtatggatggatggtgaggcctcccacggtcggtccatggacacagggatccacacgccctctcttgctctcaccagcagaatacggtgttgccaattaaaagttgaatcaatgcaagtaagcaatctacaattttcacaggttatagtctgggagtctggtttaataactatatttcctacaactagcatataagggggctttatgcaactttgtaaaggaactgttagactggaatttaggtcgacagtataaaatggcttacgatctcttgtttctaaagtttgatttccagaccaaa

SEQ ID NO: 262256 - DNA, 584 bp, Homo sapiens
atgttctaagctcatgagcctgtctcccatccaaatgacagtttgtctaagatcattaatttgatttgccaatttttgatcaatactagattgtgaattccacaatcttgtagaatttttttgccaatcattaacaaagtttactgactgaacagaagagtgcaatgcaactcctgctacagcagccgtagctgtgactgcaattaatcccataatcactgctattaaagtaaaaatgaatcttttggatctatttaaaacaccttttaatacttcagtcaaartatggatggatggtgaggcctcccacggtcggtccatggacacagggatccacacgccctctcttgctctcaccagcagaatacggtgttgccaattaaaagttgaatcaatgcaagtaagcaatctacaattttcacaggttatagtctgggagtctggtttaataactatatttcctacaactagcatataagggggctttatgcaactttgtaaaggaactgttagactggaatttaggtcgacagtataaaatggcttacgatctcttgtttctaaagtttgatttccagaccaaa

SEQ ID NO: 262257 - DNA, 620 bp, Homo sapiens
agtattagggtgggagtgacccgattttccaggtgccctctstcacctctttccttggctaggaaagggaattccctgaccccttgcacttcctgggtgaggtgatgccttgccctgctttggttcactctcagtgcactgcacaaactgtcctgcaaccactgtctgatactcccccatgagatgaacctggtacctcagttggaaatgcagaaatcattcattttagaaaaaggctttctgcagatgctttgtgatgtgtacattcatctcacagagttaaaccactgttttgattgagccatttggaaacactttctgtacaatctaacaagggatacttgggagcacattgaggcctatggtgaaaaaggaagtatcttgagataaaaagtagaaagaggctttctaagaaactgctttgtgatgtgtgcattcttctcaaagagttaaatcttccttttgattaagcaatctggaaccactgttttaatagaatctacaaaaggaatatatgggagtcaattgaggctgattgtgtaaaaggaaatgtattcagataaaaactagaaaggagcattctgagaaactgatttgtgattagtgcattcatctaactg

SEQ ID NO: 262258 - DNA, 620 bp, Homo sapiens
agtattagggtgggagtgacccgattttccaggtgccctctgtcacctctttccttggctaggaaagggaattccctgaccccttgcacttcctgggtgaggtgatgccttgccctgctttggttcactctcagtgcactgcacaaactgtcctgcaaccactgtctgatactcccccatgagatgaacctggtacctcagttggaaatgcagaaatcattcattttagaaaaagrctttctgcagatgctttgtgatgtgtacattcatctcacagagttaaaccactgttttgattgagccatttggaaacactttctgtacaatctaacaagggatacttgggagcacattgaggcctatggtgaaaaaggaagtatcttgagataaaaagtagaaagaggctttctaagaaactgctttgtgatgtgtgcattcttctcaaagagttaaatcttccttttgattaagcaatctggaaccactgttttaatagaatctacaaaaggaatatatgggagtcaattgaggctgattgtgtaaaaggaaatgtattcagataaaaactagaaaggagcattctgagaaactgatttgtgattagtgcattcatctaactg

SEQ ID NO: 262259 - DNA, 620 bp, Homo sapiens
agtattagggtgggagtgacccgattttccaggtgccctctgtcacctctttccttggctaggaaagggaattccctgaccccttgcacttcctgggtgaggtgatgccttgccctgctttggttcactctcagtgcactgcacaaactgtcctgcaaccactgtctgatactcccccatgagatgaacctggtacctcagttggaaatgcagaaatcattcattttagaaaaaggctttctgcagatgctttgtgatgtgtacattcatctcacagagttaaaccactgttttgattgagccatttggaaacactttctgtacaatctaacaagggatacttgggagcacattgaggcctatggtgaaaaaggaartatcttgagataaaaagtagaaagaggctttctaagaaactgctttgtgatgtgtgcattcttctcaaagagttaaatcttccttttgattaagcaatctggaaccactgttttaatagaatctacaaaaggaatatatgggagtcaattgaggctgattgtgtaaaaggaaatgtattcagataaaaactagaaaggagcattctgagaaactgatttgtgattagtgcattcatctaactg

SEQ ID NO: 262260 - DNA, 620 bp, Homo sapiens
agtattagggtgggagtgacccgattttccaggtgccctctgtcacctctttccttggctaggaaagggaattccctgaccccttgcacttcctgggtgaggtgatgccttgccctgctttggttcactctcagtgcactgcacaaactgtcctgcaaccactgtctgatactcccccatgagatgaacctggtacctcagttggaaatgcagaaatcattcattttagaaaaaggctttctgcagatgctttgtgatgtgtacattcatctcacagagttaaaccactgttttgattgagccatttggaaacactttctgtacaatctaacaagggatacttgggagcacattgaggcctatggtgaaaaaggaagtatcttgagataaaaagtakaaagaggctttctaagaaactgctttgtgatgtgtgcattcttctcaaagagttaaatcttccttttgattaagcaatctggaaccactgttttaatagaatctacaaaaggaatatatgggagtcaattgaggctgattgtgtaaaaggaaatgtattcagataaaaactagaaaggagcattctgagaaactgatttgtgattagtgcattcatctaactg

SEQ ID NO: 262261 - DNA, 389 bp, Homo sapiens
aagtatcttgagataaaaagtagaaagaggctttctaagaaactgctttgtgatgtgtgcattcttctcaaagagttaaatcttycttttgattaagcaatctggaaccactgttttaatagaatctacaaaaggaatatatgggagtcaattgaggctgattgtgtaaaaggaaatgtattcagataaaaactagaaaggagcattctgagaaactgatttgtgattagtgcattcatctaactgagttaaaactgtcttttgattgagtaatttggaaatactgttttggtagaatctgtgaagggatacgtgggagcacattgtgacctattgtaaaaaaggaaataacttcagataaaaattagaaagaatctttctgaggaaat

SEQ ID NO: 262262 - DNA, 609 bp, Homo sapiens
aaaggctttctgcagatgctttgtgatgtgtacattcatctcacagagttaaaccactgttttgattgagccatttggaaacactttctgtacaatctaacaagggatacttgggagcacattgaggcctatggtgaaaaaggaagtatcttgagataaaaagtagaaagaggctttctaagaaactgctttgtgatgtgtgcattcttctcaaagagttaaatcttccttttgattaagcaatctggaaccactgttttaatagaatctacaaaaggaatatatgggagtcaattgaggctgattgtgtaaaaggaaatgtattcagataaaaactagaaaggagcattctgagaaactgatttgtgattagtgcattcatctaactgagttaaaactgtcttttgattgagtaatttggaaatactgttttggtagaatctgtgaagggatacgtgggagcacattgtgacctattgtaraaaaggaaataacttcagataaaaattagaaagaatctttctgaggaaatgctttgtgatgagtgcattcatctcacagagttaaacaattcttttgattgagcagtttggaaacactgtttttgta

SEQ ID NO: 262263 - DNA, 572 bp, Homo sapiens
tgatgagtgaattcacctcacagaattaaacttttcttttgattaagcaggttggaaacactgttttggtagaatttgcaaagggatatttgggagtgcattggggcctatggtgaaaaagttaatatcttcacatagatactataaagaagctttctctgaaactgctttgtgatgtgtaccttcttctcaaagagttaaacttttcttttgattcaggctttggaatcactgtttttgtagaaactgtgaaaggatatttgggagtacatgaggmctatggtgaaataagttatagcttcagataaaaactacaaagaagctttctcagaaacagctttgtgttatgcacattcttctcacagagttaaacctttttttggattgaatagtttggaaacacagattttgtagaatctgcaaatttatatttgggagcacattgaggcttatggtgaaaaagaaaatatctgcagataaatactagaaagaacctttttcagaaaccagaaactgctttgtgacgtgtgtatttttctcacacatttaagcctttttttttgattgagcaa

SEQ ID NO: 262264 - DNA, 572 bp, Homo sapiens
tgatgagtgaattcacctcacagaattaaacttttcttttgattaagcaggttggaaacactgttttggtagaatttgcaaagggatatttgggagtgcattggggcctatggtgaaaaagttaatatcttcacatagatactataaagaagctttctctgaaactgctttgtgatgtgtaccttcttctcaaagagttaaacttttcttttgattcaggctttggaatcactgtttttgtagaaactgtgaaaggatatttgggagtacatgaggactatggtgaaataagttatagcttcagataaaaactacaaagaagctttctcagaaacagctttgtgttatgcacattcttctcacagagttaaacctttttttggattgaatagtttggaaacacagattttgtagaatctgcaaatttatatttgggagcacattgaggcttatggtgaaaaagaaaatatctgcagataaatactagaaagaacctttttcagaaaccagaaactgctttgtgacgtgtgyatttttctcacacatttaagcctttttttttgattgagcaa

SEQ ID NO: 262265 - DNA, 361 bp, Homo sapiens
ttaatctgcctctcctctcactctatactatctctgttagctaattttatttgtgcacattgcttatactgggcattatatacacatatgcatgtgtgtacatgtgcacacacacactgtatgtggacatgtatatatatatgtgtgtgtgtrtatatatagtatatatataaattacaataacataaaggtggcattttaaattagtggaaattaccctgatttgatcactacacattctatacatgtaaagaaaatatcactctgtatcccaagaatatgtacaattatggtttgtcaaatgaaaaagttcatacattgaaaaattttagataaatatcaaactttctctgaaactgta

SEQ ID NO: 262266 - DNA, 601 bp, Homo sapiens
caaacatgggtggaccaaagaacaaaaggaccgctgtgctgtgagctgaaagagtggaaagggccttggatgaaccacctgaggaatgtttccaaacagtaaacaggatgaagaygtaggagattagaagtatgaagaaagtacccacacagataaacccactgttaacagtgaccatgaactgcaatctgtaggtgtcggtacaggctagtctgagaagctgaggaaggtcacagtagaagctgtccaacacattagggccacagaagggtaaattaacaagaaatgccagttggaacagggagtgactgacaacaagggtccaggcaacagccagaaatgaaaggcacattcttgggctcataatggtcagatagtggaggggcttaatagggccacataactgtcaaaggccatggctatgagcagcaccatctccacaccaccaatgacgtggatgaagaagatttgagcgatgcagcctccaaaggagatgactttgcgctttctgaacaggtcataaatcatcttgggagaagtgacagagcaggctcctaagtcaatgaaggagagactgaccagtagaaagtacatgggggag

SEQ ID NO: 262267 - DNA, 511 bp, Homo sapiens
cttttccaggcacacagtgcaagctgtcagtggatctaccattccggggtctggaggacagcagccctcttctcatagctccactaggcagtaccctagtggggactctgtgttgggggcttcaaccccacatttccattccccactgccttagcagaggttctccatgaagacctcacccctgcagcaaacttctgtctggagatccaggcatttccatacattctctgaaatctaggtggaggttcccatacctcgattctggacttcygtgaatccacaggctcaacaccacatggaagctgccaaagcttgaggcttgcaccctctgaagccatggcctgagctgtaccttgaccccttttagctgtggctggagcagctgggacacagagcaccaagtccctaggctgtacacaggcaaacagcagaggggccctgggcccagcctatgaaaccattttttcctcctaggcctctgggtgtgtgatggaaggggctgccacaaaga

SEQ ID NO: 262268 - DNA, 453 bp, Homo sapiens
ttacaaaatcatcagctcttgtgagacttattcaagaccacgagaacagtatgggggaaatactcctgtgattcagttatctcccgttggatccctcccacaagacacggaaattatgggagctacaattcaagatgagatttgggtggggacacagccaaaccatattgctgctgaatagatcatgtagacaggctctcaaactacacggagagcaagagaggcccaccttaccacaacatttcatccaatccactaataaaacaggcacatcactgaarccaccttcaactctccagactacccagctgccagctgaataccacagatggctacagttaataccacatggagcagaatcatgtagctaagccctgcttgcactaatacaagtccacaattttttttaagtttgttgttttaagctgcgaagttttgaggtggtttgtggta

SEQ ID NO: 262269 - DNA, 601 bp, Homo sapiens
caaacatgggtggaccaaagaacaaaaggaccgctgtgctgtgagctgaaagagtggaaagggccttggatgaaccacctgaggaatgtttccaaacagtaaacaggatgaagacgtaggagattagaagtatgaagaaagtacccacacagataaacccactgttaacagtgaccatgaactgcaatctgtaggtgtcggtacaggctagtctgagaagctgaggaaggtcacagtagaagctgtccaacacattagggccacagaagggtaaattaacaagaaatgccagttggaacagggagtgactgacamcaagggtccaggcaacagccagaaatgaaaggcacattcttgggctcataatggtcagatagtggaggggcttaatagggccacataactgtcaaaggccatggctatgagcagcaccatctccacaccaccaatgacgtggatgaagaagatttgagcgatgcagcctccaaaggagatgactttgcgctttctgaacaggtcataaatcatcttgggagaagtgacagagcaggctcctaagtcaatgaaggagagactgaccagtagaaagtacatgggggag

SEQ ID NO: 262270 - DNA, 551 bp, Homo sapiens
aaatgaaaggcacattcttgggctcataatggtcagatagtggmggggcttaatagggccacataactgtcaaaggccatggctatgagcagcaccatctccacaccaccaatgacgtggatgaagaagatttgagcgatgcagcctccaaaggagatgactttgcgctttctgaacaggtcataaatcatcttgggagaagtgacagagcaggctcctaagtcaatgaaggagagactgaccagtagaaagtacatgggggagtgtaagtgagggtcagtggtcacagaaaacacaatgaggatgtttccagtaatgcttgccacatagagcacagaggaaaacactaggaggaggagctggatctcccatgaatgagtgagtcccagaaacaaaaactcagataccactgagtgattctctccatccattggtccagccaactgggctgtggctaaaattatgagaactaagaaaatggggaggaaattgtgattatgaagataatatgtactaaaatcaatattgcaatgtcactatgaataaatagt

SEQ ID NO: 262271 - DNA, 542 bp, Homo sapiens
aagtataaatttgtgattttgctttaatttgaaatattaayttcaaatatgttatcacaatttgatacaaactattgacagtaaatctgtggattaagtaatgtcttagtaggtattgggaaaatttgaaactagtaacatggaggactattgtcattgtttatttcaaagccagttaaaattctgcaaagcagtgtacataaaaataatttcaagaaatttataaaataccgagattatggtgtataaacaactttagattctttgtttaagaaattctgccagtttgtaatatatgcttcattcaaagtagctaagggctgtacctggccaatagtaggcacctaatatttgttgaaaaggaatactgagtagctgggacctcctgagtagctgggaccacacacatttaacctgtatttataaaattactgtttagagaataacatttgatggaatcatgcttttactttctgcttatgactcaattgtttgtactgacattaacatcccaaatccttagcatggcctacaaggccctg

SEQ ID NO: 262272 - DNA, 611 bp, Homo sapiens
atatgtagaagtattcctaattatgatttctttgtattcctaattgtaatagctttgtatttgaaaaatgtattgattcatactctaatgttattaattttgtatgtgatgacaacagaatatattatcatgctccttttgtgaatctcattcataatataaagtataaatttgtgattttgctttaatttgaaatattaatttcaaatatgttatcacaatttgatacaaactattgacagtaaatctgtggattaagtaatgtcttagtaggtattgggaaaatttgaaactagtaacatggaggactattgtcattgtttatttcaaagccagttaaaattctgcaaagcagtgtacataaaaataatttcaagaaatttataaaataccgagattatggtgtataaacaactttagattctttgtttaagaaatwctgccagtttgtaatatatgcttcattcaaagtagctaagggctgtacctggccaatagtaggcacctaatatttgttgaaaaggaatactgagtagctgggacctcctgagtagctgggaccacacacatttaacctgtatttataaaattactgtttagagaataacatt

SEQ ID NO: 262273 - DNA, 556 bp, Homo sapiens
  misc_feature (1)...(556): n = A,T,C or G
ctgttctttattcctggagtatttttccccctgacaaattacttatcatctatcataattcaggttaaatggcactaactcagggaaggcttccnctaacgtgcctcccttctccaaccaaattaggaacaattatatggccacatagtatcgaatcaagtttataattttaaaataattgggagattttgttgtttaacacttgttttcactataagactgtaattacatgcaagtaagaaccatgcctgtttgttcactcctgccacagtcagaatagtgcctggaatatgcagtaagggctgaacaaacactaaataaatgaacaagtgaataaatggatattgtctcatttttagaacagagtactgaakggatcatgaacactatctggtatgtcacgtaggtaatttacaagggctacaatttcagctcagatttaccttttcctggatacaggtcttgataggtctcttgatgtcatttcacttcagattcttctttagaaaacttggacaatagcatttgctgtcttgtccaaattgttactaagaat

SEQ ID NO: 262274 - DNA, 561 bp, Homo sapiens
ggatgaagacgtaggagattagaagtatgaagaaagtacccacacagataaacccactgttaacagtgaccatgaactgcaatctgtaggtgtcggtacaggctagtctgagaagctgaggaaggtcacagtagaagctgtccaacacattagggccacagaagggtaaattaacaagaaatgccagttggaacagggagtgactgacaacaagggtccaggcaacagccagaaatgaaaggcacattcttgggctcataatggtcagatagtggaggggcttaatagggccacataactgtcaaaggccatggctatgagcagcaccatctccacaccaccaatgacgtggatgaagaagatttgagcgatgcagcctccaaaggagatgactttgcgctttctgaacaggtcataaatcatcttgggagaagtgacagagcaggctcytaagtcaatgaaggagagactgaccagtagaaagtacatgggggagtgtaagtgagggtcagtggtcacagaaaacacaatgaggatgtttccagtaatgcttgccacata

SEQ ID NO: 262275 - DNA, 624 bp, Homo sapiens
agtattacaccttcagtgagcacgtgtactagaaattwaaaaaataaataaaataaaccttcaaagtgagctagcaaataaatttccctatggtctcagctctgagtggagagagaaaatgttccctgtggagtttatagccagaatccagctctcaaacaggtttcagcctgaactcacacaatctgtgtggcttccaaatttgcaagctgagaatttaattcaaagtggtctcaggttgatagcagtccaaaatgctaggtaggaaaaaaaatcctctctggacaaataaatcatcaaagcaagctcataagagcaggtttcaaaggtcatgagcttctaacacacacacaaaaatcacacacacaaaatgggggtagcagcaacatgggtagcgtattcaaacttgaaaagactttaaatatttgtattattagatgtagattatgaaacacatattttaatgtggttaatttttttaaggaatcaaaactatgagtaaagaccaagaaaattgtgctggatggccacttccaccatggctcccctcctatttaagtctgggtactgtgtcacccgaagtcttcaggcacattgttccaggtttgggtttgcctatgaaag

SEQ ID NO: 262276 - DNA, 624 bp, Homo sapiens
agtattacaccttcagtgagcacgtgtactagaaatttaaaaaataaataaaataaaccttcaaagwgagctagcaaataaatttccctatggtctcagctctgagtggagagagaaaatgttccctgtggagtttatagccagaatccagctctcaaacaggtttcagcctgaactcacacaatctgtgtggcttccaaatttgcaagctgagaatttaattcaaagtggtctcaggttgatagcagtccaaaatgctaggtaggaaaaaaaatcctctctggacaaataaatcatcaaagcaagctcataagagcaggtttcaaaggtcatgagcttctaacacacacacaaaaatcacacacacaaaatgggggtagcagcaacatgggtagcgtattcaaacttgaaaagactttaaatatttgtattattagatgtagattatgaaacacatattttaatgtggttaatttttttaaggaatcaaaactatgagtaaagaccaagaaaattgtgctggatggccacttccaccatggctcccctcctatttaagtctgggtactgtgtcacccgaagtcttcaggcacattgttccaggtttgggtttgcctatgaaag

SEQ ID NO: 262277 - DNA, 589 bp, Homo sapiens
gggtcatacaaagaacacaactgattttgagattctcacataagtattacaccttcagtgagcacgtgtactagaaatttaaaaaataaataaaataaaccttcaaagtgagctagcaaataaatttccctatggtctcagctctgagtggagagagaaaatgttccctgtggagtttatagccagaatccagctctcaaacaggtttcagcctgaactcacacaatctgtgtggcttccaaatttgcaagctgagaatttaattcaaagtggtctcaggttgatagcagtccaaaatgctaggtaggaaaaaaaatcctctctggacaaataaatcatcaaagcaagctcataagagcaggtttcaaaggtcatgagcttctaacacacacacaaaaatcacacacacaaaatgggggtagcagcaacatgggtagcgtattcaaacttgaaaagactttaaatatttgtattattagatgtagattatgaaacacatattttaatgtggttaatttttttaaggaatcaaaactatgagtaaagaccaagaaaaytgtgctggatggccacttccaccatggctccc

SEQ ID NO: 262278 - DNA, 589 bp, Homo sapiens
gggtcatacaaagaacacaactgattttgagattctcacataagtattacaccttcagtgagcacgtgtactagaaatttaaaaaataaataaaataaaccttcaaagtgagctagcaaataaatttccctatggtctcagctctgagtggagagagaaaatgttccctgtggagtttatagccagaatccagctctcaaacaggtttcagcctgaactcacacaatctgtgtggcttccaaatttgcaagctgagaatttaattcaaagtggtctcaggttgatagcagtccaaaatgctaggtaggaaaaaaaatcctctctggacaaataaatcatcaaagcaagctcataagagcaggtttcaaaggtcatgagcttctaacacacacacaaaaatcacacacacaaaatgggggtagcagcaacatgggtagcgtattcaaacttgaaaagactttaaatatttgtattattagatgtagattatgaaacacatattttaatgtggttaatttttttaaggaatcaaaactatgagtaaagaccaagaaaattgtgctgsatggccacttccaccatggctccc

SEQ ID NO: 262279 - DNA, 630 bp, Homo sapiens
attttaatgtggttaatttttttaaggaatcaaaactatgagtaaagaccaagaaaattgtgctggatggccacttccaccatggctcccctcctatttaagtctgggtactgtgtcacccgaagtcttcaggcacattgttccaggtttgggtttgcctatgaaagaaactcatgagagctggaagtgaggagtgaagaggaggtcttcacataaagcaggcttaaggattagacatagcaggtttgacagatgtgatggcttgcagaatcctttatgagctcccactgtccatctggataagatttacagacctttcagaaattcctataagcttgggttctgtgcccacwctctagactgtcaggctaagatctctgatataaaacagacctcttctgattttgtctagctgcttttctaatatctattcaccaagctcttccaataatagcataaggccctaattaatattaaacttttatcattataatacataggatgtcttctgttttcctgatcaaattctgactactattaaaatataaagaattgtccagaaatatataaaaaaagaatcacacattgatcttctttaaatgaaaatataacaattgtatggactaggat

SEQ ID NO: 262280 - DNA, 422 bp, Homo sapiens
tgattcaaggtgtgaaggtaacatcattttgattttatacatcttcttcagtccatttaagcatgttacatagcgttgtttgttcttttcatgatattctttacagtagtctcctaaatgttccctctgcttctgccaggagcccctacaatcaactcagaagctatagagtttaaaacatgtaacatattatgccacctttcttacygtaaaacatcccatggtttctcatagtatttatagtaaaagtgaaatttttatgatggcttgagaaacttttcccattagatgcccaagtgctggtctggtctgatcttctcatcttcccttgggtgattctgtggcagtcacactagcctccttgctgctccacaaaaactccagcatgatcctacttcaggatatttgccattgttactgca

SEQ ID NO: 262281 - DNA, 609 bp, Homo sapiens
  misc_feature (1)...(609): n = A,T,C or G
aaactgtaaatatacatgttcacttttttatcgtctgtctccaaatactggaatgttaagttctgtaatgtcagatatttctgtttggttcactggtgtattcttaaagcatgttacatactaggtatactcaatgaatatttgttgaataaatatcacattgggcttattccagaaattcaagcttgtttcaatagttagagcaatctacaaatgtaattcattacattaactaattaaaggagctaaatcacatcaccaccacaataatgcagaaaamcacatttgatacaactcaatattcatgtctgcctaacaaacatctcatgatactaggaaaagaggaagggatatattattttcatgtataaagcactaaccattgtagcatgccaatatactcaaaattcaatgaaattcctatcaaaattttagcattcctcttagtcctcaacaaagcatttctaaaatgtgtatagaagaccaaagggccaaaagagtcaacttctgaagaagcgcaaaaagaaagttgaggaaatcttaaaacatgttattgagcttaaagttgcaaaaataaactcatgtaccataattgatgagnnnnnnnnn

SEQ ID NO: 262282 - DNA, 609 bp, Homo sapiens
  misc_feature (1)...(609): n = A,T,C or G
aaactgtaaatatacatgttcacttttttatcgtctgtctccaaatactggaatgttaagttctgtaatgtcagatatttctgtttggttcactggtgtattcttaaagcatgttacatactaggtatactcaatgaatatttgttgaataaatatcacattgggcttattccagaaattcaagcttgtttcaatagttagagcaatctacaaatgtaattcattacattaactaattaaaggagctaaatcacatcaccaccacaataatgcagaaaaccacatttgatacaactcaayattcatgtctgcctaacaaacatctcatgatactaggaaaagaggaagggatatattattttcatgtataaagcactaaccattgtagcatgccaatatactcaaaattcaatgaaattcctatcaaaattttagcattcctcttagtcctcaacaaagcatttctaaaatgtgtatagaagaccaaagggccaaaagagtcaacttctgaagaagcgcaaaaagaaagttgaggaaatcttaaaacatgttattgagcttaaagttgcaaaaataaactcatgtaccataattgatgagnnnnnnnnn

SEQ ID NO: 262283 - DNA, 570 bp, Homo sapiens
tttaaattacagacttcactcccaattccccatctactttaagagtcttcatttatcattccttgacaaactgtaaatatacatgttcacttttttatcgtctgtctccaaatactggaatgttaagttctgtaatgtcagatatttctgtttggttcactggtgtattcttaaagcatgttacatactaggtatactcaatgaatatttgttgaataaatatcacattgggcttattccagaaattcaagcttgtttcaatagttagagcaatctacaaatgtaattcattacattaactaattaaaggagctaaatcacatcaccaccacaataatgcagaaaaccacatttgatacaactcaatattcatgtctgcctaacaaacatctcatgatactaggaaaagaggaagggatatattattttcatgtataaagcactaaccattgtagcatgccaatatactcaaaattcaatgaaattcctatcaaaatyttagcattcctcttagtcctcaacaaagcatttctaaaatgtgtatagaagaccaaagggccaaaagagtca

SEQ ID NO: 262284 - DNA, 609 bp, Homo sapiens
  misc_feature (1)...(609): n = A,T,C or G
aaactgtaaatatacatgttcacttttttatcgtctgtctccaaatactggaatgttaagttctgtaatgtcagatatttctgtttggttcactggtgtattcttaaagcatgttacatactaggtatactcaatgaatatttgttgaataaatatcacattgggcttattccagaaattcaagcttgtttcaatagttagagcaatctacaaatgtaattcattacattaactaattaaaggagctaaatcacatcaccaccacaataatgcagaaaaccacatttgatacaactcaatattcatgtctgcctaacaaacatctcatgatactaggaaaagaggaagggatatattattttcatgtataaagcactaaccattgtagcatgccaatatactcaaaattcaatgaaattcctatcaaaattttagcattcctcttagtcctcaacaaagcatttctaaaatgtgtatagaagaccaaagggccaaaagagtcaacttctgaagaagygcaaaaagaaagttgaggaaatcttaaaacatgttattgagcttaaagttgcaaaaataaactcatgtaccataattgatgagnnnnnnnnn

SEQ ID NO: 262285 - DNA, 609 bp, Homo sapiens
  misc_feature (1)...(609): n = A,T,C or G
aaactgtaaatatacatgttcacttttttatcgtctgtctccaaatactggaatgttaagttctgtaatgtcagatatttctgtttggttcactggtgtattcttaaagcatgttacatactaggtatactcaatgaatatttgttgaataaatatcacattgggcttattccagaaattcaagcttgtttcaatagttagagcaatctacaaatgtaattcattacattaactaattaaaggagctaaatcacatcaccaccacaataatgcagaaaaccacatttgatacaactcaatattcatgtctgcctaacaaacatctcatgatactaggaaaagaggaagggatatattattttcatgtataaagcactaaccattgtagcatgccaatatactcaaaattcaatgaaattcctatcaaaattttagcattcctcttagtcctcaacaaagcatttctaaaatgtgtatagaagaccaaagggccaaaagagtcaacttctgaagaagcgsaaaaagaaagttgaggaaatcttaaaacatgttattgagcttaaagttgcaaaaataaactcatgtaccataattgatgagnnnnnnnnn

SEQ ID NO: 262286 - DNA, 596 bp, Homo sapiens
  misc_feature (1)...(596): n = A,T,C or G
nnnnnnnntatcgcaagaacagcacaggggaaactgcccccatgattcaattacctccacctggtctctcccttgacctgtggggattatggggrctatggggattacaattcaagacgagattcaggtggggatacaaagcctaaccatatcagtaggcatgtattgaattttaaactcagagaaaaatactagtgtttttataggattcttactaaagaaaaaccagaaagtaataaaccatctacgctaagacataaaattcagttgtttagttacaagatagaatgtggccttgtaagaaagcaaattaacttctaacatacaaagccttagagaagattcaagtgactgacggatcttaaacagagctattattacaactcgaactgcagtaaaatatcctcagcaacatagatgtgtgtgtttcactagtcagagcaatacaaatttaatgaaactccattggtggtgtttttaatcagacaatttctgaagatgtcctggcttattcacagatgcaagccaaatctctagaagagtaccataataagaaaaaaaagaatacaggcaattgagagctgttccaaagttta

SEQ ID NO: 262287 - DNA, 596 bp, Homo sapiens
  misc_feature (1)...(596): n = A,T,C or G
nnnnnnnntatcgcaagaacagcacaggggaaactgcccccatgattcaattacctccacctggtctctcccttgacctgtggggattatgggggctatggggattacaattcaagaygagattcaggtggggatacaaagcctaaccatatcagtaggcatgtattgaattttaaactcagagaaaaatactagtgtttttataggattcttactaaagaaaaaccagaaagtaataaaccatctacgctaagacataaaattcagttgtttagttacaagatagaatgtggccttgtaagaaagcaaattaacttctaacatacaaagccttagagaagattcaagtgactgacggatcttaaacagagctattattacaactcgaactgcagtaaaatatcctcagcaacatagatgtgtgtgtttcactagtcagagcaatacaaatttaatgaaactccattggtggtgtttttaatcagacaatttctgaagatgtcctggcttattcacagatgcaagccaaatctctagaagagtaccataataagaaaaaaaagaatacaggcaattgagagctgttccaaagttta

SEQ ID NO: 262288 - DNA, 564 bp, Homo sapiens
gagaagattcaagtgactgacggatcttaaacagagctattattacaactcgaactgcagtaaaatatcctcagcaacatagatgtgtgtgtttcactagtcagagcaatacaaatttaatgaaactccaytggtggtgtttttaatcagacaatttctgaagatgtcctggcttattcacagatgcaagccaaatctctagaagagtaccataataagaaaaaaaagaatacaggcaattgagagctgttccaaagtttagggagtttttgtaaggaattaataaataaaaatgttcttgaaagagagaaattaatatgcagttcatactgccagaattgcaggcaatttatcaaagtcccctaatcctccaaaatcgctattttttttttgacacacactttacagtacagaagaaaatgtctccggcaataaatcacaaagttaaaattacctagtctacaattaactacacagtgatggtaaatcattttctaccaaaagaaagaaatgtcttgtctattcaggttctgctctacttaaaagttttccttgttggcgagc

SEQ ID NO: 262289 - DNA, 564 bp, Homo sapiens
gagaagattcaagtgactgacggatcttaaacagagctattattacaactcgaactgcagtaaaatatcctcagcaacatagatgtgtgtgtttcactagtcagagcaatacaaatttaatgaaactccattggtggtgtttttaatcagacaatttctgaagatgtcctggcttattcacagatgcaagccaaatctctagaagagtaccataataagaaaaaaaagaatacaggcaattgagagctgttccaaagtttagggagtttttgtaaggaattaataaataaaaatgttcttgaaagasagaaattaatatgcagttcatactgccagaattgcaggcaatttatcaaagtcccctaatcctccaaaatcgctattttttttttgacacacactttacagtacagaagaaaatgtctccggcaataaatcacaaagttaaaattacctagtctacaattaactacacagtgatggtaaatcattttctaccaaaagaaagaaatgtcttgtctattcaggttctgctctacttaaaagttttccttgttggcgagc

SEQ ID NO: 262290 - DNA, 587 bp, Homo sapiens
cactcctccgtggacctcctctgacatattaaacattgcagtccattataagctgcaagaggacagggatttttgcctgttttattccctactgtatcaccaggggctacagcaatatctgacaaacagtgggcatgtaatgaatatttgttaagtgaagtaataaattcaatcaaatcacaccacctgtttaaagcacttcattggcttcacattgcacttagaataaagagaaattctttttatacaatataagttcctgcagaatgcagacactttctacttctccagcctcttttcractcctctcctactagcttctgtatttaagccacattagacctttcttcagttttttatatagactttgtcgcatcacacctcagagattctgtacatgttcttcctcctgcctagaaaggatcgtccctccactttcgccaactaatccctgctcaacttttcatctcagcaggaggcccattctctttggcaatcctctggcctccagcccatttattatatgctcacatgtcaacatgtacttcgtacagcatgtaacacaattgcacttttatattttaaca

SEQ ID NO: 262291 - DNA, 570 bp, Homo sapiens
aggtttgtggaatgaaagaggaaaagaaagaattaatattcctttaaattaggatggcaaagatcatatatagaaaattggctaagttgtggtccattcatgtttgctcccaattaaggagcacagctatgaaaaggaaggcttcaaattaataaccaatagatttttttaaaaagaaaactggccaggtactgtggcttatgtctgtaatatcagcatgttgggaggccaaggcaggattacttgagcccagaaattccagaccagcctgagaatttggcaaaactctgtctctacaaaaawtacaaaaattagccaagtttggtggcatgtgcctgtagtaccagctacttgggaggctgaggtggaagaatagcttgagtctgggaggtcaaggctgcaatgagctgtgattgcaccactgcactcaagcctgggtggtagagtaagaccctgtctcaaaaaaaaaaaaaaaaaagaaaaatcactaagcaaaataagacatgtgaaggatcatgtcaaaggtaagaaaaattaggggaacattaaaagctttcttcccaagccact

SEQ ID NO: 262292 - DNA, 592 bp, Homo sapiens
ctgaaaacacttaatagagattattttagaagttgctgaggtacaaataaaactgctatgctgacatacttttttgcaccaacaactccagttcttctgacacaaaggaccatcttcctagtgccataatttatcttagaccccaaaactcacagaggcacacatcatatctctaatacttgctcaccaccactggcatgagtctctctctatcctcttctacgtgaagtgattatactgtcacctctggagctaactgtccacagtctcaagatgcacacttttacaaccagaagcctatggactgggtgagggagcagaaacagccacaggtactgcccatcagggtaatgtaagtcagcgtgcaaacaactgatcagatgaacatgaatagcaaggtgcygaggcactgggaagagggaccggaaaactctataactgttgaaaaagactcaagcccttgggaagggaaatgcctacgaaattatataaagaccattttatccaagttggtcatcattcagatgaaaaccatgaggcccagaaaagtaaactgagtttccagaattcacacaattgatagaataggaac

SEQ ID NO: 262293 - DNA, 592 bp, Homo sapiens
ctgaaaacacttaatagagattattttagaagttgctgaggtacaaataaaactgctatgctgacatacttttttgcaccaacaactccagttcttctgacacaaaggaccatcttcctagtgccataatttatcttagaccccaaaactcacagaggcacacatcatatctctaatacttgctcaccaccactggcatgagtctctctctatcctcttctacgtgaagtgattatactgtcacctctggagctaactgtccacagtctcaagatgcacacttttacaaccagaagcctatggactgggtgagggagcagaaacagccacaggtactgcccatcagggtaatgtaagtcagcgtgcaaacaactgatcagatgaacatgaatagcaaggtgccgaggcactgggaagagggaccggaaaactctataaytgttgaaaaagactcaagcccttgggaagggaaatgcctacgaaattatataaagaccattttatccaagttggtcatcattcagatgaaaaccatgaggcccagaaaagtaaactgagtttccagaattcacacaattgatagaataggaac

SEQ ID NO: 262294 - DNA, 573 bp, Homo sapiens
tatcaaatgagtattaagataaacattcaaagagttttaaagaaaaaagtgttatagatattggagggcagaagagacgattgccattaagaacaggtggaggaggttatgccaaggacattgacctgaccctttaggaattagtgaaaattgaataggagaagaatgaggtatacaatgtgtgaaaaatacctaaattgatataacaggaggagaccttttcatatcaattatcattacttctgtgtatataaccatattagatacccacaaacgaatagaaagtggatagttcttgattgacaagtaagactaataatcccagatcatagtaaggtcttaacttcaagtcaataatctttattacttatggttcattcctctccctyatgttttccaataattttaaaatgcataattaaaacaattctcatttaaaaacatagtagccatgactaatgatcttccagtgggaaggtactaagactttacaacatgtttcttgctggggataagacagcctacagccagcattcaactcatttttctaaagtctatggatcaatttgaaat

SEQ ID NO: 262295 - DNA, 576 bp, Homo sapiens
cccaaaacatgtacaactatgatacatcaataaaaaacaacaaaaaaaccaaaagaatagaaatcaaaaataaatacataaatacataaaatagggataataatacctcccttgcttgcttgctcccttgctccatttgtaagaaataagtgatataatataggtaaaaatacttaacctcatacctaccacacagtatagcacaataaacgttatttattataatctgaggcctacctacataagtgactttcaagtatagaaaattatttctcaaattttaaatactccctgattctcaggtatggtaattagacctggctttaggtaaagctctcatgtctacacttggatttaatcacttaagtatatttcccagtgccccccccaaaaaaaattgctcctaggtggacacactaatcaaagacttcctgagaaatgcaggaagaagttttgtcctctgaccacgctacrccctttccttgatggtaagccccataatctaaagccataagtttcaattcctcacataaaaagaaaaaaaatgtcttttatgaccacttcagataacactgg

SEQ ID NO: 262296 - DNA, 580 bp, Homo sapiens
accttgcctcaagcatgctgtttgctttggccccagggcttcctgaatgctgtggcatgggatggcagaaagagcccattcagcatgcaaacatatgttcagcccgaaggtacgggggttaccgttcccagggaactctcagcmaatgggggagaggcagaagattctgaaaggtcttctgtctactcagcagtccgcgtgggaccgagccctgggtgcctgtagaggggaccagccttggtaatccacccttgtgttggcttgtccttcactgtgtcaccttccctgtttcctcatcctgcttcctaaaattgcctccaaactccaccttccctcagagaaggactgaagtaggtaagtggaatttagtatcaggtttgtaagggtgagatcgcaaagtacttaagatacaaacacaaagtgtctatcctacagacctgggctcagtcctttttttttttttttttttttttagacaggactggagtgcagtggcgtgatctcggctcactgcaacctctgcctcctgagggttcaagcaattctcctgcctcagcctcccgagtagctgggattacag

SEQ ID NO: 262297 - DNA, 632 bp, Homo sapiens
tgataagcaaacatgcatgttacacacatcccatgttcaccttggagtggagaatacacatttaagtgtattacaatcgggctgtagacgtcaaaaggtgaatcagggacatgaaggcattgcacagcctctgtaaatgggcagaaccaggccatggtcagtggtctcttatcaggagaaagttactgaatcagcctcttgtccaatcaaagctgcagttctggctggtggaacgagggtcagttagtgtctggcagcgggcgaactgcaattgttttaatattacctatctccaagccattggyttgtttagctgctagagaaaaagaaacccccttgcggcagctggaaactagtttattctttaagtgtaggggtgtgtgacttaacccttccctgatatggcccttaggtcctggttatgatttggtatcttactgtcacagagtccattctgccagtcttatgacctctattttatttttattttttagagacagggtctcagtccatcacccaggctggagtacagtggcgtgatctcggctcactgcaacctccacctcccaggttcaagcaattctcctgccttagccccctgagtagctgggattacaggcacccacacaccc

SEQ ID NO: 262298 - DNA, 495 bp, Homo sapiens
tccaacagtttgagaggcagagatgggagtatgttttaaggccatgagtttgagagcagcctgggcaacacagcaagacctcctctctacaaaaataaaaaaaataaatttaataaaataaaataaatatagccaggcatgatggtatgtacctatggccccagttactcatgtggctgagatgggcagatctcttgattctaggagtttgaggccagcttgggcaacatagcaagwcttctctctctacaaaaatgaaaaaaatgcctgacatggtggtacttgcctgtattcccaggtatgggggcagctgaggctggagcatctcttgagcccagttggtcaaggttgcagtgagctatgattataccactgcactccatcctgggtgacagagtgggaccctgtctcaaaatacaaatacaaatgaaatctcaagtcagaccagtcccttctaggctatgtaggccttgtaaccacatagctgcatgatcg

SEQ ID NO: 262299 - DNA, 495 bp, Homo sapiens
tccaacagtttgagaggcagagatgggagtatgttttaaggccatgagtttgagagcagcctgggcaacacagcaagacctcctctctacaaaaataaaaaaaataaatttaataaaataaaataaatatagccaggcatgatggtatgtacctatggccccagttactcatgtggctgagatgggcagatctcttgattctaggagtttgaggccagcttgggcaacatagcaagtcttctctctctacaaaaatgaaaaaaatgcctgacatggtggtacttgcctgtattcccaggtatgggggcagctgaggctggagcatctcttgagyccagttggtcaaggttgcagtgagctatgattataccactgcactccatcctgggtgacagagtgggaccctgtctcaaaatacaaatacaaatgaaatctcaagtcagaccagtcccttctaggctatgtaggccttgtaaccacatagctgcatgatcg

SEQ ID NO: 262300 - DNA, 534 bp, Homo sapiens
catgaccacctgtgcccagccccctattattattattttaaataatagctttattaaaatattcamatgccattcactttatttattgaaatctgcaattcagtaggttttagaatattcacagagctgtgcatcgatcaccacagtcacttttagaacctttcattaccctatagagaaatccataccccttagctactacctcctactctccccacctacctttgcccccagccttaggcaaccattgattaattttttgtcactatagatttgcctaatctggacaaatagaattgtacaatatgtgatcttttgtggctttttttccctcttagcacagtgttttcaaagttcctttatgtcatagtgtgtatcaatatttcattccttctatggcagtattccatggtagagacacactgcattttgtttatctgttcatcagttggtggatatttgggttgtttccatgtattccacgtattggtcattatgaataatgctgctatgaagattgttgtacaagttttt

SEQ ID NO: 262301 - DNA, 534 bp, Homo sapiens
catgaccacctgtgcccagccccctattattattattttaaataatagctttattaaaatattcaaatrccattcactttatttattgaaatctgcaattcagtaggttttagaatattcacagagctgtgcatcgatcaccacagtcacttttagaacctttcattaccctatagagaaatccataccccttagctactacctcctactctccccacctacctttgcccccagccttaggcaaccattgattaattttttgtcactatagatttgcctaatctggacaaatagaattgtacaatatgtgatcttttgtggctttttttccctcttagcacagtgttttcaaagttcctttatgtcatagtgtgtatcaatatttcattccttctatggcagtattccatggtagagacacactgcattttgtttatctgttcatcagttggtggatatttgggttgtttccatgtattccacgtattggtcattatgaataatgctgctatgaagattgttgtacaagttttt

SEQ ID NO: 262302 - DNA, 569 bp, Homo sapiens
gacatgatcatggttcactgtagcctcaaactcctgggctcaagtggttctctcacttcagtctcccaagtagctgggactacagacatgtgccaccatgtccagctaattttttatcatagagacgggatcttgccatgttgctccgactgggctcaaaactcctgacctcaagtgatcctcctgcctcagcctcccaaagtgctgggattacaggcaggcatgaccacctgtgcccagccccctattattattattttaaataatagctttattaaaatattcaaatgccattcactttatttattgaaatctgcaattcmgtaggttttagaatattcacagagctgtgcatcgatcaccacagtcacttttagaacctttcattaccctatagagaaatccataccccttagctactacctcctactctccccacctacctttgcccccagccttaggcaaccattgattaattttttgtcactatagatttgcctaatctggacaaatagaattgtacaatatgtgatcttttgtggctttttttccctcttagcacagtgttt

SEQ ID NO: 262303 - DNA, 559 bp, Homo sapiens
tgcatcgatcaccacagtcacttttagaacctttcattaccctatagagaaatccataccccttagctactacctcctactctccccacctacctttgcccccagccttaggcaaccattgattaattttttgtcactatagatttgcctaatctggacaaatagaattgtacaatatgtgatcttttgtggctttttttccctcttagcacagtgttttcaaagttcctttatgtcatagtgtgtatcaatatttcattccttctatggcagtattccatggtagagacacactgcattttgtttatctgttcatcagttggtggatatttgggttgtttccatgtattccaygtattggtcattatgaataatgctgctatgaagattgttgtacaagtttttgtgtggacatatatttttatttttctgggatatatgcctaggagtgaaattgttgcattataggatgactgtacatttagccttttgagaaactgccagactgttttctaacgtggctataccagttgggtgcaatggctcacacctgtaatcc

SEQ ID NO: 262304 - DNA, 506 bp, Homo sapiens
gtacacgccactactgcccagctgatttttgtatttttgatagagtcagagtttcaccgtgttggccaggctggtctcgaactccagacttcaggtgatttgcctgccttagcttcccaaagtgctgcgattacaagcatgagccaccatgcccagcctgatgccaggagttttagactagcctgggcaacctagcaagaccttgtctctacagaatatttaaaaattagccaaatgtggtggtgcctgtgtatagtctctctccctctctyttttttttttctaactttttgtgacatggtctggctctgtcacccaggctgaagtgcagtggtgtgatcatggctcactgcagcctgaaactcctgggatcaagtgatcaatcctcccacctcatcctaccaagtagtagggaccacaggtgtatgccacccaggtcttgctatgttgtccaggctggtcttgagctcctggcctcaagcaatcctctcaccttggccccccac

SEQ ID NO: 262305 - DNA, 506 bp, Homo sapiens
gtacacgccactactgcccagctgatttttgtatttttgatagagtcagagtttcaccgtgttggccaggctggtctcgaactccagacttcaggtgatttgcctgccttagcttcccaaagtgctgcgattacaagcatgagccaccatgcccagcctgatgccaggagttttagactagcctgggcaacctagcaagaccttgtctctacagaatatttaaaaattagccaaatgtggtggtgcctgtgtatagtctctctccctctcttttttttttttctaactttttgtgacatggtctggctctgtcacccaggctgaagtgcagtggtgtgatcatggctcactgcagcctgaaactcctgggatcaagtgatcaatcctcccacctcatcctaccaagtagtagggaccacaggtgtrtgccacccaggtcttgctatgttgtccaggctggtcttgagctcctggcctcaagcaatcctctcaccttggccccccac

SEQ ID NO: 262306 - DNA, 544 bp, Homo sapiens
cgggtctcacactgtcacccaggctggagtacagtggcacaacctctgctcactgcagcctccacctgccaggctcaagcaattctcctgcctcagcctcccgagtagctgggattacaggtaagtgccaccacacccagctgatttttgtgttttttgtagagacgaggtttcgccatgtttcccagactgttctcaaactcctgagctcaaagcagtccacccaccttggcctcccagagttctgggattacaggtgtgagccatcttgctcattctagtttaaacttttgagtrgtttgtgtctcctgattggactcctacaaatacagaattgatgctaggaagggtaccaggagatagacgcacacagatgggatttgggaataggtttggttatccaaggagcagtgctgagctccttgcaatgggatatgggatgctggtgatttccaggaagtgcgctcacaatgactcaagctgccacatactgttgattgtgaaatgccagttgaagcatatgtcctgcaagcttaggggtgct

SEQ ID NO: 262307 - DNA, 544 bp, Homo sapiens
cgggtctcacactgtcacccaggctggagtacagtggcacaacctctgctcactgcagcctccacctgccaggctcaagcaattctcctgcctcagcctcccgagtagctgggattacaggtaagtgccaccacacccagctgatttttgtgttttttgtagagacgaggtttcgccatgtttcccagactgttctcaaactcctgagctcaaagcagtccacccaccttggcctcccagagttctgggattacaggtgtgagccatcttgctcattctagtttaaacttttgagtggtttgtgtctcctgattggactcctacaaatacagaattgatgctaggaagggtaccaggagatagacgcacacagatgggatttgggaataggtttggttatccaaggagcagtgctgagctccttgcaatgggatatgggatgctggtgatttccaggaagtgmgctcacaatgactcaagctgccacatactgttgattgtgaaatgccagttgaagcatatgtcctgcaagcttaggggtgct

SEQ ID NO: 262308 - DNA, 544 bp, Homo sapiens
cgggtctcacactgtcacccaggctggagtacagtggcacaacctctgctcactgcagcctccacctgccaggctcaagcaattctcctgcctcagcctcccgagtagctgggattacaggtaagtgccaccacacccagctgatttttgtgttttttgtagagacgaggtttcgccatgtttcccagactgttctcaaactcctgagctcaaagcagtccacccaccttggcctcccagagttctgggattacaggtgtgagccatcttgctcattctagtttaaacttttgagtggtttgtgtctcctgattggactcctacaaatacagaattgatgctaggaagggtaccaggagatagacgcacacagatgggatttgggaataggtttggttatccaaggagcagtgctgagctccttgcaatgggatatgggatgctggtgatttccaggaagtgcgctcacaatgactcaagctgccacatastgttgattgtgaaatgccagttgaagcatatgtcctgcaagcttaggggtgct

SEQ ID NO: 262309 - DNA, 603 bp, Homo sapiens
gtctagttgcaggaaaacaagctcagagatcccactgagtctacattatagtgagttgtagaatcatttcattatatattactatgtagtaataatagaaataaagtgcacaatatatgtaatgcacttgaatcatcctgaaattattccctcattcccagtctgtggaaaaattgtcttccacacrttcactctgttttttggtagaggcagggtcttaatatattgcccagtctgatctcaaactcctggcctcaagtaatatacctctctcagcctcccaaagtgctgagattacaggcataagccaccaccctcaaccaagagtttcttaaaccaaataaaaattaagtgagattacttgagcccaggtggtcaaggctgcagtgagcctgattgcaccactgcactccagcctaggtgacagaatgagactgtctcaaaaaataaaataaaatacaaattaaccctttatgacattcccagtaacttcctaagtgctccccacaagtctttgaattctgtttaattttcacataacatttaagacatttaagaacttatgtctgtctgtgtcatccctttatgtcaaaagatgtcttt

SEQ ID NO: 262310 - DNA, 603 bp, Homo sapiens
gtctagttgcaggaaaacaagctcagagatcccactgagtctacattatagtgagttgtagaatcatttcattatatattactatgtagtaataatagaaataaagtgcacaatatatgtaatgcacttgaatcatcctgaaattattccctcattcccagtctgtggaaaaattgtcttccacacgttcactctgttttttggtagaggcagggtcttaatatattgcccagtctgatctcaaactcctggcctcaagtaatatacctctctcagcctcccaaagtgctgagattacaggcataagccaccaccctcaaccaagastttcttaaaccaaataaaaattaagtgagattacttgagcccaggtggtcaaggctgcagtgagcctgattgcaccactgcactccagcctaggtgacagaatgagactgtctcaaaaaataaaataaaatacaaattaaccctttatgacattcccagtaacttcctaagtgctccccacaagtctttgaattctgtttaattttcacataacatttaagacatttaagaacttatgtctgtctgtgtcatccctttatgtcaaaagatgtcttt

SEQ ID NO: 262311 - DNA, 603 bp, Homo sapiens
gtctagttgcaggaaaacaagctcagagatcccactgagtctacattatagtgagttgtagaatcatttcattatatattactatgtagtaataatagaaataaagtgcacaatatatgtaatgcacttgaatcatcctgaaattattccctcattcccagtctgtggaaaaattgtcttccacacgttcactctgttttttggtagaggcagggtcttaatatattgcccagtctgatctcaaactcctggcctcaagtaatatacctctctcagcctcccaaagtgctgagattacaggcataagccaccaccctcaaccaagagtttcttaaaccaaataaaaattaagtgagattacttgagcccaggtggtcaaggctgcagtgagcctgattgcaccactgcactccagcctaggtgacagaatgagactgtctcaaaaaataaaataaaatacaaattaaccctttatgacattcccagtaacttcctaagtgctccccacaagtctttgaattctgtttaattytcacataacatttaagacatttaagaacttatgtctgtctgtgtcatccctttatgtcaaaagatgtcttt

SEQ ID NO: 262312 - DNA, 535 bp, Homo sapiens
tagacacagtaatttgcttgtatggaattttgcctgagagacctcattgcagtttctgattttttgatgtcttcatccatcactgtccttgtcaaatagtttggaacaggtataatgatcacaataaccccaagcataatattttgttaattctcacagaatcacatgtaggtgccacagttatccccattttatgaatggagtgatgaaaaccttaggaataatgaatgatttgcgcaggctcacctggatattaagactgagtcaaatgttgggtctggtctgactttaatgtttgctttgttcatgagcaccacatattgcctctcctatgcagttaagcaggtaggtgacagaaaagcccatgtttgtctctactcacacacttccgactgaatgtaygtatggagtttctacaccagattcttcagtgctctggatattaactgggtatcccatgactttattctgacactacctggagttagcacagaccccacaagttaggggctcagtcccacgaggccatcctcac

SEQ ID NO: 262313 - DNA, 460 bp, Homo sapiens
tggtcagggtcttagggagtgattcattctagcagaactccctggattttaaggcagatgttccatttattaattgacaaaggaggcatatttctcccctggtaacccaaagatttaggtcattttcccagagactccatttccactgtgagggttcttggaaaactaagcagaggatgaggaaaagtctgtgaacaagcttgctggtctctccctgtcctacaaaagagcatacctcttctgtaaccagaaggcccttttgattagtcaaggctggacagagtgagattgggtgtgtgtgtgtgtgtgtgtgtgtgtttgtgtgtgtcttragacagggtctcactctgtcaccaaggctagagtgcagtggtgagatcagagctcactgcagcttccacttcctgggctcaagcgatcctcctatttcagcctccagagtagctgggactatacgaat

SEQ ID NO: 262314 - DNA, 569 bp, Homo sapiens
agaggcaactgggtgtcaggagacatgatggagaggaaagcatcatcatggtcattctctgtctcactgtccagcagggactcccctgaggggcccagggctcctcctccatggtgggaggtgagcttttaccaggttccaccacccccaaagtgtgtggggttgcgggccctgggctttcagggcaggtggctccagggggcygcccagggtcaacactccctgtcccacctggtggacgctcatgagcaacggctgccaacttggcaggttgttttctctggttggaggccactgagtgactggcaggttgctgggcctcgtgtggctgcagggaggggtcaggaaggggatggagtaccaggagaacacggccgcagagtgaccttccacattcctccacacgaacatgctgacgccacgggaggcctcactgaacgcaggcctgggggccgagcacttggtccgggcagggggttcctggcaggggctcacacctcctcgccccctcctcagccaaggtggcttgggcccagagaaggggaggttggagaggagcagaaggccag

SEQ ID NO: 262315 - DNA, 458 bp, Homo sapiens
agaaaatggatggacaagtaaatcccactcagcacccatagtccmggcatggggacctcaacacacctgagccccagacatcacctttcattgcgagtagctgtgagatgacacttctgctgttcccaattccagcattaattggattagatagttattttatgaagaattttcatatgccacaatcctgaccatatcttcaagtgaacagaaaaattctattaaaaagtcaaccttctgtctcactctgttgcccagactggagtgcagtggtgcaattatggctcactgcagcctcaacctcctgggctcaagcaatcctcctgcctcagcctcacaagtagctgggactacaggtgcttgtcaccacacctcactaattttcccatttgtgttatatgtggattccacaggactgacttcgaaaacttgagtatgcgtggattttggtatacaca

SEQ ID NO: 262316 - DNA, 458 bp, Homo sapiens
agaaaatggatggacaagtaaatcccactcagcacccatagtcccggcatggggacctcaacacacctgagccccagacatcacctttcattgygagtagctgtgagatgacacttctgctgttcccaattccagcattaattggattagatagttattttatgaagaattttcatatgccacaatcctgaccatatcttcaagtgaacagaaaaattctattaaaaagtcaaccttctgtctcactctgttgcccagactggagtgcagtggtgcaattatggctcactgcagcctcaacctcctgggctcaagcaatcctcctgcctcagcctcacaagtagctgggactacaggtgcttgtcaccacacctcactaattttcccatttgtgttatatgtggattccacaggactgacttcgaaaacttgagtatgcgtggattttggtatacaca

SEQ ID NO: 262317 - DNA, 458 bp, Homo sapiens
agaaaatggatggacaagtaaatcccactcagcacccatagtcccggcatggggacctcaacacacctgagccccagacatcacctttcattgcgagtagctstgagatgacacttctgctgttcccaattccagcattaattggattagatagttattttatgaagaattttcatatgccacaatcctgaccatatcttcaagtgaacagaaaaattctattaaaaagtcaaccttctgtctcactctgttgcccagactggagtgcagtggtgcaattatggctcactgcagcctcaacctcctgggctcaagcaatcctcctgcctcagcctcacaagtagctgggactacaggtgcttgtcaccacacctcactaattttcccatttgtgttatatgtggattccacaggactgacttcgaaaacttgagtatgcgtggattttggtatacaca

SEQ ID NO: 262318 - DNA, 557 bp, Homo sapiens
ttgctaagagcaagactgcatttcttaaacaaaataraaattagatgggaatattgctcaagccctggaggttgaggctgcagttaactgtgattgcaccactgcagtccagcctaggtgatagagcaagaccctttctctaaaaataaaataaaataaaaattaaccttctatcatatttcccagtaacaccttccctcctacatttctcctagaagcccttaaattttgtttttcacatatcgtttaaaacttctaagtgctgatgtctgtctgtgtcatccctctttttttttttttttaaatgtctttttgtcacttctagctggacctaccatgaaagacttctgaatccaggaagagaaactgactgggcaacatgttattcaggtacaaaaagacttggactgtaactcaaaaatgatcaaataatagtgcatgcatcaagtgcaatcggaagctcttctggagagggagagaagcttccagttaaggtgacattgaagccaagtcctgtaagataaggaagagttgtatgagagtggggagggaagggg

SEQ ID NO: 262319 - DNA, 557 bp, Homo sapiens
ttgctaagagcaagactgcatttcttaaacaaaataaaaattagatgggaatattgctcaagccctggaggttgaggctgcagttaactgtgattgcaccactgcagtccagcctaggtgatagagcaagaccctttctctaaaaataaaataaaataaaaattaaccttctatcatatttcccagtaacaccttccctcctacatttctcctagaagcccttaaattttgtttttcacatatcgtttaaaacttctaagtgctgatgtctgtctstgtcatccctctttttttttttttttaaatgtctttttgtcacttctagctggacctaccatgaaagacttctgaatccaggaagagaaactgactgggcaacatgttattcaggtacaaaaagacttggactgtaactcaaaaatgatcaaataatagtgcatgcatcaagtgcaatcggaagctcttctggagagggagagaagcttccagttaaggtgacattgaagccaagtcctgtaagataaggaagagttgtatgagagtggggagggaagggg

SEQ ID NO: 262320 - DNA, 557 bp, Homo sapiens
ttgctaagagcaagactgcatttcttaaacaaaataaaaattagatgggaatattgctcaagccctggaggttgaggctgcagttaactgtgattgcaccactgcagtccagcctaggtgatagagcaagaccctttctctaaaaataaaataaaataaaaattaaccttctatcatatttcccagtaacaccttccctcctacatttctcctagaagcccttaaattttgtttttcacatatcgtttaaaacttctaagtgctgatgtctgtctgtgtcatccctctttttttttttttttaaatgtctttttgtcacttctagctggacctaccatgaaagacttctgaatccaggaagagaaactgactgggcaacatgttattcaggtacaaaaagacttggactgtaactcaaaaatgatcaaataatagtgcatgcatcaagtgcaatsggaagctcttctggagagggagagaagcttccagttaaggtgacattgaagccaagtcctgtaagataaggaagagttgtatgagagtggggagggaagggg

SEQ ID NO: 262321 - DNA, 431 bp, Homo sapiens
gctttcttgctttctggcaaaacagatgttccaggatcaatatactgcaccatacatggagtcagccgtttctctagggaaccttgattccttttagtagagaacrcagtttgaggtcttggactgaatgacttttgtgaacctcctctcctgagactacagcctgcatccctgcatatagcccgtttggagctcttgctgggcaccaacagatctcctaaaactgctatatagttctgcctcactcttacaaagattcatctcttgagagttttgtgctctacccccagatgtggtctttctggttatgaagcttttgcttcagtcaccctgaattttgccagccctatgcatgctataccttggattgccaacttgccctcactgaagccagtttctctggttagaatagttgcccaaacccatgccta

SEQ ID NO: 262322 - DNA, 474 bp, Homo sapiens
taactacattgtgaggtatggattcctctcagagttaaacctttcttttgacacaacaggtatgaaacagtcttaattagtgtctgcgaagggacatttaagagcccacagaggcctatggtgaaaaactcaataactccagataaaaacaagaaagaagctatytgtttaacttatttgtaatgtctgtatttatctaacagagataaacatttacattgacccagcaagttggaatcaccctttggtagaatctgccaagggacatttgggatcccttagaggcctattgtgaaaaactgaataacttcagataaaaactaggaagaaggtacctgtttagcttatttgtaatgtctggattcatctcacagagataaacatttattttgattcaggaagttggaatcactcttttgatagaatcttccaagggaattctgggatcccttagaggcctattgtgacaaactg

SEQ ID NO: 262323 - DNA, 447 bp, Homo sapiens
ggtttttgagacactgtgatgtgtgctttcatctcacagtgttaaacctttcttttgattgagcactttgggaagactgtttttggaggatctgcagaaggatatttgggcgtgcattgagggctatatggtgaaaatggaaatatctacagataaatctagaaaaaagcattgtgagaaactgtttgtgatatgtgtattcatctcacagagataaagctttcctttgattgagcagtttggaaacacggtttttgttgaatctgcaatgggatgtttgggagctccttgaggcctatggcagtaaaggaaatatcttcagataaaaactagaagaaagctttttgagacactgctttgtgatttgtgcactcgtctcacataattaaacctttcttttcattcagcagtttargaacactgtatttttagaatcagcaaatagat

SEQ ID NO: 262324 - DNA, 610 bp, Homo sapiens
cacatatgaaacccacacagctatatatatggatttaaactactaaaatattgaacaataatctgttgtgatgctttgtattgacaaccaaggtaygctttattctatcagtaaatgttaccagatattatcgtataacaagtaggagatagctattgtttatgtgagggttcatttgatatttccacatgactaggtaaaggtgtacccagacagctggcaaaatattatttctgagtatgtctgtgagggtgtttccagaagagattgcatttgaattggtagactgagtaaagagacctgccctcaccattgtaggcagatataatccaatccattgaaggctaaaatagaacaaaacggaggagaaagggcaaatcctctctctctctctctccctccctccctctctttgaaacagggtctcactctgttgcccagactggagtacagtggcacaatctcagctcactgcaacatctgcttcccaggctgaagcgatcctcctgcctcagcctcctgagtagctgggactacaggcatgcaccaccccacctggttaatttttgtgttttctgtagagatggagtttcactatgttgctcaggtt

SEQ ID NO: 262325 - DNA, 449 bp, Homo sapiens
gaggcaccaaattaaattccctgttaactctagtccctctcttcaaataaattttttgcttgcttacaaacagatccatttaaagactgtgaagcaatatcacaatttatctcacattgctatgtgtatctacagctcataagagttcatatattttttcttttctgttttttttttttttttttttttttttgagatggaatctcgctctgttgcccaggctggaatgcagtggcatatcagctcaccgcaacctccacctcccaggttctartgattctcatgcctcaacctccagagtagctgggattacaggtgtgcaccaccatgcccagctaatttttgtattcttaatagatacaggattttaccatactggctagggtggtctcaaactcctgggctcaagtgatgcacccaccccagcctcccaaagtgctgggattaca

SEQ ID NO: 262326 - DNA, 469 bp, Homo sapiens
aatgatacttcctcctcctcccaaaatgctgggattacaggtataagctgccatgcctggcccccattgtgtattcttttttcmttattttattaacttctattttaggttcaggcatacatgtgcaggtttgttatataggcaaattgtatgtcacagtggttttatgtacagattattttgtgacctaggtaataagcatagtacctcacaggtagttttttgatcctcaccctcctcccaccctccaccctcaattaggttctggtgtgtactcttcccttctttatctccatatgcactctatgttcccatttataagtgagaacatgcagtatttggttttctgttcctttgtttgttcttgacacccttgtgaaagatcagtagaccatagatgtatgggtttatttctggactttatgctgttttattggtctatatgtctgtctttatgccagcaccatat

SEQ ID NO: 262327 - DNA, 469 bp, Homo sapiens
aatgatacttcctcctcctcccaaaatgctgggattacaggtataagctgccatgcctggcccccattgtgtattcttttttccttattttattaacttctattttaggttcaggcatacatgtgcaggtttgttatataggcaaattgtatgtcacagtggtttyatgtacagattattttgtgacctaggtaataagcatagtacctcacaggtagttttttgatcctcaccctcctcccaccctccaccctcaattaggttctggtgtgtactcttcccttctttatctccatatgcactctatgttcccatttataagtgagaacatgcagtatttggttttctgttcctttgtttgttcttgacacccttgtgaaagatcagtagaccatagatgtatgggtttatttctggactttatgctgttttattggtctatatgtctgtctttatgccagcaccatat

SEQ ID NO: 262328 - DNA, 586 bp, Homo sapiens
tatttactcagtttataagattggtaccaacccattcattgcccttgtagtctgcagtataaaagaatcttaggcatttaccataaaggatttggagaatttgcctgtaaagttcctgcacatgttatctatttaaaataatttctaagatgttgatttcacgatatctcagcaattgttcttaagtgagtgaaaattataccttatgtttactttttcaatcatgtacaataaactgaagagaacctttttattatagatgttgaggaattttgtgttcaatctgagaggagaaagtttagcttgcattttctgaattktcataaaatatttgtttgccattcagcagaatactttgtataaattatattttatgaacattgcactataaatttttcactgaagaaatattccaatgtgtaatattttaaaatatcacatatctatcaagtttgcatttctattaaatgatctgtatagactgtaaaatattctgtctttcctcttagggattatttgtaagaagtggcagagcatttttttaattatttcaggtatgtagaagtcattgtactgcctggcattc

SEQ ID NO: 262329 - DNA, 551 bp, Homo sapiens
ctctgctacttacaactactaacaagagaagacgccaggcaggaccacacatggggatgcaccagaggacagcataagggtaaactggagctgtaggaggcagcttctgtatgacaagcaggatagggctagctagctaggcttggtgggcttcctgtgaattggctaatctgaacaatttatctaggaggcactaggacacccctagttgtctggtacctgtcccagcaatgatgcttarcaaccgcaaagggtgagaacctaataaaggaagtggttggagtatggacataatcagctgctaagaaaggaaagtgaccagtcctggccggggtcaaaactgtgtcaaagcagcattttaaaaaattgcattacaacaaactgcacatgtactccttaatctaaaataagtaagttgaaattctttttaaacattatattacaagaagctcctctcttgatggcatcacactaatgactgcttgcattcaggtataatccctgtttcttactatactgtctttagaattagatacatcatcaaatttcca

SEQ ID NO: 262330 - DNA, 606 bp, Homo sapiens
tttacctgttccaccgtcctctttctcctaccttaactttgttactgagacttggcataatagtgtcataaatctattcaaatggaaaaatgtcttaacwtttcatattacagcctgaaaactcacatttaaaaataaaagttctccccattcacaagactcttaaatgctgtagtattgttatgagaattaaattttaaaagcatattaagtgcctattgatttctcccacattcaacaaacatcagagtatatggcagttagtgctttttgaattacaaaaattattattgctattagctccaaagagagttatgatcacagcaaagttgagctttgaaaaaattttgtaactgattgaccgcaaaacacagcatctcttttatttgttgcctaccacttttcaacatcagatttctgagggacttgcttctgtaacatgtgttgctatgaattgtaagaaaagcaaactaaaaattatccagtgcctattgtatgctaagcacgctactagaaattgtatacgttgtattaacttaattattaaaattatctagtgagatgaagtatgctttaacatctcttttaaaaagaaaaaaaacaaaa

SEQ ID NO: 262331 - DNA, 602 bp, Homo sapiens
tggaggaagctgctgcactgtcacattctgatgagaaagagaataagtttagggaaaactgacaatacacctaggattgaataaaatataatttttctaagcataggtgatgaaatatgagccaatcctggcatcgtctctcatcctctcatcattacctaaaatgatatttcaactcgatwaaatgccacgagtgtagactactatgcagttctttagcttctttaagtattaatttgacattgacatgaaaattaacatttacttgagaatcctggttttagatatttgaaataacacaaacatgagcttctaattctgtcagtcattggcttaaatctaaaaaaaaaatgttcctgcaatttaaaacaagtaactatcagtatgttttcctagagctaaactactaagacagggataattttctaattgtcaagtaattcatttagacagcagcctataaatttctatgcattttctcttataggagacatgagtagaatttatatataactgttaattctctgtgatgttattgacctaagctttcatttggaggcaaacactggcttacatgctccaagttatagcctgagtttgaa

SEQ ID NO: 262332 - DNA, 559 bp, Homo sapiens
actgttaattctctgtgatgttattgacctaagctttcatttggaggcaaacactggcttacatgctccaagttatagcctgagtttgaatagcttttccaattaatcttcacaattaatggattaatgggaaggcagttaacttctaatgacagaacagccaggggctgattgattttagaggtttaatagcaactatttaaagtccagatattaagacaaagagaccaatcaaaggtgaaggggtagaagaaataataattttttagaaagtaaagagagcatcagagatctagaaatctgcacacattacagacttttattgacagataatttggccatatgtgacgccaygtcacctaatttgatatcaggaatagtgaaaagaacatctttatggggtaagcatttctggagtttggtatatatatatatatatatatatatatatatatatatgcatttaaaatagatatctaggagaattagaggatcaaaagttaattttaaaaaatatatccaaagatgctgaaacatatttccattttttccacaatga

SEQ ID NO: 262333 - DNA, 559 bp, Homo sapiens
actgttaattctctgtgatgttattgacctaagctttcatttggaggcaaacactggcttacatgctccaagttatagcctgagtttgaatagcttttccaattaatcttcacaattaatggattaatgggaaggcagttaacttctaatgacagaacagccaggggctgattgattttagaggtttaatagcaactatttaaagtccagatattaagacaaagagaccaatcaaaggtgaaggggtagaagaaataataattttttagaaagtaaagagagcatcagagatctagaaatctgcacacattacagacttttattgacagataatttggccatatgtgacgccatgtcacctaatttgatatcaggaatagtgaaaagaacatctttatggggtaagcatttctggagtttggtrtatatatatatatatatatatatatatatatatatgcatttaaaatagatatctaggagaattagaggatcaaaagttaattttaaaaaatatatccaaagatgctgaaacatatttccattttttccacaatga

SEQ ID NO: 262334 - DNA, 634 bp, Homo sapiens
agatggagaatatttccatttcattagctaagattattgtgtttgatttcataatcaagcaaggaaaaagtttggctggtctcagaggttcatttccactgttttagaagcttggctaaaagctggcagagtaggtgtgcattagctcagtacagaagaactgataaccattctaagctctggactctttccaacaagactacaccccctaccagggacccatcactattacaaggacactcaaatgtttccagctcctgatctccctaaacaacatgcagcatcgtggcatagagccctcccttctggagagatagtcaggtgtgtggtgtgtgagcccctcagtggacagaattctaagatggtcttcaagatttcagccacttgtataggcctaggataatcccctcccctcgagtgcaggcagaatttgtgaatatgayggggtatcagtcctgtgcttatgttatgttatatagcaaaactaatcttgcagatgtaattaattaattgaggtccttaatttaattacctaaaaagggtattatcctgagtgggttgacctaatcaggggagaccttcaaaaggtctaaaggtcagagacacaaaaagtgaaagagataagaagcatggg

SEQ ID NO: 262335 - DNA, 634 bp, Homo sapiens
agatggagaatatttccatttcattagctaagattattgtgtttgatttcataatcaagcaaggaaaaagtttggctggtctcagaggttcatttccactgttttagaagcttggctaaaagctggcagagtaggtgtgcattagctcagtacagaagaactgataaccattctaagctctggactctttccaacaagactacaccccctaccagggacccatcactattacaaggacactcaaatgtttccagctcctgatctccctaaacaacatgcagcatcgtggcatagagccctcccttctggagagatagtcaggtgtgtggtgtgtgagcccctcagtggacagaattctaagatggtcttcaagatttcagccacttgtataggcctaggataatcccctcccctcgagtgcaggcagaatttgtgaatatgacggggtatcagtcctgtgcttatgttatgttatatagcaaaactaatcttgcagatgtaattaattaattgaggtccttaatttaattacctaaraagggtattatcctgagtgggttgacctaatcaggggagaccttcaaaaggtctaaaggtcagagacacaaaaagtgaaagagataagaagcatggg

SEQ ID NO: 262336 - DNA, 600 bp, Homo sapiens
taacatttcaagaaaagctggtgctgatagacatgtgtaatgacaggtaccacaatgtggaggcttactaactatttgttgagtgaataaatgaatgaaatgtgcagagtaaagtgaaaccccaagaagttgcagaaattactatgttttggaacactttaatagactgaatgaataatagcccaacccagagaagagtgagtgtatgaaaccaaaactatccaaggaatgtaaaaaatattttactaagaaattttttaacatatttagtttctttctttcttagatacaattcactgaatcatcagtgtcaatggaaaaataaccagagtcccaaagtgtgctattacagagtacatttagcatgaaacataytcagccagtgtaattcttggggataaatttttaaactatcacttcataggtaggtgaaaaatataaaaacccatctgatgtcaactctagtgatattactggttatttattgatttttaagagaaatgagaggaaacacacaggttaccaaataagtcagaattgtattagatcaggaatccatactgaagtgtagtatggatcacagtctgctctttgttagag

SEQ ID NO: 262337 - DNA, 481 bp, Homo sapiens
tacttgtgatcaatggctatggaaatgttgggatatcagaaactcttgggtactagaggcacctagcacagcaccaggtgcagataaaagcaaagagaaaaagaagggatagatagtggtacycccatgtccaccaggcagtggtggctgatggatgagaatgccatgccattgatctcggcaatgcactgaaccaggattcaacttcaggatgactccactcagctgttaagttttaacctgtaaaagcaatgtatctactgttgaactttcaaaaattgtttcccaatactgaaaaaaagcaatgtaatttagacagttgcaacagtgagagcacctgttatggactgaattataccccccactccacaattaatatgtcaaagccctaatccccaatgtgactttattcagagagagggccataacaggaggcaattatgtttaaatgaggttgtaagggtgaggccctaatccaata

SEQ ID NO: 262338 - DNA, 411 bp, Homo sapiens
gcacagaacagctaccatttgaaaacatgacccaaataatcaattgcagatgtgaatccttggagacaatgagktgcagaggaaatgagtgagtgtttttacgtcacagtcactgctcttctaaaaagtttctaatgcacctcgatattctaggccagagataactcatttaaacttcacactgtgaagatttttaagtcatttaaaggtgttagaagggtccatagtcattatgtaacatatctttctgcacaaagagaatatagtaatcaaaccttcttgggaaatctttccattagtggctgctgggttaaagtaaaaagctcaaaatgaactcaagacagatctgggctgaaatccagtgttcaatactgactgtccacgtgactttaaagaagtctcatcattgct

SEQ ID NO: 262339 - DNA, 615 bp, Homo sapiens
ttgtttgatgactgcttcatacctctcccacccgcaaccatccagcttgatcatattgaaagcttcatgttgaaagtttctgaccacgttgtttcccaatgtctgggactcttaccagcagtggcccataagatgacatagggtggtttataggtaatttgataggtgaggttgtcaaatgatattaactyacatagtgagataattctttcttttccaagtctttaaatccttgacacaccaagtagaacatctccgttttaacacatctgctctgcttcacaatctcttttgtgagatattatgatacaactctagctagaatgtaatggcatcgttttggtttgattgcatttatttttaagttaccttctatttttggcaagtgacaagataataagggaaatgtttccttttttaaaatgcttctttttttaaaaaaaaaaagaatgcatatatattaaagatggtctatttaaagaaaaacaaatgaaagcagtaaaattttacacaaatatgaaagaaaaaaaatgagtagtagcatttgaatggctgtagttatagggaaattgatagtaaacactgcctaattttgaatgagaggagttacagtga

SEQ ID NO: 262340 - DNA, 550 bp, Homo sapiens
acattgtagcagagaaacaagcccggctgcctgggaaacaactttctaattagtgctctggatgttgctgaactaccaaatgtttggaaagagtttcatcttttaaggcgagcatctgcctgccatgctgttgtcatttgcctggcaaacgcttattctgaatgggcatatagtcatggggcttattcctgatctaattttgcagtactctacactaaagctgatgatcccagtttcaacagggttaagcaagttcaatatccttgatactttttctatcatcttcccacctccatcttcccagagtcaggaaacaytaccttttcctaaatctaaatctgcccccagcctttccatcatcctgggacccagcagttcctttatccttggctaggttactgagcagcagaaaggaatgatatttataggctgaacatacaagattgctgcaacttctaaaaaatcctttcaaatattagatagcattaaacactggaatatgatagttctgagactgggtaatttataatcagaaaagtggaaattttct

SEQ ID NO: 262341 - DNA, 515 bp, Homo sapiens
tggatagcataggagcagtaggtgacactcacaggaaggtggttgttagacctggggcttgaaggttattgaatgtgaatgaaaaatcagctgctgctatatcactttgcacctaaaatatattcaaaatcatcaatttaggcggtattacaccatctcttatgtgctggattttacaagtctgacctttagttacacacactggctgcatgcctgtgacctacacttggcccctacttgagtgggcgcgtgctcaacattaatggcctgaatgactccaaccgaggaacggcagatgaatttaagcagtcaaccatccaacaaataaatttctattaatattcacagaacttagagtgcartagagcagagagtcaaattgatgctggttttaatctggtggtgaatacattcctatgcttcttggtgggagggagtgaagatagttcactgacataaccaaaaaacagtgacggtctcatgctctggtgtggacacagccaagtctgtctgca

SEQ ID NO: 262342 - DNA, 515 bp, Homo sapiens
tggatagcataggagcagtaggtgacactcacaggaaggtggttgttagacctggggcttgaaggttattgaatgtgaatgaaaaatcagctgctgctatatcactttgcacctaaaatatattcaaaatcatcaatttaggcggtattacaccatctcttatgtgctggattttacaagtctgacctttagttacacacactggctgcatgcctgtgacctacacttggcccctacttgagtgggcgcgtgctcaacattaatggcctgaatgactccaaccgaggaacggcagatgaatttaagcagtcaaccatccaacaaataaatttctattaatattcacagaacttagagtgcagtagagcagagagtcaaattgatgctggttttaatctgktggtgaatacattcctatgcttcttggtgggagggagtgaagatagttcactgacataaccaaaaaacagtgacggtctcatgctctggtgtggacacagccaagtctgtctgca

SEQ ID NO: 262343 - DNA, 560 bp, Homo sapiens
cccagacagtaaagtgaaagtaagcttattaagaagtaaatgaatcaaacagtggctactccatagacagagtagcagcatgggctgcttgactaagtayacaaatggttatttcttgattatatgctaaacaaagggggtatcattcataagttttccaggaaagggctaaggagttcccagaactgagggttattcccctttatagaccatatagggtagcttccagatgttcccatggcatttgtaaactgttgtggcactgctgggagtgtctttaagcagaggaatgcattataattagcaaataatgagcaatgaggatgatcagaggtctctttcattgccatcttggttttggtggactttggccagcttctttactgcctctccctttatcagtagggtctttgtgatctgtatcttgtgaaatcagtcctgctaacctcctatctcatcctgtagtgaagaatgcctaacctcctggcaatgcagcctaccatatctcattctcattttacctagcccctactcaagatggagtcactctggtttgaatg

SEQ ID NO: 262344 - DNA, 535 bp, Homo sapiens
gtagctgtaaaatttttcatttgtcagtttttaggtttttcttacttggactactggcttcaagatggaaccctttcaggaacatggacaggaaagcatgcaatttctagggcttaataagcaggcacagttggaaggcaaaacaccaaaaaatcaagaattccattttttttttttaccaaatcctggatccccaaaaagggaatcagcccatcccccattgragtcttacccctcattgggaggtggggacatttttataccttctagatgaccaagagcatgcttctctgatccaaaagtgcaaagagcagagtgcttccccataactgccattagccatcactgaaagtatattccctacatagttattacacaccaaagctctctcataatccaaagtaatttctgatacctgcaaaagtaaaaaacaccaggtaactgaatgcaaaacagaacagaggcttagattttgggaggatctatccgttttcaattcctgggattccataaggaaaatagaggtttttcccag

SEQ ID NO: 262345 - DNA, 548 bp, Homo sapiens
tcaccatgattcagataaatatcttggtaaattaaagccattgactggcaaaacaaatgccaacaaaatctgcaatgatccttgcacacatcagtggcaaaatctagagtccttagaataacatttgcatttttccctgtgatattatttctccatttggaaatcagcttcgtctcccatcctctctcctccaaacagtgcccagttcagccacacaaactgcaggctatccatttcttagcatgtcttgttatccaaatgatttccagcatttggttgttctagtcaacttggtgaatgtacactcaatattgaagacccagctcaagtgagaagcatttctgtttcatcagctttgacctcttttcctcatgttccagtgtttttctcaccataaaacttgtcaacttagagtgtcattattagtgaccccatttctggggatccccatccaatcagacaatgagttcttaaaaaaaataccttttattatttatcatgtattcccagagactaatatggcrcctgggacattgctgcttagtaat

SEQ ID NO: 262346 - DNA, 627 bp, Homo sapiens
cttccgttctaggtgctggggataaagagatagacatgaccaytgacttcatggagcttacaggttagtaggagaggctgttattacagagctgctaatccccctccaccccccagaaaaagacattacaggcttaaactcaaattttacaaaaagataggtgctaatccaattggagattttttgttttgtctaaaaagtggaatgagtttatttttattttcaaaattcaaatagcataattattttttctgattatggaagcaatgcatgctcattcataaatatttgatcataccacatatatgactctcaaattttacaaaaagataggtactaatccaatcagagattttgtttttgttttgtctaaaaagtggaatgagtttatttttattttcaaaattcaaatagcataattatttttttctgattatggaagcaatgcacgctcattcataaatatttgatcataccacatatatgactctctaacctgcttatgttaatcaacaagattcagagcacatttttcaatgtcaaaataggctttatatcatctctaaaaaaaaatggctgcatggtactccattacatgaatgaaccattttacctggttttaagttc

SEQ ID NO: 262347 - DNA, 627 bp, Homo sapiens
cttccgttctaggtgctggggataaagagatagacatgaccattgacttcatggagcttacaggttagtaggagaggctgttattacagagctgctaatccccctccaccccccagaaaaagacattacaggcttaaactcaaattttacaaaaagataggtgctaatccaattggagattttttgttttgtctaaaaagtggaatgagtttatttttattttcaaaattcaaatagcataattattttttctgattatggaagcaatgcatgctcattcataaatatttgatcataccacatatatgactctcaaattttacaaaaagataggtactaatccaatcagagattttgtttttgttttgtctaaaaagtggaatgagtttatttttattttcaaaattcaaatagcataattatttttttctgattatggaagcaatgcacgctcattcataaatatttgatcataccacatatatgactctctaacctgcttatgttaatcaacaagattcagagcacatttttcaatgtcaaaataggctttatatcatctctaaaaaaaaatggctgcwtggtactccattacatgaatgaaccattttacctggttttaagttc

SEQ ID NO: 262348 - DNA, 601 bp, Homo sapiens
ctttctaaatcaatttagaaatctgaggaattagacatccaaggccataggttctactttggacttcatgtaagaaatggaatccaaaaagtgcactatattacagaagaatgsgattccctaatgaaattccatgaaggaatcatctgccattttgttttgttttgttttagagtcaggttttcactctgtcacctaggatggcatacagtggaacaatcataacttcctgtaacctccaattcctgggctcaaacaatactcccacctcagcctcccaagcagctcagattaatacatgtgccaccaggcctggctaatttttatttttatttttatttttggtaaagatgggatcttgctatgttgcctaggctggtcttgaactcctgggctcatcagtctccccaacactggaattacagatgtgagtcacttcacccagccatcacccacagtttttgtaagatatggaaggctaacaaatcctttgagtattgatcccaaaatgttatgaagggaaagctggagagtgtcatggaggcagaagaaattcctagaatcttagattttggagggcccttaaacatcacccagcaca

SEQ ID NO: 262349 - DNA, 601 bp, Homo sapiens
ctttctaaatcaatttagaaatctgaggaattagacatccaaggccataggttctactttggacttcatgtaagaaatggaatccaaaaagtgcactatattacagaagaatgggatwccctaatgaaattccatgaaggaatcatctgccattttgttttgttttgttttagagtcaggttttcactctgtcacctaggatggcatacagtggaacaatcataacttcctgtaacctccaattcctgggctcaaacaatactcccacctcagcctcccaagcagctcagattaatacatgtgccaccaggcctggctaatttttatttttatttttatttttggtaaagatgggatcttgctatgttgcctaggctggtcttgaactcctgggctcatcagtctccccaacactggaattacagatgtgagtcacttcacccagccatcacccacagtttttgtaagatatggaaggctaacaaatcctttgagtattgatcccaaaatgttatgaagggaaagctggagagtgtcatggaggcagaagaaattcctagaatcttagattttggagggcccttaaacatcacccagcaca

SEQ ID NO: 262350 - DNA, 601 bp, Homo sapiens
ctttctaaatcaatttagaaatctgaggaattagacatccaaggccataggttctactttggacttcatgtaagaaatggaatccaaaaagtgcactatattacagaagaatgggattccctaatgaaattccatgaaggaatcatctgccattttgttttgttttgttttagagtcaggttttcactctgtcacctaggatggcatacagtggaacaatcataacttcctgtaacctccaattcctgggctcaaacaatactcccacctcagcctcccaagcagctcagattaatacatgtgccaccaggcctggctaatttttatttttatttttatttttggtaaagatgggatcttgctatsttgcctaggctggtcttgaactcctgggctcatcagtctccccaacactggaattacagatgtgagtcacttcacccagccatcacccacagtttttgtaagatatggaaggctaacaaatcctttgagtattgatcccaaaatgttatgaagggaaagctggagagtgtcatggaggcagaagaaattcctagaatcttagattttggagggcccttaaacatcacccagcaca

SEQ ID NO: 262351 - DNA, 547 bp, Homo sapiens
ttttgctgcaagatttccataaactcctacaatccttatgtagcaatgccagtgcattctttccactgcagatggtgtattagtccgttcccatgtggctaataaagacataccagagactaggtaatttataaaggaaaggtttaattgactcacagtttgacagggctgaggcctcaagaaacttataattatggcagaaggggaagcaagcatgtccaccttcacatcgtggctgcaagaagtgcagggcaaaaagggtaaaaaccccgtataaagccatcagatcttgtgagaactcattcactatcatgagaacagcaacataggggcaaccacccccatgattcaattacctcccactgggtccctcccatgacacatggggattatgggaactgtaatccaagaygagatttgggtggggacacagcccaaccatatcagatggcctctctttgtcaccttttacaatgattgcttctgtaggtcttccactgccaatacctctcatttgccaatacctctcatttactcctgaccaacc

SEQ ID NO: 262352 - DNA, 547 bp, Homo sapiens
ttttgctgcaagatttccataaactcctacaatccttatgtagcaatgccagtgcattctttccactgcagatggtgtattagtccgttcccatgtggctaataaagacataccagagactaggtaatttataaaggaaaggtttaattgactcacagtttgacagggctgaggcctcaagaaacttataattatggcagaaggggaagcaagcatgtccaccttcacatcgtggctgcaagaagtgcagggcaaaaagggtaaaaaccccgtataaagccatcagatcttgtgagaactcattcactatcatgagaacagcaacataggggcaaccacccccatgattcaattacctcccactgggtccctcccatgacacatggggattatgggaactgtaatccaagacgagatttgggtggggacacagcccaaccatatcagatggcctctctttgtcwccttttacaatgattgcttctgtaggtcttccactgccaatacctctcatttgccaatacctctcatttactcctgaccaacc

SEQ ID NO: 262353 - DNA, 640 bp, Homo sapiens
gtttatttatgcctttatttcattgttaaccaaaagtcattcaggagcaagttaatttccatgtaattgtgtggttttgagagatctttttggtattgatttctatttttattccgttgtggtccgagagtatggttgatatgattttgatttttttgaatttattgagatttgctctatggctgagcatgtggacaatcttggagtaagttctgtgtacagatgaaaataatgtgtattctggggttgatgggtgcagtatcttcttaacaatttctttttagaagaagttcttcgttttgatgaagtacaattgatctagtttttgcctttataaatctggctaaaaaaatctctgyttaatccaaggtgacaagtattaattcttatatgttctttgccatattttgtagtttcaggttttacctttatgtttattacaccttttgaattaatttttgtaacagttatgaagtgtggtttgtggtttttgcatttagctattttgatctagttttgatttcaatttgtttacagctttacttattcaaaaatatttattactactttaatatttaacatttgattttgttgtaatttttcttctaatattttcttcatttttctcttttgttattta

SEQ ID NO: 262354 - DNA, 640 bp, Homo sapiens
gtttatttatgcctttatttcattgttaaccaaaagtcattcaggagcaagttaatttccatgtaattgtgtggttttgagagatctttttggtattgatttctatttttattccgttgtggtccgagagtatggttgatatgattttgatttttttgaatttattgagatttgctctatggctgagcatgtggacaatcttggagtaagttctgtgtacagatgaaaataatgtgtattctggggttgatgggtgcagtatcttcttaacaatttctttttagaagaagttcttcgttttgatgaagtacaattgatctagtttttgcctttataaatctggctaaaaaaatctctgtttaatccaaggtgacaagtattaattcytatatgttctttgccatattttgtagtttcaggttttacctttatgtttattacaccttttgaattaatttttgtaacagttatgaagtgtggtttgtggtttttgcatttagctattttgatctagttttgatttcaatttgtttacagctttacttattcaaaaatatttattactactttaatatttaacatttgattttgttgtaatttttcttctaatattttcttcatttttctcttttgttattta

SEQ ID NO: 262355 - DNA, 640 bp, Homo sapiens
gtttatttatgcctttatttcattgttaaccaaaagtcattcaggagcaagttaatttccatgtaattgtgtggttttgagagatctttttggtattgatttctatttttattccgttgtggtccgagagtatggttgatatgattttgatttttttgaatttattgagatttgctctatggctgagcatgtggacaatcttggagtaagttctgtgtacagatgaaaataatgtgtattctggggttgatgggtgcagtatcttcttaacaatttctttttagaagaagttcttcgttttgatgaagtacaattgatctagtttttgcctttataaatctggctaaaaaaatctctgtttaatccaaggtgacaagtattaattcttatatgttctttgccatattttgtagtttcaggttttacctttatgtttattacaccttttgaattaatttttgtaacagttatgaaktgtggtttgtggtttttgcatttagctattttgatctagttttgatttcaatttgtttacagctttacttattcaaaaatatttattactactttaatatttaacatttgattttgttgtaatttttcttctaatattttcttcatttttctcttttgttattta

SEQ ID NO: 262356 - DNA, 375 bp, Homo sapiens
taaatcttaaagcttaaaataatctcatttgactccatgtctcacatccaggccacactgatgtaaggggtgggttcccaaggccttgggcaaatagtgtatttttaaaatgttaagcatcacaaatcattagggaaatacaaattaaaagcacaatgggatatcacgtcataccttttagattggttatcataaaaaagataaaaggaaagggtgtrgagaaaaggaagctcttatatgctgttggcgggaatgtaaattgatatagccattatgaaaaatattatggaggaccctcaaataattaaagatagaactaccatatgacccatcagtccctctgttaggtatatacctaaaggaattaaaaccagc

SEQ ID NO: 262357 - DNA, 562 bp, Homo sapiens
atacacattgctttatgcacaggtatgttaattttaaaatgatgtataaccttatgaggaaataatctatttgccattataattataactgcttgcttctatgtcctttgtaattacaggtttgagttatatacctgtgtcagtacttaattatcacctgaacatccacactagaacttaattcatatgaagatagggacttagtccattttgctactggtgttttctttggtccctgatgagtgtctggcttataataagatatttctttaatatttggtaatttagtgatcaaataagtagtgattcatccatattccatatggaatagcaattcaagtaagggttaaaaaatctgttttcatattgaacatgctcctatgttaagtgaaacatacagaacatyaaattgtacaaacaatatgaatgtactatgcacttttttttgtttttgatactgatatatcttggggaaagggttaaggttatttttaaaaattggtcttaaaatttaaaccttcaaaaagggtagaggtttgatatgtggaatatttatctcaga

SEQ ID NO: 262358 - DNA, 574 bp, Homo sapiens
aatttaatgtggcacatatacatcatggaatactatgcagtcataaaaaaggatgagttcatgtcctttgcagagacatggatgaagctggaaaccatcattctcagcaaactaacacaggaacagaaaaccaagcacttaatgttctcaatcataagtgggagttgaacgatgagaacacatgaatgcagggagtggaacatcacacaccagggcctgtcatgggatgcgggattaggggagggatagcattaggagaaatacctaatgtagatgatgggttgatgcatgcaggaaactactgtggcacatgtatacctgtgtaacaaacccacacattctgcacatgtatcccagaacttaaagcataaaaaaatacattttttatctataacattctttacatctctattttcttctcactgcttccctcataattcgatcctcccttttaataacttctgaattagacaaaaattatttcccaccaataaacaaatatatttctytggcacattttgaataagcctaggaagcaagaaattctgaactgcctatgagaaactggcattct

SEQ ID NO: 262359 - DNA, 551 bp, Homo sapiens
ctttatttgccaaaaatattagtattggtgaacctgtgttttgtggctttgtaaactgattattgtaagtgaagcaatatattccaaagttctagttcttatcttatttatttatttatttatttatttgagacagagtctcgctctgtcacctaggctggagtgcagtggcacgatcttggcttactgcaacctccgcctcccrggttcacgccattctcctgcctcagcctcccaagcagctagaactacaggtgcccaccaccacgcccggctaattttttgtatttttagtagagatggggtctcaccatgttagccaggatggtctcgatctcctgacctcatgatccacccgcctcggcctcccaaagtgctgggattacaagcatgagccactgcgcttggcctatcttaacttttttattaactataaaacttaaattcacccaccataggtgaacattttgatgattcttaggatatttatatacagtaagtttatacattatcgtgattcagtttgataatattttcatcaccacaaaaaa

SEQ ID NO: 262360 - DNA, 516 bp, Homo sapiens
aactctcaacaaagttagcatttttttcgctgtaatatttaatttgatgttttcccatttgcatgataagtgaaagtcattcacagtgcttctgaygagctactcttcattcatttgattatcaaaacattcaatgagcaactacattatatcaggcactgcagaaggcattcagtaacagtcatgaaaaggagaaggagaccctatccttacctgccatagatagtttagtaggcaaagcagatacaaattatgatgagagggaatgtcagttactgaaggatatgatgacatgggaaaaaaacacgggtgcagtaaaggtttatattagaagaaaaaaatgtaacaaagcttgaaaggtctacaaaatccaaaagtgtgtggaaatacagccactcataggagcaataatagcttcaactattctaagctattccatgtgttacgaaggaaaatatcttgcatgattgccatgggagaaaagaacaattatcattatgagaaagttaaagggtg

SEQ ID NO: 262361 - DNA, 641 bp, Homo sapiens
tcctctccctgtcccatgacttcaccctgcactcttcaaccagtcaataatcatcatagttcagccccctctgaaactctctaatcccaaattctttggggagatggaatcgaggtttccttccatctcctcactgggtgaccctatgattaaacctctttctctgttgtagcctgatgtcttgtcatactgacttgctgtgtgtgttgggcaatgagcctattatggttacattgtaaaataattttsaggatagaggaaattttccaaacatgtggaattttcccagtattcaagactaaaaatctgctggagctagaattagaggtggttgtgggagaaatatatttgcttatagaactgagttttgtcttccctgatcttaccttcaccagccaaaaggtcttgtcacaggtagctttgttttctttttcctgcccctaaaacattttccctaaagtgatttccttgatagtcacttaaaaagcactcagccaggtctgaagtgagctgctatttaagaaggatgcttgacgcaggccacctggagctggaaggagagcatccatctttcccaaatgggaagtaagctcagggtgggcccaaccttagggaaaagaggtctggagtgagtggggtgg

SEQ ID NO: 262362 - DNA, 630 bp, Homo sapiens
attgatctctcgaggatccagaagagtcatttcaaagtgactatgaaatgtaaagattggagtaataaatctgagtaataatcctctatctcccataattcacattgttaagaacttctcattgtattttgccatccagtaattgaagattcccattcagaacctcattgggatgctgctgtttgtacacacaaatatcacactggtaggctgaaggttgcttaaaggcccagaaaactgaagttctgtatctttgcatctctgctcttaaggatactttcgattgccagcagcgaccagccaatccatgaaagagaagttcttggctcatcttattgggaagtctagagttggtaaaaagaaaggcactgtcmcataatatatatcaggcacctcaaattggcatctttgatatttgctcttccttctcaactctgatgctcttagttttcatcattacatgaaggccctgtgatagacattcagtttagactagtgttattttcaaagagactatcgttggagatgaaggatctaaaggtaaaaggtgtcctggttccataaaaagattcctcaagctccaaaattcttatgtaaatttacacacacacacaaacacacacacacaca

SEQ ID NO: 262363 - DNA, 610 bp, Homo sapiens
acaataactttggctcatattttaatgctgcagttgaaacattaatatccttgttttgtgtaagagatttaaaattcagagaacccaggtattttgccttagttcacacatacrgaaagtgtagccatgattcaaatcctaaatttctaatttcaacacacttctgttacacacactctgcctcagttaatggatccaagatatactcacattaggatactctgaggaaagtttacttaaacagggacaatgttttgaagtgtgaatagtagggtaatttagtattgcattgcattgtgaatgatgcagaaacatcgggctagtgctagaagagctgttactatttctggtcctgtgctagaatagggtagcaaatggtaatttaaatatagtgttgtgttaaaaaaaatgcactttgaaaaaaaaatagcctttggtggagagcacagcaagcccataatgaaaagcaagaaggaaattacggacccaaatataccaacttcaatttcctttctcctcctaatctcctgccagggcttcctattgtcctaacacggccttaacacagaagcatgaaagctcattgatggactttatacaggtcaaatct

SEQ ID NO: 262364 - DNA, 496 bp, Homo sapiens
ctaatcaacttttcatgctctcaaagtcatgttaacataagtaattatttttaaggaattcttgttttggggagaaagagcccctttaaaatttcataatctggccctgggtcacacttattagactaaagcttaaaataattctaggcaaagaagaaagcacagtatagttcaaattagataccaccaccatcacccccatcacactacacagttcccccacctagtggcatttggttctgagtatgtggcccaggatccaaagggctcatgttggtgactgagtttaagtgttaaaagaataaagagaataacaaagatgttgtttcttaaaaatagggtaaaagctgatctgcatcagaagcacctaagagccctattcaatttaaatatttatgggatccatgamcacttactaaatttctggaactggataaaggaatcagaaaaattttaagacggtttcccaaagtgatgcttaatgtacactggagtt

SEQ ID NO: 262365 - DNA, 621 bp, Homo sapiens
aaacccatttgaacaggagtaaaaagagttggtgtttaacctgagccaaggcttttattccagcctgtcaacaggacacacagatggccctgtgggtttcatggtagctcagatcagagagaatcagtgtcaaaccacacagaaatgtgcagatatcctcaggctcacacacaagcactggtatagtaaaaaatagtagtgccttggcacagttcaaggatgagactattaagttaggcaatgactaacttccccttagttttttgtgttttgcgttttgcatttttaaaacctaaatatttggaactcccctatgctctacttcgccaaaagtatgaatgacaccaaattccatcgtattcacaggcatcactcctcaccatgactcaggagaccttttgagattctcttctgcctttttttttttctgtgcaacaggtagtgaaattcttttttatttaccctgctacagacagttttatttttctcagcttaagatttttaaacatctaggcttyatgtgagtatgtgacaccatttttttcttagaaggcttggaagtgtctttggtttgacaaaaaaataaatggtagacattggcaggaggcaggatgaaagggg

SEQ ID NO: 262366 - DNA, 286 bp, Homo sapiens
gtcataagtgggattatttagtctcactaacatacatggaaccttggaaaattttcaggatgactatcaggcctgcaatcctcctatatggcatggcttttataaaacggaatattagggttttcaaagacgttggcatgtcacttatttatgtatttatttttaaaaattttatgtagactttgatgaygccagtggaagctgtccaaggagatatattcaaaagtttcacatagagatatttttaaatatcagagagtggcatcttaatttgaaagtaagtgaa

SEQ ID NO: 262367 - DNA, 286 bp, Homo sapiens
gtcataagtgggattatttagtctcactaacatacatggaaccttggaaaattttcaggatgactatcaggcctgcaatcctcctatatggcatggcttttataaaacggaatattagggttttcaaagacgttggcatgtcacttatttatgtatttatttttaaaaattttatgtagactttgatgatgccagtggaagctgtccraggagatatattcaaaagtttcacatagagatatttttaaatatcagagagtggcatcttaatttgaaagtaagtgaa

SEQ ID NO: 262368 - DNA, 622 bp, Homo sapiens
gagctaaaatttgtctaactttctttgttcatagataagaaaagtttttcatggccatagtagaagtcagaggtgaaatcggaaattccartttgcttcatcagggaatttcttttaggtgtattttaggattttaaatattattaaatactaagagtgacatttgctacttggtgtttaatatgtagtagttcacatgttaattcctctgggaaggatttacatcttcaaaagttaagaaaatgacaaatataatattgcagaaagaacaagtcaatttttactgagtgtatctatgccttcaaacaaaaaaactgagtgcctatcaagcgtctcattgttctctataaagtaaatgatattgttaagacaggtactgttgcagctcttctgattcaaagtgttttctctgcgattagagaaccaaagataggtaaagttgacatcttagcattattctattctgacactttgttccccttttctaagaaatggaatataaatgtacatctgctccaattttctactcacactggacctcctcaagttctttttcaccacatgattaaaagcaatgtctgactcatttgaacttgacattcatgttgtatttttcttgtat

SEQ ID NO: 262369 - DNA, 588 bp, Homo sapiens
tgtaaagaaaaatgttcagctagaatttggcttggaggaaagtaggctcatttcttcttttttaatttaagagttaacaaagactttttttttcagttgataggctgtctgataaaccagagatgtgatttgattatgtatgtgggttttctactgggagaaaagtaacctcgataatagaaccaactcaatagtgtacaataatcttgtttgctaacttttcaaaaagactctgttagaagaaaacactgttatgggtgaaactcatatagtatttataagcctaaaaatagtctaattgtttttaaatttacaaattcaacaaatcgctgagtcttggattggggaaataactcacccagggtcacataactggtggcagagccaakgatacagcattgatttatatgactctgcagcccatgccctccctagcaaggaggatacactacatctccatgtgggggttgtgtattgatatggttttgttgtgtccccacccaaaatctcatctggaattgtaatctccataattcctacgtgtcaaaggtaggatcaggtttaggtaattaaatcatgagaccagtt

SEQ ID NO: 262370 - DNA, 584 bp, Homo sapiens
agtttcccccatgctgttctcatgaacttgtgagttctcccaagatctgatggttttataaacatctggcattttccctgctggcattcattttctctcctgccaccttgtgaagaggtgacttccaccatgattgtaagtttcctgagggctccccagctatcagaaattgtgagtcgattaaatctttttcctttataaattacccagtcttggctatttcttcatgacagtgtgagaacagactaagacatgtatattacactagatttgtttataatgtgttcagttataatgatttttcatatatcactgtatatatgatttcatggcaacacatttaaattcaaaactctttgaaagcaatatatrcaggcgcataactcttagctgtttaagatcaaataaataagtggttgaaattcttctaaaaaattttgaagttgcttatgtgtgaaatataaatatctaaataaatgtattataaaattctcatatgtactaaatatatactaaataatgtatctagtatatatactattttatatgtactgctatgtgcacatgattagacagttgtaatt

SEQ ID NO: 262371 - DNA, 589 bp, Homo sapiens
tcagtcctccaagatgaagtcaagaaccttaaggattctttccagaaaggaataggctaacgttgagttaatgaccaaaagatgaaaaggaacaaagggagaggagaacaggaaagaggatcagaggaaaataagcctattaaacattgatctttttttgtttgtttgtttttgaaatggagtgtcactctgtcgcccagactgcagtgcagtggtgcgatctcggcttgctgcaacctcyacctcctgggttcaagcgattctcctgcctcagcctcccaagtagctgggactacaggtgcccaccaccacgcctggctaattttttgtatttttagtagagatggggtttcactgtgttagccagcatggtctcgatctcctgacctcgtgatccgcctgcctcggcctcccaaagtgctgggattacaggcgtgagccaccacgcccagccaaacattgatcttaaatagagtgaatgtactcaaaggtaattcatgctgtgcaccaacttatggaccatttgtgttcatggttagctaaaatcaagagtcttcctcccagtgatggcttgcctattgacaccctc

SEQ ID NO: 262372 - DNA, 589 bp, Homo sapiens
tcagtcctccaagatgaagtcaagaaccttaaggattctttccagaaaggaataggctaacgttgagttaatgaccaaaagatgaaaaggaacaaagggagaggagaacaggaaagaggatcagaggaaaataagcctattaaacattgatctttttttgtttgtttgtttttgaaatggagtgtcactctgtcgcccagactgcagtgcagtggtgcgatctcggcttgctgcaacctccrcctcctgggttcaagcgattctcctgcctcagcctcccaagtagctgggactacaggtgcccaccaccacgcctggctaattttttgtatttttagtagagatggggtttcactgtgttagccagcatggtctcgatctcctgacctcgtgatccgcctgcctcggcctcccaaagtgctgggattacaggcgtgagccaccacgcccagccaaacattgatcttaaatagagtgaatgtactcaaaggtaattcatgctgtgcaccaacttatggaccatttgtgttcatggttagctaaaatcaagagtcttcctcccagtgatggcttgcctattgacaccctc

SEQ ID NO: 262373 - DNA, 589 bp, Homo sapiens
tcagtcctccaagatgaagtcaagaaccttaaggattctttccagaaaggaataggctaacgttgagttaatgaccaaaagatgaaaaggaacaaagggagaggagaacaggaaagaggatcagaggaaaataagcctattaaacattgatctttttttgtttgtttgtttttgaaatggagtgtcactctgtcgcccagactgcagtgcagtggtgcgatctcggcttgctgcaacctccacctcctgggttcawgcgattctcctgcctcagcctcccaagtagctgggactacaggtgcccaccaccacgcctggctaattttttgtatttttagtagagatggggtttcactgtgttagccagcatggtctcgatctcctgacctcgtgatccgcctgcctcggcctcccaaagtgctgggattacaggcgtgagccaccacgcccagccaaacattgatcttaaatagagtgaatgtactcaaaggtaattcatgctgtgcaccaacttatggaccatttgtgttcatggttagctaaaatcaagagtcttcctcccagtgatggcttgcctattgacaccctc

SEQ ID NO: 262374 - DNA, 589 bp, Homo sapiens
tcagtcctccaagatgaagtcaagaaccttaaggattctttccagaaaggaataggctaacgttgagttaatgaccaaaagatgaaaaggaacaaagggagaggagaacaggaaagaggatcagaggaaaataagcctattaaacattgatctttttttgtttgtttgtttttgaaatggagtgtcactctgtcgcccagactgcagtgcagtggtgcgatctcggcttgctgcaacctccacctcctgggttcaagcsattctcctgcctcagcctcccaagtagctgggactacaggtgcccaccaccacgcctggctaattttttgtatttttagtagagatggggtttcactgtgttagccagcatggtctcgatctcctgacctcgtgatccgcctgcctcggcctcccaaagtgctgggattacaggcgtgagccaccacgcccagccaaacattgatcttaaatagagtgaatgtactcaaaggtaattcatgctgtgcaccaacttatggaccatttgtgttcatggttagctaaaatcaagagtcttcctcccagtgatggcttgcctattgacaccctc

SEQ ID NO: 262375 - DNA, 577 bp, Homo sapiens
gaccataccattgcctggtatattttcctatagaagataataatgacatgccttccaggtaaaactctggaagggctgtatattatgagtttccaatcttgaatatgatcacaatgttggagggtgagagccatcttcttattagagacatgtagatggatgtagccattaacattgggaatcttagaacccagtcctgctgctttctatttgtgcagtcttggacaaactgtttcatatgttgaggtatgtttttccatctattaaattaggttaacaacatgtatatattacattttgtgaagtttaaaatgatggtttgtatgcaaaacagtacagtatggttcataaaagcttacactttggaaactgaatctcgagttttgaattctggcttctatttgctckttgcagttgggcaagttatttaacacttccatgcctcagctcattatatgtaaaattagaataatatcacctatttcaaagggtaggtggacaattgaataattctttaacagaagcaaaagatggataatactacctttatgttagtgttacagagtattaagtatga

SEQ ID NO: 262376 - DNA, 527 bp, Homo sapiens
tgtcactcaacagtaaatttagaggctgggtgcggaggctcattcctgtaattccagcactttggaaggcygaggcgggtggatcacttgaggccaggagttcgagaccagcctggccaacatggtgaaaccccgtctctacaaaaaatacaaaaattagtcaggcttggtggtgcatgcttgtaattccatctacttgggaggctgaggcatgagaatcacttgaacccaggatggggaggttgcagtgagcccagactgtgccactgcactctgtcctgggtgatagagtgagactcttgtctccagaaaaaaaaaaaaaagtaaatttagttttctgaaaaatatcattgatatatttatgtaaatatttcagaaatgcttataaaaagataattaaatggtctcatgttctttgctatgtcattggttgagaagtcaagcaattcacaaagatctactgtactgttaattttaattcaaaattttcttgaaatagaagaatgtttgccaaatcttcaataatc

SEQ ID NO: 262377 - DNA, 595 bp, Homo sapiens
tcattgccttggaaaggggtgataacttcccgtttattgccatggcatttgtaaactgtcatagcaccggtaggaatgtcttaatgctgatgagcagtgaggacagctagggatcactttcatttccatttgctgcttgctgctagtttctttactttatcctatctggcccagatcctgttttggtcagcasggttgtgaccagaaaataagttctgcttgtctcctatgttattccctacctcagaggttaaatactcctctttaatattaatggggctgcagcagggcagacgtctaccttctataactgcttcttgctgattttatgagtgcagtcccggactagcattggaggagtaaactttctctggatacctgatctaaggagctcagtggaaggatgtcttaattttctgcatcagaaaatggggtggattgaaatccttgtgccagcatcatctttatgtgaaatctagaagatacaaactttagtaggaggctgaagaagaaaattaaaattcaaaacaagaaaaaaattaatgctcctgtgtccacattatttatttatatgtttgaaaaaaaacagccttaa

SEQ ID NO: 262378 - DNA, 595 bp, Homo sapiens
tcattgccttggaaaggggtgataacttcccgtttattgccatggcatttgtaaactgtcatagcaccggtaggaatgtcttaatgctgatgagcagtgaggacagctagggatcactttcatttccatttgctgcttgctgctagtttctttactttatcctatctggcccagatcctgttttggtcagcagggttgtgaccagaaaataagttctgcttgtctcctatgttattccctacctcagaggttaaatactcctctttaatattaatggggctgcagcagggcagacrtctaccttctataactgcttcttgctgattttatgagtgcagtcccggactagcattggaggagtaaactttctctggatacctgatctaaggagctcagtggaaggatgtcttaattttctgcatcagaaaatggggtggattgaaatccttgtgccagcatcatctttatgtgaaatctagaagatacaaactttagtaggaggctgaagaagaaaattaaaattcaaaacaagaaaaaaattaatgctcctgtgtccacattatttatttatatgtttgaaaaaaaacagccttaa

SEQ ID NO: 262379 - DNA, 534 bp, Homo sapiens
tttaaaaatttattttcccaataaactgcatgtcattaaattttcccctatacaggacatttatattgttctcactttatttttagctatttatcacaaaacaatgctgccgtaagtatacatgtatatgctaaaaggtagaatttctcagtagtagtgatatacctattacatttatcagacagtgacawatttttatccaacattttggaaccaatattcaatgtttacactttttccagtattataaaaatgttcataccaccttatattagtccaatcaatatttacagcctttttgtttacccatgtaatttgtgtgtctgtgtatgtgtatgtgtgtgtgtgtcctgattaagcacttgttcatgtgttgattttgcaactggaatttttctcttccgtgaattacctattcctttatccaaatttcctttgattacttttgtcttacaaattttacatagttcttatattttattaaatcaaatcaattgtcagtagctaatagctccattaagtattctacttatc

SEQ ID NO: 262380 - DNA, 584 bp, Homo sapiens
aacattcaagtgtactaattattgaaaatatgacgatgataatacacatactgttgatacactattgatctctcgaggatccagaagagtcatttcaaagtgactatgaaatgtaaagrttggagtaataaatctgagtaataatcctctatctcccataattcacattgttaagaacttctcattgtattttgccatccagtaattgaagattcccattcagaacctcattgggatgctgctgtttgtacacacaaatatcacactggtaggctgaaggttgcttaaaggcccagaaaactgaagttctgtatctttgcatctctgctcttaaggatactttcgattgccagcagcgaccagccaatccatgaaagagaagttcttggctcatcttattgggaagtctagagttggtaaaaagaaaggcactgtcccataatatatatcaggcacctcaaattggcatctttgatatttgctcttccttctcaactctgatgctcttagttttcatcattacatgaaggccctgtgatagacattcagtttagactagtgttattttcaaagagactatcgtt

SEQ ID NO: 262381 - DNA, 566 bp, Homo sapiens
atttttgtgctctcaattgtatggcattctggaagaagcaaaactataataatggttaaagaaaattactggttcccatgggtttgagagcaggagatgggattaaataggtgaagcacaaaagacatgktaggtgaaacgcatctgtatgatttactaagggttgatgtatgaagctgtgcatttgtgaaaactcatggaacttaggacaaggagtgaactttaatgtatgcaaatttaaaaatcattgagaaggtcatggaatacttggacggaatgtataacatgacaaagcaatctaaatatagtataaacacatgaagcaacttcactgataaatgttgggtgaaaggatatggcacgcttttatataaaggtataatatctttttatataaagttacgtaagtaactttggaaatgagtggagacaaggagtataaaatttcagttatgcaagatgagtaagttctggagatctgctgtacagcagcatgcttataggtagcaatacttttcactgtacatttcaaaatcttttaagagggtagatcgtgtgttgtgttc

SEQ ID NO: 262382 - DNA, 566 bp, Homo sapiens
atttttgtgctctcaattgtatggcattctggaagaagcaaaactataataatggttaaagaaaattactggttcccatgggtttgagagcaggagatgggattaaataggtgaagcacaaaagacatggtaggtgaaacgcatctgtatgatttactaagggttgatgtatgaagctgtgcatttgtgaaaactcatggaacttaggacaaggagtgaactttaatgtatgcaaatttaaaaatcattgagaaggtcatggaatacttggacggaatgtatarcatgacaaagcaatctaaatatagtataaacacatgaagcaacttcactgataaatgttgggtgaaaggatatggcacgcttttatataaaggtataatatctttttatataaagttacgtaagtaactttggaaatgagtggagacaaggagtataaaatttcagttatgcaagatgagtaagttctggagatctgctgtacagcagcatgcttataggtagcaatacttttcactgtacatttcaaaatcttttaagagggtagatcgtgtgttgtgttc

SEQ ID NO: 262383 - DNA, 574 bp, Homo sapiens
aatttaatgtggcacatatacaycatggaatactatgcagtcataaaaaaggatgagttcatgtcctttgcagagacatggatgaagctggaaaccatcattctcagcaaactaacacaggaacagaaaaccaagcacttaatgttctcaatcataagtgggagttgaacgatgagaacacatgaatgcagggagtggaacatcacacaccagggcctgtcatgggatgcgggattaggggagggatagcattaggagaaatacctaatgtagatgatgggttgatgcatgcaggaaactactgtggcacatgtatacctgtgtaacaaacccacacattctgcacatgtatcccagaacttaaagcataaaaaaatacattttttatctataacattctttacatctctattttcttctcactgcttccctcataattcgatcctcccttttaataacttctgaattagacaaaaattatttcccaccaataaacaaatatatttctctggcacattttgaataagcctaggaagcaagaaattctgaactgcctatgagaaactggcattct

SEQ ID NO: 262384 - DNA, 630 bp, Homo sapiens
attgatctctcgaggatccagaagagtcatttcaaagtgactatgaaatgtaaagattggagtaataaatctgagtaataatcctctatctcccataattcacattgttaagaacttctcattgtattttgccatccagtaattgaagattcccattcagaayctcattgggatgctgctgtttgtacacacaaatatcacactggtaggctgaaggttgcttaaaggcccagaaaactgaagttctgtatctttgcatctctgctcttaaggatactttcgattgccagcagcgaccagccaatccatgaaagagaagttcttggctcatcttattgggaagtctagagttggtaaaaagaaaggcactgtcccataatatatatcaggcacctcaaattggcatctttgatatttgctcttccttctcaactctgatgctcttagttttcatcattacatgaaggccctgtgatagacattcagtttagactagtgttattttcaaagagactatcgttggagatgaaggatctaaaggtaaaaggtgtcctggttccataaaaagattcctcaagctccaaaattcttatgtaaatttacacacacacacaaacacacacacacaca

SEQ ID NO: 262385 - DNA, 565 bp, Homo sapiens
gccatcaaaactgacattttaaaaaacaatttagacagaagactctgctatcattccaaccctgaccccagcaacagttctttttgagctgcatttgaccaaaatgtctctactttctggagaaagccatactactttggaaatagctagagaatattctcttaagccagacacaaaaagagcaaaggaaccatcttcggtggagaaaggaaagaaagtgagactgcatgctaagaggggaatcacatgtgctaaggcttttccaccaagggagacaaaaatggaataaaaggaaaatagcaaaaatataaggagaattagattcaaatcctaagtctactattktttgatgtttttggcaaattactcaatgtttccaagcctcaatttgctcttctgttctgtaggaaaaatacccatctcactggcgcattaatgaaaaagggtccatgatataaaatggatatttcttcctgcctcatctcttccattttcataaaattcatagccaacttggaacgtcattccaggtctgtctaatactggttcaaatggactatgcttt

SEQ ID NO: 262386 - DNA, 575 bp, Homo sapiens
cttccattttcataaaattcatagccaacttggaacgtcattccaggtctgtctaatactggttcaaatggactatgctttattccaagcaaaaagcatatccyattatgacaaaaaggtttctattaaaaatagagagcagataaaagggagaccatcatccaggaagccatcggctgattcataaaaatacagaatgagtcatcctgtatcccaaggctaaaacttataatcaatgatcatgtctggccagccaatcccagcccagaggagaaggagctgcccagtgggccatttacaagcctattacaatccttccttgtaaaaccattaactctgcttccagcttggtgaaaggaaaatcaatctgggctgtttgcaacactgtattccaaatgtacctgcagcctggttggctttctgaacaactagggtcggggaagtgcagtgatttctgtgtgtgtgtgtgtagcgccactgaagaacaggctttcacatctggctttgaaaatcaatctcttggccttcatcttgacatttattatttcaaaatgcttcagttcctatcagcaatt

SEQ ID NO: 262387 - DNA, 517 bp, Homo sapiens
ggagacactgatacgccaatctggaggccagagaacagctcccaaggcgtgtgctaggctgaggtgctgtattagtctgttttctgattgctataaagaaataccggagactgggtatttatcataaagaaaagaggcttaattggctcacagttctgcaggctgtacaggaagcatagcggcttctgcctttagggaggcctcagaaagcttccaatcatggcagaaggcaaggtggagcaaggagtctcatgtggcgggagcaggaggaagagacagcagagggaggtgccacacacttctaaacaaccagatctcacgagaactcactcactatcactacagcaacaccgagcagatggtgctacaccattcatgagaatccgccctcatgttccrtcacctcccaccggccccacctcctacaatggcgattgcaattcaacatgacatttggtagggatacagatacaaaccatatcaggtggggaagttggttttgagttccaagctcaga

SEQ ID NO: 262388 - DNA, 517 bp, Homo sapiens
ggagacactgatacgccaatctggaggccagagaacagctcccaaggcgtgtgctaggctgaggtgctgtattagtctgttttctgattgctataaagaaataccggagactgggtatttatcataaagaaaagaggcttaattggctcacagttctgcaggctgtacaggaagcatagcggcttctgcctttagggaggcctcagaaagcttccaatcatggcagaaggcaaggtggagcaaggagtctcatgtggcgggagcaggaggaagagacagcagagggaggtgccacacacttctaaacaaccagatctcacgagaactcactcactatcactacagcaacaccgagcagatggtgctacaccattcatgagaatccgccctcatgttccatcacctcccacyggccccacctcctacaatggcgattgcaattcaacatgacatttggtagggatacagatacaaaccatatcaggtggggaagttggttttgagttccaagctcaga

SEQ ID NO: 262389 - DNA, 517 bp, Homo sapiens
ggagacactgatacgccaatctggaggccagagaacagctcccaaggcgtgtgctaggctgaggtgctgtattagtctgttttctgattgctataaagaaataccggagactgggtatttatcataaagaaaagaggcttaattggctcacagttctgcaggctgtacaggaagcatagcggcttctgcctttagggaggcctcagaaagcttccaatcatggcagaaggcaaggtggagcaaggagtctcatgtggcgggagcaggaggaagagacagcagagggaggtgccacacacttctaaacaaccagatctcacgagaactcactcactatcactacagcaacaccgagcagatggtgctacaccattcatgagaatccgccctcatgttccatcacctcccaccggccccacctcctacaatggcgattgcaattcaacatgacatttggtagggatacagatmcaaaccatatcaggtggggaagttggttttgagttccaagctcaga

SEQ ID NO: 262390 - DNA, 552 bp, Homo sapiens
ttggaggggacgcacagctcctcctgtgtacagggacctgcctttatccttggaggggacgcacagctcctcctgtgtacagggacctgcctttatccttggaggggacgcacagctcctcctgtatacaggggcctgtgtttatcctgggaggggacgtgtagctcctgtgtgcagggacctgcctttatcctgggaggggacacgcggctcctcgtatctgcagggacctgcttttatcctgggaggggtcacgcagctctgtgtccacaccacgctggcagtcccccaagcttacaaattgctgggagtgaaacctctctgcccctgcttcactgtgagacctggggcagggcccctcccttggtgggcctcagtttcctcatctgtaaagcaagtgggcccctggaatgctggctccatcaagaaaggcatctcggagcgccggaaacaattctgcggccagaaacaagtttgcagcgctgtgatctcagcgagtgtgacccygtgagcctcacctttcctgtcttttaaatgggagcggaatgcctt

SEQ ID NO: 262391 - DNA, 616 bp, Homo sapiens
atcctatgccgcaagggtattcgggtcgctccgtccgttttcacagctaatcttcatatgacattaaaatttatccttaggataaattcctagaatgaaattgcttggtcaaaagcaagggtttggggttatggtttttcagaaattaccctcagaaaagactataagagagaccatgtcccctacatcgttactaccaacaccagattttttttatttttcgcaatggagtctcattctrtcgcccaggctggagtgcagtgtgtgatcttgggctccctggcaacctccggcctcccaggtttaagcgattctcctgcctcagactcccgagtagctggtactacaggcgcccgccaccacacccagctaatctttgtatttttactagagacagggtttcaccatgttggccaggctggtctcaaactgccctcaggtactccgcctggcctcggcctcccaaagcactggaattacaggtgtgagccaccgcgccccgcccatcatttaatatatatatatataaatttttttttttggttaatcttagtggagttctgaatagttatgtctgccggaattcactatgggcttaattgcgtttctccaaaat

SEQ ID NO: 262392 - DNA, 461 bp, Homo sapiens
accgtttgcagacaccatccccctagggtgggaggtgccaagaacagcagctgrccccagaggtgggcagcaaataggacccaggtgcgtcttgaccccactcaggtgagaagggattcggaaggccagtgcctccagtgtgggggctgaaggtccaccaatctgtgctgtggggacaagactcagacagtcaactgagtggagcagccacgccccaactggcttccagcatggactctgggcaatgttttgactttgcttcttccactctccacatgggttcatgtggtctttttttacttttctctttttaaaaaatactttagagcagttttagctttagagaaaaataagtggaaagtacagagagttcccatatactgtatcccctcgccccccacttcccctgatattagcatcttgtggtacatctgtcgcaattgatgggccaagacagatac

SEQ ID NO: 262393 - DNA, 600 bp, Homo sapiens
cattcataatctagacgggaacccattccttaaactgaataaatgagctggtccaagaactgggtgttctctgtaaaactatgaattgggaaacacacatcaagagaacgacttagcaacagaaaggatgtcaaaagacagaagtgagtgacagagatctagttgacctgagctttggggaagcatacgtggaaaagccaatagctggaagaattaaaagaaaaaacacgaacagcaacagagtcaacccaactccctgcaccaggatgaggctttgtagacttccattgctgagttccctagaatgaggagaggtccagtctctgggcttggagaggtccagctccatcacacctcctgctctatgatttccatgaattccttcattacttcacacatgtgtttatagcagaagctctttgcttggactacctgtgtggtccctgtcayatgaaaccaaaagatacaaactcaaacgaataccgtaatcaatcacccattgggacagacattgttgactctacttttttttcttcagacaaaaataactttgttggtttagagataataagttatttacccaaggccacacagtaaata

SEQ ID NO: 262394 - DNA, 585 bp, Homo sapiens
gtctgagcctcagtatcctgtgaaaagatcaatatgctccaaattcattatgaaaaatgtctggaaatctcatcccatttattagtatttttgccaatggttttcagataagacagcagataaatgttgagaaagaggcagtaaatgagtcttttcttttatacgaatttacatttttttgtccccaggtaagcagtgtaaccaaaggcacactatctcaccctgaaagtgctgcacataagaaatattatcttctcttcaatcctccacatggtccccaaagaaaagatcatgcagctcactccgttaaccccragcattgaataaataaccaattattttagaatataacaggaaacagggacattgttcaacttggtttagagggagaacttactatacttgattatgtatatttttcctttcaatatgacttatcttttgctaatttgccctggcttgtttactatcaagcccaccctttaaactctctcccttccagtgacttgtggcttgacaaaaaaataagtcacttactcgtttccagttagggtgtgatatgggagaaaactgacactagtattc

SEQ ID NO: 262395 - DNA, 585 bp, Homo sapiens
gtctgagcctcagtatcctgtgaaaagatcaatatgctccaaattcattatgaaaaatgtctggaaatctcatcccatttattagtatttttgccaatggttttcagataagacagcagataaatgttgagaaagaggcagtaaatgagtcttttcttttatacgaatttacatttttttgtccccaggtaagcagtgtaaccaaaggcacactatctcaccctgaaagtgctgcacataagaaatattatcttctcttcaatcctccacatggtccccaaagaaaagatcatgcagctcactccgttaaccccgagcattgaataaataaccarttattttagaatataacaggaaacagggacattgttcaacttggtttagagggagaacttactatacttgattatgtatatttttcctttcaatatgacttatcttttgctaatttgccctggcttgtttactatcaagcccaccctttaaactctctcccttccagtgacttgtggcttgacaaaaaaataagtcacttactcgtttccagttagggtgtgatatgggagaaaactgacactagtattc

SEQ ID NO: 262396 - DNA, 585 bp, Homo sapiens
gtctgagcctcagtatcctgtgaaaagatcaatatgctccaaattcattatgaaaaatgtctggaaatctcatcccatttattagtatttttgccaatggttttcagataagacagcagataaatgttgagaaagaggcagtaaatgagtcttttcttttatacgaatttacatttttttgtccccaggtaagcagtgtaaccaaaggcacactatctcaccctgaaagtgctgcacataagaaatattatcttctcttcaatcctccacatggtccccaaagaaaagatcatgcagctcactccgttaaccccgagcattgaataaataaccaattattttagaatataacaggaaacagggacattgttcaacttggtttagagggagaacttactatacttgattatgtatatttttcctttcaatatgacttatcttttgctaatttgccctggcttgtttactatcaagcccacccwttaaactctctcccttccagtgacttgtggcttgacaaaaaaataagtcacttactcgtttccagttagggtgtgatatgggagaaaactgacactagtattc

SEQ ID NO: 262397 - DNA, 580 bp, Homo sapiens
accagcatgagccgtcagtcaggatagcctcctcttagtaacagcttgtcttagcaacaccaagaagatggaaactggctagaacaaaggagagctctgcagagagacagatctgaactggaagccttctgcttctgctcttcaaaggctccttcactttccagcttcaattttccaatctatataaagggcacagtcatagttcattattagtcatgaacttcaagaactacatggagttcttgtgggaattatataaggtcacataaataaaggsacttagcgcagattcaggaacatattagtttttgttttggtaaatgccatttattattatcaataacaatagcacctagcagccccttccccagtagtttccctgccccagcagtccctgccctagcagtgcattctagtcaattgcagacactggttttcccctttagacctacagatgtttcctatgagactactgaaagcttctccaggactgaatttcttcccttattctctcccatttcccacccatggagaagttagacaacgttcagttacttgtaattatccatcaacccatcac

SEQ ID NO: 262398 - DNA, 491 bp, Homo sapiens
aaaacacacatttagctgaagaccaaaccccttgccaagaaaaggaaagctcatcgatgctcacatcctcaagctcgagctctgtaggggtgtttcccattgtttctgtatcttttcctgcagaataagagaaggaccctcaaaccagcatgagccgtcagtcaggatagcctcctcttagtaacagcttgtcttagcaacaccaagaagatggaaactggctagaacaaaggagagctctgcagagagacagatctgaactggaagccttctgcttctgctcttcaaaggctccttcactttccagcttcaattttccaatctatataaagggcacagtcatagttcattattagtcatgaacttcaagaactacatggagttcttgtgggaattatataaggtcacataaataaaggcacttagygcagattcaggaacatattagtttttgttttggtaaatgccatttattattatcaataacaata

SEQ ID NO: 262399 - DNA, 580 bp, Homo sapiens
accagcatgagccgtcagtcaggatagcctcctcttagtaacagcttgtcttagcaacaccaagaagatggaaactggctagaacaaaggagagctctgcagagagacagatctgaactggaagccttctgcttctgctcttcaaaggctccttcactttccagcttcaattttccaatctatataaagggcacagtcatagttcattattagtcatgaacttcaagaactacatggagttcttgtgggaattatataaggtcacataaataaaggcacttagcgcagattcaggaacatattagtttttgttttggtaaatgccatttattattatcartaacaatagcacctagcagccccttccccagtagtttccctgccccagcagtccctgccctagcagtgcattctagtcaattgcagacactggttttcccctttagacctacagatgtttcctatgagactactgaaagcttctccaggactgaatttcttcccttattctctcccatttcccacccatggagaagttagacaacgttcagttacttgtaattatccatcaacccatcac

SEQ ID NO: 262400 - DNA, 580 bp, Homo sapiens
accagcatgagccgtcagtcaggatagcctcctcttagtaacagcttgtcttagcaacaccaagaagatggaaactggctagaacaaaggagagctctgcagagagacagatctgaactggaagccttctgcttctgctcttcaaaggctccttcactttccagcttcaattttccaatctatataaagggcacagtcatagttcattattagtcatgaacttcaagaactacatggagttcttgtgggaattatataaggtcacataaataaaggcacttagcgcagattcaggaacatattagtttttgttttggtaaatgccatttattattatcaataacaatagcacctagcagccccttccccagtagtttccctgccccagcagtccctgccctagcagtgcattctagtcarttgcagacactggttttcccctttagacctacagatgtttcctatgagactactgaaagcttctccaggactgaatttcttcccttattctctcccatttcccacccatggagaagttagacaacgttcagttacttgtaattatccatcaacccatcac

SEQ ID NO: 262401 - DNA, 652 bp, Homo sapiens
catctggcctgtcactcactgatggcctagtctcaamctccctttcccgccttaattccccttctcacatcctctgcttgtgctcttctcgacacgcttatttctgggtgtccaaatccttgtcacacttcctgaactcaaagaaatgccaggccaggctgggggcggtggctcacgcctgtaattccagcacttgggaggccgaggcaggaagatcacttgagcccaggaggctgacgatgcactgagccgtgatcacgccactgcattccagcctgggcgagagcgctagaccctgtctcaaaaaaacaacaaaaaagaaaaggccaactcactacttcaccccagagtccagcacacggctctcaacgcggtgagcgcctgctgcacgtctggatgagtaaagtgtggctcctgttgtcatccagccacgatctgttaatgattcttactgaacacgtggcttggcctctcagagcaccagccagcagttaaaaacacaaaccagcggccaaagttcagggctctccacccccaccagccgtgcacctgggcaacaccgcccaacgcccagaggctctctcctggtctctgcagagggaggcaccggcacctccgcaagggacgcgcccagggttcgcgtgaagccgcc

SEQ ID NO: 262402 - DNA, 646 bp, Homo sapiens
gctggaaaccatcattctcagcaaactatcacaagaacataaaaccaaacaccacatgttctcactcacaagtgggagttgaacaatgagaacacaaggacacagggaggggaacaaacatcacacaccggagactgttggggagtggggggctggaggggttagcattaggagaaatacctattgtagatgatgagttggtgggtgcagmaaaccactatggcctatgtatacctatgtgacaaacttgcacattctgcacatgtatcccagaacttaaagtatagttaaaaaaggaaaaaagagagagagaggggggaaacagtatggagactttccaaaaaatgagaaacagtactggcctttattctaccaatcccactactgggtaactacccaaagacaaagaaatcacgatttcaaaaagatacccacacttctatgtttaccacaaatctattctcaatagcatatatgacaacctgagtgtccaccgacagatgattttataaaagaatatagcatatatgcacaatttaatactagtcagccacaataaggaatgaaactgtgtcttttgcagcaagatgcctagaactgggggacattataattagtgagctaactcacaaacagaaagccacat

SEQ ID NO: 262403 - DNA, 589 bp, Homo sapiens
gtcttttttctgtgtgtttggtgtcattgtggtgcatgaggtggcttggagggcatttggcctggaggtgtggagaacaattagcagagggtgattgtcatccaggcagagacctggctgacagtgtataaagcagttggcctgagctcaggggtcctgagggtgaccgtgggctgcaggacagttggagtcggttggggacaggggctgtgtgaaggcctggggcaccctagggagaggtcttgccgacgttgggaagcacctttgcagctaaggagggccaggctggagatctgggagctgccagccaggtggggttcttgaaggcrcaggcatggtgagaggacaggcttctcggggagaaaaagaaaactagaaacagtggttgccgaagagatgggggccagagcaggctccagagcccccagctgagctagggtgggactgcgctgccactcctttctctgctccctgtctggtccatgtatttctcacccaggctcttggttggccgtattctaagccaggtccctctcctggctccagaagtttaggggtaaagcccctccatagggggtgctgcctgctg

SEQ ID NO: 262404 - DNA, 643 bp, Homo sapiens
agggtatggagacctcataatacgatgattttctgcartttaatcattattgccacacaagtgatagcatcctctctctttatatcagcacattccctaacgtacaataaaggctgagcacagataccgccaaccagactgaccagcacctctcaccgagtgcctgagctgatagtgatagatatcacatttgtctaacaaaatcattacaccctgtaaggatacccaccagtcataaggagacaatttaaaaaatttagtcaaagcccaaacctgataggtagtcatttatacttagaagaattaactcttatcttcacatgtatttttcttaatcatagagaagctactagagtcactgtccaagttactgaatatcttattcctagaatgagacactgcacaatgtgttctgacacgaggggatgtagatatagttaagggacaggagatgtgatcacgggaacaagagtctgtgatccagcagttctttctctctcacagttgaccagaaacaaggccccagcagaacaaaggaaacattgacttaggtctccacagtctgatgtgagataaacagcaggtagtttatgcttccgttttatagtaggaaatttaataaagaagggccattttggggata

SEQ ID NO: 262405 - DNA, 643 bp, Homo sapiens
agggtatggagacctcataatacgatgattttctgcaatttaatcattattgccacacaagtgatagcatcctctctctttatatcagcacattccctaacgtacaataaaggctgagcacagataccgccaaccagactgaccagcacctctcaccgagtgcctgagctgatagtgatagatatcacatttgtctaacaaaatcattacaccctgtaaggatacccaccagtcataaggagacaatttaaaaaatttagtcaaagcccaaacctgataggtagtcatttatacttagaagaattaactcttatcttcacatgtatttttcttaatcatagagaagctactagagtcactgtccaagttactgaatatcttattcctagaatgagacactgcacaatgtgttctgacacgaggggatgtagatatagttaagggacaggagatgtgatcacgggaacaagagtctgtgatccagcagttctttctcyctcacagttgaccagaaacaaggccccagcagaacaaaggaaacattgacttaggtctccacagtctgatgtgagataaacagcaggtagtttatgcttccgttttatagtaggaaatttaataaagaagggccattttggggata

SEQ ID NO: 262406 - DNA, 643 bp, Homo sapiens
agggtatggagacctcataatacgatgattttctgcaatttaatcattattgccacacaagtgatagcatcctctctctttatatcagcacattccctaacgtacaataaaggctgagcacagataccgccaaccagactgaccagcacctctcaccgagtgcctgagctgatagtgatagatatcacatttgtctaacaaaatcattacaccctgtaaggatacccaccagtcataaggagacaatttaaaaaatttagtcaaagcccaaacctgataggtagtcatttatacttagaagaattaactcttatcttcacatgtatttttcttaatcatagagaagctactagagtcactgtccaagttactgaatatcttattcctagaatgagacactgcacaatgtgttctgacacgaggggatgtagatatagttaagggacaggagatgtgatcacgggaacaagagtctgtgatccagcagttctttctctctcacagttgaccagaaacaaggccccagcagaacaawggaaacattgacttaggtctccacagtctgatgtgagataaacagcaggtagtttatgcttccgttttatagtaggaaatttaataaagaagggccattttggggata

SEQ ID NO: 262407 - DNA, 537 bp, Homo sapiens
gtattgcttcacttctatctagctgtttgcttttatttttgatcaaccatgaaaaaaaaagttaatctgtttttactaggaataaatgtgttttctcctttagccaaatgttgtctgccatcctgttgttgcttcagctgtgggacagcagggcacaggaaactgacaatgagcgttctgcccagggcaccagcaccttgcttttgyccttgctgcaaacgttccagagcatcatttgtggtaaggatacgcccccctccgagggcaacatgcacgtgagtgtcatgatggaacgttgtgtttaggtggtactcaagtctagttattttttacgcaagaccagtgtgtgtgtccacggcagtgtttttctctggcgtgtgtgtatttggtggtaacagcagcgagtcagatgagacaggtgtgggaggccacttgtttgtggagaagacttggatcagtgagcaccgacttccttgtcagcacagaaccaagcttgaaacacgcacttttaaatcaatactagaaaagaacaacgaa

SEQ ID NO: 262408 - DNA, 537 bp, Homo sapiens
gtattgcttcacttctatctagctgtttgcttttatttttgatcaaccatgaaaaaaaaagttaatctgtttttactaggaataaatgtgttttctcctttagccaaatgttgtctgccatcctgttgttgcttcagctgtgggacagcagggcacaggaaactgacaatgagcgttctgcccagggcaccagcaccttgcttttgcccttgctgcaaacgttccagagcatcatttgyggtaaggatacgcccccctccgagggcaacatgcacgtgagtgtcatgatggaacgttgtgtttaggtggtactcaagtctagttattttttacgcaagaccagtgtgtgtgtccacggcagtgtttttctctggcgtgtgtgtatttggtggtaacagcagcgagtcagatgagacaggtgtgggaggccacttgtttgtggagaagacttggatcagtgagcaccgacttccttgtcagcacagaaccaagcttgaaacacgcacttttaaatcaatactagaaaagaacaacgaa

SEQ ID NO: 262409 - DNA, 537 bp, Homo sapiens
gtattgcttcacttctatctagctgtttgcttttatttttgatcaaccatgaaaaaaaaagttaatctgtttttactaggaataaatgtgttttctcctttagccaaatgttgtctgccatcctgttgttgcttcagctgtgggacagcagggcacaggaaactgacaatgagcgttctgcccagggcaccagcaccttgcttttgcccttgctgcaaacgttccagagcatcatttgtrgtaaggatacgcccccctccgagggcaacatgcacgtgagtgtcatgatggaacgttgtgtttaggtggtactcaagtctagttattttttacgcaagaccagtgtgtgtgtccacggcagtgtttttctctggcgtgtgtgtatttggtggtaacagcagcgagtcagatgagacaggtgtgggaggccacttgtttgtggagaagacttggatcagtgagcaccgacttccttgtcagcacagaaccaagcttgaaacacgcacttttaaatcaatactagaaaagaacaacgaa

SEQ ID NO: 262410 - DNA, 594 bp, Homo sapiens
acaaattctaagttcattttctatattacctcttttgtacatagaattagccatttttctaaagcttgcttgtttctaacgttaacgaatagcagtaaaataaaaaaattgtgataccgtgtataattacttctaggacctctcaacctactggcctagcagacgtgcatgtttatatgaacccatgtttatggacgcatcaaaactacttatgtacytaatcttctgtaactttattatattaaaaatgagaacacactggtctcctgacccaactatgctaccacgtggacctttctagccttccttccttgactgtccataaccatccactttaaagtgaggaatcctatcccaccaattgccttattattacctggttgcacaattttaggacacatgcatagcggtatcagaaatgtaaagctcattggaaatatgtttatctactagaatagagtgctatgtgtagtttctttacattttaaacatacagaatttcctcattttcaaagttaattagactagcaacttcattttctactttcttcagtgaagtcatttcaattacaccatataatatcatttatttga

SEQ ID NO: 262411 - DNA, 595 bp, Homo sapiens
tgcaacaaacggcggttgttgtcatggcccatttagaagatctggctacaccctgtagatgcctctgccgtgtagctgtccgacgtctcataaggtgtgtgtgcaagaaccgtgttctccatgggttttgtagctagtaccacttgtaggttctcatcctgggcccgtgtggagacttgctttttctggtattggtagggggagctggcctgtggtttttaaacgtgtttgcagttgaaggtgttatccgtgttgagagtgaatgatgagcaagctgaggcgcacaggcctggggacccaacctgggggcccaggttccaggttcaggtggcacagccccagagagctcccctttacccacagccccaggccctcccaccttctacagagggttccacagccttctttatactctgaacgtgggctgtcttagtatgtaatgctggttatagtagtgacagtataattatatattatatctgttatgtaatagtaatggtaatagtagtgatttgcatgtgtggagcacctgtagggtgcaggcccactgaggacctcatrcacgctgttgtatctcattatgtcaatgagaaaa

SEQ ID NO: 262412 - DNA, 411 bp, Homo sapiens
tgtattaaatgccattagggcagggcttaaagcattttatgaaggggagaattaactttgctgtaaatatcttctgtgactggaaaagttgaactcttgcttttttcagagtttgatttttgttagaataaatttcatttcctctacmtgtgtggtcacagtccactaatacttgtcatcgaatacttgtcatagttttgttgcccagtgggttctttatgcatgtaacaattcattatactttctgaagcatggtgtacagtcactttggaaactgattcctaaggaatattctagccaaatcatgtatctgtgctttagtttttctgcgtgtacggttgctgccagctttatagggcatgtgggtttatgtggtatctgctgttacttgggcacagcagcatcaactca

SEQ ID NO: 262413 - DNA, 411 bp, Homo sapiens
tgtattaaatgccattagggcagggcttaaagcattttatgaaggggagaattaactttgctgtaaatatcttctgtgactggaaaagttgaactcttgcttttttcagagtttgatttttgttagaataaatttcatttcctctacctgtgtggtcacagtccactaatacttgtcatcgaatacttgtcatagttttgttgcccagtgggttctttatgcatgtaacaattcattatactttctgaagcatggtgtacagtcactttggaaactgattcctaaggaatattctagccaaatcatgtatctgtgstttagtttttctgcgtgtacggttgctgccagctttatagggcatgtgggtttatgtggtatctgctgttacttgggcacagcagcatcaactca

SEQ ID NO: 262414 - DNA, 411 bp, Homo sapiens
tgtattaaatgccattagggcagggcttaaagcattttatgaaggggagaattaactttgctgtaaatatcttctgtgactggaaaagttgaactcttgcttttttcagagtttgatttttgttagaataaatttcatttcctctacctgtgtggtcacagtccactaatacttgtcatcgaatacttgtcatagttttgttgcccagtgggttctttatgcatgtaacaattcattatactttctgaagcatggtgtacagtcactttggaaactgattcctaaggaatattctagccaaatcatgtatctgtgctttagtttttctgcgtgtacggttgctgccwgctttatagggcatgtgggtttatgtggtatctgctgttacttgggcacagcagcatcaactca

SEQ ID NO: 262415 - DNA, 411 bp, Homo sapiens
tgtattaaatgccattagggcagggcttaaagcattttatgaaggggagaattaactttgctgtaaatatcttctgtgactggaaaagttgaactcttgcttttttcagagtttgatttttgttagaataaatttcatttcctctacctgtgtggtcacagtccactaatacttgtcatcgaatacttgtcatagttttgttgcccagtgggttctttatgcatgtaacaattcattatactttctgaagcatggtgtacagtcactttggaaactgattcctaaggaatattctagccaaatcatgtatctgtgctttagtttttctgcgtgtacggttgctgccagctttatagggcatgtgggtttatrtggtatctgctgttacttgggcacagcagcatcaactca

SEQ ID NO: 262416 - DNA, 519 bp, Homo sapiens
tacaatcctgagttctgatgccgtgcctgaggtgtgtggaatcaccagaaagtgtattcacgtagatagaggaattacaagtcaacctgtgtaaacatgttaggtggagctctttcatatgaatgatgctgaattttaccttctaaattgagtgttcagttgagcatctttttttttttttagtatttattttgagttgtgcacttgagtttctctttcatgtttgcgtgtgcattttctagaatggcttcagtcatccatcttctctggaggctgcagaccagccagatccactacagctacaacgaggagaaagatgaggaccactgcagctcccagtgggcacacctgccagcaaatcaccactgctcccacagatggggcccctgggggaccattctcaggcatttctgyaagtcattgcagacaataacattcaggatcacaacgtgaaggtgagctaggcctgtccccactgtcacctcagtgctctgtttatctgaggactttgacatagga

SEQ ID NO: 262417 - DNA, 529 bp, Homo sapiens
ttatagcatagttttaaaaccatgtattaattactaaatttaacatattttaaccaatttaaacctatgagcattatttatattttacttgaataacttttagagcacagtttaatattaaatagggtagactaatgatgaaaattgttttcctttgttaggacaaatggcagccactgttgagtactgttacaggggttcacagatacaagtggttgaagcagaatgttcaggatctttatccgcagtctccactcctcagtacaattgctgaatttgcccttaaagaagagccagtggatgtggaaaaaatgagatagtgcctactaaaacagataacatttgatgagaaatgcttctctgcagtgggtaatatacataacacttaactgtatatgcattgatattttgcagttsgagagagcagaggttcgcctggaagggatagatacaattttgaaattgtatctggcgagcaagaatttcttacttccatctgtgcagtaagcgatgttttgtggatggcaaa

SEQ ID NO: 262418 - DNA, 512 bp, Homo sapiens
aaaatgtgcttgtatcacaagcacaggtgctaaaaaggaggggaaaacatccttactgatattttcaaygtatgttttacttttcatcaacatgaacctcaacttgatatgatgcagattgaaggaaatcacccataattccatatgaaaaaggcctgtgatattttatgggaaaataaatagagaaaatgctaacggaaactctgttaagcatgaagctttatggagcaaacacaaatccagtggtgaaagatacacactcgagttctgtttgttgtcttggaacaatacggtttagaggtgactggcgggtgaggagaacatatgcgagttcaccaaagagaaaagctgaatgaggcaatgcctcttcctgaccatatctcttactcagataactatagaatttattgtccagtaaagggtatattaaaaaatcatattaaaagtcatgcagtgaagttgtccagggaaatcaagacttaacagtctcactctgacaataatgaacaggg

SEQ ID NO: 262419 - DNA, 512 bp, Homo sapiens
aaaatgtgcttgtatcacaagcacaggtgctaaaaaggaggggaaaacatccttactgatattttcaatgtatgttttacttttcatcaacatgaacctcaacttgatatgatgcagattgaaggaaatcacccataattccatatgaaaaaggcctgtgatattttatgggaaaataaatagagaaaatgctaacrgaaactctgttaagcatgaagctttatggagcaaacacaaatccagtggtgaaagatacacactcgagttctgtttgttgtcttggaacaatacggtttagaggtgactggcgggtgaggagaacatatgcgagttcaccaaagagaaaagctgaatgaggcaatgcctcttcctgaccatatctcttactcagataactatagaatttattgtccagtaaagggtatattaaaaaatcatattaaaagtcatgcagtgaagttgtccagggaaatcaagacttaacagtctcactctgacaataatgaacaggg

SEQ ID NO: 262420 - DNA, 512 bp, Homo sapiens
aaaatgtgcttgtatcacaagcacaggtgctaaaaaggaggggaaaacatccttactgatattttcaatgtatgttttacttttcatcaacatgaacctcaacttgatatgatgcagattgaaggaaatcacccataattccatatgaaaaaggcctgtgatattttatgggaaaataaatagagaaaatgctaacggaaacyctgttaagcatgaagctttatggagcaaacacaaatccagtggtgaaagatacacactcgagttctgtttgttgtcttggaacaatacggtttagaggtgactggcgggtgaggagaacatatgcgagttcaccaaagagaaaagctgaatgaggcaatgcctcttcctgaccatatctcttactcagataactatagaatttattgtccagtaaagggtatattaaaaaatcatattaaaagtcatgcagtgaagttgtccagggaaatcaagacttaacagtctcactctgacaataatgaacaggg

SEQ ID NO: 262421 - DNA, 512 bp, Homo sapiens
aaaatgtgcttgtatcacaagcacaggtgctaaaaaggaggggaaaacatccttactgatattttcaatgtatgttttacttttcatcaacatgaacctcaacttgatatgatgcagattgaaggaaatcacccataattccatatgaaaaaggcctgtgatattttatgggaaaataaatagagaaaatgctaacggaaactmtgttaagcatgaagctttatggagcaaacacaaatccagtggtgaaagatacacactcgagttctgtttgttgtcttggaacaatacggtttagaggtgactggcgggtgaggagaacatatgcgagttcaccaaagagaaaagctgaatgaggcaatgcctcttcctgaccatatctcttactcagataactatagaatttattgtccagtaaagggtatattaaaaaatcatattaaaagtcatgcagtgaagttgtccagggaaatcaagacttaacagtctcactctgacaataatgaacaggg

SEQ ID NO: 262422 - DNA, 504 bp, Homo sapiens
ctaacggaaactctgttaagcatgaagctttatggagcaaacacaaatccagtggtgaaagatamacactcgagttctgtttgttgtcttggaacaatacggtttagaggtgactggcgggtgaggagaacatatgcgagttcaccaaagagaaaagctgaatgaggcaatgcctcttcctgaccatatctcttactcagataactatagaatttattgtccagtaaagggtatattaaaaaatcatattaaaagtcatgcagtgaagttgtccagggaaatcaagacttaacagtctcactctgacaataatgaacagggggattccctcaagatagactaggacatgaccccacactggcaggtagtagtacgagaaaagaacgcatggaaaatctttaccttatgcttgaggtagggaccaggctaaagtgaaagccagacctaaaattctatctaaaataaatccacaattgaagaaaatatgtggtgtacaggcataga

SEQ ID NO: 262423 - DNA, 504 bp, Homo sapiens
ctaacggaaactctgttaagcatgaagctttatggagcaaacacaaatccagtggtgaaagatacacactcgagttctgtttgttgtcttggaacaatacggtttagaggtgactggcgggtgaggagaacatatgcgagttcaccaaagagaaaagctgaatgaggcaatgcctcttcctgascatatctcttactcagataactatagaatttattgtccagtaaagggtatattaaaaaatcatattaaaagtcatgcagtgaagttgtccagggaaatcaagacttaacagtctcactctgacaataatgaacagggggattccctcaagatagactaggacatgaccccacactggcaggtagtagtacgagaaaagaacgcatggaaaatctttaccttatgcttgaggtagggaccaggctaaagtgaaagccagacctaaaattctatctaaaataaatccacaattgaagaaaatatgtggtgtacaggcataga

SEQ ID NO: 262424 - DNA, 415 bp, Homo sapiens
ctcatattttaatactagcagcttattatatatgtcaatccatcaggcattcagaaatacatgcttatgaaaatttttggcaccatcagacaaaagacaagtgtagaagacatttgtaaccctataaacactagtaaattaaaaacagaaggacctttatgtcctaacrtatctgtgttgtgaaaggctgcctgtgaaatacgggattccttaaacatattttaaaaatcataggtgtcaatattttttagaaatccatttaaattttctcttgttattttacaatgcctattatttatatagtggctctgctgattttgatgtatatcctaaactttatattttctttaaaggatgttttatacaactttatgtaaaatgtttcagtatcttcacattatttccctgtcctttt

SEQ ID NO: 262425 - DNA, 415 bp, Homo sapiens
ctcatattttaatactagcagcttattatatatgtcaatccatcaggcattcagaaatacatgcttatgaaaatttttggcaccatcagacaaaagacaagtgtagaagacatttgtaaccctataaacactagtaaattaaaaacagaaggacctttatgtcctaacatatctgtgttgtgaaaggctgcctgtgaaatacgggattccttaaacatattttraaaatcataggtgtcaatattttttagaaatccatttaaattttctcttgttattttacaatgcctattatttatatagtggctctgctgattttgatgtatatcctaaactttatattttctttaaaggatgttttatacaactttatgtaaaatgtttcagtatcttcacattatttccctgtcctttt

SEQ ID NO: 262426 - DNA, 415 bp, Homo sapiens
ctcatattttaatactagcagcttattatatatgtcaatccatcaggcattcagaaatacatgcttatgaaaatttttggcaccatcagacaaaagacaagtgtagaagacatttgtaaccctataaacactagtaaattaaaaacagaaggacctttatgtcctaacatatctgtgttgtgaaaggctgcctgtgaaatacgggattccttaaacatattttaaaaatcataggtgtcaatattttttagaaatccatttaaattttctcttgttattttacaatgcctattatttatatagtggctctgctgattttgatgtatatcctaaacttwatattttctttaaaggatgttttatacaactttatgtaaaatgtttcagtatcttcacattatttccctgtcctttt

SEQ ID NO: 262427 - DNA, 584 bp, Homo sapiens
tcttaattatatatatcttacggcttctttgcatktcagagttttttttgggtattttgatgttatgctattgaatatctagatttgattggctacctttgaacaatgttgtggcaggcagttcagtaacttcaggatgagtatttgtctgttgttgttttaaatcttctctttaagctttgttgagttagtctagagccatctgtaatttggagctaaatgagcactgtcactagggcatgaacctccagtggtctttactgaatatcctggaggtacagaggggattcccttctctgattagaattaggaatgtaaagggaaaagagaaaaatagaaagctatgcataaacacgtgcattaaaatgaattttatgtgggctttttcatgaaaatgttcctaaggtattttatttttttattgtggtaaaatacacataacataaaatgtactcggttaaccattttaagtgtacagttcagtggtactaaatatagtcataacattgtgcagccgtccctaccatccatctccataattcgtttcatcttgtaaaactgaaactctatacccattaaacaat

SEQ ID NO: 262428 - DNA, 575 bp, Homo sapiens
ttttcatgtatgatcctgttcatgaaaaagagaaattctttcattgtgctagaagcttaaaataatgaaaatgccactttctacattaaacagaaactgaagggaatcaaggtgaattgcatgagacatagaaaacaagtgggaaagaaatctagtataatttgccctttgtgtacctttattatttagcgtttgagtaaatgattcccccaaatatcttcccatcttaattcatgtctataamgtagacatttatgtctcaccttgtcaagaagggccaactctaacataaacatttcccaaaaatgcttcctgctaaaacgtaagctcagtctggctagaaatgcagctcacttcctaaagattaattggtagctaattttgcatgctgttctctgaacttgagtgaaacctgtccatcaggcatacagggaatgacaggaaaggtgacaacagaagatgaatgttatgtcactaaccttcaaagatgacctgccttttctttcaaattcttgatatcttaagacttcattaattcatgtctcttttcccttggttcaacattttgctatacc

SEQ ID NO: 262429 - DNA, 509 bp, Homo sapiens
aactgaatttaagccgtggagcagtgttttgttgaacaataactatgatataggacactcttcctccttttcatgtatgatcctgttcatgaaaaagagaaattctttcattgtgctagaagcttaaaataatgaaaatgccactttctacattaaacagaaactgaagggaatcaaggtgaattgcatgagacatagaaaacaagtgggaaagaaatctagtataatttgccctttgtgtacctttattatttagcgtttgagtaaatgattcccccaaatatcttcccatcttaattcatgtctataacgtagacatttatgtctcaccttgtcaagaagggccaactctaacataaacatttcccaaaaatgcttcctgctaaaacgtaagctcagtctggctagaaatgcagctsacttcctaaagattaattggtagctaattttgcatgctgttctctgaacttgagtgaaacctgtccatcaggcatacagggaatgacagg

SEQ ID NO: 262430 - DNA, 575 bp, Homo sapiens
ttttcatgtatgatcctgttcatgaaaaagagaaattctttcattgtgctagaagcttaaaataatgaaaatgccactttctacattaaacagaaactgaagggaatcaaggtgaattgcatgagacatagaaaacaagtgggaaagaaatctagtataatttgccctttgtgtacctttattatttagcgtttgagtaaatgattcccccaaatatcttcccatcttaattcatgtctataacgtagacatttatgtctcaccttgtcaagaagggccaactctaacataaacatttcccaaaaatgcttcctgctaaaacgtaagctcagtctggctagaaatgcagctcacttcctaaagattaattggtagctaattttgcatgctgttctctgaacttgagtgaaacctgtccatcaggcatacagggaatgacaggaaaggtgacaacagaagatgaatgytatgtcactaaccttcaaagatgacctgccttttctttcaaattcttgatatcttaagacttcattaattcatgtctcttttcccttggttcaacattttgctatacc

SEQ ID NO: 262431 - DNA, 638 bp, Homo sapiens
ggtgttcaggggaaacccctgaactggcagttggtgtcagaagtgagaatcttcttacatggcctcttcctttgaactgtgcagctggacgcaaactcttcacaatttgggccagaagtctygtgttgactttgcagcctaaagtatcttgtagtttgtctaaccctcaataaatttgctttcatcaaatattgtatttgttaccccaaaattaccatcacgtttttttttctccaaataactaacattggagaaatagccagctgagtttgtaactcaacagaaacaagtgatccatataccatataagtggccatctcattttgccttcttccaccaaatcttagcaacctcaaccattgccatgagccactgtaggcctaccagctacaaacaaacaagtatcttgtaaaaacacttcatactcccatttgataaatttcccagcaaagagatgtctactttaactctatgcaagtggctcatattcacgaagtctgtagatattattcatgtagtgtgagaaaatcatcccagcgatgccagcacattctccttcccatgatctgcttagtttgcaaacatattcaggccatgggtgagagatttgtatttcacagtacaacaattttatggag

SEQ ID NO: 262432 - DNA, 366 bp, Homo sapiens
gattttcttccctgggaagctaatatttcaaacacttaaagagtatatagatttccaacttgtatcccgtttataaaactatctctaggctgctgatttcaggaggaggctcatgaatattctctttgcagagaatatatcaggagttaacaacagcttcaatatttgtggacgaccagttaactaagccacctcttagtgtctttagttgggaaatcttagctgaagatattcaataatgaaccaagagtgactaaaaaattcaayatttaagtatatttcattgtaattaatttgaattgaaatagccatatacagctagtatttactatattgaacaatgcaaataagaggagaaaattaata

SEQ ID NO: 262433 - DNA, 494 bp, Homo sapiens
aggagggggaaggaggaaggaagaaaggtgaaaagaaagaatggtaaactttttaacaacawaatttatccttctagaatatgaatgttggtctatttgatgatgtcccacagattcattagtctctgctcattgtttattttttattctttctgtttctgagagtcagtattttccattttcttctcttcaagttcatggcttcttctgtgtgtgcaaatatactcttaaatccctctggtgatttttaaatttttatcattgtagttttccactccagaatttctgttatctctttgctgatattcctactttttaatattttttctgattcctttatttctttgtttatgttttccttttgacatttgagtataatgaagagagttgttttaaagtctttgtctggtaagtttgatgtctgggtttccttagggatattttctgtcaatttattttggtcctttgaatgagccacactttcccattctttg

SEQ ID NO: 262434 - DNA, 494 bp, Homo sapiens
aggagggggaaggaggaaggaagaaaggtgaaaagaaagaatggtaaactttttaacaacaaaatttatccttctagaatatgaatgttggtctatttgatgatgtcccacagattcattagtctctgctcmttgtttattttttattctttctgtttctgagagtcagtattttccattttcttctcttcaagttcatggcttcttctgtgtgtgcaaatatactcttaaatccctctggtgatttttaaatttttatcattgtagttttccactccagaatttctgttatctctttgctgatattcctactttttaatattttttctgattcctttatttctttgtttatgttttccttttgacatttgagtataatgaagagagttgttttaaagtctttgtctggtaagtttgatgtctgggtttccttagggatattttctgtcaatttattttggtcctttgaatgagccacactttcccattctttg

SEQ ID NO: 262435 - DNA, 545 bp, Homo sapiens
tcacaatcatttcctaaatcctctcccgtttcccatacctttccccatgcaacatccttttagtaagactgggaggagatgtatgcagtgggtacgttcaaactacacctgtgcaatyctgcataatctagccttctttaattctgttactccctgtttattgctgaatggagtcattcaaacattggctcagaaaatatttgagcttctgtttgatgccacttgccagagatggcagcagacagaacagaccaagtctttgtcttatggagtctacattctttggagaaggaaagaaaaaaaccaaggaatgaaggagccccctctgttgactatgatcatctccttatatcctaagaagtctggtgtcccaaatgagccataactgtctgcctcgtaccatctatacccgtgtcttagtccattcaggctgtgataacaaaaataccataccctaggtggcttatccacaacacaaatttgttgctcatggttctggaggctgggaagtccaagatcaagacactggcaggtgcagggtctgg

SEQ ID NO: 262436 - DNA, 545 bp, Homo sapiens
tcacaatcatttcctaaatcctctcccgtttcccatacctttccccatgcaacatccttttagtaagactgggaggagatgtatgcagtgggtacgttcaaactacacctgtgcaattctgcataatctagccttctttaattctgttactccctgtttattgctgaatggagtcattcaaacattggctcagaaaatatttgagcttctgtttgatgccacttgccagagatggcagcagacagaacagaccaagtctttgtcttatggagtctacattctttggagaaggaaagaaaaaaaccaaggaatgaaggagccccctctgttgactrtgatcatctccttatatcctaagaagtctggtgtcccaaatgagccataactgtctgcctcgtaccatctatacccgtgtcttagtccattcaggctgtgataacaaaaataccataccctaggtggcttatccacaacacaaatttgttgctcatggttctggaggctgggaagtccaagatcaagacactggcaggtgcagggtctgg

SEQ ID NO: 262437 - DNA, 599 bp, Homo sapiens
aacccacacatttggtgtcagaagtgtgagtagagttttttttcagttgcatgtctcttgctagcatctcaacatttgcgccatccatctcctctgcgtgcaattctccactcaccctctacaacctacttggtgttctgatcttggttgggaatcacattcttctggaagccttctctcacttattaggccggatcagstctctttgtttgttatatgatctcagagtgcctcacattcttctctacccacacttttcttggtttataaccatgtttatgtgtgtgtgttacagccctgaaactctttgtactagaaattgtggtttcctgagagtaataggtgatttagacaatacaaagacaaaactagttcactgtaaattttatcctttgtgtgtagtcaaacaccgccagggattagagcatggggacatctcaatctcaccttaaagaagaaagttttggtgctctctcaggtctgttctagataagaataatcccttccccatgatattaaacagagggatgccttcgacctgttttatccagagccatcccttacccatgacccctgtggtgagcagcacctccaggtgt

SEQ ID NO: 262438 - DNA, 570 bp, Homo sapiens
aagttttgaggataacatgttatgcagcaatagataactaatacatccactcactaacttatgcttacttcttattggctagactctgtcacatggtgcatccattcacaagggaggctgggaaatgtagtttaaaccagaccaatctgaataaagggagggctctattagtgaggatgaagggggaaatgggttctgcattawgccatttctgtcctgctttagtagcacaaagctgcaaggagttcacaatagtttgtggacgacatcttccttttcctttggtttttctttactaatttcaggtagatagactggaattcagctcccatgcaatgggtgtgctattgcttcagttgtaggtttttggataaaattttgggttgaggaaagtaaaagttctacctgtgaatatctttcctgtaaataagtcagttacaaagatatctgcatcatcagtcaaccatttaatttgttaagaggacattaatttaagacccttccacagggcaattgcatgctatgcaaggatatggaaggatttacagtttcttaattttttgaagtggc

SEQ ID NO: 262439 - DNA, 570 bp, Homo sapiens
aagttttgaggataacatgttatgcagcaatagataactaatacatccactcactaacttatgcttacttcttattggctagactctgtcacatggtgcatccattcacaagggaggctgggaaatgtagtttaaaccagaccaatctgaataaagggagggctctattagtgaggatgaagggggaaatgggttctgcattatgccatttctgtcctgctttagtagcacaaagctgcaaggagttcacaatagtttgtggaygacatcttccttttcctttggtttttctttactaatttcaggtagatagactggaattcagctcccatgcaatgggtgtgctattgcttcagttgtaggtttttggataaaattttgggttgaggaaagtaaaagttctacctgtgaatatctttcctgtaaataagtcagttacaaagatatctgcatcatcagtcaaccatttaatttgttaagaggacattaatttaagacccttccacagggcaattgcatgctatgcaaggatatggaaggatttacagtttcttaattttttgaagtggc

SEQ ID NO: 262440 - DNA, 481 bp, Homo sapiens
tatacttgtcctgggtcagaccgtgtgaaaagcactgggtattggagatgaaaagtggttggccctttttctttgaaagcttagtccagtggggaagatggatgtggaagctgagcaattaaaatgcagcttgataaaagctgtgctgaaaaaccctcactgarctgagcagtgggggctgggagggagcaggtcttaaactgaatgatcaggtttagtgggagctgtttaaattctgagccatcaggcatttttgctggattcctttcggtgcgcttgttaatcaattataaaataataataatgaacacttcaggagagaggatggaggttgaaagacagtggagggctggacttgaggttggaagatttgcagagacctggattgtgcattcgacctttacaaattgaagcgagaggctttgcatctctgaacatcaggattccactctataaaaaggagaatgaaagcattcagttt

SEQ ID NO: 262441 - DNA, 481 bp, Homo sapiens
tatacttgtcctgggtcagaccgtgtgaaaagcactgggtattggagatgaaaagtggttggccctttttctttgaaagcttagtccagtggggaagatggatgtggaagctgagcaattaaaatgcagcttgataaaagctgtgctgaaaaaccctcactgaactgagcagtggrggctgggagggagcaggtcttaaactgaatgatcaggtttagtgggagctgtttaaattctgagccatcaggcatttttgctggattcctttcggtgcgcttgttaatcaattataaaataataataatgaacacttcaggagagaggatggaggttgaaagacagtggagggctggacttgaggttggaagatttgcagagacctggattgtgcattcgacctttacaaattgaagcgagaggctttgcatctctgaacatcaggattccactctataaaaaggagaatgaaagcattcagttt

SEQ ID NO: 262442 - DNA, 556 bp, Homo sapiens
cattgcattttcctcttggtgacagcacacattaaatgcctactcgatcacattgcatacctgtttcattttaccttctcatgaaataagagtagcaggtgctcattttacaaacaaggctctgagatgggtgcacatttctcaagatccactgtttagtaagtggtgggaccaggtccaactgatgcttaaaaagcttcctatcctccctcaccaccaagagagagcaaacagagagctccttggtggaagtgcacccttgactygcaggcagttcagatttcattggatttttgtttttgtacctgctaagaatcaggctttagacagtggcttgcttctagtttgggttaatttcatctctgggtcagcatatagtaacccaggggttctccaaaggtgatgcctagaccacgagcatcaacgtcacctgggaatttgttaaaaatgcaatttttcatgctcaagacttactgactacgaatgcagatgttctcagagagtagtgcctggactatcagcatcaacaccacctgggaacttgttaggcaattga

SEQ ID NO: 262443 - DNA, 624 bp, Homo sapiens
ttgggaaggtatagatgtgagaaagagcatgctgtctgcgtttagaagatttagggaggtctgttgggtcaggaccagggtgtacatgtcttatgtgggaggatgatgagtgggaggtgagacagagtctgtgagtcagggtgaggcttctgtatcaggctaaaaagtgtgccttcaccctttattattaggggactatattaattctatctctgcctaacaaatcacccccaaacttgcagcctccaatattaatgaacctttgttatcttgcagtttctgtggtcaggaatttgggagttacccatttgggtgcttctggctcaggktctttcatgaggctgtagtcaagttgttgttaggggctgctgtcatccgaaggctcaactggggctggaggagccacttacacaatggtgccctcacatggctggcaagttggttcctgatggtggctggaggttcctcatcacctggaccttcccagagatctgcttgggtgtcctcatgatgtagtgtctgatttccccaagagagagaaaggcagaagcagcagtgtcttttatgcccacacaccagaagtcatgatcatttttgcaatatcctgttggttacaaaagtcag

SEQ ID NO: 262444 - DNA, 233 bp, Homo sapiens
cgttttagacttttgacctccagaactgcaaggaagtacatttgtgttgctttaagccattacatttttggtaatttgttatagcatcaatgggaaaccaatacactaaccaagcctttgaatcaccaaggcttgggacttctttgctcctgggaagaactggcaagactttattttctgactctgactccctttgasttgacagaggtgggctttctaaaaggggaaaagcc

SEQ ID NO: 262445 - DNA, 562 bp, Homo sapiens
accatccctggtttatggttctccagagcagcgaggacaggtctgcaaacaccagaatgtgcggttttttttttccttgcgktgattttattctgcattctgtattctcgctgggccggatgctgcctgtgacttgactaattatttcccgcatgaagtgcgctgagtgctttgaatttaaacatgataccttgaggtccccgtggcaggccctgtccctcacccttggccccactggggcagtctttggattcttgctggaaaaaggcccagtcagcaggatatgctgctggagacaccaagaagtctataaaagcccctgggagtttattctcaaggtggcggcccttccccctctcctgggagctccattaggcccagtctgaaatatgcacttgtaagagatggggatgtgagggtcaaccgtgaactccatgagaatacaacctgttggtttactttgtcattgtatccccagaatttatcatgaggcctggtacatagtagaacctcagtgaatatttatttgttggattaatgaaagaattcttccccagaaggt

SEQ ID NO: 262446 - DNA, 562 bp, Homo sapiens
accatccctggtttatggttctccagagcagcgaggacaggtctgcaaacaccagaatgtgcggttttttttttccttgcggtgattttattctgcattctgtattctcgctgggccggatgctgcctgtgacttgactaattatttcccgcatgaagtgcgctgagtgctttgaatttaaacatgataccttgaggtccccgtggcaggccctgtccctcacccttggccccactggggcagtctttggattcttgctggaaaaaggcccagtcagcaggatatgctgctggagacaccaagragtctataaaagcccctgggagtttattctcaaggtggcggcccttccccctctcctgggagctccattaggcccagtctgaaatatgcacttgtaagagatggggatgtgagggtcaaccgtgaactccatgagaatacaacctgttggtttactttgtcattgtatccccagaatttatcatgaggcctggtacatagtagaacctcagtgaatatttatttgttggattaatgaaagaattcttccccagaaggt

SEQ ID NO: 262447 - DNA, 562 bp, Homo sapiens
accatccctggtttatggttctccagagcagcgaggacaggtctgcaaacaccagaatgtgcggttttttttttccttgcggtgattttattctgcattctgtattctcgctgggccggatgctgcctgtgacttgactaattatttcccgcatgaagtgcgctgagtgctttgaatttaaacatgataccttgaggtccccgtggcaggccctgtccctcacccttggccccactggggcagtctttggattcttgctggaaaaaggcccagtcagcaggatatgctgctggagacaccaagaagtctataaaagcccctgggagtttattctcaaggtggcggcccttccccctctcctgggagctccattaggcccagtctgaaatmtgcacttgtaagagatggggatgtgagggtcaaccgtgaactccatgagaatacaacctgttggtttactttgtcattgtatccccagaatttatcatgaggcctggtacatagtagaacctcagtgaatatttatttgttggattaatgaaagaattcttccccagaaggt

SEQ ID NO: 262448 - DNA, 513 bp, Homo sapiens
atgtgacctcaaaatacagtacaaccgtataaccaaaacggcatagtaatggcattaaaaacagatacatagactaatggcaacagaatatagtatctagaaataaatccatatatttatagccaactgatttgcaacaaggcaccaagaatgtacacttggtggagaaaggacagtctccttagtgaatgattctgggaaaattagatatccatctgcagaagaatgaaactagacccctatctctcaccatacacaaaaatcaacccaaatggataaaagacttaaatataagacctgaaactgtgaaaccacaagaggaaaatgcagggaaatgtttctgaacattgtactggcagagatttcatggtcaaaacctcaaaggcrtgtaaaacaaaataaaaaatagacaagtgaatttatatcgaactaaaaagcttctgcacagcaaaggaaacaacagagtaaagggacaacctacacatggggagaaagtatttgctaactgttcat

SEQ ID NO: 262449 - DNA, 604 bp, Homo sapiens
gcaagtgagctatgattgtgttactgcactgcagtctgggtgacagagccagatcctgtctctaaaaaaaaataataaaaaataaataaaaaaaaaaatgaggggaaaagcaaatatccagatgattccctccacccccaaaacaaactgatttgtccttaagaatcttattttatttttaaacactttgggattttaaaaatagaattcccctgatgattctctcacttaaagacttgcatttagatcaagtaacttcaagtgtccaggcaccagaaatactgctcagaaccatatatttcccctccaacatgcagcataggtgtcagtctcataaatagggggaatgccagatgtgcccaagtrtggacttagccagtacaaaagcgcaaatatatcggacacgcagacttagacaggtttgctacataaccagagagatcactggatttactcagttccaaatgagcagctccccttttaagcttcttcaagcttggcatctgtgggactttgtaaatccccagcagagctcaggggaagtggtcctgaattgtttaacagccacagcaattactttgttttatacacgacattcttacct

SEQ ID NO: 262450 - DNA, 642 bp, Homo sapiens
actgctgttattgctgttattgcgaatacttagcactgtgctggggaggtgtacctaggaaactagcatgtattaaasaccgactttttattcatattttatctaatcctcacagcaacccaagagggaaatgctatgattatgccctgtgtgtttacagatgatgatctgaggctcaaagaaatgaggtaactaatggaaatgcagcactaggaaatgatggagcccagtttgtcccgaggtctatctgactctaaagaccttggtccctgcacctcaacacaaggacggggctttcacaactgggtgaggaaggagaggagggaagcagggagcccagaagagctgcagacgagtcaagcagaggcagctcctgtagctacaccctcgtgtcagcaaggaggacctcaactgctctgggaaactgcctgatctatgatatttaaaatgccttcttcattttgggaggctgaggctagaggatcacctgagtccaggagttcaagaccagcttgggcaacatagggagaccccccccatctctacaaaagaaattaaaaaattaaccaggcatggtggcacatgcctgtaggcccagctattcaggaagctgaagagggaggatcgcttaaggtgggtagg

SEQ ID NO: 262451 - DNA, 642 bp, Homo sapiens
actgctgttattgctgttattgcgaatacttagcactgtgctggggaggtgtacctaggaaactagcatgtattaaagaccgactttttattcatattttatctaatcctcacagcaacccaagagggaaatgctatgattatgccctgtgtgtttacagatgatgatctgaggctcaaagaaatgaggtaactaatggaaatgcagcactaggaaatgatggagcccagtttgtcccgaggtctatctgactctaaagaccttggtccctgcacctcaacacaaggacggggctttcacaactgggtgaggaaggagaggagggaagcagggagcccagaagagctgcagacgagtcaagcagaggcagctcctgtagctacaccctcgtgtcagcaaggaggacctcaactgctctgggaaactgcctgatctatgatatttaaaatgcyttcttcattttgggaggctgaggctagaggatcacctgagtccaggagttcaagaccagcttgggcaacatagggagaccccccccatctctacaaaagaaattaaaaaattaaccaggcatggtggcacatgcctgtaggcccagctattcaggaagctgaagagggaggatcgcttaaggtgggtagg

SEQ ID NO: 262452 - DNA, 642 bp, Homo sapiens
actgctgttattgctgttattgcgaatacttagcactgtgctggggaggtgtacctaggaaactagcatgtattaaagaccgactttttattcatattttatctaatcctcacagcaacccaagagggaaatgctatgattatgccctgtgtgtttacagatgatgatctgaggctcaaagaaatgaggtaactaatggaaatgcagcactaggaaatgatggagcccagtttgtcccgaggtctatctgactctaaagaccttggtccctgcacctcaacacaaggacggggctttcacaactgggtgaggaaggagaggagggaagcagggagcccagaagagctgcagacgagtcaagcagaggcagctcctgtagctacaccctcgtgtcagcaaggaggacctcaactgctctgggaaactgcctgatctatgatatttaaaatgccttcttcattttgggaggctgaggctagaggatcacctgagtccaggagttcaagaccagcttgggcaacatagggagaccccccccatctctacaaaagaaattwaaaaattaaccaggcatggtggcacatgcctgtaggcccagctattcaggaagctgaagagggaggatcgcttaaggtgggtagg

SEQ ID NO: 262453 - DNA, 515 bp, Homo sapiens
tcataggttgactgcaaaacctagtaaggtggataattccacatcataactttatkcccagtgcactcagagaaattaatcattccatcttggtccagcacagtctggctttcatgtccatcatttcagtagaagcactcccaccaagccaccaatgccttccttgttgaaaagagcatgggtactgtcattctccttcttttttaaaaaaaaaatatttcagtagtttttggggaacaggtggtttttggttatatggaaaagttctttagtggtgatttctgagattttggttcacctctcacccaagcagtgtacacgatatccagtgtgtagtcttttattccccaccctactccctgccttccccctgagtccccaaagtccatcgtatcattcttatgcctttgcatcctcatagtttagctctcacttatgagaacgtatgatacttgattttccattcctgaattgcttcacttagaataacaatctccaacttcatccaaggtact

SEQ ID NO: 262454 - DNA, 515 bp, Homo sapiens
tcataggttgactgcaaaacctagtaaggtggataattccacatcataactttatgcccagtgcactcagagaaattaatcattccatcttggtccagcacagtctggctttcatgtccatcatttcagtagaagcactcccaccaagccaccaatgccttccttgttgaaaagagcatgggtactgtcattctccttcttttttaaaaaaaaaatatttyagtagtttttggggaacaggtggtttttggttatatggaaaagttctttagtggtgatttctgagattttggttcacctctcacccaagcagtgtacacgatatccagtgtgtagtcttttattccccaccctactccctgccttccccctgagtccccaaagtccatcgtatcattcttatgcctttgcatcctcatagtttagctctcacttatgagaacgtatgatacttgattttccattcctgaattgcttcacttagaataacaatctccaacttcatccaaggtact

SEQ ID NO: 262455 - DNA, 589 bp, Homo sapiens
cagttattcattgtgtcctgctgttttaaactatccacttcgtctgtttccactgcatccccatccttctggttgagatgtctccaatagcctcctaattggtctccctgctgccatgtttgctcacccccacttcatcacccagcgggagtgatgctttcacagtgttggtcagaccatgcaactcccctgcctaaatcactgcaataaattccccttattccgagaataaaatctcaattccttcctttggcgcagtggatgttgtggtgtgctgccctgaccttcctacaagactaagacatttatttccccagtgcctgggagtrtaggtgaagccgtccctgtgaactttatagaattaatcagggaagaaagaaagggagaaacatagtagatgaagtttgcagcacactcagctttaatcatgaggttagtttgccctctgacctgcttcctcatagtttggtgcttattgtcctggaatcatgtagaccctgttacaagattatagctctccttaactactctgcaggtaacaacttgaacattataaaatgttatgttttccctttgagatattctttca

SEQ ID NO: 262456 - DNA, 589 bp, Homo sapiens
cagttattcattgtgtcctgctgttttaaactatccacttcgtctgtttccactgcatccccatccttctggttgagatgtctccaatagcctcctaattggtctccctgctgccatgtttgctcacccccacttcatcacccagcgggagtgatgctttcacagtgttggtcagaccatgcaactcccctgcctaaatcactgcaataaattccccttattccgagaataaaatctcaattccttcctttggcgcagtggatgttgtggtgtgctgccctgaccttcctacaagactaagacatttatttccccagtgcctgggagtgtaggtgaagccgtccctgtgaactttatagaattaatcagggaagaaagaaagggagaaacatagtagatgaagtttgmagcacactcagctttaatcatgaggttagtttgccctctgacctgcttcctcatagtttggtgcttattgtcctggaatcatgtagaccctgttacaagattatagctctccttaactactctgcaggtaacaacttgaacattataaaatgttatgttttccctttgagatattctttca

SEQ ID NO: 262457 - DNA, 587 bp, Homo sapiens
ctgcctcccttgcttccatttggaacatctttgagggtccaccccagttccagtgcccccacataagaccacctgcagcttctattgtcactgcagttttccctacttcctccctttgtccagcttgcttccttcccatccttatatctgttgttctcaaaaccactccccaacaaaatccctgcatgtgaatctctgctcagaatcttttcccctgggagcctgactcacaacataagtcttacaaggttctccatgacctggctccagctcaatgcccagtacaaagtggatgytcagtgagtaccttggattgattggctcattggctggttgcttggttggttggggtaaaatgcatagaacatgagaattcaggtgaagaatatctctttcacgtggtcagcactgggcatttgttcagggggcttcaggggcatgatcagtggacatccagggtagcaaatgggcaatgcagaccccaggcagctgctggtatcagtaatgaagggtatctgtaatccaggtagcacaggggtgagtagaaaggccctgccagtgacctacttttatcgttaatgcttttc

SEQ ID NO: 262458 - DNA, 563 bp, Homo sapiens
aggggaactgcctctgctttctagctgtctagctcacgtactttctatttctgcttcctgagagaagtcagtgaagatggtgacaaagatgagtgaaaacatagagaagtttgtctgaggaaatgcaggattcactgggagttttttcaaactatcccattactaacccatttcttcctgttatctcaaaatggagggaaagatataaaccacatttattgctatggactcggttgcatttgagttgggaagagatcatttttcatgtgtagctcttggggaaaagcctggcttggaattcctgccaacttggagatatatggacaaaattactaagaaataaaatgggacagtccataattaatcattgtgtaagggctggaaaggttaactttgcctgatattcttcaattctgtccccacattttgatgcaccaatgacttcctaaacaagtgttaattcaattttatgtgccaggcattacrcttagggctttgtgagtgtaattccaattaatctgaatggcaaatgaagtaggtaccatcattaacttcattttgca

SEQ ID NO: 262459 - DNA, 528 bp, Homo sapiens
acacattacgtaccaggttggtgctttatcatctctaatcttcgtaacagctccttcagttggtcttattatttacattttgcaggtgaggaaactgagactcccagaggatacacgttccaggtcacaagctagaaaaagtcatagctggtattaaaatgtagttttattggcttccaaagccttttaccctgccacatatgtaaattctttagcaatttaaatgaagccatttgggttacccaagagtacaatttggaagagattcactaccccatttcctaattatccagtgaaaatctatgtgtctaggagacttcaagcattcatcattgtaaaggctggarcaacttcaagaagcacaggtttaagacttaatttagaatgaacatggtgtattaaggagctagggagtgatattaggccacttccatcttcccaaaatcatccctgacaactcacaagcccctctcctcaatgttcctttaattaggcaaagcacagggaacatattctgcaaattgctaa

SEQ ID NO: 262460 - DNA, 524 bp, Homo sapiens
acaatccacatctttattcattcatgaaacacttaatgtgacagcctcagatgttggcaaggacatgcagaactcttctgcattattggtaaggatgtaaaatggtgcaaccacattggaaacatttcaggccatttcttataaaacgaaacacacacctgccatatgatcygatcattccattcctagatatttctccaaaagaaataaaaacatgcttaggaaaagacttgtacaggaatattcacagcagttttatttataattttcataaatcagaacctattcccagcacagtgtctatccatacaataatgtataagtaaactgtggtacatccgtacaatggaatgctacttagcaatgaaaagaataaactgttgcttcatggaaaagcatgaatgtatttcaaaaacattcagcaaaataagccttgcgtaaaagagtgtatagcacataattctatttttatgaagttcaagaatggacaaaacaaacctagagtataaaaattcagagtagtg

SEQ ID NO: 262461 - DNA, 600 bp, Homo sapiens
accttgggaaaaatggctcatcctctctgatactcagttttctcacccacaaaaaggagacattactggagagattgaatattacatccattaaaatgaagcgtgggagctatcgctggtgtgttttgtaagtggcggtttcctttcccctgttcactttgaagctgcaagtggattgttgacccgtggccaactcagtgccataaaccctgaaaatcctggtratgatttccaagcagcagtaaaactcagaatcactcacacgacttcttgtcccacttaaaattttccctgagttattcttttccttttgcaaatagaaacaagaatacaatggaaaaaagtgctacctacccaaactctgcaggtaaatatccataagtagttcaagcctaggaacggccttcaatgacggacagggcggttttgtttttgtcacatgccgggttcattataatccttggaaaagcaggttcccagagaaatgctgatacagcttgtctctgtgttgctatgatacatgcaaagcatcacacacaattagatcctgaaatacggacccaagtttttaattaccgagttcctgcctgtcttgcaggg

SEQ ID NO: 262462 - DNA, 349 bp, Homo sapiens
ttgtaccttgtaaggcattttatatggaaaacactaacatagaaatttcatcagctgccyagctagataatgcttactatgtaccttggaaatacccagtggtgcactaagattggaggcagtgacctggattgtaactcactgatgcctctgggcagtaaagggaatagacagtaagggcattggccccagaaagacctgagttggagccctggctctgctcttttatggatgtgtgatcataaacaagtcagctctcctgtcttggcctcagtttctctgtctgttacatgggtatgacatcaccatcccagggtgggttgagaggttaagcaagatgaaaagtgta

SEQ ID NO: 262463 - DNA, 401 bp, Homo sapiens
tatacaatatccatgtctctgggagttgggtgagggtgcattaggccagtatgtggagcagctggggtgcaggaaagagaacagaaacttggagactgactccaagcagcttaaagctgtctggcctcagctttctcacctgtaaaatgggaccaaacactttgattcacagaggcagtgttatagagggcaagagcctggcacgtctgaatttgtatcttggctcagccacttggaagctgtgcacccctgggaaaattccttcacctttctgaacctcaggttgtttttctgtaaaaaggggtctaatgatggcacctagacctcatagagttgttrtgcacattaaaataattaaaataatgtgtgtaaaatgcttagcctattgcatggcaaacaat

SEQ ID NO: 262464 - DNA, 608 bp, Homo sapiens
tttggtgaatggcttcacactttgccacctctgtgttgatgcttccctcaggaaaattgctccatgcctctgcattcataaatccaaacagacacacccttactttctctgtgtcttgccttctcacacataaggaacatctattatattggcattgttaaataatcatctcactagttttgacaacactccttcccattggagtaaggatggagttcgctatgatctccagcttactgggatagtctcagtcagagctttccattcctgtagcagcaggaaaggggaagagaggaatgagaaaaaggggacacttctcactggagtcaactccttttaaggagccttcctgtaagtctctcttyctccctttctgccgttatctctttacatctcatgggtcagaatgtggtcatgtggtcatgccttgcaagggagtctgggaaatgtagtcttttagctgagtgataaatgtttctcatactagcaaataagaggacatcaagtaggcactagtgtttatgtcactgtccccttgaactcacccaccacataaatagctagggcagtgatgaatgttgggtagagaacttaatttgagaagaaaa

SEQ ID NO: 262465 - DNA, 555 bp, Homo sapiens
aattgtaagattcaaaagtgctttcatacaaaatatattatttcagtccaggcattatgaactgtgctacaatatatacaggacacttgtagaaactgtgtatccatggatgcattcatttttttttttttttttgaggtggagtcttgctctgttgcccaggctggagtgcagtggcgcaatctcagctcactgcaatcactgccgtccaggttcaagcgattctcccacctcagcctcccaagtagctgggattacaggtgcctgccaccatgcccagctaagttttgtagttttagtagagacagggtttcgccatgttggccaggctggtctcaaactcctgacctcaggtgatccgcctgcctcggccttccaaagtgttggggttacaggtgtgagccactgtgccaggcyagatgtattaatttttaataacagcaaacttaactgcaatggtcataaaaacaaagggaactgcctgactcatagaactgaaatgtttagaggaagaacgagcttgaggtgcagagtgatcattcctatggcttaatt

SEQ ID NO: 262466 - DNA, 438 bp, Homo sapiens
ttaattgtcatcattatgtttttagaaygggctaattttgtcaaagtctttcttgccaaaggggttaggagaagtcaaccatggctggggttgcaagggctctgataggatacttggagcatcctcatgttaggatttgatgggactagaaggaaatggaaaaatgctaagtctagggactggagataccttgacagtggaataggatgagaatgaatagatgcaaggacaagctgggaaaatgcagaaatgatctgggtccccctagagacagtccatgtatgtatggtgcttggggtcggggcataacaaaggactgtaatagacaaacccgtagaagtagaaacagaaattatatgtcagcatggcagtcaaagatgaccacctgacatccacataaataaattctaggtggcagaatggcaaacagcttttatc

SEQ ID NO: 262467 - DNA, 556 bp, Homo sapiens
ttccatcttttggtaggggtgccgtctgtgttggatgggctgtggtgatgctcagttttatcataaccttttctgagtctgatttttcacctctgggaactcaggctgcttggtctcatctaagcatcagtgacaagctctgatggttggagttttgttttcttgagttactgcagatgggagagggaggcagggagccccacacaggtcacagtgaatgggtgcatccacctgtgagcaatgctgaacacaaactattaataatgcagcaacttctgcctttgtgtttggagctcgtgtaagatttgctgaatcacagaasttaccgatgttcaatgcagacctgtatggcaggaggattcagactcacactttgagttcaacccataatttgtacccttgatttcaaaatgcccttgggaatcaccttttatctcacaaggtggtgtgaaattctcttcagatttccaatggaaattcagtttcaatttgctttaattaacaaagtgcccagatcacttaggtgaagtctcatggagtcaacttgtcatgaaat

SEQ ID NO: 262468 - DNA, 454 bp, Homo sapiens
cttatttatagtttttaggttgtccccactgtttgactatcacagtgctgcarataacttttgtatccatagcatttctcacaagttcaaggatgatgtttttttttccaatggaattgctgggtcacatagtatgtgcgtttttaactttaaaaatttgtgccaaatggctcttcagagatgtttatcaatttatcttcccaccagcaaatatgagagtgactgtttccccacaatctcagtgccacagtttgttatcagacatgttgatttttgccaattagaaactaaaaatatgttgctatagttttaagttgtatttaacttataattagtgtggatgagcatattttggtatgtttagatattcttttttagacgaaaaaaacttggtcaatttttctattgagttgttggtctttttcttactgatttataggatttctttatcttt

SEQ ID NO: 262469 - DNA, 608 bp, Homo sapiens
taccattatatactaatatcatgtatgtatgtgggtctatttctggatttcctattctgtgattttccaccctttgagatgcctcattttgtttctgagctctaatactctttgtcccaagtcctcaaaagcatgaagaaggaagctcctgtttggttgacaggattgtagacttttcagtggcttctatttgggaccaaactcatgcttgggatggtgacttattagaaagaagggaatgagggttagaaaatttctcccgatcattaagcccaatcatcttctttcagaattcagaggtttcaaattgctgcattaaagagatagaatgaaaaatgagttgaactctgtaatggagaacaggttgatggtaataatgataatattggtgatcgtaaaccaccatcctgctggtgctgggcagcttaaatatgttatcttattgattcttacaccaagtgatacattaacattttttatttccatattacataagaaggaagtggagatgatacaaagtrgagaagggattacgacccatgtataaccaaattcaaactcaggattcctatttactctgtattgtaggatctttggcacagtataac

SEQ ID NO: 262470 - DNA, 583 bp, Homo sapiens
tagatcttgcttcaaaaaaattgttttaaagtcacagtattttgggaggccaaagtaggtggatcatttgaacccaggagtttgagaccagcctgggcaacatggcaaaaccccatctctacaaaaactacaaaaaattagctgggtctggtggtgtgtgcatgtagtcccagctacctgggtggctgaggtgggaggattgcttgagcagaggaagctgaggctgcagtgagccgtgatcatgcccctgcactcyagcctgggtgaaagagtgagaccctgtctcaataaaaaaaaaatgtagaattacaaagggaataaattattttgttggcaaaatattataaacaataaatatgtgatagaatgatacatgtacttccttaatagtgcattaaatagatccaacagcaggtctaataactatcaatatttcaacattgtgctaagcatgaatagtattttgtgatgtctacaataattgtgctgtgatggcaaagtatctgtggtttctcttggtgacaaaatcataatgtaagtatcactgtgcttgactgtctacattcagctgaaggaaatgaaa

SEQ ID NO: 262471 - DNA, 583 bp, Homo sapiens
tagatcttgcttcaaaaaaattgttttaaagtcacagtattttgggaggccaaagtaggtggatcatttgaacccaggagtttgagaccagcctgggcaacatggcaaaaccccatctctacaaaaactacaaaaaattagctgggtctggtggtgtgtgcatgtagtcccagctacctgggtggctgaggtgggaggattgcttgagcagaggaagctgaggctgcagtgagccgtgatcatgcccctgcactctagcctgggtgaaagagtgagaccctgtctcaataaaaaaaaaatgtagaattacaaagggaataaattattttgttggcaaaatattataaacaataaatatstgatagaatgatacatgtacttccttaatagtgcattaaatagatccaacagcaggtctaataactatcaatatttcaacattgtgctaagcatgaatagtattttgtgatgtctacaataattgtgctgtgatggcaaagtatctgtggtttctcttggtgacaaaatcataatgtaagtatcactgtgcttgactgtctacattcagctgaaggaaatgaaa

SEQ ID NO: 262472 - DNA, 606 bp, Homo sapiens
aaatgtttttcatgtattaactcaatgaatcggcctaagtactcaatgagataagaattgctaatatcattcccatttcatggttaaagataataaaacacacagtgtttaaataacctgctcaaagagtcaaatttcagaagttttaaggctgtaattcagacccaggcagtcagcttgcatgtaatctgtgccattgtagaggtgtctatgagagctgtagggctcagaggcacagggctctctgtcagtgaaggaagaggtgtctgaactgagtcttcaaagatgagaagtttccaggtacccaaagtgggacagaaagaacaggccatttaacctctctgaactgcatttcctcaccttaggatgtaaggtttttaagaggaatgaatgagaaatcataagtataggccttctttgaggtgcccaagggcagaagctgagcagcacagctctttctctctctctctcttccttctttctgcatttagagcccctagtctgctgccccagagaatctccarcctcaacccaaggtgtccagcccctcagctttcagggctgccaggcatctgatgaagatatacttttctgcatgagctgtaa

SEQ ID NO: 262473 - DNA, 543 bp, Homo sapiens
ggctccggtatcactccagtcatgaggaccacagtcggggtcaggagaaccacaatgcaaagtgctgtactgggactcaggacacctgggtgcttctcccagcaccacaactcattgcaataaataatcactgagttctttacaaagccattctatggtatttattgagcacctgctgtggacaaagcaagcaagggtgagcaagggctggggagtccagatataaacaagccaggcatcatctctgccctcaaggagctcagagtctagtggttaaggcagatattaaagaaatatacagttagccatggattcgaccaaccatgaattgaaartattcagaaaaagaagtgtctgcactgaacatgtatggactttgtttcttgccattattccctaaacaatgcagtataacaactatttacatagcatttacattgtattaggtatgacaagaaatatagagatgatataaagtatacaagaggatgtgcgtaggttatatgcaaatactatgcctttttattaatatataaggaactt

SEQ ID NO: 262474 - DNA, 584 bp, Homo sapiens
tggcagctgtttgtaaaatggcttgtagggcactagagccccgacagggagacccgttgcagtggtcctcctttttctaattcataatctggggccaaagactctagtgggaatggggtaagatgcacataggctcggcaagatgcaattttctccccatgaatcttggggacctcttgttatgctgcaggctctcttagttaagactcaactgctaagtaattctcattacctctcctcgctgacaggcartgaacagctgtcaagcatgtcttacaaaacaagacaattttccccccattaatgtagctcaggattgagaagagcagaggagcacacatcgcggtaaccgagcttcccggcagtgtctcggccagccccattttccagtgagcaataatttctcctgctgccctaggaggtaggaggtagaggtgcgaacagggaactaggaaggggtgacctttgggatctccctcccatttgggttcccgttgacctttcggaaagaaaccttctaactgcaacacctttggaatttgtgtgtaatttgcatctgcaattggatgggatatgtggagcac

SEQ ID NO: 262475 - DNA, 584 bp, Homo sapiens
tggcagctgtttgtaaaatggcttgtagggcactagagccccgacagggagacccgttgcagtggtcctcctttttctaattcataatctggggccaaagactctagtgggaatggggtaagatgcacataggctcggcaagatgcaattttctccccatgaatcttggggacctcttgttatgctgcaggctctcttagttaagactcaactgctaagtaattctcattacctctcctcgctgacaggcagtgaacagctgtcaagcatgtcttacaaaacaagacaattttccccccattaatgtagctcaggattgagaagagcagaggagyacacatcgcggtaaccgagcttcccggcagtgtctcggccagccccattttccagtgagcaataatttctcctgctgccctaggaggtaggaggtagaggtgcgaacagggaactaggaaggggtgacctttgggatctccctcccatttgggttcccgttgacctttcggaaagaaaccttctaactgcaacacctttggaatttgtgtgtaatttgcatctgcaattggatgggatatgtggagcac

SEQ ID NO: 262476 - DNA, 617 bp, Homo sapiens
ctgtttaattacagaataacactgtctttagtagagaacaaaagggacattattgaaaaatcccttgactaacctgtaccttttggagctacacatcatgaggctttttacaaaatgcctcataaaattacctatgaattaaattgagatctatctgggagaaggctgtaaatttccctcaaacaagcagctatctctttcagctgaaacttgtctttctaggttgccccagtccccaccactccatattgtctcagccctggttatgcatttatgtcagctgcttggctctcaagagcatttgtgttcatgactcctcgcttaaaattattctgcacggaagttgatgatggagttgtgtttaacctcaagatgtgacttagctgtgtgatcccagcaaatcaggaatcatctctgagtctcagtttccttgctggtgagatgtgaacgctgctgtggtggggagtaagggggagggaggcaggctttatgrcagctatgagcatttactcatttactatgagtcagacaagtaagactgaatctccatgctatagtttgctacccacgttcttttatttttatttatatatttatatatttatttatttgtttat

SEQ ID NO: 262477 - DNA, 537 bp, Homo sapiens
gatcatagctaactacaacctcaaattctgggatccaagcaatcctgctgccccagcctccaaagtagctgggattacaggtgtgcaccaccatacccagctaatttttaaatattttttagagacagggtctcactgtattgcccatgctggtttcacactcttgggcccaagcaatcctcccactttggcctcccgagtagctgggattagaggcaggtggcaccatgcctggccatttcattttttaaagttttggcatgtatctctacaaggtgaggacaattaagaaatamccaatggcaataccattaccacctctaaaaagtgaatgattcttttatattatgcaatatcctgtcagtgtctaggaactaaaatagcttcctctttccttctccctcctcccacatctaatccatccatgcgtcctgccaactccacactcatcctgaatccatccactctgctgcctctctgggacttccatcctagcctagcctgagatgatctctgacctggacaactgcacgtccc

SEQ ID NO: 262478 - DNA, 591 bp, Homo sapiens
ggtctcttggtttaactttgtatttgcaggtttgacctaattccttgccggctcataatataattaaagttggcatttccttctcttatccgccctccccactccccggctttccctccccgctgtgtgcctgtttatcactagatggtgctaagacttgggttatagctgccagagactctrggaaagttgttcaggagccaagcaggctggaatttgagaactggaagatgccttcagagctcatccggacagcacttttgttttacaaatgaggaaacagaaactcagtgaaaataagtaatttgtcagagacccagagatctctcccctccttttttttttctctttcttatctgttaatagcttccagtgttacctcatcacccaggaaggagcacagctcagagagcaacaaggtcagagttgctttgcagaaagcactttggcagctgcatggtaccattcattgattcatttattcattccaaaagcagttattgggtacctactttttgctttgcatagtgctagacgttgggaataaaaatcagatgagaattcctaggattctaggaattcacattctct

SEQ ID NO: 262479 - DNA, 592 bp, Homo sapiens
tttattttattttattttattttattttattttattttattttattttattttattttattttattttatttttgagacagagtctcactctgttgcccaggctggagtgcagtggcacgatctcaactctctgtaacctctgcctcctgggttcaagccatctttcctcctcagcctcctgaatagctgggactacaggcatgcgccaccacacctggctaatttttgtatttttagtagagacaaggtttcaccatgttggccaggctggtctcaaactcctgmcctcaagtggtctgcccgcctcagcctcccgaagtgctgggattacaagtgagtcactgcaccctgccttgattttattttaaatgtttgtggggaatgtggggatgaaactaacagttccctttgtagtgacctacacagttgccctcccactgtaactggtgtatgacttcggcgggtgtgggaggagtgttgcttgtgggaaatttctaaggctgatgtagacaacataatcttagggtctgtagcagctcagcaggaatgaatgagccccctgctggagtttctgagagcttcgtgaaaaca

SEQ ID NO: 262480 - DNA, 592 bp, Homo sapiens
tttattttattttattttattttattttattttattttattttattttattttattttattttattttatttttgagacagagtctcactctgttgcccaggctggagtgcagtggcacgatctcaactctctgtaacctctgcctcctgggttcaagccatctttcctcctcagcctcctgaatagctgggactacaggcatgcgccaccacacctggctaatttttgtatttttagtagagacaaggtttcaccatgttggccaggctggtctcaaactcctgccctcaagtggtctgcccgcctcagcctcccraagtgctgggattacaagtgagtcactgcaccctgccttgattttattttaaatgtttgtggggaatgtggggatgaaactaacagttccctttgtagtgacctacacagttgccctcccactgtaactggtgtatgacttcggcgggtgtgggaggagtgttgcttgtgggaaatttctaaggctgatgtagacaacataatcttagggtctgtagcagctcagcaggaatgaatgagccccctgctggagtttctgagagcttcgtgaaaaca

SEQ ID NO: 262481 - DNA, 563 bp, Homo sapiens
gctttctggggtctgcctcactggcctcctcaaacatgctgaaatcttccctgcctcggagtcacttagtttgctatgtcctctgcttgaagctcttgcaacagctcttcccaaggctggcttctcattctcaggtcaccatcaaatgccatctccctggccacttccctggtaccctcctggactacccactcctgaccmtatcacaccacagttattaacaaacactctcattacttgtttattatctgtctcccctctgaatatgagattgaaaagagcaggggctgtgtctacctcttcactgatgaatccttagtgtacagcaaatgcctggcacaagtgggtgcttaacaaacttgtgcagcatggaataaatgaatgaataaatgaggcccctttcagaagtgctcagagaaggtggcccagtgagtgcatcagacagggaggctcgctttgaaggcaggataatcatttcttcttatgttcatctaacactttaatacttttaacttttcaaaggccttggggctcatttgagccttacaactgcccaacagtgg

SEQ ID NO: 262482 - DNA, 621 bp, Homo sapiens
cttgcattaaggccaaggtggtagagatgcaatggagatgagcaatttaaaatattcacagagagaaatcaaaggactttctaattaggcagttatggggtttggaggataaaataaaagcgaggcccagcacagtagctcatgcctrtaatcccaacactttgagaggccaaggcgggagaactgcttgagcccaggagttcaagaccagcctgggcaacagatgagacctcatctctactacgaaaaaaacaaacaaacaattagccaggcttggtggcgcaagcctgtagtcccagctacttaaaggttgaggtcgaaggatggcttgagcccaggaggttaatgttgcaatgggccgggatcgtgccactacactccagcacggacaacagagtgagaccctgtcttgaaaataaaaaataacaaggaatataagaaagccccccagtttccagcctgcataaaagggtggatggaattcagagagtcaacacagaaggaagaactgatcatgcatgctagaatagacatctaagagaggaagttttttgcttggttgaaaatggcttagaagtcactggcataaacacatcagttagaagccataagaacagagga

SEQ ID NO: 262483 - DNA, 512 bp, Homo sapiens
ctgtcctcattgctctctctctgtctcctgcctcatgtaagatgtgcctgcttccccttctgttatgattgtaagtttcctgaggcctcctcagccttgcagaactgtgagtcaattaaacctcttttccttataaattactccattatcaggccattctttatagcaatgtgaaaatggactaatacaatcayctacctgaattgagtttgatataatttagaaaacacagaaaaattttcaaattttccaatttccaaatgtggggaggatttaggaccttaggattctagttttcacactggagtttttcaaacgttctcctaatttgaactaccttgtaatttttctctaaaaaggcactgttctaatgggcaccaagtataggtcacaatggtttatctcgagaatctaatagtccagataatttagatttctcactttctagctctactgagggaacatctaacctctctaagcctcagttctgtaattcagaagtgttgatgcta

SEQ ID NO: 262484 - DNA, 481 bp, Homo sapiens
tatttgatcaatcattattctggatatttctgtaaaggtgtgttttgcatgagattaacatttaaatctgtggacattgagtaaaacagattaccctttataatgtggatggatgtattagtccattctctcattgctataaagaactacctgagactgagtaatttatagagaaaggtttaattggctcacagttccacaggtrtacaggaagcatgactaaggaagcctcaggaaacttacagtcatggcagaagacaaagggggagcagacatgtgttacatggctggagcaggagaaagagagagaatggggaggtgccatgtacttttaaacaaacagattgtgtgataactcactatcagcagaacagcaccaaaggagaaatccatccctgtgatcaaatcacctcccaccaggccccagacctccaataatgattattgcaatttgacataggatttgggcagagacatagac

SEQ ID NO: 262485 - DNA, 521 bp, Homo sapiens
aatctggtccattgtcctgtgagttcttccggtaaggaacaaggcagcaggcacttgcagaaatattccctaattgtggaagaaggagcttaccccctttactgacatattttttcctgttgatctcctcactctgctcttgtttgctttgttttgttttgtgttggttgtttcctgttgaggcagaaatatggctycccgttagcataatgctctttactgctagcttacaaaacccacggttttttaaaggtcctcttcataatatccatgggcctcagtgatattcttaaagtaggcattgtttccattatttatcctagaaaataacaacaatgataatgacaacaaaacggaaaggcggccagcttcagttgttctttaggccaagttatgagatcagccaattcaggctgtgttatgcaatctcaccaaatagtttattatattttgctagaacctccatgcagacattttgctttttatttcaaatgctcatttaatattagttatttggcaca

SEQ ID NO: 262486 - DNA, 521 bp, Homo sapiens
aatctggtccattgtcctgtgagttcttccggtaaggaacaaggcagcaggcacttgcagaaatattccctaattgtggaagaaggagcttaccccctttactgacatattttttcctgttgatctcctcactctgctcttgtttgctttgttttgttttgtgttggttgtttcctgttgaggcagaaatatggctccccgttagcataatgctctttactgctagcttacaaaacccacggttttttaaaggtcctcttcataatatccatgggcctcagtgatattcttaaagtaggcattgtttccattatttaycctagaaaataacaacaatgataatgacaacaaaacggaaaggcggccagcttcagttgttctttaggccaagttatgagatcagccaattcaggctgtgttatgcaatctcaccaaatagtttattatattttgctagaacctccatgcagacattttgctttttatttcaaatgctcatttaatattagttatttggcaca

SEQ ID NO: 262487 - DNA, 497 bp, Homo sapiens
tattttctcctttcttattttcttttccttctgggactctcaaaatgtgtgttagttcacttgatgatgtttcataggatccttaacttctgttaamctttttcaatctttgttctttcttttctttagattcaatttttattgtcctgttttcaagttctctgattctttcttctgtctgctcaattatgcctttgaatctgttatggtttgaacatggtttatttttcctcttcaaatctagcattgaaatttgatccccaatgttggatgtcgggcctaattgcaggtgtttgagttgtgggtgtaaattactcatcaatggctttgtgccattctcgtgtgcataagttctcactcttggttcccaaaagaactggctgtcttcaagaggctgattcctcctctttcctctcttgccttctctctcaccatgcaatctgcccacactcattccctttccccttctgccatgagtggaagcagcctgagattcc

SEQ ID NO: 262488 - DNA, 569 bp, Homo sapiens
agaaataaattcatgcacctatagccaaatgatttttaacaaaagccaagaaccaacattagagggaatagagtctttttagtaaatggtgctggaaaaattttatatccacatacagataaatgaaaccagatgcctacttctcaccatgcacaaaaaccaactcaaaatgaattaaaggcttaaatgtaaaagttcacactataaaccaactagaagaatacattggggaaatgctgatgatgttgggctgggcaaagattcatttccaaacaactcaataataataataaaaatctgatttaaaattgggcaaagaccttaatagacatttttcaaaaaaaagtcatacaaatggccaacaggtatatgaataaaagctcgatatcactaattgtcagggaaatgaaaaccaaaaccacaataagactctacctcatagcagttagggtagctattatcaaaaaggcaacagatagcaactgttggcaaagatgtggagaaaaaggaacacttgcacactgttggtaggattgtawattggtagtcattgtggaaaacagtatgga

SEQ ID NO: 262489 - DNA, 635 bp, Homo sapiens
gctgcattgcgatgtttttgttagaaattttattaaccacacaatccatagttattattgttgctttaaacagtcacttagcttttaaataaattaaagtgtgaagacatttaaaaaatactttcccaaattaaaaataaaatggtgcagaagtcataatgtaatcaatgaattttcaaaggaaatgcaccttttaatccgcactccaatttaactaaaagacaattacctgccttcagacggttcatgtctcctccatttattatycattccactgtcgccaatgataatcaccgtactgatttctagcgtcatagataaatgtgtgtgtttgaactttacgtaagtgaaacctacgatatgctctttggtgtattttgctcaacgttgtttcaaaatttgtgcatattgtgtgtcatagacttttgattatcattgctgtatagcaattcagtgtgtgaatgtgtcaccaactaatgatacatttcacttttgaaggtatgttattagtgtttaggttaggcctgttctttctatttctgttgtgaatgttttagtactttgttttttctgccatttattttggctctaaccttatggctgcatttaaaagttctacaggatgcaaatgttca

SEQ ID NO: 262490 - DNA, 635 bp, Homo sapiens
gctgcattgcgatgtttttgttagaaattttattaaccacacaatccatagttattattgttgctttaaacagtcacttagcttttaaataaattaaagtgtgaagacatttaaaaaatactttcccaaattaaaaataaaatggtgcagaagtcataatgtaatcaatgaattttcaaaggaaatgcaccttttaatccgcactccaatttaactaaaagacaattacctgccttcagacggttcatgtctcctccatttattattcattccactgtcgccaatgataatcaccgtactgatttctagcrtcatagataaatgtgtgtgtttgaactttacgtaagtgaaacctacgatatgctctttggtgtattttgctcaacgttgtttcaaaatttgtgcatattgtgtgtcatagacttttgattatcattgctgtatagcaattcagtgtgtgaatgtgtcaccaactaatgatacatttcacttttgaaggtatgttattagtgtttaggttaggcctgttctttctatttctgttgtgaatgttttagtactttgttttttctgccatttattttggctctaaccttatggctgcatttaaaagttctacaggatgcaaatgttca

SEQ ID NO: 262491 - DNA, 635 bp, Homo sapiens
gctgcattgcgatgtttttgttagaaattttattaaccacacaatccatagttattattgttgctttaaacagtcacttagcttttaaataaattaaagtgtgaagacatttaaaaaatactttcccaaattaaaaataaaatggtgcagaagtcataatgtaatcaatgaattttcaaaggaaatgcaccttttaatccgcactccaatttaactaaaagacaattacctgccttcagacggttcatgtctcctccatttattattcattccactgtcgccaatgataatcaccgtactgatttctagcgtcatagataaatgtgtgtgtttgaactttacgtaagtgaaacctacgatatgctctttggtgtattttgctcaacgttgtttcaaaatttgtgcatattgtgtgtcatagacttttgattatcattgctgtatagcaattcagtgtgtgaatgtgtcaccaactaatgatacayttcacttttgaaggtatgttattagtgtttaggttaggcctgttctttctatttctgttgtgaatgttttagtactttgttttttctgccatttattttggctctaaccttatggctgcatttaaaagttctacaggatgcaaatgttca

SEQ ID NO: 262492 - DNA, 635 bp, Homo sapiens
gctgcattgcgatgtttttgttagaaattttattaaccacacaatccatagttattattgttgctttaaacagtcacttagcttttaaataaattaaagtgtgaagacatttaaaaaatactttcccaaattaaaaataaaatggtgcagaagtcataatgtaatcaatgaattttcaaaggaaatgcaccttttaatccgcactccaatttaactaaaagacaattacctgccttcagacggttcatgtctcctccatttattattcattccactgtcgccaatgataatcaccgtactgatttctagcgtcatagataaatgtgtgtgtttgaactttacgtaagtgaaacctacgatatgctctttggtgtattttgctcaacgttgtttcaaaatttgtgcatattgtgtgtcatagacttttgattatcattgctgtatagcaattcagtgtgtgaatgtgtcaccaactaatgatacatttcacttttgaaggtatgttattagtgtttaggttaggcctgttctttstatttctgttgtgaatgttttagtactttgttttttctgccatttattttggctctaaccttatggctgcatttaaaagttctacaggatgcaaatgttca

SEQ ID NO: 262493 - DNA, 603 bp, Homo sapiens
cagttatatatacagctacccactccgcctcctgaaagcagtgcataagagtttctgttgctccatatactttccagcatgtggtatgttttrtctttagcatgatagctattatattatagtaggtatgcagggatactactgtattgacagctgtatgttttttcttctcctacttcttgaacccctagcttcatacctctactgggctattaagccacctcgtgatatcctcatgacaatctggtaagataagatgatgcaggcggggtggaacagagatgtttacctgtccaaagaaggaccacatggaacaagccggagctcttgaactgatctgggacaatgccaagaatgtcctcctccactaaaatgttgacaccaatgacagcaactccttaattcccctctagatccatgtagatgttgagtttttacttaaatattaactattaacaaatactagttcaatcataggatggagacaaataaaaaccccatagacacatagtagaaaacagaactgaaactcagctgtggtttaaaaggcagagtaatatttggcaaatcactggacttccctgagccccgaatttctaaact

SEQ ID NO: 262494 - DNA, 603 bp, Homo sapiens
cagttatatatacagctacccactccgcctcctgaaagcagtgcataagagtttctgttgctccatatactttccagcatgtggtatgttttatctttagcatgatagctattatattatagtaggtatgcagggatactactgtattgacagctgtatgttttttcttctcctacttcttgaacccctagcttcatacctctactgggctattaagccacctcgtgatatcctcatgacaatctggtaagataagatgatgcaggcggggtggaacagagatgtttacctgtccaaagaaggaccacatggaacaagccggagctcttgaactgatctgggacaatgccaagaatgtcctcctccactaaaatgttgacaccaatgacagcaactccttaattcccctctagatccatgtagatgttgagtttttacttaaatattaactattaacaaatactagttcaatcatrggatggagacaaataaaaaccccatagacacatagtagaaaacagaactgaaactcagctgtggtttaaaaggcagagtaatatttggcaaatcactggacttccctgagccccgaatttctaaact

SEQ ID NO: 262495 - DNA, 583 bp, Homo sapiens
ttggtttgtaatctgtgggtctcactggatgcatcaggaaaagcagaggtaaccaagtagaatctccaggaggaggaaaaagcattatccttaagccaaagtcagagaagggatggataaggcagtgatagtaagtgttgctagcaagaaaacaacatctccatagatagttatatatatggcctttcatcttcaataagtcagaaagccctgagtttttttatctttatagcttgaaaatgaacattaatttgaatgggaatgtgataaacatatamataaaaatcaagatctagcattaacagaattaataattgttacaaggtcctgaataactcataaattaattgaaggaatgggtgtgtttcttgaaagagtcagcatcagagagactcatgcctctctgtcaaacacataaagcaggaataaacacaaagggatggaagatgctcatggagtggtcctggccaaggtaatattatgagttcttctttgatctctctagtctgaaaataaaatggtagaaagctgacgacgatttttgttttcaacatagcgctccacattgtttcctgtcaaaatt

SEQ ID NO: 262496 - DNA, 583 bp, Homo sapiens
ttggtttgtaatctgtgggtctcactggatgcatcaggaaaagcagaggtaaccaagtagaatctccaggaggaggaaaaagcattatccttaagccaaagtcagagaagggatggataaggcagtgatagtaagtgttgctagcaagaaaacaacatctccatagatagttatatatatggcctttcatcttcaataagtcagaaagccctgagtttttttatctttatagcttgaaaatgaacattaatttgaatgggaatgtgataaacatatacataaaaatcaagatctagcattaacagaattaataattgttacaaggtcctgaataactcataaattaattgaaggaatgggtgtgtttcttgaaagagtcarcatcagagagactcatgcctctctgtcaaacacataaagcaggaataaacacaaagggatggaagatgctcatggagtggtcctggccaaggtaatattatgagttcttctttgatctctctagtctgaaaataaaatggtagaaagctgacgacgatttttgttttcaacatagcgctccacattgtttcctgtcaaaatt

SEQ ID NO: 262497 - DNA, 604 bp, Homo sapiens
ttgccaattgaaagtaatggcaaaacagcaattacttttacaccgacctaatagttcccaaggaattaatcactattcttatgctaatcactactagatttatacatttaggcaagaattctcggtgattatgatatttttatatctaaactttctatagccctggaataatcccatatgtatctcaaacacaacttcccagaatttatcttttgatttgcattaccatgacctgccttctatcatctactcagttttccatgcagaatatcaatggagacattaaagttcccccgttctttcaaacactccatatgatacatgagcaagtttcagaaactttcataaaagtgatctcaaatctgtacagttctctgttgactaccatgttaatttagtgtgccatgtgtgtagatgtgtacacaattatacatctgaacagttgaagttgtactctgaatggtataccctaaattttacttagtaaagttgcacctttstgtacataagtgtgatatttttaacgtgtaaaaattagattacactcatattgtatgattctatttcattgaaatccaaatgaaacaaaactagtaataagaaa

SEQ ID NO: 262498 - DNA, 554 bp, Homo sapiens
tttccaaaccattctgtgtgctagaatgccccttgccctataattcattggccttagtctttcagccttcaaatctccttctctatgtggcccttcgcaaccttttttggccatatttatctctcctccatgcttccgtagcatgttcttttgctatgttttcctgctctttagaatttatttattgttagtggartatacttgatagatatttcaggtaatatttcatatgtattgaaaagcacattgtattttttggtttagaaactaatgatatatgattccatatggttcataatttgtttataagtacaaatatatagatatatttatacatatttatgtataaatatttatatgtgtatatgagtaaattctgttgagtcatttacattttctacatcttatttttgttctgcctaacctattgaatttttaaggtggtatgttagaaagaaatatactttttcttagaattgtttctgatttgttgaagttgttgaagtctataatattatgtcttcattgtgggttgaatttttatcaaattaaaa

SEQ ID NO: 262499 - DNA, 512 bp, Homo sapiens
ttctcatctcagccacattctggaagaccacaacttctattaccagtgtgggaccctcatccatgtttccagaaggaacaaaacagatttatattacaattattgtctatgtttgtactaatctatctggaagataccatttatttgttctgatttttcctctgaatgagcctcacttttctcttttctttgtactctttatagtattttagttagccaagtttgtatgtaactgcagataaaattgtgtgtaatttttgattttgaaaaagtactgcatggagagatgctaaaagtacaaaattacattgtttacccttacagacatacarggaacaaatatttgactatcctccccaaattattgccttacttcacctctttttgtggtgtgactgtaggtatggctatctaatataatggtggggaagacttcactatcccaccaatgatgtcccttattccccacctaagggctcttgccttgttcaatcacaattattcaagaaagt

SEQ ID NO: 262500 - DNA, 591 bp, Homo sapiens
aaaagcttcttataggctggatgaaaagctaggaaaatatatttttttgctggggaaaatcagggaattaaaaagtgcccacatataacggagaaacaaagccacgtacatgtcaaggatagggcacatgctcaggaaagagtcgagaaaactctaagctttcaccacaggtggatctcttggctcagtgcaagcagcaagtgagggctgaagcagacttgtcatgacctggctaagtgctaaagatgtatctcagcacaatgccaattcataaatcctggaagtagtattgtgtttttttttaattgttgctttattcaatttctgtagctccaggcatttaaggaaatctgtgtcaaaacactagttaaacacaaactaaagaaaagagacttcggtgactacacatcacaaggaaacaagtcattaataaatattagagaagtcacaaagcaaatgaacattcacaaccttcaaatatcaataacagcaaaacctagcaaargtggaaaatctggtgttcaggacagttacattattgcatttcttgcttaaaatggaaaaaatactgtaaagactacaaagagaaaa

SEQ ID NO: 262501 - DNA, 596 bp, Homo sapiens
ccttttggagttgatttctagttttattctgctgtagtctgagaagagacttgatatgattttgatttttaaaaatttattgagacttgttttggggcctatcatatgggctggtctgtcttggagaatgtttcatgtgttgatgagaagaatatatattctgaagatcttaggtagaatgtcctgtaaatatctgttaggtccatttgttctagctgttgtttaaccccattgtttccctattgatttcctgtcttgaagaactacctatgcagtactgkctgtggtacattgaagtctcccactattactgttttgctgtctatctcacttcttaggtatagtaataactgttttatgaatctaggagctccagtattgggtgcatataaatttaggattgtgatatcttcttgctaaattgattcttttatcattacataatgactatctttgtcattttaattttgttgctttgaagtctgttctttctcatataagaatagctactctgacttgcctttggtttccatttatatgaaataacttttcaatccttttaccttgagtttatatgaatccttctgtgctaggtg

SEQ ID NO: 262502 - DNA, 487 bp, Homo sapiens
gatctgagtttgacgagtaagcaaagtccagacaaaaatgtggttaaaagaaccagaaaacaaataaaagtctgaggttccatctttgattgatgcctgtgtttgagtttcaccttactacctctttggaaggggcatagtagaatcataactgctaaagttttgtaatgatgctcacaccaagtctcttcctgcaaaatgttagaaaacacttgsgataagacagagtgatttcaataaaaaatgatattgcttccactaacattaaatgttaaggtgaaaagggtccatagtgatggatcattatttcaaaaaggaaaaaaataatatgaaaaggaatagtggttcctcttgatgtatagtatgcctgtattatggttttataaaattgtgaacttgtgtaataatataataggagatactgttgaatttctaactgtttatacatttaaattcatatatgttatgttcattttatcaatcacaa

SEQ ID NO: 262503 - DNA, 579 bp, Homo sapiens
aatattgacctgcatgtgaatcttagcactggctctctgccggcagcattacccaaccagataattcagccagttgctacacccaccactgaagccaaactagtcgcactgtttggccagggtgcagtaactgagagccctgcctggcttaagtctcagctagttgccctgcccagccatagattccagcctatgtatggctctgactgggaaggaaaccaaaccagcagcccttccaaaataaggagcatagtctatggccttacccaactatggaatctggccagtgatctcacccaccacacagcccagcctacctctacccagccacggagtacagccctcagcttkcatagctgtggaacccagtctacagataaattcagttgtacagcatggtgcatgaccctgcctgggcagggagcccagccagcaaccccatatagttgcaaagcatattttgctgcccagcccaacctgctagattagtactgaccctgacaaaccacaaagcatagccagtggccctacccagtgaaataatccagccagggaccttgcccaactgtaatatcacat

SEQ ID NO: 262504 - DNA, 427 bp, Homo sapiens
atcctgtgtaccatttcaagattattgtggccatgttctctaactgcattgcacagatgcaatcagacagtggctcatcttggcctgtgctgcatacctctcccttcctaatstggggggtcttttctgatcccatggcaagggacgcctgcagaacctgctctttgctcacatatatgtactccacagtgtaggaggctaatgcccacagggctatctatgaccaagtggagacaatgaataaatccacccctttgtctctggagcattttattctaagatatatttcaaaaagcaacttatagaagatgccagctgacagagccttcagtcacccacagcaatgaccaataccttaacacaaatgtatgtagcctttctctcttctcttgtgttactccccctgtcctttaatcccactccctgt

SEQ ID NO: 262505 - DNA, 590 bp, Homo sapiens
taattactcatttacatatgtaaggccatacataggaaatagtactgttttctagctactcaaagaggtgacgatacctttcattccttaaataaccaagtgtatttttaggtgacttctgttcaatcaatagttttctctaataattgaagctggctcctgtgctttctgttgtgattttcattgttgttaaacatagacagcaatgtatattatttgttgacagaacgtttctccatatcactgatactagaaagaaactgcagcccaagtgacagttttttcaaacaaccgaaaatattataccacgtctgaaacaaattgagagtaatattcttgttttgggaaatgcyagaccttgttgcaagggttataggtaaaaatactgtgcacacagaaacagacacatataagcaggagagaggtttatttgcatttctgaacttccccactgacataattactcagcagagaaaaaaaaaaagtttctacctctccaatcttcaacgaccatttacattcacaatgttcaagagatctaacacttttaggcactttggagatttaacggtggaggagaggagaaagac

SEQ ID NO: 262506 - DNA, 590 bp, Homo sapiens
taattactcatttacatatgtaaggccatacataggaaatagtactgttttctagctactcaaagaggtgacgatacctttcattccttaaataaccaagtgtatttttaggtgacttctgttcaatcaatagttttctctaataattgaagctggctcctgtgctttctgttgtgattttcattgttgttaaacatagacagcaatgtatattatttgttgacagaacgtttctccatatcactgatactagaaagaaactgcagcccaagtgacagttttttcaaacaaccgaaaatattataccacgtctgaaacaaattgagagtaatattcttgttttgggaaatgctagaccttgttgcaagggttataggtaaaartactgtgcacacagaaacagacacatataagcaggagagaggtttatttgcatttctgaacttccccactgacataattactcagcagagaaaaaaaaaaagtttctacctctccaatcttcaacgaccatttacattcacaatgttcaagagatctaacacttttaggcactttggagatttaacggtggaggagaggagaaagac

SEQ ID NO: 262507 - DNA, 610 bp, Homo sapiens
tctgtctccagttgcattcttctgcataaggatatcaaagttttcaaacactatgtattgaagaggttattctttccccattttgtattttcagtgactttattgaatattcattgaccatacatgtttaagtttgtttctggtttctctattrtgttccctcggtctacatatttgtgccagtaccatactgttttagttactgtaagtcgtaatataatttgaaataaggaagtgtgatgcctcaactttgttcttgtttccttgaaaattactctgggtatttggagcgtttatatggttccatatgaattttagattatttttttcaatttttgtgaaaaatataatttggattctgatagaaattgcattggctctgtagatagttttgagtagtatgaatatttttaaaatattcttccaatctagaaatattgcatatcttcctatttacatgtttctttttcagcttttttcatagcgtttaatggattttagtgtacagatctttaacacccttggttcaatttattctaattattttactatttttgatgctattgtaaatggcattgttttcttaatttctttttcagagagtttgttg

SEQ ID NO: 262508 - DNA, 517 bp, Homo sapiens
gtagaggctctgctgaggaattgttttccttgactttttcagcttctagagagcacctgctttccttggcccttcatccctttctaaatcttcaaagccagcacaatagcatattaaaatttctacctctctggtctctgtttctatcgtcacatttcctactctgagcctcccgcttataaggactctgatatggtttggctctgtrtccccacccaaatctcatctcaaattgtaatccccatgtgcagagggagggaggtgattggatccccacgctgttctcatgaaagtgagtgaattctcatgagatctgatggttttcaaagcagcagttttttaccctgcgctctcacttctcttttttgctgctttgtgaggaagctgcctacttccccttccaccatgattctaagtttcctgaggtttccccagccacgtggaactgtgagtcaattaaacctcttctttataaattacccagtctccagtagtatctttatcagtgtgagcacgg

SEQ ID NO: 262509 - DNA, 493 bp, Homo sapiens
gaactaccatctttacaggggtaattagtcctattaataaaaagaagtcagggctgctgttgrtggtggaattgtcaaaatgagggcagaatgaatgaatttggcacacacaagtgattcacttgggtgcctctttgtactcccttgcctgattttgatagtaattggacaagttcaataacttctgcttacaatggatatggtaaacatgagcttaaatctgtcaagcatatggatctgggttatgtcactgggggaatctgctatgccagatggggaactagctgagtgtggaaggagtgtagaatggcatcagaggtgaaagaatagtagttgcaactctgacagcagctgttgaggagggattagagttcattctactagcctccctcataggttttcctaggaatcctggggcatctgcttctagaactcaattgaaaagagtcccctccctcatggatatacttctatttgaccattacttacctga

SEQ ID NO: 262510 - DNA, 632 bp, Homo sapiens
gactacaggtgcccaccaccatactcggctaattttttgtatttttagtaaagacggggtttcaccttgttagccaggatggtctcgatctcctgacctcgtgatccacctgtctcagcctcccaaagtgctgggaatacaggtgtgagccactgcgcccagcccttattgtgatttttctatctgagttcttaagcttgcttctggaagcatctgagacttagaaaaacaamaagagagaatagtgaaaatggggcttcctcacaaaattaaggtgcatgattttttcttctcctacatgctgaatgtatattcatacagtagcaaataatctacattttcttagacactttttcttagattaattagtttttcaaatgacattgatgtctttgtcactatagtggcattcctgaaccaggtttctgttggatttttgtgagtcccaaaccctcttttaacagaatcatttaagaaattgttttagcaactattctgtcatttttttgacatctggatttgttttcctgcaagtctgtcagaagacaagtgtagatttatatgtagacatactatgaaaactgcctattcactgaaagtaatatatgtgtgctacagctttatcatattgc

SEQ ID NO: 262511 - DNA, 425 bp, Homo sapiens
tatctaactggttgtttttagtattccctgataattcttttttatttttgtaaggtcagtaataatgtccctctttcatttctgattttagtaattagtctgttttcttttgttggtcagtctagctaaaactgtctattttgttgatcttttcaaagaaccmaatttggttacactgatttttttctctctcccacttctcactctctatttcctttatttctgctctaatttttattgtttctctctcttgctctctctctctctttttttttttttttttgagatagggtcttgttctgttgcccaggctggagtgcagtggtgcaatcatggctcactgcatcctcgacctcccaggctcaagtgatcctcccacttcagcctcctgagtagctgggactgcaggtgcacaccaccatcgc

SEQ ID NO: 262512 - DNA, 469 bp, Homo sapiens
tctagagctagaggtgaggccatatgtgggagatggagagagatggctaatgggtacagagtttctttttggagtgatgaatatattctaaaattgataatggtgatggttacacaactttaaagaaagtaaaaaccattgaattgtacaatttaagtgggttgagttgtgtggtatgtagatcatgtctcagtaatactgttttttttgtgtgagtggaaaaaaagatataaaggagtcagactttagggagatcaactcaaatatctgtgtggcatttaaaggatttttaggtttttaaaraaaagaaaaagcatgtaagattgccagtttgtagctatctgttcatggtggaaaacagtaactttttctcatgttcatcctagtcacaaacattgtgatgttacttcagacataatcattctaaaaggcagagataacttcagttttttaaagataaggagtgcac

SEQ ID NO: 262513 - DNA, 469 bp, Homo sapiens
tctagagctagaggtgaggccatatgtgggagatggagagagatggctaatgggtacagagtttctttttggagtgatgaatatattctaaaattgataatggtgatggttacacaactttaaagaaagtaaaaaccattgaattgtacaatttaagtgggttgagttgtgtggtatgtagatcatgtctcagtaatactgttttttttgtgtgagtggaaaaaaagatataaaggagtcagactttagggagatcaactcaaatatctgtgtggcatttaaaggatttttaggtttttaaagaaaaraaaaagcatgtaagattgccagtttgtagctatctgttcatggtggaaaacagtaactttttctcatgttcatcctagtcacaaacattgtgatgttacttcagacataatcattctaaaaggcagagataacttcagttttttaaagataaggagtgcac

SEQ ID NO: 262514 - DNA, 597 bp, Homo sapiens
aaatccctcctggctagagcctggcaatatttatgatcctcagaggtgtggccatgggttcaagttataagtaggtttaaaaacaataccaaaagctaaggtgtggggaaaacaagcttcagaatctatcaaaccaccctaccttctccattaacctcatcaccatcttaaatcatttctctcttaagcaagtctttctcaccttccctgtccttgtttgactcaatcttttaytttggaattttcatttctctttgctctgcttcccatgaaagaccatcagaatgagaagctgtcttttaaaaatatagtgaggtcccagaaagcaatctataatttaaaaaggttgtttaagccctgcacactgcctgacacagaccaggtaccccacaaatacatggttctgaaggaatgatagtaattttaggaacctcctttgtatttctgaagaaaattatacttattaccaactgtgcttttgctgcatagtatgtaataaatttgtgattaataaataacataatgaatcctttagaatgaagtgaacaagaggcaaattagaatacaaactttttcaacaaagtgaatggctactta

SEQ ID NO: 262515 - DNA, 597 bp, Homo sapiens
aaatccctcctggctagagcctggcaatatttatgatcctcagaggtgtggccatgggttcaagttataagtaggtttaaaaacaataccaaaagctaaggtgtggggaaaacaagcttcagaatctatcaaaccaccctaccttctccattaacctcatcaccatcttaaatcatttctctcttaagcaagtctttctcaccttccctgtccttgtttgactcaatcttttattttggaattttcatttctctttgctctgcttcccatgaaagaccatcagaatgagaagctgtcttttaaaaatatagtgaggtcccagaaagcaatctataatttaaaaaggttgtttaagccctgcacactgcctgacacagaccaggtaccccacaaatacatggttctgaaggaatgatagtaattttaggaacctcctttgtatttctgaagaaaattatacttattaccaactgtgcttttgctgcatagtatgtaataaatttgtgattaataaataacataatgaatcctttagawtgaagtgaacaagaggcaaattagaatacaaactttttcaacaaagtgaatggctactta

SEQ ID NO: 262516 - DNA, 590 bp, Homo sapiens
attccatttccttatctgtaaaatgggtaacaatgtatctattcctcctaaataaagtattttcttgggattttaactgagttcatataagataatgtagataaagcacttgccaattatttactagtcactgctttactacttattgataactctattmgagatacagtattagggatatagcaggaagaacgggatttggttctttggttatagcctggaggtctgagtttgagtcctggttctgttactgatgagttttgtgatctgggaaaagtaactttttctttcagacctttttagtttttttttcttcagcttttaagttcaagggtacatgagcaggatgtgtgggtttgttacataggtaaaagtgttccatggtggttggctgcacaaaccattccattacctaggtattaagcccagcatccattggctattcttcctgatgctctccctcccgctgcctctctcccccacacaggccccagtgtgtgttgttccctccctgtgtccatgtgttctcatggttcacctttcacttataagtgagaacatgcagtgtatggttttctgtacctgcatta

SEQ ID NO: 262517 - DNA, 590 bp, Homo sapiens
attccatttccttatctgtaaaatgggtaacaatgtatctattcctcctaaataaagtattttcttgggattttaactgagttcatataagataatgtagataaagcacttgccaattatttactagtcactgctttactacttattgataactctattcgagatacagtattagggatatagcaggaagaacgggatttggttctttggttatagcctggaggtctgagtttgagtcctggttctgttactgatgagttttgtgatctgggaaaagtaactttttctttcagacctttttagtttttttttcttcagcttttaagttcaagggtacatgagcaggatgtgtgggtttgttacataggtaaaagtgttccatggtggttggctgcacaaaccattccattacctaggtattaagcccagcatccattggctattcttcctgatgctctcyctcccgctgcctctctcccccacacaggccccagtgtgtgttgttccctccctgtgtccatgtgttctcatggttcacctttcacttataagtgagaacatgcagtgtatggttttctgtacctgcatta

SEQ ID NO: 262518 - DNA, 602 bp, Homo sapiens
taatactctgtgctgtgggcactgcacccaataaatgttgattcatgaagtgtgtaggcaaattgcccattgcgtctacctgtcagccagtatatgctcaatgcgcttattgcactatgcttgcctgcttcctctatgagactaggagctctttgcggaaagtgtctataactcattcatttctatcatagtttggactttcatttcaaaatgtcagaaatgaaagttaaactagattaacagaaaagtggagaggggtttatgcataagatacccacagtactttaatttcaggcatagctgcatatcaccactatgatgaccctactctcagggggcaagatggttgccagcaaccctgggattatcttccatcctctttgctaaccccaggtgtcccagaatttgatttttattggcacygatcttgttgcctgtttatttctgaaccaactactctaggtcaacgatatctgatgttctgactagtcagtatgtaaaacatgtcaccttcccacagactgcatggacttgaggaagaggtggggagggtagatccttaaggaaagcttcaacgttatcagatgactggagtaatgaat

SEQ ID NO: 262519 - DNA, 556 bp, Homo sapiens
ttccttttaagcattggtttagcaatgcaactcaacacaaaatgtgttttaatgtttcgtgtggtttgttctttgaccagtattatttagaattgtgttgcttaattattaaatatttgggattttcatagatatcttatggttctctaccttaatgtaatacatttttgtaagagaacatactctgtacgatttcagtgttcatatcttgttggtggacatatccattattattaaaaaatgttctttgtgtctagtaacattttttgttcttaaagtctgtttatttaattttagtacagccactmcaactctcatttgttaccctttgaatatttttcctaccctcttaatttcaacttatttgtatctttgaatctaaaatgtgtctcttgtagacagcttgtagttgcattatttttttaaatctattcagccaatctctccttttacttggctatttaatcaatttatatttaatgtaattattaggtatgatttatagctgccttttttgctgtttattttttgtgtagcttatgtttattgtattcct

SEQ ID NO: 262520 - DNA, 577 bp, Homo sapiens
acagtgttaactaattgctaatgattgtttttttttttttacaagtgtctccaagaaaaagtctgcattgaatgatctgagtcaggtcaattagagacaagtcttgtgaatggggttttccaaggcaccctagacaggtcaaaagataacaattctgagaattgtgcttggaaggatccccagtgccattctgttccctccagtgaccaggttgttggttttcattatgattgcagactcttggttttcaaggctaccgtgttgctggggagagaaaagtaggaatagaacaagtcaaacgctacagaactcactgttcttaaaaatattcagctattkttcttgaacaaaatggccactggattgctgcaagtctttggttaattttgagttctgaaaagattgattccattttttttccaatgttctctttgctttttaaaaatttttgaaatattaagttctgggatacatgtgcaggatgtgcaggtttgttacaaaggtaaacacatgccatggtggtttgctgcacctatcaacccatcacctaggtattaagcccaacatgcattagcta

SEQ ID NO: 262521 - DNA, 577 bp, Homo sapiens
acagtgttaactaattgctaatgattgtttttttttttttacaagtgtctccaagaaaaagtctgcattgaatgatctgagtcaggtcaattagagacaagtcttgtgaatggggttttccaaggcaccctagacaggtcaaaagataacaattctgagaattgtgcttggaaggatccccagtgccattctgttccctccagtgaccaggttgttggttttcattatgattgcagactcttggttttcaaggctaccgtgttgctggggagagaaaagtaggaatagaacaagtcaaacgctacagaactcactgttcttaaaaatattcagctattgttcttgaacaaaatggccactggattgctgcaagtctttggttaattttgagttctgaaaagattgattccatttttttyccaatgttctctttgctttttaaaaatttttgaaatattaagttctgggatacatgtgcaggatgtgcaggtttgttacaaaggtaaacacatgccatggtggtttgctgcacctatcaacccatcacctaggtattaagcccaacatgcattagcta

SEQ ID NO: 262522 - DNA, 582 bp, Homo sapiens
ttaaaccatgtggttgtcaaggccagtctcaagagatgatcagatacagtggtttttaaaatgtgtgttacagaagcctcaggatcttcagaggatttcagtgctgaaatggggcaaggacaggctgggttctggtcccttcactcctggcttcagtgaaagaagctctccttttatgttttgcttccatgtaaaatttttcaatttgaaagaagattgcaacgaatgaattttatcattggatgttgttcactccatacattttcttaaacatcccacgatgttccagacactgtgccaattgtggaagctacaagtataaatragtcattgtctgataacatagggtttgggggtgctctaaaagtacttcaggacagtagtatagacacagtagaagacattagttcagtctggggaaatcatttctgaaatgaggaaactgggaccctgatcatttcagtgatttttccaaagtcacatagtttgtagcagagcaacctatatcccagctatttatgcagatgcttcttgtctaacccatgttgcttcccaaaagaatggaatccacgtaccaatgct

SEQ ID NO: 262523 - DNA, 611 bp, Homo sapiens
tattatttacaaagagatagattgatgaaccggatcaattygagagaactctatcaccagtggaggccaatcttccattcctcaaaaaaaacttttctttttttttttgttttttttgagacggagttttgttctcgtcgcccaggctggagtgcaatggcacggtcttggctcaccgcaacctctgcctcctgggttcaagaaattctccctgcctcagcctccccagtacctaggattataggcgcccgccaccatgcccagctaatttttgtatttttaatagagacaagggttcaccatgttggctgggctggtctcgaactcctgacctcaggtgatctacccgccttggcctcccaaagtgctgggattgcaggcgtgagccaccgcactcggccgtctcaaaaaaaacttctaactatcaggaaaaatcttacacctggtgaaaaatcttaaagtttactttttgtcagggctaaatcatgttgatgaatgacatacagagctatgcatggattaaataaagtacgaatatgcagccaaatatgaaaaaatgctcatcatcactggccatcagagacatgcaaatcaaaaccacaataagatac

SEQ ID NO: 262524 - DNA, 611 bp, Homo sapiens
tattatttacaaagagatagattgatgaaccggatcaattcgagagaactctatcaccagtggaggccaatcttccattcctcaaaaaaaacttttctttttttttttgttttttttgagayggagttttgttctcgtcgcccaggctggagtgcaatggcacggtcttggctcaccgcaacctctgcctcctgggttcaagaaattctccctgcctcagcctccccagtacctaggattataggcgcccgccaccatgcccagctaatttttgtatttttaatagagacaagggttcaccatgttggctgggctggtctcgaactcctgacctcaggtgatctacccgccttggcctcccaaagtgctgggattgcaggcgtgagccaccgcactcggccgtctcaaaaaaaacttctaactatcaggaaaaatcttacacctggtgaaaaatcttaaagtttactttttgtcagggctaaatcatgttgatgaatgacatacagagctatgcatggattaaataaagtacgaatatgcagccaaatatgaaaaaatgctcatcatcactggccatcagagacatgcaaatcaaaaccacaataagatac

SEQ ID NO: 262525 - DNA, 611 bp, Homo sapiens
tattatttacaaagagatagattgatgaaccggatcaattcgagagaactctatcaccagtggaggccaatcttccattcctcaaaaaaaacttttctttttttttttgttttttttgagacggagttttgttctcgtcgcccaggctggagtgcaatggcacggtcttggctcaccgcaacctctgcctcctgggttcaagaaattctccctgcctcagcctccccagtacctaggattataggcgcccgccaccatgcccagctaatttttgtatttttaatagagacaagggttcaccatgttggctgggctggtctcgaactcctgacctcaggtgatctacccgccttggcctcccaaagtgctgggattgcaggcgtgagccaccgcactcggcsgtctcaaaaaaaacttctaactatcaggaaaaatcttacacctggtgaaaaatcttaaagtttactttttgtcagggctaaatcatgttgatgaatgacatacagagctatgcatggattaaataaagtacgaatatgcagccaaatatgaaaaaatgctcatcatcactggccatcagagacatgcaaatcaaaaccacaataagatac

SEQ ID NO: 262526 - DNA, 611 bp, Homo sapiens
tattatttacaaagagatagattgatgaaccggatcaattcgagagaactctatcaccagtggaggccaatcttccattcctcaaaaaaaacttttctttttttttttgttttttttgagacggagttttgttctcgtcgcccaggctggagtgcaatggcacggtcttggctcaccgcaacctctgcctcctgggttcaagaaattctccctgcctcagcctccccagtacctaggattataggcgcccgccaccatgcccagctaatttttgtatttttaatagagacaagggttcaccatgttggctgggctggtctcgaactcctgacctcaggtgatctacccgccttggcctcccaaagtgctgggattgcaggcgtgagccaccgcactcggccgtctcaaaaaaaacttctaactatcaggaaaaatcttacacctggtgaaaaatcttaaagtttactttttgtcagggctaaatcatgttgatgaatgacatayagagctatgcatggattaaataaagtacgaatatgcagccaaatatgaaaaaatgctcatcatcactggccatcagagacatgcaaatcaaaaccacaataagatac

SEQ ID NO: 262527 - DNA, 570 bp, Homo sapiens
ttacagaggaaggaaatgggatctggggagaacaaagaactgtccaaagtctcaaaagtgattagtagcagaacatttctggctagcatttagttttcctatctatttgatgaagtgattggacttggtaacttagtggttattccacatctgaaattctatttctttttcacttgggatgtatgtaacttgccgtgatacaaagtacaatttctgcgcaagacagcaagctccctggacagcctcgtgtacactcagcagtaaaagtgttttgatgctgctgcatattgtcagagcccagttaaggggctcagagctcatcatcaacctggctgaccaccaggcttaaagatgcaaatacctatacccaactggactttaggatccaaatttctaaggttttaaaaccaattttataaaatagactacaaacctatacctgcaggcccaacctggacttygacaggtttgttgttcctctctgtgctaacttttccctagaggaatttgagcccaatattgtcatttcatccaatttttcaagagaagccataaattccatttgtgtgt

SEQ ID NO: 262528 - DNA, 572 bp, Homo sapiens
ccatatatacccaaagatagtttttcctcagtaattacatttgcatgtaacttattacatgcaaatatgagaaaacatgaggaaagttggaatagaagcatagtttatttaactttgtgaaatctgtgagtctgcaaattcttggtgctgtcctacagcaacaaactacagaagtctgcaaatgggtaaacacttctgttgggtgaactatgcttgccttctgtagcatccaaaatgtcactccaaacagatgctggggatgacagcagagggctatttgcatactaatatgccccacccagattcagatgcagagggacatagataagatgtgttaggcaaatgcacatgcggttaactcgctacatgtaactgagagataaatggaaygtatgcagtgatttccaactttttcctcctgctgtcatcgattttcttggctcacctaaccatcatgcaaattctcttcctgttacaagtacagtgtggcaggaagaaaagtggctttcttgccaaactctggctcatttccatctcatgtcggatagtcatgggtcatggatcactttaca

SEQ ID NO: 262529 - DNA, 572 bp, Homo sapiens
ccatatatacccaaagatagtttttcctcagtaattacatttgcatgtaacttattacatgcaaatatgagaaaacatgaggaaagttggaatagaagcatagtttatttaactttgtgaaatctgtgagtctgcaaattcttggtgctgtcctacagcaacaaactacagaagtctgcaaatgggtaaacacttctgttgggtgaactatgcttgccttctgtagcatccaaaatgtcactccaaacagatgctggggatgacagcagagggctatttgcatactaatatgccccacccagattcagatgcagagggacatagataagatgtgttaggcaaatgcacatgcggttaactcgctacatgtaactgagagataaatggaatgtatgcagtgatttccaactttttcctcctgctgtcatcgattttcttggctcacctaaccrtcatgcaaattctcttcctgttacaagtacagtgtggcaggaagaaaagtggctttcttgccaaactctggctcatttccatctcatgtcggatagtcatgggtcatggatcactttaca

SEQ ID NO: 262530 - DNA, 595 bp, Homo sapiens
agaggcaaggcattaatacaagctggattgctgcttctgcttcctctagcggggcttggtctaagccaagtcttgattagccgtgacctcatcttcatcatagacatcctgggactgcaccctttcaacctcctccattgatggccacttgagggctatcaggatggaatgacatgggatctggcacagtataaattctctggagtattcagaaaactacaaatcaataccgaacttctcctttcaatccaakgctctctcaaatctttttaaaagctgcaaaaaagatgtcaagtagagggagactgagatgagttttgatgattatagtgctgattttttttttttcagacacagtctcactctgtcacccaggatagagcgcagtggtgctctctcagttcactgcagcctatgcctctcaagttcaagtgattctcctgcctcagccacccaagaagctaggattacaagtgcccaccaccacacctggctaatttttgtatttttagtagagatgggttttcaccacgttggctaggcttgtctcaaactactgacctcatgtgatccaccgacctcggccccccaaggt

SEQ ID NO: 262531 - DNA, 594 bp, Homo sapiens
gcccaggccagctcctcaccacaaagaattatctgatccaaaatgtcagtggtgctgaagggaagaagcccttccctacagcttcccttgcagatgatagctcaaccactgctcaatcactgctggcaaacaaattatggggaagaatgaaaaaacggcaagagttttaccacctgaaccatggggccaggtagcagccactgatgacagttcttctgtgttttcctttagcgtatattacatgctggagggtgctgctttctgattaatttcagcaatacactaccagaggtcagagtagggctttattttttaatgttaggacatatctgttagcacaagggtccccaacccccaggtcatgaacaagtacctgtttgtggtctgtaaggaactgggctgcccagcaggagatgagcagcaggccagcatcacagactaaactccacctcctgtcaaatcagtggcagcgttaggttctcagaggagtttgaaccctgttgtgaactgcacaggtgacggatctagkatgcatgttacttatgagaatctcatgcgtgatgatctgaggtggaacagttttatccccaaagc

SEQ ID NO: 262532 - DNA, 479 bp, Homo sapiens
ggtttttaaatgcagtctagtccatttaagtgtgtttgtttatggactattcattgctttgtgtctggagacagctggtggtcatagaacaggtaagaaataagacctagttttaatttctggttactagctaggtgacatttttcagttatatatcctctcygagcttcagggatcttatttaaaagatgaaaaagacaatagctttatttgggggccggcatgaggattagttatttgtctagtacctggtacacagaaaaatgttagttattagtgttaatggagaagaaagttttcagggaaagcaaaaaaaactaaaccattagaaatttgtgtgaaaaggaagtgatcagtatttaaaaataccttaatatacagaaagaggagggtggaaatctattacagattaagataaacacttaagtgcatttgaaattactttttgaataagaataaaatagcgttctcacccaaaa

SEQ ID NO: 262533 - DNA, 523 bp, Homo sapiens
ctgtagtcccagttattcgggaggcaaaagctggggagaaaggatcactcgggcccaggaggttgaggctgcagtgagacaagaccctgtcrctgaactctagcctgggcaacagggtgagactctctctcaaaaggaaaataaaatagaacaagagtagatgaaacatgctgtgcttgttccctaaaatgttaataagtaaaacaaagtgcatgttgtcaggtcgaggtgagatgtgaatgagtgctgacccaggagtctttttcacacagatgactgctggctgcaaggcctttataatcagcaaaacaaagctatctggtaaatcaacatgagctgaaagtgacattaacaaaagaaaaaagattgaagccatgaatgtaacaatttttctctaacctgccttggtcagaccactcttggtggtgctgagcttttgatgctacactttgaaggtgttttgagtgactgaaaaattgtcaggagaaggctctggatggtcaagtactaccccaggccagat

SEQ ID NO: 262534 - DNA, 589 bp, Homo sapiens
aatgaaatgataaagtgcttttaagatttttgttagaactgataatggcaaaatagggaatttcctatgctctgttcagatgttctaggaaatataatgcaaatttagagtgcatcactacattagaatactaataccatatatgtgaataaacattgtgaaatgaaaaataaatggtttcgtgtgtcatatatgtctttagagccaggtctagtggcacatgcctgtagtcccagctactcaggaggctgaggtgggaggatcgcttgccctcaggagtttgagaaaagcctgggccacacagcgagaccatytttaaaaaaaaaaaattctttaaagatcacttgataaaaactctgatcttttcctatccaactaatcacaatgaaaatttccaaaggaaatatattcacttttgtactctttataaaaattagtgactcctttgaagaaacttgctatgtgctaaattcaataaaaacccaattagtgttagttcagtaatctagatacacagtaaccatagatcaaatcatatcccataagatagtgcaatatgtaactccacctttctactacagcactaacg

SEQ ID NO: 262535 - DNA, 589 bp, Homo sapiens
aatgaaatgataaagtgcttttaagatttttgttagaactgataatggcaaaatagggaatttcctatgctctgttcagatgttctaggaaatataatgcaaatttagagtgcatcactacattagaatactaataccatatatgtgaataaacattgtgaaatgaaaaataaatggtttcgtgtgtcatatatgtctttagagccaggtctagtggcacatgcctgtagtcccagctactcaggaggctgaggtgggaggatcgcttgccctcaggagtttgagaaaagcctgggccacacagcgagaccatctttaaaaaaaaaaaattctttaaagatcacttgataaaaactctgatcttttcctatccaactaatcacaatgaaaatttccaaaggaaatatattcacttttgtactctttataaaaattagtgactcctttgaagaaacttgctatgtgctaaattcaataaaaacccrattagtgttagttcagtaatctagatacacagtaaccatagatcaaatcatatcccataagatagtgcaatatgtaactccacctttctactacagcactaacg

SEQ ID NO: 262536 - DNA, 598 bp, Homo sapiens
gttgtttggttacataaaaaagttctttagtagtcatttctgagatttttgtgcacccctcacccgatcagtgtaccctgkacccattgtgtagtcttttatcccttgccaccccctaccctttcccttgagttcccaaagtccaatgtatcattcttatgcctttgcatcctcataccttagctcccacatatgaatgagaacatacaatgtttggttttccattcctgagtttatggcagcacatttgcaattgcaaaaatatggaaccagcccaaatgcccatcatcaacgagtaaagaaaatgtggtgtatatagaccatggactactacccagccgtaaaaaagtaatgaaataatggcattcacagcaacctggataaaactggagaccgttattctaactgaagggatattcctgaccctcatcatattagcccctgtgttaaggaaatctgtaaacacacctaaatgttcttttactgtatatgtgtgctcgtctgctacatgcacataccctatctcttggcatcagaagctgttcaaacatggacccaagctacctctccagctttctcccatttcctaatactctca

SEQ ID NO: 262537 - DNA, 598 bp, Homo sapiens
gttgtttggttacataaaaaagttctttagtagtcatttctgagatttttgtgcacccctcacccgatcagtgtaccctggacccattgtgtagtcttttatcccttgccaccccctaccctttcccttgagttcccaaagtccaatgtatcattcttatgcctttgcatcctcataccttagctcccacatatgaatgagaacatacaatgtttggttttccattcctgagtttatggcagcacatttgcaattgcaraaatatggaaccagcccaaatgcccatcatcaacgagtaaagaaaatgtggtgtatatagaccatggactactacccagccgtaaaaaagtaatgaaataatggcattcacagcaacctggataaaactggagaccgttattctaactgaagggatattcctgaccctcatcatattagcccctgtgttaaggaaatctgtaaacacacctaaatgttcttttactgtatatgtgtgctcgtctgctacatgcacataccctatctcttggcatcagaagctgttcaaacatggacccaagctacctctccagctttctcccatttcctaatactctca

SEQ ID NO: 262538 - DNA, 598 bp, Homo sapiens
gttgtttggttacataaaaaagttctttagtagtcatttctgagatttttgtgcacccctcacccgatcagtgtaccctggacccattgtgtagtcttttatcccttgccaccccctaccctttcccttgagttcccaaagtccaatgtatcattcttatgcctttgcatcctcataccttagctcccacatatgaatgagaacatacaatgtttggttttccattcctgagtttatggcagcacatttgcaattgcaaaaatatggaaccagcccaaatgcccatcatcaacgagtaaagaaaatgtggtgtatatagaccatggactactacccagccgtaaaaaagtaatgaaataatggcattcacagcaacctggataaaactggagaccgttattctaactgaagggatattcytgaccctcatcatattagcccctgtgttaaggaaatctgtaaacacacctaaatgttcttttactgtatatgtgtgctcgtctgctacatgcacataccctatctcttggcatcagaagctgttcaaacatggacccaagctacctctccagctttctcccatttcctaatactctca

SEQ ID NO: 262539 - DNA, 618 bp, Homo sapiens
tgtatatgcattttgatgaacgtatggacacattctgttggatacatgcctaagaataaagttgttgagtcacagagtatgtataaattgagttattccttatctgaaatgtttgggaccagaagtgttgtggattttcaatttggggaggattttggaatatttgcagaatatattctggttgagcatctctaatgcaaaaaatctgaaatgctccaataaggattttctttgagtgtcatatcagtactcaamagtttcagattttggagcatttcagatttcaaatttttggattaggggtactcaacttgtatatgttcagctttaatgagtactgacaagcagcttttcaaagtggttgtactaatttaaactctcatcaccagtgtatgagagttccagttgctccaaatcctcctgaagacttgatattgcctatttttccattttagctgttctgattgatagttgtgaagtagtaccacattatgggtgtagtttgcattgttctgatggttaatgaaattgaaagcacttttttgtttacattttcttagacttgctcagcttctttggttaatcaggggttcataactcctctgaaattaattagca

SEQ ID NO: 262540 - DNA, 415 bp, Homo sapiens
tgatcaccacgacaaccctcacccctatccgtcttaccctgaggtggggccactcgacccagaacacatcctggcgttccatcatctgccttcatgttcacttggaggtttcctggaggggcgcccctcctagggtcgtgacagagcctccgtccatccccaagcactactcttattggcttcagccaggggctggacgccatgggaatwtctccatcccgaaaagagaaggttatcccactctactctgggagaaggatgaagggggtggggggagccctgagggactgtggtttggaaggcagacccaggtgtggtggggtttctacttggcagatctcagcaagagaggtagcagtggttatgaggatgaggctgcgagccagactgtctgggcttgaaccctagcctagac

SEQ ID NO: 262541 - DNA, 461 bp, Homo sapiens
gagaacatggaaaaaaaatggaatcaatcttttcagaactcaaaattaaccaaagactgcagcaatccagggccatttgttcaagaamaatagctgaatatttttaagaacagtgagttctgtagcgttgactgttctattcctacttttctctccccagcaacacggtagccttgaaaaccaagagtctgcaatcataatgaaaaccaacaacctggtcactggagggaacagaatggcactggggatccttccaagcacaattctcagaatgttatctttgacctgtctagggtgccttggaaaaccccattcacaagacttgtctctaattgacctgactcagatcattcaatgcagactttttctggagacacttgtaaaaaaaaaaaaacaatcattagcaattagttaacactgtggctgcctgagatgttggataacatttggggaaaacgatg

SEQ ID NO: 262542 - DNA, 577 bp, Homo sapiens
aactttaaaccatgtggttgtcaaggccagtctcaagagatgatcagatacagtggtttttaaaatgtgtgttacagaagcctcaggatcttcagaggatttcagtgctgaaatggggcaaggacaggctgggttctggtcccttcactcctggcttcagtgaaagaagctctccttttatgtttgcttccatgtaaaatttttcaattgaaagaagatgcaacgaatgaattttatcatggatgtgttcactccatacattttcttaaacatcccacgatgttccagacactgtgccaatgtggaagctacaagtataaatgagtcatgtctgataacatagggttgggggtgctctaaaagtacttcaggacagtagtatagacacagtrgaagacattagttcagtctggggaaatcatttctgaaatgaggaaactgggaccctgatcatttcagtgatttttccaaagtcacatagttgtagcagagcaacctatatcccagctatttatgcagatgcttcttgtctaacccattgtgcttcccacaagaatggaatccacgtacccaatgc

SEQ ID NO: 262543 - DNA, 626 bp, Homo sapiens
catcagagagaaaacacagttctgtactctcgtggctagtgggggagaaaacaaaacacaataaacgttataaataagtcaatgatgttgtaaatgaagccacaagtgctaagtaagtttggartaagataaggaaaattggaagactgactggttggtggctgattaaattttttaatatcgaggtcacaggaggtgaaatttaggcaaagacttgaaggaggtaagagagagatgcagatagttgaagaagtggaacagccagtgtaaagacccgctttgggagcaaaatttgagtgttggcagagcatcagggagccagtgtggctaaaccagagtgagcaagacctaaactggtaggatacagtgtcagggagatacagggggcttgagtgcatatgactttgtggatgacagttaggactttggatttttctcgtgatgaattgacaagacataacagggttttgagcagaaaagtgccatgagctgactgacactgagttgatttggaaggctctccctaactgagtgccatccagcagaactctccataatgatgcaaatgttctctgttatccaatatggtaggtacttactacacatgaacctgaaatgtgaccagt

SEQ ID NO: 262544 - DNA, 626 bp, Homo sapiens
catcagagagaaaacacagttctgtactctcgtggctagtgggggagaaaacaaaacacaataaacgttataaataagtcaatgatgttgtaaatgaagccacaagtgctaagtaagtttggaataagataaggaaaattggaagactgactggttggtggctgattaaattttttaatatcgaggtcacaggaggtgaaatttaggcaaagacttgaaggaggtaagagagagatgcagatagttgaagaagtggaacagccagtgtaaagacccrctttgggagcaaaatttgagtgttggcagagcatcagggagccagtgtggctaaaccagagtgagcaagacctaaactggtaggatacagtgtcagggagatacagggggcttgagtgcatatgactttgtggatgacagttaggactttggatttttctcgtgatgaattgacaagacataacagggttttgagcagaaaagtgccatgagctgactgacactgagttgatttggaaggctctccctaactgagtgccatccagcagaactctccataatgatgcaaatgttctctgttatccaatatggtaggtacttactacacatgaacctgaaatgtgaccagt

SEQ ID NO: 262545 - DNA, 609 bp, Homo sapiens
tgcaatgaggactatctattctcacacctatgttgttgtgatgtcaatgacagggtcctcaaaggagcaagcctgtttctgtggacaagagttcaagattctgaactcaggttacataaaacagtcgcagtgatggggctctgccatggcattacacgtgactgttcaacctacttttaagagtttggcaggagcagcaacatctgttttgcagtcatctctatcccaagagggaaaaatatccatgataaggctagggttggagagggcagaaggtaggaaaaactaattggtattatccccttctttctatcctactggttaataggaaaaaatacttagaggaaagaattgtggacacactgttctttcatgtctgtggattttatgaaatattttttaaaatctgctttaagaatcatctgatgaagttttaatgtttgcttattttcagaaaattttcctaggacttgtctgttaaaccaagaataacaatgtattaagatgttagagttyccaaagactagcaacagaagtaggcagaacagaaagaagcaatgatgatataatgataacaactgacatcaatgctcatctgctatgagcaag

SEQ ID NO: 262546 - DNA, 572 bp, Homo sapiens
tttaattttaaaatgtgcacaggacctgaatagacatttctcaaaagaagatatacaaatggctaacaggtatgtaaaaatgtgatcaacatcaccaattatcagggaaacacaaacccacaatgagggttgatacctcatacctattagaatggctgtgaaaaagacaaaacagtaagtgttaggatatggagaaaaggaatccttgtacactatgattaaaaggtaaagtaatacaaccatcatagaaaacgatatacaggttcttcaaaaaaytaaaaatagaattaaatatttgatccagcaatcccacttctgtgcatatatccaaaggaaatggaatcagtatgtgaagagatatctgcattccagtattcatgcagcattattcacaaagcaaagttatagaagcaaactaagtggccattgatggatgcatggataagaaaatgtgtttatatataccatggaatattctttactcctaaagaaatcgtgctatttgtgacagcatggatgaacctagaagacattgtgctaagtaaaataagccagatagaggaagggaaata

SEQ ID NO: 262547 - DNA, 510 bp, Homo sapiens
atgcataaagtctagaacagctaatatattataatgaaatatcaactataatcccagctcaaagagaacaccatgaaattatgaagggctttccacaaatctctaaatttatgtcttcataagattacatttctatttcttcttgaataatttccttattttagctatgatttagtgatagtaagatggtaattatgaggagaaacttctcccaacackgcattgagaaaattctgcctcatttcaccacacaccagagtcttaagcagtcacttctaatgtagctgaacaatagatcctcacccacctgagtctatgaattgaatccacgtatatagataaggcccccaaggagtggtagtaagctgggaatgccatcagctcatcttccttcaggcctatatttgtcattgtcacttgtagaagcaggacagccctggcgttggggttggtagaaacagagagtatcaaagggaaaactgaacttccctaatttttggaaaacagcag

SEQ ID NO: 262548 - DNA, 510 bp, Homo sapiens
atgcataaagtctagaacagctaatatattataatgaaatatcaactataatcccagctcaaagagaacaccatgaaattatgaagggctttccacaaatctctaaatttatgtcttcataagattacatttctatttcttcttgaataatttccttattttagctatgatttagtgatagtaagatggtaattatgaggagaaacttctcccaacactscattgagaaaattctgcctcatttcaccacacaccagagtcttaagcagtcacttctaatgtagctgaacaatagatcctcacccacctgagtctatgaattgaatccacgtatatagataaggcccccaaggagtggtagtaagctgggaatgccatcagctcatcttccttcaggcctatatttgtcattgtcacttgtagaagcaggacagccctggcgttggggttggtagaaacagagagtatcaaagggaaaactgaacttccctaatttttggaaaacagcag

SEQ ID NO: 262549 - DNA, 510 bp, Homo sapiens
atgcataaagtctagaacagctaatatattataatgaaatatcaactataatcccagctcaaagagaacaccatgaaattatgaagggctttccacaaatctctaaatttatgtcttcataagattacatttctatttcttcttgaataatttccttattttagctatgatttagtgatagtaagatggtaattatgaggagaaacttctcccaacactgcattgagaaaattctgcctcatttcaccacacaccagagtcttaagcagtcacttctaatgtagctgaacaatagatcctcacccacctgagtctatgaattgaatccacgtatatagataaggcccccaaggagtggtartaagctgggaatgccatcagctcatcttccttcaggcctatatttgtcattgtcacttgtagaagcaggacagccctggcgttggggttggtagaaacagagagtatcaaagggaaaactgaacttccctaatttttggaaaacagcag

SEQ ID NO: 262550 - DNA, 534 bp, Homo sapiens
agtggtagtaagctgggaatgccatcagctcatcttccttcaggcctatatttgtcattgtcacttgtagaagcaggacagccctggcgttggggttggtagaaacagagagtatcaaagggaaaactgaacttccctaatttttggaaaacagcagattggagacagatgggctccagcgttttccatgtgtgaggtcattgtcccaggcagccttgctcaggaccacatttcttgtcagsaaaacagaagtcaaacgatatttctaccttccaagagaatagaacataatgtcagattttctcatggattcccacaggttcaagaaagtttcatggccttatttaactgcttaagcatttcaactaaaaaattatttgtctttcaaatacacaggaatctatttggaaaaattttaaccagaaaaagttggaattctaaagtaaaaaatgcataaggccatcaaaattttttacagcttttaatttagatgtcaatgggggaaaaaaagacattctctgaagtttgctttta

SEQ ID NO: 262551 - DNA, 460 bp, Homo sapiens
ggttaccacaaagctatctggaaatgtaacatctgccatttagaaaatttttgtagagttaatagaactttacctgaagggaggctggcaatatgcatcatgatttcaaatattgtattaattgttttgtaattttgtgttttttaaaactaaacttattaaattggttgtatattactttaggtagcactatttggtgatgagagaataataatttgcaaaatataagagttcctttttataaaaatgtcctctgttttatattactaccacttcstctgaaagtttaaaattgtaattttgtaattaaaatatatattcacaaatgtgattgtcaatgtgaatatttataattttagggtttttttttgcatttggtagggacagggttttctggtgtctattcttcttcaaaataaaaggtagagagaatggaatcacggaaaggttaaaacacaaa

SEQ ID NO: 262552 - DNA, 460 bp, Homo sapiens
ggttaccacaaagctatctggaaatgtaacatctgccatttagaaaatttttgtagagttaatagaactttacctgaagggaggctggcaatatgcatcatgatttcaaatattgtattaattgttttgtaattttgtgttttttaaaactaaacttattaaattggttgtatattactttaggtagcactatttggtgatgagagaataataatttgcaaaatataagagttcctttttataaaaatgtcctctgttttatattactaccacttcctctgaaagtttaaaattgtaattttgtaattaaaatatatattcacaaatgtgattstcaatgtgaatatttataattttagggtttttttttgcatttggtagggacagggttttctggtgtctattcttcttcaaaataaaaggtagagagaatggaatcacggaaaggttaaaacacaaa

SEQ ID NO: 262553 - DNA, 525 bp, Homo sapiens
aggccaaataatggcttccctcaaagctcagccctcccacccacctcccagtcctctcccatgcaggggkctgccggcctcctggggtacaggggtccaggccaaacccaacccacagatggttggtgaaaccagcacatatccaagggccttttccccacctgggccatgtgcccactgcatagataggcctgtgcttgctcccctaggacagagactcccttttcttccgttggaatgaagggtggggagatttgatggtgtcctgtacaggttgggtgttaatctgatgtggtgctcttggagaagcttacctgagttaggtgttttctcagcacgtggtgtgtgctgccccttcaagctgcaggagtcccagaaggtaagtgctactgcaacccccatttactggtgaacagaggtcaggtgatctgcagccgaccgagcagctgctaagtggccaacaggcgggatctgcatctcacttgcagaggccctgcctggatgctggggctgccctgagactcc

SEQ ID NO: 262554 - DNA, 580 bp, Homo sapiens
ggtgtgtgttcccaccaaaatcttacattgaaatgtaatcctcaatgttggaagtgggcctagtggggaggtgattgaatcatgagggcaggatttccatgaacagtttggcatcatttcctttggtgccattctcacaatagtaagttttcatgagagctggttatctacaagtgcatagcacttcccccctgcccttgcacttaccatgtgatgtgcaagcaccggatttatttttcaccttgattgtcagttgtcagaggcttcaccagaagcagaagccagtgctatgctttctgtacagcctgtagaacyatgaggcaatgaaacctatttcctttataaattaactagtcactgattatttttacagcaatatgagaatggcctaatatatccatcaaaaaactattagaagtaataacttgagtaaatttgcataatacaaaatcaacatgtacaaatcagtaggatttctatatgccaacagtcaacaaactggaaaagaattcaaaaaagtaatcctatttgcaatagccacaaataaaacaaaatgtgtgggaatttaccaaagaaataa

SEQ ID NO: 262555 - DNA, 580 bp, Homo sapiens
ggtgtgtgttcccaccaaaatcttacattgaaatgtaatcctcaatgttggaagtgggcctagtggggaggtgattgaatcatgagggcaggatttccatgaacagtttggcatcatttcctttggtgccattctcacaatagtaagttttcatgagagctggttatctacaagtgcatagcacttcccccctgcccttgcacttaccatgtgatgtgcaagcaccggatttatttttcaccttgattgtcagttgtcagaggcttcaccagaagcagaagccagtgctatgctttctgtacagcctgtagaaccatgaggcaatgaaacctatttcctttataaattaactagtcactgattatttttacagcaatatgagaatggcctaatatatccatcaaaaaactattagaagtaataacttgagtaaatttgcataatacaaaatcaacatgtacaaatcagtaggatttctatatgccaacagtcaacaaactggaaaagaattcaaaaaagtaatcctatttrcaatagccacaaataaaacaaaatgtgtgggaatttaccaaagaaataa

SEQ ID NO: 262556 - DNA, 584 bp, Homo sapiens
aaccaccaaacaccataatagtcaaagctattctgagtatataaccaaaactggaggaatcccattacctggttttaaatgatactatcaagctatagtaattaaaacagcatgacactagaataaaaagacataaacacaaatggaatgaaatagagaacttakaaacaaactcatacagctaaactaaacttattttgaacaaaaatgtcaataacatacaacaaaaaataagacggtttctgtaataaatagggctgggaaaactggcaagccataggcagaagagtgaaactagaaccctatttcttgccacatacaaaaatcaaattaaaataaattaaaaacttaaacctaacacctcaaactaccaaaattttacaagaaaaacactggggaaaccctttagggcatggtttgagcaaaaatttcttaaataatgccccataagcacagacaactaaagcaaacatggacaaatggaattacagcaagtcagaaagcttttttaaagtgaaggaaacaaagtgaagagaaaacccacagaatgggagaaaatatttgtgaattacccatctgaaaag

SEQ ID NO: 262557 - DNA, 584 bp, Homo sapiens
aaccaccaaacaccataatagtcaaagctattctgagtatataaccaaaactggaggaatcccattacctggttttaaatgatactatcaagctatagtaattaaaacagcatgacactagaataaaaagacataaacacaaatggaatgaaatagagaacttagaaacaaactcatacagctaaactaaacttattttgaacaaaaatgtcaataacatacaacaaaaaataagacggtttctgtaataaatagggctgggaaaactggcaagccataggcagaagagtgaaactrgaaccctatttcttgccacatacaaaaatcaaattaaaataaattaaaaacttaaacctaacacctcaaactaccaaaattttacaagaaaaacactggggaaaccctttagggcatggtttgagcaaaaatttcttaaataatgccccataagcacagacaactaaagcaaacatggacaaatggaattacagcaagtcagaaagcttttttaaagtgaaggaaacaaagtgaagagaaaacccacagaatgggagaaaatatttgtgaattacccatctgaaaag

SEQ ID NO: 262558 - DNA, 584 bp, Homo sapiens
aaccaccaaacaccataatagtcaaagctattctgagtatataaccaaaactggaggaatcccattacctggttttaaatgatactatcaagctatagtaattaaaacagcatgacactagaataaaaagacataaacacaaatggaatgaaatagagaacttagaaacaaactcatacagctaaactaaacttattttgaacaaaaatgtcaataacatacaacaaaaaataagacggtttctgtaataaatagggctgggaaaactggcaagccataggcagaagagtgaaactagaaccctatttcttgccacatacaaaaatcaaattaaaataaattaaaaacttaaacctaacacctcaaactaycaaaattttacaagaaaaacactggggaaaccctttagggcatggtttgagcaaaaatttcttaaataatgccccataagcacagacaactaaagcaaacatggacaaatggaattacagcaagtcagaaagcttttttaaagtgaaggaaacaaagtgaagagaaaacccacagaatgggagaaaatatttgtgaattacccatctgaaaag

SEQ ID NO: 262559 - DNA, 483 bp, Homo sapiens
  misc_feature (1)...(483): n = A,T,C or G
tgttctttactctggagataaacactggttttcttttccactgaataataccacatttcaaaatgaggggaaacatcttgaaactaagaggtatggccttattaaatttgatttggtttccattgtaattaatttaatcacatgtgttctagagtttgtcctcagtcttctcctactttaggmccatgatctgttgaatttgctcggctccctgctcaacagcaggaaatcagaattatttaaaaacctcattgtggctgggagcagtggctcatgcctgtaatcccagcaatttgggagccgtggacgtacgctgnnnnnnnnnnnnnnnnnnnnnnnnnnnnnnnnnnnnnnnnnnnnnnnnnnnnnnnnnnnnnnnnnnnnnnnnnnnnnnnnnnnnnnnnnnnnnnnnnnnnagcggacctatgggaggtgaggaggagaatcactgaacccaggaggcagacgtttcagtaaggcaag

SEQ ID NO: 262560 - DNA, 483 bp, Homo sapiens
  misc_feature (1)...(483): n = A,T,C or G
tgttctttactctggagataaacactggttttcttttccactgaataataccacatttcaaaatgaggggaaacatcttgaaactaagaggtatggccttattaaatttgatttggtttccattgtaattaatttaatcacatgtgttctagagtttgtcctcagtcttctcctactttaggaycatgatctgttgaatttgctcggctccctgctcaacagcaggaaatcagaattatttaaaaacctcattgtggctgggagcagtggctcatgcctgtaatcccagcaatttgggagccgtggacgtacgctgnnnnnnnnnnnnnnnnnnnnnnnnnnnnnnnnnnnnnnnnnnnnnnnnnnnnnnnnnnnnnnnnnnnnnnnnnnnnnnnnnnnnnnnnnnnnnnnnnnnnagcggacctatgggaggtgaggaggagaatcactgaacccaggaggcagacgtttcagtaaggcaag

SEQ ID NO: 262561 - DNA, 483 bp, Homo sapiens
  misc_feature (1)...(483): n = A,T,C or G
tgttctttactctggagataaacactggttttcttttccactgaataataccacatttcaaaatgaggggaaacatcttgaaactaagaggtatggccttattaaatttgatttggtttccattgtaattaatttaatcacatgtgttctagagtttgtcctcagtcttctcctactttaggaccatgatctgttgaatttgctcggctccctgctcaacagcaggaaatcagaattatttaaaaacctcattgtggctgggagcagtggctcatgcctgtaatcccagcaatttgggagccgtggacgtacgctgnnnnnnnnnnnnnnnnnnnnnnnnnnnnnnnnnnnnnnnnnnnnnnnnnnnnnnnnnnnnnnnnnnnnnnnnnnnnnnnnnnnnnnnnnnnnnnnnnnnnagcggacctatgggaggtgaggaggagaatcactgaacccrggaggcagacgtttcagtaaggcaag

SEQ ID NO: 262562 - DNA, 565 bp, Homo sapiens
tctatactaaaagtacaaaaattagacaggcatggtggtgggcgcctgtaatcccagctactcgggaggctgagacaggagaatcrcttgaacccgggaatcagaggttgcagtgagccaagatcatgataatgcactccagcctgagcaacagagcaagactctgtctcaaaaataaataaataaataaaccgtcagatctcatgaggcttattcactgtcacgagagcagcatgggaaagacccatcccctgattcaattacctcccactgggtccctcccacgatatatgggaattaggggagctacaattcaagataagatttgactggggacacagccaaagcatgtcacaggttatgaaacaaattgattctagcaggccagacgtaggagagatgagccccttgaccatcccaaggaagagtggttaacagatgcaagtgttttatgcatcaggaaaacaggagggctagatatgctattattagcacaagagaatcaatcaaggcacaagccttgctggcctcgacctcagctcaaaaagctgagttaattgaactt

SEQ ID NO: 262563 - DNA, 565 bp, Homo sapiens
tctatactaaaagtacaaaaattagacaggcatggtggtgggcgcctgtaatcccagctactcgggaggctgagacaggagaatcacttgaacccgggaatcagaggttgcagtgagccaagatcatgataatgcactccagcctgagcaacagagcaagactctgtctcaaaaataaataaataaataaaccgtcagatctcatgaggcttattcactgtcacgagagcagcatgggaaagacccatcccctgattcaattacctcccactgggtccctcccacgatatatgggaattaggggagctacaattcaagataagatttgactggggacacagccaaagcatgtcacaggttatgaaacaaattgattctagcaggccagacgtaggagagatgagccccttgaccatcccaaggaagagtggttaacagatgcaagtgttttatgcatcaggaaaacaggagggctagatatrctattattagcacaagagaatcaatcaaggcacaagccttgctggcctcgacctcagctcaaaaagctgagttaattgaactt

SEQ ID NO: 262564 - DNA, 563 bp, Homo sapiens
cacggccgcttttccatcccggccctcacttgatgcggtccagcagggttgaaattgtttgaaatgcttgttcccagtgcggtaaagaaatagcacttgaatgtaaatttaatttcctcagcaaggccatttttatttttttttaatttctgcagaaagtgtacactcgccagcagttttgccacaacagtatactgagcaaaggagacagggtcatttataacctgatgcatccaccctactgctgtgtccagtttccagtggctggaacgggacctcacattctgtatttgtcccgattggctagcaacttagaacttttttaaagaggaaaaggcagaggagaacraaggaaggaggaaataacttgtggaatgctgaaaaaagtaaaaacaccttcgaataaagaagaggaacaggcaatgacctaaagcttgcttggactagtataagcatgccagggcaaatatttaggctaaattgtgggagctaagaacataaagtacattgatttctttattagggctagcagatatttaagaatgttagcacaggtctttgaa

SEQ ID NO: 262565 - DNA, 563 bp, Homo sapiens
cacggccgcttttccatcccggccctcacttgatgcggtccagcagggttgaaattgtttgaaatgcttgttcccagtgcggtaaagaaatagcacttgaatgtaaatttaatttcctcagcaaggccatttttatttttttttaatttctgcagaaagtgtacactcgccagcagttttgccacaacagtatactgagcaaaggagacagggtcatttataacctgatgcatccaccctactgctgtgtccagtttccagtggctggaacgggacctcacattctgtatttgtcccgattggctagcaacttagaacttttttaaagaggaaaaggcagaggagaacgaaggaaggaggaartaacttgtggaatgctgaaaaaagtaaaaacaccttcgaataaagaagaggaacaggcaatgacctaaagcttgcttggactagtataagcatgccagggcaaatatttaggctaaattgtgggagctaagaacataaagtacattgatttctttattagggctagcagatatttaagaatgttagcacaggtctttgaa

SEQ ID NO: 262566 - DNA, 563 bp, Homo sapiens
cacggccgcttttccatcccggccctcacttgatgcggtccagcagggttgaaattgtttgaaatgcttgttcccagtgcggtaaagaaatagcacttgaatgtaaatttaatttcctcagcaaggccatttttatttttttttaatttctgcagaaagtgtacactcgccagcagttttgccacaacagtatactgagcaaaggagacagggtcatttataacctgatgcatccaccctactgctgtgtccagtttccagtggctggaacgggacctcacattctgtatttgtcccgattggctagcaacttagaacttttttaaagaggaaaaggcagaggagaacgaaggaaggaggaaataacttgtggaatgctgaaaaaagtaaaaacaccttcgaataaagaagaggaacaggcaatgacctaaagcttgcttggactagtataagcatgccagggcaaatatttaggctaaattgtgggagctaagaacataaagtacattgatttctttattagggctagcagatrtttaagaatgttagcacaggtctttgaa

SEQ ID NO: 262567 - DNA, 625 bp, Homo sapiens
gcattagtcagggttttccagagaaacagaaaagagagaaggagatgtccagaattgtctcgtgtgattacagaggctagaatccaaggaagagtggcttgagtccaggggcagaattccctcttcccctgggaggtcagtatttcttcctttaaggccttcaactgattggatgagacccacccacattatggagcataatctgctttactaaaagtatactggcttaaatgctaatttcatctgaaaaataccacagaataatgttgaccaagtactgggagaggccttttccttcrtcttttggtaaattgcaatccctgggtatattcacatttgaaactcaaatgtgggcattggctactgcaggcctttcccggctcaatggagtgcagacaggggaggcacaggagtgactccactgtgtgaagagaagactgatgagggcccgtgtggcacctcaggtagggtctgcactgtctggactatggtcaggcccctgcctgagccagccctgctctccagtgtccccaaggaatccctgaaactagcatctcatggaggagatagacgatgcaggaggtcccctgtgcccagaacaaatggtacaacaaggccctctgtt

SEQ ID NO: 262568 - DNA, 625 bp, Homo sapiens
gcattagtcagggttttccagagaaacagaaaagagagaaggagatgtccagaattgtctcgtgtgattacagaggctagaatccaaggaagagtggcttgagtccaggggcagaattccctcttcccctgggaggtcagtatttcttcctttaaggccttcaactgattggatgagacccacccacattatggagcataatctgctttactaaaagtatactggcttaaatgctaatttcatctgaaaaataccacagaataatgttgaccaagtactgggagaggccttttccttcgtcttttggtaaattgcaatccctgggtatattcacatttgaaactcaaatgtgggcattggctactgcaggcctttcccggctcaatggagtgcagacaggggaggcacaggagtgactccactgtgtgaagagaagactgatgagggcccrtgtggcacctcaggtagggtctgcactgtctggactatggtcaggcccctgcctgagccagccctgctctccagtgtccccaaggaatccctgaaactagcatctcatggaggagatagacgatgcaggaggtcccctgtgcccagaacaaatggtacaacaaggccctctgtt

SEQ ID NO: 262569 - DNA, 550 bp, Homo sapiens
ggcggctgcactcctgactcctccccagcctcctggagctgcccaggtgagcagacagagttttgagagctggtactgagactctgtgcctggagacagacactgggcagggaccctcmactttcctgtccgttttgcgcagagagtcagaaacagatgctggggagcagccagcaagcagagggctgcctgtctcagaggcaggagcatccgcctcagaggatggcaggtggggagatcctggactgtgccacccccaggggctctgcagccctcccggtgctcagttatcaggctcactacctctcaaaggcatctcttctctctgtggacatttgtctgtcacagctgcaagattctcacaataaacttgctctccagattcctaaaagaattgcttgctccagtttagccagctaagactttcttggataatggcataatctggaaggatatttaacaattttaaactggaaattattgactctatggtgagtcaggaaaaaccacattcacaatattcaacagcagcgctgggccttgatgctcc

SEQ ID NO: 262570 - DNA, 550 bp, Homo sapiens
ggcggctgcactcctgactcctccccagcctcctggagctgcccaggtgagcagacagagttttgagagctggtactgagactctgtgcctggagacagacactgggcagggaccctccactttcctgtccgttttgcgcagagagtcagaaacagatgctggggagcagccagcaagcagagggctgcctgtctcagaggcaggagcatccrcctcagaggatggcaggtggggagatcctggactgtgccacccccaggggctctgcagccctcccggtgctcagttatcaggctcactacctctcaaaggcatctcttctctctgtggacatttgtctgtcacagctgcaagattctcacaataaacttgctctccagattcctaaaagaattgcttgctccagtttagccagctaagactttcttggataatggcataatctggaaggatatttaacaattttaaactggaaattattgactctatggtgagtcaggaaaaaccacattcacaatattcaacagcagcgctgggccttgatgctcc

SEQ ID NO: 262571 - DNA, 550 bp, Homo sapiens
ggcggctgcactcctgactcctccccagcctcctggagctgcccaggtgagcagacagagttttgagagctggtactgagactctgtgcctggagacagacactgggcagggaccctccactttcctgtccgttttgcgcagagagtcagaaacagatgctggggagcagccagcaagcagagggctgcctgtctcagaggcaggagcatccgcctcagaggatggcaggtggggagatcctggactgtgccacccccaggggctctgcagccctcccggtgctcagttatcaggctcactacctctcaaaggcrtctcttctctctgtggacatttgtctgtcacagctgcaagattctcacaataaacttgctctccagattcctaaaagaattgcttgctccagtttagccagctaagactttcttggataatggcataatctggaaggatatttaacaattttaaactggaaattattgactctatggtgagtcaggaaaaaccacattcacaatattcaacagcagcgctgggccttgatgctcc

SEQ ID NO: 262572 - DNA, 509 bp, Homo sapiens
gtctgtcacagctgcaagattctcacaataaacttgctctccagattcctaaaagaattgcttgctccagtttagccagctaagactttcttggataatggcataatctggaaggatatttaacaattttaaactggaaattattgactctatggtgagtcaggaaaaaccacattcacaatattcaacagcagcgctgggccttgatgctccagggcagtgcagggattagagatctgagaggtttcatgacgcttctcaggggaatacacgggttctgggttcttctaaggaagctccctccatgccagccaccaccttgtctctgctggggaaacagtggtccaggggccctcaactgcagggaaattattgaacctcccaatgtcactgcatctcctctgggtcttcttttattccttctttcccctagaaaacaccttctgacacackcccgctctgcctgtctgtcccctgctgcggccagacagcgagcagggaagaaatcc

SEQ ID NO: 262573 - DNA, 595 bp, Homo sapiens
tagcccagccaacatctggctgacccccaaatacacagaaagacacacacacagagctgcaggaccacctgcagctgaccacaaacaaatgaactgagtgagcccagtcaacaccagaataactacctagccaagctacacactctcaggctacataaaggcttattatttttagtcactgagattctgggtggattcttttcagcattattgtggaaatacataactgatatacaaggggccaaatgagaagagcagaagaacagccacattgtcaaaaacatatattatttttcaagagctttccactggagtggaagctccttctgctyaattgttcagtgattacaatgctatagaatagattactaaaatgttcttatattaataatctcaccctggaagtcctaaagctcataatgcaattacttttttaaaagtcattgcttagcaaaaaagcacaagtagcattataacatatttactgatgggttttaaaatagtaagatgatatggtttggctgtgtccccactcaaatctcatctcgaattgtagctcccataattcccacgagttgtgggaaggccagggtga

SEQ ID NO: 262574 - DNA, 627 bp, Homo sapiens
catccattactccctgtctttttgataaaaaccatttgaactgggttgagatgatactcattgtagttttgattttcatttatctgatgattcatgatttggcaatttttttatatatacctgtgctggccatttgtatatcttcttttgaggaacatctattcagatcctttgccaatttttttttatttttgctattgagttgcttgagctccttgtatgttgtggttattaatctcttgtcagatggatagttgcaaatgttttttcccattacrtggattgtctctccacttttttgattgtttcctttgctgtgcagaaacattttagcttgatgtaattctatttgccggtttttgcttttgttccctatgcttttgaggtactatccaaaaaattcttgctcaggacaatgtcaagaagcatttcttctaggtttttctctaacacttcaataattgcaggtcttgaatttaagtctttaattcatttgagttaatttttttaatctggtgagagagagaagactcgtttcattcttctgcatatggttatccagttttctcagcaccatttatctaagagaatgtcttttctctatcatatgttcttgacacctttgtc

SEQ ID NO: 262575 - DNA, 645 bp, Homo sapiens
tggtctcttcatgcatttttatgccactattatgatgatttggttactacagctttgtagtatattttgaagtcacatagtgtgatgcctccagctttgttctttttactcaggtttccttgggctattcaaggacttttgtggttccatataaattttaagactttttttctaattctgtgaagaatgtcattggcattttgatagggattgcactaagtctgtaaattgcttttgttagtagtgtcattttaacaatattaatctttttaatcatgagcatagaatgyctttctatttttgcatcctcttctatgttttcatcagtgctttatagattttgggtatagatcttatctttctaaaaacactatatcttaatatagtcacattctaaggtacttggggttaggactttaacatatgaatttgagagggtagggaacgatagcccccaaatactcagcttataacagagctgtatttagatgccttaagaacaaagtatcaagttagcagaatatttacaaattagcacaagataacttattttgtgcgtttatagacataatcaaaccttcaggcaaaaaatatatatatctgaaatgctattttcccaacagtatattgcctatcattcaaccc

SEQ ID NO: 262576 - DNA, 556 bp, Homo sapiens
ttttatgtgtaaaattgtttgttcatctggtgtatcaatgagactagtgaagattacaatgaatgtatttcatggactagactagctatcaatgaaatatattttaacattttaatcagatttttagaatgaggaaagggtatattttcattactaatcaaatggttgcaattcaaaaatgtacttgtaattcatatggcggccaaaaaaaagtaaaacacaaccactttgctaatgggaaactgattctatttctaaataagcagtaacaacaaattacaaagctgaaagaagcctaatcactgtctatttttttaaattaatgttctggttttgcactaaccctagattctacacacaaaaaatattgaaagaaaaaaaaacattagttaatggtaggctgcttatactcagggaatagaggagatagcagtgacytagataacttgggagaaaaacaaaattttatgtgaattatcttatgctaggtaacctgtataagataatacatctgtgccacgtatgttcctaaagttcaatatgcacaactaccgtt

SEQ ID NO: 262577 - DNA, 567 bp, Homo sapiens
tatgtatataaacatcttctttcatccagtccactgttgatgggaacctaggttgattccatatctttgctattgtaaatagtgctgcaatgaacatatgggtgcatgtggcttcttagaagaattatttatattcctttaggtatgtacccaataatggaagttgctgggtcaaatggtagttatcttttagattctttgataaatctccaaacttcttgagatggtttgaacatatgtccttacccaaatctcatgttgaattgtcatttccaagtgctggaggtggggactggtgagaggtgtttgaatcatggggatggatctcttatgaatggcttgggccatcccattggtgataagtgagctcctgctctgmgttcacacgagatctggtggttcaaaagtgtgtggcactccccctccaatctttctcacttgcttctgcttttgccatgtgacatgcctactccccctttgccttccatcatgattgtaaacttcctgaggcctccctagaagccaagcagatgccagccctatgcttccaagcctgcagagccttga

SEQ ID NO: 262578 - DNA, 566 bp, Homo sapiens
aatgtaactgatttttgtatatttattttgtagcctgaaactttaccaaagttatttatcatttataggaccctttggtcagagactatggggttttctaggtatagaaccataagtgtagaatattttttaggtatagaatctcggcagaggaaaccacacttgcaactgcatatatgtataaaaccagcataytgccgtctataccagagtatgtatgtaaggaaaatgaaaaaaattaaaaatatagactacatttacaatacaatacatgtaagtgttggaaatacatggatgtttggtttattcttttatttacattttgctttatttgaatataacttttataaatatgtttctcaagtcagtgataaatatttgaaacaataactactgactcagcctagctaaaattctcaacatcaaatgccaactaaaaagaaaaaggcatggatgatcttatttggtgtgtttgcaaaggccatctttgtgaaactttaatttaaaagaaagagtgaataattatatattttctgtcatacccatacaaagaaacctgtctgaaa

SEQ ID NO: 262579 - DNA, 539 bp, Homo sapiens
ctgcaataaggaatagtccgctgggtttcttctgtaatcttgaatggccaacagaaagactgctcaattatgaayggcacaaggggtgtggcactgcagtcatgccagagcattcaccagttctcatctttacagtgttagtgatcgcagccaatgagattgattcccagtttataactttcaatatcctaccatccttaaaacatgacaaagccctttaatcagtttccattagaaagccaaacagtccaagaatattgttggatccttttttctaactggaaatctaggactcacaggaaggattcatatcctactatatattgcatttcacttggaaaaatatgacatatgacgcttctctcaagaatctctggctgctctgtaaatcagtctttaatttttctcaccccgtcctttcccttatttgaaccaaaattctctcctccatcatcaaattattttatgacacagagtagcctccaatttttgtgtgaaacctgggtccagactcatacctggaatccagaaactcattt

SEQ ID NO: 262580 - DNA, 552 bp, Homo sapiens
ggagttttaaagggcagcagtgacaagcactatattactcactattgagagaggggcaagtattgagcagcagcctccaggatatgtccattgcagcctggtcctggatcacaaatgtgttttaattaaatgtatttgcctttctgcgtattttattgtagccctagcacttagcaaagtatttcatatagacattcatacaacaaatatttgtggaaggaaagaaaagaggaaggagggaaagaaggagaggaaggaaagcaagcatgagtgcatcycaactcttggaatttcagctaaaatatcctgtatttattcaattccttgaggcactagacctacacctaacaagatcatgtatttattgagtacatttctagtaacatgtcaggcattatggagaaagaataacatagagaagtaaaatcacttagcagagcacttggcacactgtgtgttccataaacgttgagacattgagttcataaatgaaagcttgggcaagggcaagagtagaagggcagagagagaaagaaagaaaatgcaatgcat

SEQ ID NO: 262581 - DNA, 607 bp, Homo sapiens
cctttaatatttctgggtggtgagatgccaagctgaaggggagagtcatcttcagaagtgagtcaaaaggggacaaggagcttcacagaatcaaactctaagcctaaaaagtccaaaggaaggtcacattttccaatctccctatttttcagaaggagaacactgagacccggggtggtacatttatctcaagtgaaactgctaatgaggagcaatgctgaaatacwgaatcctggtctcccaaattccatgagtgcctgagtcacttgtggtgtggctgatcctggcagatgtagagatgagggacctgagacttgtccctttgggccagaaagtttaaagggcctggtgtctggatggtgtattcccccatgaaagcaaatcagaactaaggagcaggccctctgtcatttctcttggcccattactccccatcccccacctccaccctacacaggggcctcctaagatctgaggaacagtaaactttatcttatcggctgtttgggaaaaaactgtcatttgatctgtttatttggaagccagccctgctgagctcaagagtttgctatgaggccagctagagtgaattcgtttgggggctgct

SEQ ID NO: 262582 - DNA, 607 bp, Homo sapiens
cctttaatatttctgggtggtgagatgccaagctgaaggggagagtcatcttcagaagtgagtcaaaaggggacaaggagcttcacagaatcaaactctaagcctaaaaagtccaaaggaaggtcacattttccaatctccctatttttcagaaggagaacactgagacccggggtggtacatttatctcaagtgaaactgctaatgaggagcaatgctgaaatacagaatcctggtctcccaaattccatgagtgcctgagtcacttgtggtgtsgctgatcctggcagatgtagagatgagggacctgagacttgtccctttgggccagaaagtttaaagggcctggtgtctggatggtgtattcccccatgaaagcaaatcagaactaaggagcaggccctctgtcatttctcttggcccattactccccatcccccacctccaccctacacaggggcctcctaagatctgaggaacagtaaactttatcttatcggctgtttgggaaaaaactgtcatttgatctgtttatttggaagccagccctgctgagctcaagagtttgctatgaggccagctagagtgaattcgtttgggggctgct

SEQ ID NO: 262583 - DNA, 607 bp, Homo sapiens
cctttaatatttctgggtggtgagatgccaagctgaaggggagagtcatcttcagaagtgagtcaaaaggggacaaggagcttcacagaatcaaactctaagcctaaaaagtccaaaggaaggtcacattttccaatctccctatttttcagaaggagaacactgagacccggggtggtacatttatctcaagtgaaactgctaatgaggagcaatgctgaaatacagaatcctggtctcccaaattccatgagtgcctgagtcacttgtggtgtggctgatcctggcagatgtagagatgagggacctgagacttgtccctttgggccagaaagtttaaagggcctggtgtctggatggtgtattcccccatgaaagcaaatcagaactaaggagcaggccctctgtcatttctcttggcccattactccccatcccccacctccaccctacacaggggcctcctaagatytgaggaacagtaaactttatcttatcggctgtttgggaaaaaactgtcatttgatctgtttatttggaagccagccctgctgagctcaagagtttgctatgaggccagctagagtgaattcgtttgggggctgct

SEQ ID NO: 262584 - DNA, 582 bp, Homo sapiens
acatactattgtctggatgtaccacagtttatttagccatccacaaactcaaggacatcttaattactaccaaattttggcagtgatgaataragctgctataaataactgtatgtgggttttttgtatggatgtaagttttcagttcctttggataaataccaaggaatagactgactggaccatatggtaacagtatgtttagttttgtaagaaactgccaaactatctttcaaagtctgtactattttgcactccaaccagcaatgaatgagagtttctgttgctctacatcctctccaacatttggtgttatcagtgttttggattttggccatcttaattggtgtgtagtggtgtcattgttttagtttgcatttccctgatgacatatgatgtggagcacctttttatgtgctcacttgccatctttgtatcttcttttatgaagtttctgttaaggtcttctgtccatttcttaattggtttgttattgttgaattttaagggttcttgtatcttttggataacggttctttatcagatgagaatattttctcccagtctgtggtttctgttctc

SEQ ID NO: 262585 - DNA, 548 bp, Homo sapiens
gtgccatggtggtttgctgcacccatcaacccattatctacattaggtatttctcctaacgctatgcctccccttgccccccacccccaagttgtgtaattttttwaaaaaaattatagtacttggtgtcaaaaccttgtccctgatatcagcagtatgaattattaatagataccatctgaaaccctggagggaagtaataagcttttaaagatgttcatcctgatgattagcctgtcatctttcatggggccctgaaatcaagaatccaccctttttcacatggatataatggatttaatacagtatttagcattatgcactgtatatatatgtggtcttttccctctaggtggctctctgggtctatatagatacaaactattgagaaatgtggctattcctacctttattttgcttctgtgttctgtgggactgtgaattacattttagtaaactgtgaagcccatgaacacatagtatcagctgctcaatttagtgcaagtttgaaaaaggaaataataaagcaaataagaattaacatttat

SEQ ID NO: 262586 - DNA, 609 bp, Homo sapiens
tggacctagtagcagaattgctagataacaactaaggatgggaagcgggggaagcacatgggaggattccccagcttctgctaaaattcaaccagggtccattctctgtgtggattaacttttggggaatayaataacagctgaaaaagcaatggaaattttctaatttttcttgggttattcaaatcatgattatttggaaaactgtgtgtggtttttttaaactgatatgggtaactttgtcagcttttattagaaaccaaaacatgaatctaatttcaactgtcataggccctagatcaggggaagaaactgcctttttttggtatgaaataataaatgcttcatgggatacagagagttgagagttgagaagggcatttagtgtcattcttgagtttataaattagaattccacctcttctggatgagggtttatatggccaggattaccttcaggaaacatggatgtggaatggcaccgtatcattggcttttatttttagggatgttgttggaagaggaggatgtgtctttcagttaacttttccccttgtcattgttacatatttatgtttgaaaatccctttttaatacttcggagcattt

SEQ ID NO: 262587 - DNA, 296 bp, Homo sapiens
aggtgcttttttgtgtgggcaattattcartttagcgttctatggggaggacaatcagtagaggtttccatttggccatctcgctcctcctcctctgttccaattctgagtccagcaaacaaaaatagcgccctttggaaagaagctactataggacaagcttagcagggagctatgcttcacctccatgagagcagactacctacctaactatttactttggaaaagagctccagatgaaggcctgatgagattcccatgcttactctgaaatcatcattttggaatcagtcatt

SEQ ID NO: 262588 - DNA, 548 bp, Homo sapiens
gtccaagggagatgggggaactccttgcagaccaaaatttttaattttatattttgctattaagccatgcttatggtgaacatctccagtgaatgatccataataacaaaagagatcctttatatatgtgtgtgtgtgtrtatatatatatatatatgcgtgtgtttatatgtatatatgtgtgtgtgtgtgtgtatatatatacatatatatatatatatatatatctcgtatattgtccaatccttttaacctagaatatgggataaaaatctgctcccagtagaaatgccatgttccttaagaagtccctcacactctgcagtgggagacggaggaacttgggaagaacttggcatcacaggagacttgtgagactttgtttttgcagtcagtatttgctctgaaagcttgtgctggggacaaaagtgagtcatatgttatggggaagctcagccattcatgaaacaaaaaaaacttaccttaaaaaatcatatccaagttgttgctcaaaggtcttttttaggctttttgtaattggaagaaaa

SEQ ID NO: 262589 - DNA, 614 bp, Homo sapiens
gaaatgtatccaggaatttaccttcctagaaattacrccagggctcattttgggctttttgaagagttacaggagacattctgtgattataacagtggttacttcgctaggaaacattcatggaacatgtacttgttactcttttctttatgtaattcttagatcaaccttgtttcctatgaataccggcaaaaccaactcgtccattgtctacactatgccaagggaaatatccacatcaacttgaaataagataaggagaaaaaaatagaaagaaaattacttctaggcctttcattgcttattatttgcccctattctgccctccgtgtttttacttgctgtgatccaaggcaacacactcatgtagcagctcctaactgtgatcatcctagcacagtatgagtcactaagcaggagaagcttcttattttcctttgaattacaagccctgtgcttgagagatggttcaataagccccctacagaatcacatggaagacaaacttccatgacaccattagtctcatacctgaaagtaatttaaattttttcccttacaaaactaaattgtagaaaattcagaaaatgcaaatacacaaagaaaaaaaaaag

SEQ ID NO: 262590 - DNA, 495 bp, Homo sapiens
ttctcctgtttaaaatgctttttggcacttagggttttgagactcgtaatcacgccttttcaccttaaattataaagcccttttatggctgttactggactttctagggaggcctgatgcagtgaagcctgaagttcctgcttaaggctttgagcatagagggtttctaacaaaaggtactaaaatctactgcaaaacagatgatttttcattcaggaacatgtattcgtgaagaccacactgactgaagtgaccttagtgtttctaagtcaggttgtgctgatctgtctctcttagcagcttctggagatctaaaacagtcgtctagcatgataaatctctgcactctgcattgttgaggcagacrctgtcacggtggaagtaaatgagcatgatttatatttacaattcagaaacttttcttttaaatggaagcaaagctgggactatgtctattatgcctaaagactgcagcaatattgcaagtaactacaa

SEQ ID NO: 262591 - DNA, 600 bp, Homo sapiens
  misc_feature (1)...(600): n = A,T,C or G
ttggaaatatatctccactccaacctacctgtaacctgaaattacacctttaaaaagcttaccatttatgtttcataaatttttagtgtggtagagcatatttcattttaaataactccctcctcctaccatgaatcttcagatgaagtacattagaatgaggtgcattagatgtgggaatcatctgctgaagtatcatatttaaatctaattctattaaacactgcaggacactgggcaaactggagaagtgcaacgatcatttcaatgctctcagtatagaaactgatgctccccaggctgagaaaagaaattaggatctggtaagtgataaagtaatagacaggagctttgaaaagttcgatgargctgtggggcataccacagaacattcagactgagcannnnnnnnnnnnnnnnnnnnnnnnnnnnnnnnnnnnnnnnnnnnnnnnnnnnnnnnnnnnnnnnnnnnnnnnnnnnnnnnnnnnnnnnnnnnnnnnnnnntatagttccattttaataatggaagttgtaggagattgatttatagaacattttgaaataatttttttattatacaaaatggaatatttacatggc

SEQ ID NO: 262592 - DNA, 587 bp, Homo sapiens
actggaaaatgtggaatcaaatattaaagagcaaatatagactagaaagggggtggcacattgggaaaagaaagacaaggacactgaaggattttrctgtccaagcaaaggaaaattattctaactttgtgtaacttttgcagctttgttaatattagaagatgtagctattattagattgacttttttttatgaggaaattaaacaaggtcatttcagtaacactgagaattcacactttctgcgaaaccactatttcctcaaggggctaataggagctcaacatggataggaaaaaccactcctttcatatattctcagaatagttacctaactcataatggctggagattgaaaaggcctattcagttcttggctgcagcctccagggactcagggcagcatttttctttgttctgtagtacattttcccctgttttgaatggttttatttcaatggcctcaaggctttctcttcttccatggaaaactgattccagattctagccaatctcatcataaaaattactttcttaccaggaattaaaagatgtctctctttttgcgtgtgtgtgtgtaaaaagaga

SEQ ID NO: 262593 - DNA, 594 bp, Homo sapiens
gtccatcatcacaaaatgggatttattccaagaatggaagattggtttaacattccaaaaatcaattaatgctatttaccgttttgatcaaataaaaataactatgtgattattatgatagatatcaaagttatttgagaaaatttaacatcatttatatgatagaaactatcagcaaatgtagaaatagaagaaaattcctcactccagtaaagagtaactatgtacaaccaggaaacacactaaatgataaaatattgaacattttccacctaaattgggaagaactcaaggatttcaactcttaatctatttgacattgtaatagaagttctaaccataacaataaggtaaaaacaataaagtgtatattgatgagaaagaayatcactcttaattgcagataatatgattgcttcagaaatccaaaaaatttacagaactactaaaaatgatagatgaagttagcaagataataaaaaagttaagattttaaaacattttatttataccctattaagtataaattaaacataatttgtgaaaataatgtatccatcatagttttgaaaaatgcttaaaaataaatatagt

SEQ ID NO: 262594 - DNA, 588 bp, Homo sapiens
tagtcaaacaggttttagaaagcctcctgtttccagcagagataactaatcatacttaatgtaaatggtcatcagaaagggaacactatagaagctgtaggaaacaggcttgcagatgaagctgctaagcaagcctccctagaggaagaaattagactatttagcctgatcccagacctccctaagatagtattaaggcctcagtttaccaaagaggagaaaggagaattaggataggggtcactcaaactgaagatgagaaataggtacttcctgatgtgagagatgataagtaaacccctaatgagagaactaatgaatatatkatgcaaagggagaattggggacccctggctctgtgtgatgcaatacttagaaattattggtgtatagggatttatatcctcgctaaacaagtatgtggaagttgtgtaacttctcaaaggatgaacaaaaagttaattagaagacaggccacaggaggacgacctcctggactaagaccattccacagcattcaagtagatttcacagaaatacccaaagtacaaagagtaaagtatttgcttgtgatcgtagatcaccttt

SEQ ID NO: 262595 - DNA, 659 bp, Homo sapiens
ttcatcccttccactttttaacttcttgtcatttctatttatgtcctattatactctatgtcttaaaaagttgtagttattatttttgataggtttatcttttagccttcctattcaagatactaacaccacagttagtgttttaatattctgtatttgtctgtattcttactcttaccagtgagttttgttcatcagatgatattttattgctckttaatgttttttttaaaaactgaagaactcccttttgcttttcttgtaggacagatctggtgttgatgaaatccctcagattttatttgtctagggaagtgtttatttttctttcatgtttgaggtatagtttccccggatataatattgtaggataaaaggttttgttttattgtttttaccttcagccttttgcccccctctaagtttaaatatggcatgccactctctcttggcttgtaaggtttccactaagtctgctgccagaagtattggagctcctttatatgttgtttcttttctcttgttgctttaggattatttctttattgttgatattgggagtttgattattaaatatcttgaggtagtcttatttgggttaagtacttggtgttctataacctttgttacttgaagatatatttctcctggtttggaaa

SEQ ID NO: 262596 - DNA, 659 bp, Homo sapiens
ttcatcccttccactttttaacttcttgtcatttctatttatgtcctattatactctatgtcttaaaaagttgtagttattatttttgataggtttatcttttagccttcctattcaagatactaacaccacagttagtgttttaatattctgtatttgtctgtattcttactcttaccagtgagttttgttcatcagatgatattttattgctctttaatgttttttttwaaaactgaagaactcccttttgcttttcttgtaggacagatctggtgttgatgaaatccctcagattttatttgtctagggaagtgtttatttttctttcatgtttgaggtatagtttccccggatataatattgtaggataaaaggttttgttttattgtttttaccttcagccttttgcccccctctaagtttaaatatggcatgccactctctcttggcttgtaaggtttccactaagtctgctgccagaagtattggagctcctttatatgttgtttcttttctcttgttgctttaggattatttctttattgttgatattgggagtttgattattaaatatcttgaggtagtcttatttgggttaagtacttggtgttctataacctttgttacttgaagatatatttctcctggtttggaaa

SEQ ID NO: 262597 - DNA, 657 bp, Homo sapiens
gattttaggtggctcaccttgtccaggcatcttggctccccacagaggccatagacaaacctgagactgttactcagaagggagtggaggcaacacaagcagaaaagcaggcattgtagcaagcaggcaaccttgtgcatgagccaaggtaggaaaattggactatcagtactgccttggtggttgggcattttcggaggttgagtgtatgtgactgagatgtatcttagacatgaagcgagtgcggagtcccaatccgtggttctgttctcctgygagggaagctgccagagatggacaaagcaaatcttggggtgtgcaagaaacctccagtagtgtggattgaatacacagggaaaagctcagacatagagactgactgaaaatgggaaacagaaattcaaggcctatgggataaaggaaagagggagccaaagagactccctctgacattcccccagatagtcctttggggagaatgtttcaggtttggagggacaaccctcaaatcagggacacggagaagcaaaagatggtaaagactgctatttaatctggtccaaagaccccattcataagccttcagtcttttggcctaagtttggctcaggtgaggattgggagtgccaacctttaattatgtgaataataaaaccc

SEQ ID NO: 262598 - DNA, 548 bp, Homo sapiens
atgaaaactctgaaatctagaggaaagcaaggcaagaagtggaaggagcagacaggcatcaagcccaccagtatgcatgggctagttcaaagaaaacctcagacagtgatgtgccgtctgtattgggatgtgtccacacatccacccagccacctatggccaccttatgtgaggaaagtctatttgtcattaacctttttcctacaatgccctaccctttttgtttttttttttttttttgaaaawcttgtcttctaacacgactgagttcacacctcttctctgatgattccctttcccattcttccttagcattttgagctcacttctgtagcacctaaaacattgcataatggtcttttgcagccttttccaatggttaaactgtatacttataattagtagggactgtattttattcatatttctatccttagcacttatttcttagaaagtgttcagtaagtgtatgtgtggagtgagtaaataagtgaatcctggaatccatgaagggccccaaagtgactgttattttttatgtaattcaa

SEQ ID NO: 262599 - DNA, 611 bp, Homo sapiens
atagccttttttctctactagcacttcgttgcctccttcattatatacaaaacaaagtaaagagcctaattatcttggtctgagcagatggaaaggaaatcagggtattgatctttagggcaatatcttagggcaatgcatatgactaataagctgggcagttaaagggatggtccttcattgacaatggtaagaaaaagacatcttattcactgccccagattaactcaggaaaaagcaagagatgctttctgcccttccccctctactgcctccatttccccagcaagaacaaaaccattgcacatggtttttaaaattagcgttcatagagactggagaaatagaaacaaatcatgccaggcggaaaaacgttgagataattctagcctgaaatgataagcagagtatggcagtgaaagcaaacctacaactttaatggaaccagggaattcctgtctttctttgaggcttcataatcwgagtatcttacatttccaggccactagtgagtgttctactggggacacagaattcaatttgtgttaaaaatgctagaaaagttgtagaaaatggtgatacaggataaatgataaactgtcctaagacaa

SEQ ID NO: 262600 - DNA, 489 bp, Homo sapiens
aggaggatcatgaggtcaggagttcgagaccagcctgaccaacgtggtgaaaccccatcttcactaaaaatacaaaaagtaggcgggcatggtggcaggcgcctgtaatcccatctactcaggaggttgaggcaggaaaattgcttgaacctgggaggcagaggttgcagtgagccaagattgcaccactgcactccagcctgggcaacagagcgagactccagctyacaaaaaaaaaaaaaaaaaaaaaaaaaaacataaattgttagcagcatacctatataataaggaatgttaaagaaagtttgtcaggcagaaggaaagtactaccagatgaaaatctgaatctgcacaaaggtatgaagagcatcagaaatgtaactatgtgggtaattacaaaatgcttgttttcttattgtgcaaacctctttaaaaatgtttgactatttaaagcaaaaataatagcagtgtattatattgttgaattta

SEQ ID NO: 262601 - DNA, 534 bp, Homo sapiens
ctctggtaatctaataattgtattaagagattatgaatttaatattaatgactttttttgaaagtyttcatagtatatattaataccctcttccactatgcaaaattgaacagcctttgacttttcgtggagaacaaagttgggtttgttgttattgttttttgttgtgctttcatcagcatatgcagcatatgcatcacttcaaattgtatctatagatttatcatgaaaaaagtaaattattgaattctataacaattcaaaagtcaaattgtaggctattggcttattcagtgtaaggtatgttttatggcttggtgacctctgacctatttaataagctgttttttcttggtcttaggacatagattgtttaaaaaataaaacaaatgaacagacgttattctttagagcaattttaggtttgcagcaaaattgagaggaaggtatagcaatttcccatataccccaagttcctccacacgtgcataacatcccctatatcaacatctcccatcagaatggtacattttt

SEQ ID NO: 262602 - DNA, 534 bp, Homo sapiens
ctctggtaatctaataattgtattaagagattatgaatttaatattaatgactttttttgaaagtcttcatagtatatattaataccctcttccactatgcaaaattgaacagcctttgacttttcgtggagaacaaagttgggtttgttgttattgttttttgttgtgctttcatcagcatatgcagcatatgcatcacttcaaattgtatctatagatttatcatgaaaaaagtaaattattgaattctataacarttcaaaagtcaaattgtaggctattggcttattcagtgtaaggtatgttttatggcttggtgacctctgacctatttaataagctgttttttcttggtcttaggacatagattgtttaaaaaataaaacaaatgaacagacgttattctttagagcaattttaggtttgcagcaaaattgagaggaaggtatagcaatttcccatataccccaagttcctccacacgtgcataacatcccctatatcaacatctcccatcagaatggtacattttt

SEQ ID NO: 262603 - DNA, 534 bp, Homo sapiens
ctctggtaatctaataattgtattaagagattatgaatttaatattaatgactttttttgaaagtcttcatagtatatattaataccctcttccactatgcaaaattgaacagcctttgacttttcgtggagaacaaagttgggtttgttgttattgttttttgttgtgctttcatcagcatatgcagcatatgcatcacttcaaattgtatctatagatttatcatgaaaaaagtaaattattgaattctataacaattcaaaagtcaaattgtaggctattggcttattcagtgtaaggtatgttttatggcttggtgacctctgacctatttaataagctgttttttcttggtcttaggacatagattgtttaaaaaataaaacaaatgawcagacgttattctttagagcaattttaggtttgcagcaaaattgagaggaaggtatagcaatttcccatataccccaagttcctccacacgtgcataacatcccctatatcaacatctcccatcagaatggtacattttt

SEQ ID NO: 262604 - DNA, 534 bp, Homo sapiens
ctctggtaatctaataattgtattaagagattatgaatttaatattaatgactttttttgaaagtcttcatagtatatattaataccctcttccactatgcaaaattgaacagcctttgacttttcgtggagaacaaagttgggtttgttgttattgttttttgttgtgctttcatcagcatatgcagcatatgcatcacttcaaattgtatctatagatttatcatgaaaaaagtaaattattgaattctataacaattcaaaagtcaaattgtaggctattggcttattcagtgtaaggtatgttttatggcttggtgacctctgacctatttaataagctgttttttcttggtcttaggacatagattgtttaaaaaataaaacaaatgaacagacgttattctttagagcaattttaggttygcagcaaaattgagaggaaggtatagcaatttcccatataccccaagttcctccacacgtgcataacatcccctatatcaacatctcccatcagaatggtacattttt

SEQ ID NO: 262605 - DNA, 234 bp, Homo sapiens
tgcccacatatttattaacagcaagccagtcattagcattgtttctatagatatttgattaactaaaagcatcccttatgggaaatgaagggatgggccgaattaaaggaatagrttgggctagttaactgcaagaggagcatgtccttaaggcacagattgctcatgctattgtttgtggcttaagaatgccttatttaagcagttttccaccctgggtgggacagttgttcc

SEQ ID NO: 262606 - DNA, 629 bp, Homo sapiens
aggaattaaagacacacacacagaaatatagaggtgtgaagtgggaaatcaggggtctcacagccttcagagctgagagccccgaacagagatttgcccacatatttattaacagcaagccagtcattagcattgtttctatagatatttgattaactaaaagcatcccttatgggaaatgaagggatgggccgaattaaaggaatagattgggctagttaactgcargaggagcatgtccttaaggcacagattgctcatgctattgtttgtggcttaagaatgccttatttaagcagttttccaccctgggtgggacagttgttccttgccctcatttccataaacccacaaccttccagattgggcgttagggccattatgaacatgttacagtgctgcagagattttgtttatggccagtttttggggccagattatggccagattttggggggcctgctcccaacacttggcttattcatctctccttttcctctaatccctgacaaccaccaatccttttactgtcttcatagatttgttttttccagaatgtcatatcattggaataatacagtataaagccttttcacattcccttcttttacttagtaatatgcatttaa

SEQ ID NO: 262607 - DNA, 234 bp, Homo sapiens
tgcccacatatttattaacagcaagccagtcattagcattgtttctatagatatttgattaactaaaagcatcccttatgggaaatgaagggatgggccgaattaaaggaatagattgggctagttaactgcaasaggagcatgtccttaaggcacagattgctcatgctattgtttgtggcttaagaatgccttatttaagcagttttccaccctgggtgggacagttgttcc

SEQ ID NO: 262608 - DNA, 537 bp, Homo sapiens
ggtgatatttatcttaagtttcataaacttacataaacattattctcactcttggtttgcttctttatttttcaaagagtagaggttatatatacataatgtccaattcaatccactataaattcactctggctacatgatgccaaacatttggctatagcaataactaaaatttaacattaagaactttttcattgcttgtatggttgtattgataaagatgaacccaaataagaataagttaggaaatgttccaaaagaaagagaatggggagcaaagccagaaaaacaaaaccaaatattcatgaacagcagtccacgccaatgaaattggaaagaattagcaagaatcagaatcttttttacsgtgttgtgaaagagattatgatattaactgtcatgccttataacagtgctaaataatgagtaacaggtgaccagcttttctggaattgaagttcaggtcaatatcctagaaaatctctacatttatattttcaattaagaaaatatgttttctttttgggagggaggagt

SEQ ID NO: 262609 - DNA, 625 bp, Homo sapiens
tagctctttgaaggactcttgggtgctttgtaaaccactgccacaatgaaagcagtagaaaagattctgcaatgccagccacaggttccttyaagttgacagagattgcagttttactaaggtggtttaggggcagttttttccctttctctgatatttggtatccaggagggctgattctaaggaaaatgaaaacaagtttctcattttaggtgctttgagcatgaggttttgataaatctgaagttttagctttcagtagagttccacaggtgcttggaaagctgtgaagtttaaattattacattgcatgcactacaagttttccaagattctgtggagaagaagaaagacatattctggggaaaggtaaattaaatttgattacccaataattttcagtaaacatatatctatatgtataatacttgataaactatattctaagatgtacatttgtttcatattttaaccttcgaaattggaaaatgtcttattaatgtacatatttaatgtggtggtatttttgtttctctcagaaaaactgttgtcttggaattgcacaaatacaatatgcataactggaaataaaatgtatccctgcacacatccctctacccagaat

SEQ ID NO: 262610 - DNA, 546 bp, Homo sapiens
tgataaactatattctaagatgtacatttgtttcatattttaaccttcgaaattggaaaatgtcttattaatgtacatatttaatgtggtggtatttttgtttctctcagaaaaactgttgtcttggaattgcacaaatacaatatgcataactggaaataaaatgtatccctgcacacatccctctacccagaatggttgttgaaagtgaataaaaaactgctgctgttctccgtaatgatgtccagtgtgtagattttgctgaactcaggatgtgaatgattgctgtttttgtatcttctgtctcttagaaaaaaatataattccttaagattataggaaaagaaaaagascccagggagataaggagtgattgggccattgattcaagcatttctaattagtaggacagaccacctcccaactgagtgacccacaacccagtgaggagtaagactgttctaccaaaatgcccctaaatctccttaattgtgttattgagactgacttcctgtaatttggatgcaacctatttgatatcaccat

SEQ ID NO: 262611 - DNA, 512 bp, Homo sapiens
gttgaggaaggggtgaagcaagcactcctgtggccactatagctgggactgggtcacacctgaggcctgaatggtacttgggtctcacacgaggcccatggtgactactgcctggctactgttgatgtttatgcaatgcccaagggctcttcattcagttggtggcaaatccttcaaggactgsgtcctgtccttcagggaagcaggtgcttttctgccccagggtgggtctaggaatatcatctgggacctagggcctggaatcagaagcttcaggattctgcctgatgctttattttactgtggctgagctagtatccaagttggaggagaaagtcctctttactcttccttcttctttccacaagtgaaaagagtctcttgttaagcttcactgcctggagttagaagaggggtgccatacgtactcccttggctgtctcagctggtgtctccctgggtcatgtggaccccaagtccactggctctgagtccagcatagcaccaacact

SEQ ID NO: 262612 - DNA, 551 bp, Homo sapiens
catcatgtacacagagttaactctgctttacctactaacatatagacaagatgtagttcaaaacacgtttgattgaagaggaaaactgcagtttctacttacacctgaacattctcctgaatattatctatgccacagtttctaaaggaatttacttttgtaacatgaatgatctttacttatcaggaaatatcaaaaacttagtttcaatggcaaatgtgtgctatgtaggaaaattagayacaagtaattggaagttttaaaatccaaatgaagttttgatcaacgtattctacacaacaaataattatgatgtttattttgctacctgcacataaaatgcttccttggctgctttcctgagccatacaattattttaagatgtgtttttcatgctctctgcagtcagagatatgtttcttttttaatttaaaataaaacgactttttggtaatcatatcaatttttctttcgggaagacactacttttttttttaacttactgtttaaaaaactgtccaaatcaatataactttcatggttgggtact

SEQ ID NO: 262613 - DNA, 574 bp, Homo sapiens
tttaactttggtgaaattccactggattatggaaacagtgtagggttttattatgagcataagatgagccttattaaaagactgggatatttattattcaagtcatgtctacacctcattagaagctgtattatgaataacttactcacattcaacactgattttataacatctgaaaccaagcatcagtaccaagcacaaatgagaggaataaatttctccaatccttaggtcatcccgaagaaacaaaatcatatgacaagtasatgattattttaaaaatgattttggataatgccgtaacactcaacctcccaaaacattaaatgtgttggtttccttaaagacatattttaaaatgccacatctgtcttgaatatggcatactaaaaaattaggataataaaatagggctcttaatatttcacaaagtttgaaaatgatagcacagatatccagcccccaacctatattgcagcactttttgtaaacaggaaaaaggacacactaaaaattgatatgttataaaaaaaaatactgacacagtattcagtatgtacaaaagagcatggac

SEQ ID NO: 262614 - DNA, 605 bp, Homo sapiens
gttgtttacttcaatgaacattctaatgataggcaaaataattgattctaggataatggatttcccaacttaatatttcctatctgcacttaatatttcccatatgcatgagtttgcaagtctctttcctgttccatcattagcaatcagtacarctctaaaaaggaatggtatatcaaataagaagtaaattagctaatgtcagggaaaagaatggctattagttcacagaaaatttgagagagaaccactctagtgtgagaaattcacacagagacaccagtgagtttctgccatgaactgatcctactcaatcccttttgagtgggggagttgcataccttaaagcccttagctacactatctctagatcccatcctgagctgcctttaccacttccaactttgtgtgtttactcaggtgtgcatgttctgatttttacatagaaaagaatcatgaatcagcttttgccagctggctatgtatgatgtggcaatggaaacattttattttaatgaaatatccgcattctgttgggtctagtatttggtcaagtgtctcaattttcatctatcagtttaccctaaccacccattgataactcc

SEQ ID NO: 262615 - DNA, 540 bp, Homo sapiens
agagttcaacacgatgatcatgttaagtgactaaagaattcacattttcctgatccatgtgaaggtagtctgagcaaaactggtatcccagcacatggagaaatagggctttggctcttattactctatttattattgggrttgactggtctgacttcctagggggtgcttcttttttctgatacctccaatagcctgaagctgggcaatgggtcaatgaagacagtgttcttagcctacacaaagccacttatctgtacacaggatgcttttctgctggaacttggagtaagtgtttaaaaaacattaatgagtgattcttggatactatctctgaatgagaataaatctatgccctgttttatctcctttctttaaattctcttttttattatttattttcttccttctctcattattttctttatctctcattattcttctttctccttttcttggagatatttcatgctattagagctttcatttcaaaagtctgtattcaatgacaagtgaaagagagcagtacttgttttcatt

SEQ ID NO: 262616 - DNA, 645 bp, Homo sapiens
aaaatgcagtcagagacacagaaaaaagactttatgttcaagaagaccaattcatccaaggtcttcttgaatcccaaattgaccagtgtcatcataggaaatcagaaagctaagttgaaacaaaaatggatgctaagagcattgcagcttgtcatactccccgcaacaacgtcatgtgctacacaatacagaatctttcatcagcgaawgtataaagccacttaatgtgggcctttagggagtcttctgaaaagaataaaaactgaaaatgttaaagccacgaacttcaagcgtgcactaagtactaaatagcagagctcttatctgaaatttctttctccagaaaacccagcccagtgataaactcctatcacttcataatatttacttatactgctcattcacttatactgctactcatttagtcatattgttctatgggagtacatgtgactctcttgttatttcacctttcgcctatatatgtgtgtatctggattcagtacatgaataggattgtgtgttacacttccttgtgcccacaaagcctccacagtaggtttctaactagactgaaagatgagtagctattgatggagggataaaattaatattaatgacaacaaattgttgaaagtgaataat

SEQ ID NO: 262617 - DNA, 645 bp, Homo sapiens
aaaatgcagtcagagacacagaaaaaagactttatgttcaagaagaccaattcatccaaggtcttcttgaatcccaaattgaccagtgtcatcataggaaatcagaaagctaagttgaaacaaaaatggatgctaagagcattgcagcttgtcatactccccgcaacaacgtcatgtgctacacaatacagaatctttcatcagcgaatgtataaagccacttaatgtgggcctttagggagtcttctgaaaagaataaaaactgaaaatgttaaagccaygaacttcaagcgtgcactaagtactaaatagcagagctcttatctgaaatttctttctccagaaaacccagcccagtgataaactcctatcacttcataatatttacttatactgctcattcacttatactgctactcatttagtcatattgttctatgggagtacatgtgactctcttgttatttcacctttcgcctatatatgtgtgtatctggattcagtacatgaataggattgtgtgttacacttccttgtgcccacaaagcctccacagtaggtttctaactagactgaaagatgagtagctattgatggagggataaaattaatattaatgacaacaaattgttgaaagtgaataat

SEQ ID NO: 262618 - DNA, 645 bp, Homo sapiens
aaaatgcagtcagagacacagaaaaaagactttatgttcaagaagaccaattcatccaaggtcttcttgaatcccaaattgaccagtgtcatcataggaaatcagaaagctaagttgaaacaaaaatggatgctaagagcattgcagcttgtcatactccccgcaacaacgtcatgtgctacacaatacagaatctttcatcagcgaatgtataaagccacttaatgtgggcctttagggagtcttctgaaaagaataaaaactgaaaatgttaaagccacgaacttcaagygtgcactaagtactaaatagcagagctcttatctgaaatttctttctccagaaaacccagcccagtgataaactcctatcacttcataatatttacttatactgctcattcacttatactgctactcatttagtcatattgttctatgggagtacatgtgactctcttgttatttcacctttcgcctatatatgtgtgtatctggattcagtacatgaataggattgtgtgttacacttccttgtgcccacaaagcctccacagtaggtttctaactagactgaaagatgagtagctattgatggagggataaaattaatattaatgacaacaaattgttgaaagtgaataat

SEQ ID NO: 262619 - DNA, 587 bp, Homo sapiens
cttctatgcagttcagctaagatcaatcccgatggctaaaactctcttaggtaccaccattttagcgtgtgtcctttatctaacactatataatggtctttaaatagtcgcacgaaaacctctctgacattgtcaccattattgaaacccaagagaatttgtgtcactataaactataagagtttgacgtttgatttggggggtacgtgttttattrgaaatggttgttgtaatgcaacttgaaagatatgacccacagctgaaaagtcagtaccagatatagaccaaggatttagcaacaccctcactagcaaagtaacaacatccagagtcctgcaaatctgaattaaaataaaacatcctatttggagtcctctgactaggtcatatggtatacacaaatatttttaaattatataatatcaaataaatttcataatttgagtacagtcataaataaaatccctgctgcccaagctctatttattgagaatatattcacatttattgctgcagagtgaagtgtatgtacatcaactcaaattaatttcagtcagaatcactatataactaattttgtgtgtttg

SEQ ID NO: 262620 - DNA, 587 bp, Homo sapiens
cttctatgcagttcagctaagatcaatcccgatggctaaaactctcttaggtaccaccattttagcgtgtgtcctttatctaacactatataatggtctttaaatagtcgcacgaaaacctctctgacattgtcaccattattgaaacccaagagaatttgtgtcactataaactataagagtttgacgtttgatttggggggtacgtgttttattggaaatggttgttgtaatgcaacttgaaagatatgacccacagctgaaaagtcagtaccagatatagaccaaggatttagcaacaccctcactagcaaagtaacaacatccagagtcctgcaaatctgaattaaaataaaacatccyatttggagtcctctgactaggtcatatggtatacacaaatatttttaaattatataatatcaaataaatttcataatttgagtacagtcataaataaaatccctgctgcccaagctctatttattgagaatatattcacatttattgctgcagagtgaagtgtatgtacatcaactcaaattaatttcagtcagaatcactatataactaattttgtgtgtttg

SEQ ID NO: 262621 - DNA, 532 bp, Homo sapiens
acttctgttcctctcaaaataacccatcagtgtccaattgcttttggatattgttttccaatttctgaaatgacagctaagtattttgataagtttatctatagagtattagtggttgcaaawtatgtttattgatcatctctccacggctgtcctcttctgtttctttattgaataaaaggcactccaattctttaaagaatttttagggcaggatgtggctatgggtaaaaacatgctatccaagataacagtgctcatgtgcttaaaacatccttcttttcgtggaccacattcagggcttcaaaataatgtgccacctaaaattacattatccaagaaacagaagtgcttagcccagcaaaaagaagacacatgaggttctattagcggaatacaaagagttaaagagtagtcttgtgataagcaaatttaatttaatccactaagctctaggatagccccagaaccactgtggttcaggaagtcaagattttactatgaattggaaaaagacttttgcaaaatgaag

SEQ ID NO: 262622 - DNA, 532 bp, Homo sapiens
acttctgttcctctcaaaataacccatcagtgtccaattgcttttggatattgttttccaatttctgaaatgacagctaagtattttgataagtttatctatagagtattagtggttgcaaattatgtttattgatcatctctccacggctgtcctcttctgtttctttattgaataaaaggcactccaattctttaaagaatttttagggcaggatgtggctatggrtaaaaacatgctatccaagataacagtgctcatgtgcttaaaacatccttcttttcgtggaccacattcagggcttcaaaataatgtgccacctaaaattacattatccaagaaacagaagtgcttagcccagcaaaaagaagacacatgaggttctattagcggaatacaaagagttaaagagtagtcttgtgataagcaaatttaatttaatccactaagctctaggatagccccagaaccactgtggttcaggaagtcaagattttactatgaattggaaaaagacttttgcaaaatgaag

SEQ ID NO: 262623 - DNA, 532 bp, Homo sapiens
acttctgttcctctcaaaataacccatcagtgtccaattgcttttggatattgttttccaatttctgaaatgacagctaagtattttgataagtttatctatagagtattagtggttgcaaattatgtttattgatcatctctccacggctgtcctcttctgtttctttattgaataaaaggcactccaattctttaaagaatttttagggcaggatgtggctatgggtaaaaacatgctatccaagataacagtgctcatgtgcttaaaacatccttcttttcktggaccacattcagggcttcaaaataatgtgccacctaaaattacattatccaagaaacagaagtgcttagcccagcaaaaagaagacacatgaggttctattagcggaatacaaagagttaaagagtagtcttgtgataagcaaatttaatttaatccactaagctctaggatagccccagaaccactgtggttcaggaagtcaagattttactatgaattggaaaaagacttttgcaaaatgaag

SEQ ID NO: 262624 - DNA, 449 bp, Homo sapiens
gggagttaaaccatgagaacatatgggcacagggaggggaacatcacacataggrgcttgtcaggggtttgggcaaggaaagggatagcattaggagaaatacctaatgtagatgatgggttgttgggtgcagcaaactgcctggcaaatgtataccaatgtaacaaacctgcaccttctgcatatgtatcccagaattgaaagtacattaaaaaataataataatgcaaaaaaaaaccccacttttatcctttaagtctatgtgtgacccaattctttcaggatgccgggaaagagctcaagatacagaaagctgtcacactgaccctctgcccttgtgaaaaggcagagggtcaattgagcttgttaaaacttaagccatctgtggacagcaaggctaaaacagcattgtaaaactggggctgcaggcatccacccctagacaatac

SEQ ID NO: 262625 - DNA, 449 bp, Homo sapiens
gggagttaaaccatgagaacatatgggcacagggaggggaacatcacacataggagcttgtcaggggtttgggcaaggaaagggatagcattaggagaaatacctaatgtagatgatgggttgttgggtgcagcaaactgcctggcaaatgtataccaatgtaasaaacctgcaccttctgcatatgtatcccagaattgaaagtacattaaaaaataataataatgcaaaaaaaaaccccacttttatcctttaagtctatgtgtgacccaattctttcaggatgccgggaaagagctcaagatacagaaagctgtcacactgaccctctgcccttgtgaaaaggcagagggtcaattgagcttgttaaaacttaagccatctgtggacagcaaggctaaaacagcattgtaaaactggggctgcaggcatccacccctagacaatac

SEQ ID NO: 262626 - DNA, 449 bp, Homo sapiens
gggagttaaaccatgagaacatatgggcacagggaggggaacatcacacataggagcttgtcaggggtttgggcaaggaaagggatagcattaggagaaatacctaatgtagatgatgggttgttgggtgcagcaaactgcctggcaaatgtataccaatgtaacaaacctgcaccttctgcatatgtatcccagaattgaaagtacattaaaaaataataayaatgcaaaaaaaaaccccacttttatcctttaagtctatgtgtgacccaattctttcaggatgccgggaaagagctcaagatacagaaagctgtcacactgaccctctgcccttgtgaaaaggcagagggtcaattgagcttgttaaaacttaagccatctgtggacagcaaggctaaaacagcattgtaaaactggggctgcaggcatccacccctagacaatac

SEQ ID NO: 262627 - DNA, 511 bp, Homo sapiens
ctaatttgcttatcactgccatgtatatatgatttggttcagaactaagcacagttgcatctctctggcctaagaaatgcctattctgcctcttgctttccatttatttgataataataccaatttataccttgtcactgaggctaaaataataaatacatacacaatttttgaaagtcaaccttttacctcatcattcctatccagtcaaaattcttttgattttactttctaatattcttgctgtttgtctgctccatrttcaattcacattgccactgttttgtggatatcttttggttcacatttgcctggattatcaccatggaattacacaattatgacacggatgttctgagtctggatgcagctaattgggcatctgagaagctttcatgttaccactcagatatggaagtttggatatgaaacattttgggtcttctcagtaagcacaatttgccaacaagcagaaatctagagagccgatggctagcaacatagatggtgt

SEQ ID NO: 262628 - DNA, 618 bp, Homo sapiens
acttggcacctgagatttaaccacttaatatatatcagcatacactgtaaattgtaaatataactggaaaaacagaattttgtaaaaatgcaaaatatggtctttttcatgcccataatacaataaagcattttatcattttgaccatattaacttatgttaacagtatgacatcaaacacggagtcaatgagcagcacaattttgggggaaaaaagatcttactactgatattctctataataaagggaagagagtgtttttgacttgaattttttggacatttggccgaatcctttactcagtgagaattgacttggcttatgagagttaattcataccatttggaggctgaagcagttataaagctgctttggaatgtcctaaattgggcctaagagacctgtttttgacagatgygctcatgtagtccagtcaattggcatatggaattttaatgtacaagctagtgcaaaagtttctacatgtaacatttattagtgctcctagtggcatggagagacagatggtacacacattacatgcagaagcgagctttgcaattggccttacaggcccaattttgctcagttacctaggtcccttaactgcaccccca

SEQ ID NO: 262629 - DNA, 711 bp, Homo sapiens
gctcctgccagtactgagtacgtgtttgccctttgttcaccaacctgtatggtttctcactttttgatcttcatcattccaattattaacaatggtagcctatttccattttaatgtacaattctttaatcacaaacaagatagaacagttttcacatatttattagccattttttaagtgtttttgttctttgctttctattaggttattattatttttcttaattttaaaaattctttgtataccatgaaaattatatactaagaaatacttttttatgctaaggtatattttaatacttacatactgagatactaaggactatttagttgcaagtgtttttttcagtccatcartgagagattattcaattacaagagatagaactcaactcatttaaacaacaaatgagcctagtgtggtggctcactcctgtaatctcagcactttgggaggcaaggcaagaagatcacttgagtccagcagttcaagaccagcctgggcaacatagtgagacctctgcatccacaaaaaaatgttttttttgtttgtgctttgtttttgttttttgagacggagtttcactcttgttgcccaggctggagtgcaatggcatgatcttggctcaggctcactgcaacctctgcctcccaggttcaagcgattctcctggctcagcctccccagtagttgggattacaggcacctgc

SEQ ID NO: 262630 - DNA, 543 bp, Homo sapiens
atttttatatttttccccagtctctctctagatatgtcctttgggtcttaatgctagttcatgtgattctaagtggataaaaattaaaattttaaattattaacataaatttagctatttatctttatgtatttattgccaattttaaatgcagatgtaagtatttaaagctcctatgtagaatcaccagtgttatgcagttcatgyttggtaacttataacatacatatgcattttgatctcaccagaaaagtgaaaatcctgggggtgtgtgtggggggaggggggaactcagttgtctttattttactgtgtgatatacacatattctactgaatctcattatgtttactttatggatgagtgtggaaagactgatgtaaaagaaactatggaaagctctattctttcttttccatccatgttttcatcctcagtgtaagtggttggttaataaaggaaagttattccagttataaaagacattatagggttctataattctctttcttagaccgtcattgacttctttctgtattcata

SEQ ID NO: 262631 - DNA, 587 bp, Homo sapiens
ttctttctgctgtaagctgattttaaaacatcatgagctaaaataaagaatattatgagaacttaaatcctgttcagtttctgccatcattaactattcagtcttacgtaaatcaaataaccccctttggatgcaatattttcatcttcaaatgaaagtgttggagtggttgaataaaatatccttttatacaaatcaagctgtaragataaagaaaatttgaagactctgaagactcaggctgtttctccgaggaaaggacttttacatcttttggttctaaatgatcatcctttctctaaaggtagcattcagacaaatactaaatttcaacattatgcattacctaatgtatttctatttcatatataatgtttatgccttagtctgtatagcataagtataaatataaaatagcataatataatatactattacatgtttagatgtaacttctgttatatagatggcacattatttgctaatgaagggtaaattacttaatattttatatttgtacaattgaataaaaattgacaaaaaataagaatgaatttgttgctttatctagagtaagtgaatatttg

SEQ ID NO: 262632 - DNA, 587 bp, Homo sapiens
ttctttctgctgtaagctgattttaaaacatcatgagctaaaataaagaatattatgagaacttaaatcctgttcagtttctgccatcattaactattcagtcttacgtaaatcaaataaccccctttggatgcaatattttcatcttcaaatgaaagtgttggagtggttgaataaaatatccttttatacaaatcaagctgtagagataaagaaaatttgaagactctgaagactcaggctgtttctccgaggaaaggacttttacatcttttggttctaaatgatcatcctttctctaaaggyagcattcagacaaatactaaatttcaacattatgcattacctaatgtatttctatttcatatataatgtttatgccttagtctgtatagcataagtataaatataaaatagcataatataatatactattacatgtttagatgtaacttctgttatatagatggcacattatttgctaatgaagggtaaattacttaatattttatatttgtacaattgaataaaaattgacaaaaaataagaatgaatttgttgctttatctagagtaagtgaatatttg

SEQ ID NO: 262633 - DNA, 594 bp, Homo sapiens
tgatgggttgtctttttcttgtaaatttgtttaagttctttgtagattctggatattagccctttgtcagatggatagattgcaaaaattttctcccattctgtaggttgcctgttcactctgataatattttcttttgctgtgcagaagctctttagtttaattagatcccatttgtcaatgttggcttttgttgccattgcttttggtgtttaatcatgaaatctttgtccatgcctatgtgatacatggaatactatgcagacacagtaaagaatgaaatcatgtsttttgcaacaacaagcatgctaattggaagccattatcctaagtgaattaacacagaaacagaaaagcagatactgcatgttcttactgaaaatgcgcatgcatggatataaggatgggaacaagagacactggggactggtagagaggggaggagagaggggactgttggctcaaaaagtatctattgggtgctatccttattacctgggtgatgggatcatccataccccagtcctcaacatcacatgttatgctcatataacaaacctgcactcataccctgaacccaaaataaattggaaa

SEQ ID NO: 262634 - DNA, 576 bp, Homo sapiens
gcaacaatgaaagaaagcaaacatgaacgtacagttatttccttgataatttacttctactcattcagaacttactcatcatccagaaagatgttcgtcaaatttcacatttatggactgcatttccctgattagactggaagataccacataactagatttaacttatagagttttgtgtatatattaatactagaatattcattacacctagaacagtgtgacacacagtaaacacaatttgttttaagaacaaaagtaggaattagtcatattataagccactgaatacagcactactcatgcctgcattcttatgaaacatccataatgttatatcattatgcaaatcaaggggctgtcgcccattacttttcccctaacattctcaacttttatgttcattgctttaacatttctctaaatagactactcctatttgattaatttactccaaatgcttgttccttctattacattattctcaaacaaaaagtsaacccttttctgatggatttcaagtacaacctactacctcaattgattctaaaatgcactctatacaaacagaaacac

SEQ ID NO: 262635 - DNA, 505 bp, Homo sapiens
gctttactcaaaccattataaaggaaaatcacagtacaatatgtgsattacctcttccagatccttttctttacttctcatgttatgccacctaatctatcctttgaggctatatgaattccaacaatgatagaagtctgttctgctctatacatgttttccccgaggtctttaagctgtgaaatactcccttggcatgtatgaatcagcaagtatcagatacataaataaaaaataggtcatttagaaattcaaagaagtaatatttcagtatagagttattctctagggatggaattggaccttttatgatagaattttggtaggcagacaaaaatagagtttgcacaaatatagctttcaaggaaactataaactgaagcagaagctgaaaagatcaaaggagtgatcactagcatgctgaacttcacaaaatcgaagggccatcttggtcatctcccaaatctgagatttactataagcaatattaattttctcttttata

SEQ ID NO: 262636 - DNA, 567 bp, Homo sapiens
agaattgcatatgaaagcagaaataacttgtatatatttacctatccttttatcagtcatctaagtttatagtatataaccagcacccccaaaatcttacctattgtcatccttattgtttcatcttgataatcctcatcttcctcttcccttgatgtcattatcaacatcaagttccatgaggggtaactttgtattatatagcaaaatatctaccaggtagaaaatagttagtatttgttttatggargacagtgagctgaaaacaaacataactgttggggggattcataaagaacgaataaccatttgaaagaggtatataagaaagtgaaacagagggcaactgctttctaattctgcttgattcgtttcacattttattatgcttaataaacaacataaataaaattatatggcaaaagttgaaaggaagaagcagaattttaagatagaccggagtaaagtcttgatatgttgcgctcattgtttagtttagtgtattatcagttttcttttatttcacaaggggtaatagcctagagaaaaaaaaagtgttgaattgaa

SEQ ID NO: 262637 - DNA, 575 bp, Homo sapiens
tttactttgtctttctgatatgtatttttttctttgtcgttgcgtgacaaaggctttctcaaacctagccatgcattagaatcagtaagggatcttttaatatttactaatatatgagactgatctatrtattaacttttcattcctgccataacaaattaccaaatgaactgcaacaacaacaacaacaacaacaacaacaacaacaacaacaacaaagcagtaacatgttggatacagcatgcctcagcttattactctgctccagatttcaaaagaccaaaatcgaggtgtggacaaaactgcattttttattggaaatctagggaagcgtctatcgccgagcccattgaggttggcggaattagtttcttgtgactataggactgaagttcctgcttctctactggccatcagccaggggctacccttacctcctagggacttgtctctgatccttacatgtggctccctacatctcagagatagtaacagtgcatcgaatcttctcactggaaattcctcagacttcaccttctgcatccatcatctcttcaggctgcctctggagaaag

SEQ ID NO: 262638 - DNA, 603 bp, Homo sapiens
ttctcctgctcttaagcaacccttgaccaactgatagcatcacctttaagcaaagtgattcttcacagcagtcttacatcartgccagctgtgatttcatttctattgaatcactgtaattcctgaaacaatttatgaagttgttctgcaatcctgatttaaacttatattttcatgaaataaaggcacatgagactatattcatctgtgtttttctacttttccatttttttaagaaagttggacttgtggatgtaaacttattgccttcattgactagtagagacatcgttctaaagcaagtatagatataaatctgaatatgcttacttgcaggtgtaatagatatctcactggcagtgttgcacttattgcttctctcagcctacacaacactgtttgggcatggataaacaggtgcacactggcgaaggaccagatcaaccccaaaacacaagtgaccgatgtgcttctacatatttaggccaactggtagctttttattgactgcagatggttactgagtatgcaataaaaaacttccagttgactaatcacattcttaaataaccctaaagattttttttaaatgtttttcctggt

SEQ ID NO: 262639 - DNA, 603 bp, Homo sapiens
ttctcctgctcttaagcaacccttgaccaactgatagcatcacctttaagcaaagtgattcttcacagcagtcttacatcaatgccagctgtgatttcatttctattgaatcactgtaattcctgaaacaatttatgaagttgttctgcaatcctgatttaaacttatattttcatgaaataaaggcacawgagactatattcatctgtgtttttctacttttccatttttttaagaaagttggacttgtggatgtaaacttattgccttcattgactagtagagacatcgttctaaagcaagtatagatataaatctgaatatgcttacttgcaggtgtaatagatatctcactggcagtgttgcacttattgcttctctcagcctacacaacactgtttgggcatggataaacaggtgcacactggcgaaggaccagatcaaccccaaaacacaagtgaccgatgtgcttctacatatttaggccaactggtagctttttattgactgcagatggttactgagtatgcaataaaaaacttccagttgactaatcacattcttaaataaccctaaagattttttttaaatgtttttcctggt

SEQ ID NO: 262640 - DNA, 563 bp, Homo sapiens
cataattcaaggtcctgaacaaaggtcatttctcaatgcagcctttcataatggcctttgttaaattcatctccccctgccccttagccttctgcaacccatgatatttccattataagaccctgcatcctcttctttgtactcagctatttgtctagttggtgtggtgtgtagagtatgaccttcaactagatgaatttgagttctgggtttgggtcctgtttctactacttaccagctgtgtaaccttgagtggggcaccaaagtttctgaacttagcttagttatctgtaaaatggatatcatgacaacagctacctcctaggtttgttataaggattaaatgaaatgttgaactgaaggtatytgcatcatctggcatttagttagtgcccaataaatgttagtaattattattgcatttctagggtttgcatcccatctttaccatctattagctataagggctaagaaagttaccttcttcgtgtctcaggttcctcatctgtgaagtggggataataatagtaaaagaattcttgtaagaactaaatgagatgatg

SEQ ID NO: 262641 - DNA, 547 bp, Homo sapiens
ttggaaaacatattcgagagaataattgaggaaaacttccccaaccttggtagagatctagacatccaaatacaagaagctcaaagaacacctgggaaattcatcacaaaaagataatcacttaggcacatcaggttatctaaagtcaagacaaaggaaaaatcttatgagctgtaaarcaaaagcatcaggtaacctataaaggaaaaccaggcagactaataggaaatttctcagcagaaaccctacaaggtagaaggaattggggtcctatctttagcctccttaaacaaaacaattatcagccacaaattttgtatctggcaaaactaagcttcataaatgaaggaaagaaggtctttttcagacaaacaaatactgagagaatttgccactactaagccagcactatgaaaactgctgaaaggcgctctaaatcttgaaacaaatcctcaaaatacaataaaatagaacctccttaaagcataaatctcacaggacctataacacaacaacaaaagcaagagattgaggcaacaaataacac

SEQ ID NO: 262642 - DNA, 586 bp, Homo sapiens
atctccttaaagtcctatctccaaatacagtcacattaagggttagggtttctatgtatgggttttggagagacatgattcagcccataacaaacaccagctatagtgcgaactctatgctaggcactaatatacagtggtgaacaagttagttactattcccctcccccaccmatagagtgctgtctagctggatgggttcacagtaaacaaataattgtgtgtttgtgtgtgtgtgtgtatatatatttatatataattatatatatatatatgtaactattgtcctagtgaacacatatcttggggaaaaacctgattctgtgcaaagcccaaggatagcacttgtctagaagctttggagttaatgtcaaggttagcaagagtaatgctatgaataagttcttaattcaagttttggagaagatcatatgtagtagacaaagcaaaataatgagctgcaaaaatgaaaatacaggttttttttaaaaaagaataatgctgtgtttctatctcacatttagaattacttcatccactataaaaattcatgagtgaaggagttgcttttagaacagtgttatga

SEQ ID NO: 262643 - DNA, 541 bp, Homo sapiens
ttgtgacagctaaaaatgtatctagacattgtcaaatattccctgggaggcaaaatgcccctgtttgagaaacatagttttgaatacaaaacacagaattccctgagtttgattttatccaagtacatcaaacttatttcttctaaagtttaaaaggtcatcaaatgagtaagacatcatttgattcgttcctttaaagctcaygtctgtagaagcgcatgattctttgggtatctactctgaattgatgcaaagtgattttgtataaatgatattgcacgctctcatataagaatctgaaaagttgagagtacaatggactccagggtatattcaaagcttgttctaatatagcctatgccatttaatctagatccgtgactgaacagtaattgaactgcatagttccaagaagttgccccttattccggtatcatttgcctacaagaattataatagcattagctgaaatctcaaagcaggtacccatcaaatcacgttaaaatatttcacagtgaagaaaaatatgacagaatgtctg

SEQ ID NO: 262644 - DNA, 541 bp, Homo sapiens
ttgtgacagctaaaaatgtatctagacattgtcaaatattccctgggaggcaaaatgcccctgtttgagaaacatagttttgaatacaaaacacagaattccctgagtttgattttatccaagtacatcaaacttatttcttctaaagtttaaaaggtcatcaaatgagtaagacatcatttgattcgttcctttaaagctcacgtctgtagaagcgcatgattctttgggtatctactctgaattgatgcaaagtgattttgtataaatgatattgcacgctctcatataagaatctgaaaagttgagagtacaatggactccagggtatattcaaagcttgttctaatatagcctatgccatttaatctagatcmgtgactgaacagtaattgaactgcatagttccaagaagttgccccttattccggtatcatttgcctacaagaattataatagcattagctgaaatctcaaagcaggtacccatcaaatcacgttaaaatatttcacagtgaagaaaaatatgacagaatgtctg

SEQ ID NO: 262645 - DNA, 434 bp, Homo sapiens
tttgattttatccaagtacatcaaacttatttcttctaaagtttaaaaggtcatcaaatgagtaagacatcatttgattcgttcctttaaagctcacgtctgtagaagcgcatgattctttgggtatctactctgaattgatgcaaagtgattttgtataaatgatattgcacgctctcatataagaatctgaaaagttgagagtacaatggactccagggtatattcaaagcttgttctaatatagcctatgccatttaatctagatccgtgactgaacagtaattgaactgcatagttccaagaagttgccccttattccggtatcatttgcctacaagaattataatagcattagctgaaatctcaaagcaggtacccatcaaatcaygttaaaatatttcacagtgaagaaaaatatgacagaatgtctg

SEQ ID NO: 262646 - DNA, 400 bp, Homo sapiens
gaccccacccccactgcaaaaaaaaaaaaaaaaaaaaaaaaaaaaaaaacaaacaaacccagcataaaatgctactttaaagggggtgtctggaataataccctctactcaggagcacaggragcctccactgttctccatctctcctgcagatgccagacaatagctgcctggcctccctcttccattcttcatagaacaacaaagctatcttttttcaaatatggaagaactacaacctccttctgttagagtccccacctagaatgtaagctccaggaagacagggaattgtttatttttctgtattgatgtattcttggtgcctagagtggtgcccagtacatggcagttgcttagtaaattgttgactggctgatgaaatgaatgcataaatgaa

SEQ ID NO: 262647 - DNA, 400 bp, Homo sapiens
gaccccacccccactgcaaaaaaaaaaaaaaaaaaaaaaaaaaaaaaaacaaacaaacccagcataaaatgctactttaaagggggtgtctggaataataccctctactcaggagcacagggagcctccactgttctccatytctcctgcagatgccagacaatagctgcctggcctccctcttccattcttcatagaacaacaaagctatcttttttcaaatatggaagaactacaacctccttctgttagagtccccacctagaatgtaagctccaggaagacagggaattgtttatttttctgtattgatgtattcttggtgcctagagtggtgcccagtacatggcagttgcttagtaaattgttgactggctgatgaaatgaatgcataaatgaa

SEQ ID NO: 262648 - DNA, 636 bp, Homo sapiens
aaaacttccctaagagcaagaaccacataaaatgacacttcaacacaatggaagagttattatctattggaacagattgggtactcaataaataattgttatatagtttatgtctttattttagcatttctatcaatgatctattttattcttttaatgtttttagttcatatgcaaatatggaatggctatggctcgtttctttgtcacattatttwtcagaagaatgtactcagagctctaatgtgtgtaccttctgtgagtacccagccagcagagaagaagaagtgggtgtggcccagggtggattccctcagctactgcccactcgttttcttgtgttactctaaacaatatgttatatagtgttatatagctgatgtggtccctgcccttggtctagggtagagcaggcagtgggcaagcaatgagccaacactgatcactcaggttctgtctcctgggggttggaatcttggagcagccctgctgccagtgcacttcaatttctggttaattggctcttctgtcaggtttatgagtaatcccagatcctctggttaaattttactttctcccttacgtgaagtcagtgttaattcctgttgaaggcctacaaaggaccctgatacaaat

SEQ ID NO: 262649 - DNA, 560 bp, Homo sapiens
ccatatctgtggttacagcactgctaaggttgcgtctgcagtctttttgctttgttttttttttttttttttgagacggggtctcactctcttccccaggctggagtgcagtggcttgatcttggctcactgcaacctctgcctcctgggctcaagtgatcctccctgctcagcctcccaaataactgggactagaggtgtgtgccaccatgcctggctaaattttatattttttgtgtagatggggtttcaccatgttgcccyggctgatcttgaactcctagactcaagtgatctgcccacctcagcctcccaaagtgctgggattacagccaccatgccttcctctctcccccacccctctttgttttagataaaaaagaaattagctctttcttcccccttgggatgatgaaaagtcaggttagctttgaaacatggatatggtccatgtaacaccctaaagttcctatagccttagatgttatgaacagcttcaggtaacaagactcaggcatgaaaagcacccagcagtagacacaatgcttgaagcatcaaga

SEQ ID NO: 262650 - DNA, 557 bp, Homo sapiens
tacctgcttcttgatgtttgccccaactctctgccatgcttcctcatcaccactgctaatgacctagtgactcattaaggccatttagcaactttggatgcagacctaaaacacagggagcatccacagcatgttttccttaattccaagcactgtattggtaccatcagatagattaacyctcaccttagtgaggtctccacggctggtgcccagaatacatatgaacattttgctttcatattccataacttgatgccaaggcatagggaaaagatcacatttaaaaatttattccaaatattttttctctttttaagaccccagtattttgtatggatgagtggagatgaaaaattaactgaggaattcagatatatggtggatttgccagaccctacttgcatacatgggctctgttggcctcctcttgtatacagacatcgctgtcaacaccagcagaggaaacatatgaatggtggcaattctttgtttattttgcttatcagtaagtaacacacttgttgcaaataagtaagtatgacaaaagaccaatt

SEQ ID NO: 262651 - DNA, 571 bp, Homo sapiens
gcacaaatatcattgcctcacaaactcctcttatctggagtacctgcttcttgatgtttgccccaactctctgccatgcttcctcatcaccactgctaatgacctagtgactcattaaggccatttagcaactttggatgcagacctaaaacacagggagcatccacagcatgttttccttaattccaagcactgtattggtaccatcagatagattaactctcaccttagygaggtctccacggctggtgcccagaatacatatgaacattttgctttcatattccataacttgatgccaaggcatagggaaaagatcacatttaaaaatttattccaaatattttttctctttttaagaccccagtattttgtatggatgagtggagatgaaaaattaactgaggaattcagatatatggtggatttgccagaccctacttgcatacatgggctctgttggcctcctcttgtatacagacatcgctgtcaacaccagcagaggaaacatatgaatggtggcaattctttgtttattttgcttatcagtaagtaacacacttgttgcaaa

SEQ ID NO: 262652 - DNA, 473 bp, Homo sapiens
agactggattattactgaaggcttttttaggtttacttttctcatttccttcatcactgcttattgagttacccgtttaaatatttgccctcattggtctgtaagttctatgaatacagggactttagctggtgactgttgtagtcactagtgcattttcatgcaccatgcatacttggcacacagtaagtctttaaatatttgcagaatgaataaatgaatgaattagacaatagctccatcccaaacacgcacatgcacatacacactctgacgcagtaggagagaagaggaacrgcatttttagagctaaacgggataacatcctgtcctccttaacaggaaggatcttggagtcagtgctagaaaatctctgagcttataagaaatggatccacatcacttgtgaaactggaattatctgataggtgattaaaggttttgtccataggactcaggaagtaataaatcta

SEQ ID NO: 262653 - DNA, 598 bp, Homo sapiens
tgaagtaaatgagaaaatgatcaaaaattaaagtgggtgtggtttgggggcaccaggaaccatttagactggattattactgaaggcttttttaggtttacttttctcatttccttcatcactgcttattgagttacccgtttaaatatttgccctcattggtctgtaagttctatgaatacagggactttagctggtgactgttgtagtcactagtgcattttcatgcaccatgcatacttggcacacagtaagtctttaaatatttgcagaatgaataaatgaatgaattagacaatagctccatcccaaacacgcacatgcacatacacactctgacgcagtaggagagaagaggaacagcatttttagagctaaacgggataacatcctgtcctccttaacaggaaggatcttggagtcagtgctagaaaatctctgagcttataagaaatggatccacatcayttgtgaaactggaattatctgataggtgattaaaggttttgtccataggactcaggaagtaataaatctatattctttgaagcttaagatagagtatttgttaggctacttgctgctagatgaggcaaga

SEQ ID NO: 262654 - DNA, 572 bp, Homo sapiens
gggtatttggaacatttagcataagtgtataattcccaaacataaagattattcaaggaaactgggatcttttgggggccattcctagcctttgaagttgatgttaaaacttcaaagtttataattaaattattaacttcaaagttaatagttttcttccaaagttgtagaatcagagttgccacagccactgcctacaaggatgacaaccaatatctgaatattgcagttgaccatttatgaaataccaggctgccccactatggccccaaactagtctraggataaatttcccatggaaaaactggcttatattcaaatcatctaaaaactaagagcttacccttcaaagtttttattctatccacaaagaccctacattccccaaattggattttcacaatctctggatgttctcaaattttattgtgctcttctgaaattgggacccaggttgtgctcagaaagtctacttccttgagctgttccatgtgacgatctgagctcatgctagggtggcgtgttaatggctaaggtgaatgagatctgcctattgccaggcagtgacccag

SEQ ID NO: 262655 - DNA, 452 bp, Homo sapiens
atcaggtacacccaaacttctytgtttttaggaaacctaacctaagactgggagataagattagtcaacaaagtagactattctttgatataggtaagctacatctatataagatacagcttacatctgtatcaaagacctagttgtatctaagggatgggaggaggagaggggagaaggttacttgctggagatgctaacttttgagctgagtgtgtatgtataaagacatagtatatatatatatttataacatagatatatacttaaaagtaagatgatttcttataatagcaattgttattaaaaaactataatgttaggttttagggggatgtgatataatactatgatgtaggataattattttgactttgtaggtctgttcagtatggtctgcacagctctctcaacattgtatgtataactaaaggtcagcagtctggtcctct

SEQ ID NO: 262656 - DNA, 532 bp, Homo sapiens
aagataactctcctctgaagccaggtctgatggtcagagttgctgttaaagtacaagtctcatggattgcaatgggagtgatagggcccagaaacaagagtakacaggtggatgcaattatcataatgagtggcagggtcagagtggcagcagagtgggcctgacccacagagttgagatgtgcttaatgaaacgcagagtgcctaggggtaaaggagatggctgccaataggtgtactatgctgtcagcaaggatatcatgaaaagaatccccaggagtctgaggacagttgctctaatatgaagtcttgattatttgtccagttttcagacctgatttggttttcaaactccaaatgcattgattgatgagggggctgggtcctcaggaggaaggaccctacaatgctgtggcaaggatacacagtaatggttttcccagtgcttccacaatgggacctatggccatgtactcttgtaattatgtgctggagaaaagaggaagaccaaacttttgaggactcttggacac

SEQ ID NO: 262657 - DNA, 606 bp, Homo sapiens
ttcacataacttgtccaaacctcacagtcaataagtgccttgctggaatttgaacccaggcggatgccttgttttgagaaaagtatcaatgccaatattccatgagggttcatacatgaaaggccagtcattaacaccattaacataagcaagttctattttcttgtttgtattcttcttatgtattttaatgttgacatgggtaagttgcccttaaattgcctttgkatctccattgttccaaggggtcatgatacaatagtattcttcactggccattctttacaccttgtgagacagatcctctttgagcactgcaagctgacactttctagttctttatgagaaagtcttttgtaggttttcttaaagaagcctgcttccaaaaagttactgggaatgtagcagtcactacattagctgtgtgattgacacatggaaaggtgaaattgcttgcccaaggtaattctgcaggctagtggcgatgccagctcatgatctgtagatccggctctgtgcccttagctgtgaccattggatcaaagagtcaccttaaaatcagggggcacctgtaagcagcttcagtgtgcaagtgcattgcatact

SEQ ID NO: 262658 - DNA, 606 bp, Homo sapiens
ttcacataacttgtccaaacctcacagtcaataagtgccttgctggaatttgaacccaggcggatgccttgttttgagaaaagtatcaatgccaatattccatgagggttcatacatgaaaggccagtcattaacaccattaacataagcaagttctattttcttgtttgtattcttcttatgtattttaatgttgacatgggtaagttgcccttaaattgcctttggatctccattgttccaaggggtcatgatacaatagtattcttcactggccattctttacaccttgtgagacagatcctctttgagcactgcaagctgacactttctagttctttatgagaaagtcttttgtaggttttcttaaagaagcctgcttccaaaaagttactgggaatgtagcagtcactacattagctgtgtgattgacacatggaaaggtgaaattgcttgcccaaggtaattctgcaggctagtggcgatgccagctcatgatctgtagatccsgctctgtgcccttagctgtgaccattggatcaaagagtcaccttaaaatcagggggcacctgtaagcagcttcagtgtgcaagtgcattgcatact

SEQ ID NO: 262659 - DNA, 542 bp, Homo sapiens
atgtgtagattagttaatctgaaagcctcctattataaaacatgtagaattgctggagaaaatataacaatacttaaatgacctatttaaatgaatagttgcactggcaagaatgtaagggaaatccctaggagccagaaatgaagaggatgttgaaacagtgaatgtcaagcagaagtgttgactgctctcagggtacagctggagatggggatttctggtctctgtaaccatggggcttagatgttaatatctatctgaagttgaagatgaggtataccctaggtgaggtgtgggatctcacactgaataaagttggatttcagtgagtaggtggactaggaaaaatgttcacacattgtcaaagtgggtcagcaaggcagttcttccctctctaagcattgactgaaaaataaaatcaagtaaaaagtttctaatgggatatcatartcactggcctactccaattgaaatggagatttgaatgtaaacaacccaaatgatctaggaattcataagccttaaagtcatcctgagatggt

SEQ ID NO: 262660 - DNA, 601 bp, Homo sapiens
caacatctattcatgagcaaattttagcaaactagaaatggattaagggaacagtctctattgataaagagaatacaataaacatcatacttaatggtactatgttgaaccctttccttctgagatgggagtcagtagggatatcctttaaatttattaaaaatatattgaagaaactagccagctaaatatagcatgaaaaataacaaaagcgtaaagtttagatactcttatttgtaggtgatatgattgggtatgaagaaaatataaaagaatgtgcaggtgatttattaggtatattaaataatttggcaaggttttcagatacaaagttgacagccaraaatcaattgcatttctatcagtcagcaacaaaaaaataggaagtaaaataaagaaatatactatttaaaattgtatgaaaaagttatatattcaggcataaatctaactgaagtacaaatccgctgtccagatagacataaaatattattgaaagaacagctacacagagaaatacaccatgttcatagatgaaagactaaattttggtaagatattaatactcctcaagttgatatatcaaaactaagcatgccca

SEQ ID NO: 262661 - DNA, 576 bp, Homo sapiens
cttttcctttgcatccaccacttggctgtttgggacaagaggcctagctttcagcctgtctcagctttcaacatgccttcctcattaagcttaattatttctagcttttgatttaaagtgagagatgtatggctcttcctttcatttgaacacttaaaggctattgtagggttattaattggcctaatttcaatattgtgaaattgtgtctcggggaataaaaaggctcaaggagagggaaagagacggggaacaaccagtcagtggagcagccagaacacacagaacatttatctattaaattctctatcttctgtgggcacagtttgggtgcccctgaataattacaatagtaacatcaaaaatcactgatcacagataatcrtaacagatataataataatgaaaggtttgaaatattgtaagaatcgccaaaatgtgacagagagatgctaagtgagtacatgtttttggattaatggtaccaacaggcttgctcaatgcagggttgccacaaacctccaattaagaaaaaaaaagcaacatctgcaaagcacaatgaaatgaggtatgctg

SEQ ID NO: 262662 - DNA, 470 bp, Homo sapiens
  misc_feature (1)...(470): n = A,T,C or G
aatgtaaatttatgttgagaaatatagccattgcacagactagaatgctggtgtcagcagatcactataattttcctataagcagccaatgtgggaagccaaattatattttcaaaggcaattctaaaatattcaatgataaatgaaactgcatcaagtgagccagtcattccattggcttgtattgtgcaacgagtgtatgagttttcagcagctggggaattggttggacaaatgatggacaaatcacttttatgtccagctgaattcacctttcwcccatacattcacaaggaacgaatttatgtgagtttccaggacaacataatagagttcaaagcccagcgttattaatgtttttccttgtgtttccttcgtataaagagaggatgaccttgccaacctactcagctcactntgttagccgagtctgtgaacaggggaaaattacagccttagagccactatct

SEQ ID NO: 262663 - DNA, 468 bp, Homo sapiens
agggaggtaggatcacttagcagtgtaagcatgggcttgtaattagatacaactaggttcaaatcgtagttttacgtctagttttaatcctgtatttttttttttttttgccctttaccataggggcaaatgcataaggtctccaagcaccagtttccttatctataaaatacataattccatacctcatggattaaatgatataatgtacgtgaagtattcaacagtgtttacaattcagtagctattattagtatgtgttatgttattaggggacctgtgttttccatttctaattctctgtctccttttatctggggtcagtcaatctcttctctgagtcagcttttaartgtggggggtttgaaactctggtcatcttcagatctaaaaatgtttatgactctttctgttgtaatataaccccttgcattgtaaagataatcactgtttatgttccaagagtag

SEQ ID NO: 262664 - DNA, 608 bp, Homo sapiens
gtgcgcgccagcacccccggctaatttttgtatttttagtagagacggggtttcaccatgttgaccaggatggcctcaatctcttgacctcatgatccaccccctcggcctcccaaagtgctgggactataggcatgagccacagcccctggccttaatagttaatttttaatgtggcttttaaaacttcttagatgtggctactagaacatttttaattacatgtgtagatttactttatatatctactgtacagcactggtttagaggtgaagagtgtgggctctggagatagtctatctagatttgaaccctggctgcaaatcactggctatgtgactcctggcaaagtggctttcagaccttccacagagacctgctgtaatcatttcattttataacattttacactcacatacacatacagataaaatggatgaaataatacccttaccacatgtaatgcattctgatatgttctgtttcatttcattcccctcccrcctcctatagtctttcctctctcatctgtttatttaaaacaatgcttgtcatgacctcctgaattaaattcaaaacacagaaatgggtcacaaactctggtttga

SEQ ID NO: 262665 - DNA, 556 bp, Homo sapiens
cataatattggtagaacaagtagacagaaatcagtaagaatacagaggttttgaacaacactctcaaccgtcttgacttgattggtatttatagaatgctccacccaagcaaaatacacrttctgtccccatccagctcacacagaacgtttaccaagtcagaccttattctaggatactagtaaatgcaaaagaatttgaatcatacaaagtatgttctttaaccacattagaattaaattagaaacccaaaccagaaagatctctggaaaattctcaaatatttagaaataatataacatactgctaaataacccatgcataaaaaagaaatcaaagggatatgagaaagtacgttgaactgaagaaaaatgaaaacacaatgtattgaattgtgtgggatcctgttaaagcagtactcagagaaaaatttatagcactaaataattttattagtaaagaagaacgatcttaaatcaatttctactcttccgcctaaagatacttaaaaaagaccaaattaaccctaaataagcagaaaaagggaaatagtaaa

SEQ ID NO: 262666 - DNA, 556 bp, Homo sapiens
cataatattggtagaacaagtagacagaaatcagtaagaatacagaggttttgaacaacactctcaaccgtcttgacttgattggtatttatagaatgctccacccaagcaaaatacacgttctgtccccatccagckcacacagaacgtttaccaagtcagaccttattctaggatactagtaaatgcaaaagaatttgaatcatacaaagtatgttctttaaccacattagaattaaattagaaacccaaaccagaaagatctctggaaaattctcaaatatttagaaataatataacatactgctaaataacccatgcataaaaaagaaatcaaagggatatgagaaagtacgttgaactgaagaaaaatgaaaacacaatgtattgaattgtgtgggatcctgttaaagcagtactcagagaaaaatttatagcactaaataattttattagtaaagaagaacgatcttaaatcaatttctactcttccgcctaaagatacttaaaaaagaccaaattaaccctaaataagcagaaaaagggaaatagtaaa

SEQ ID NO: 262667 - DNA, 556 bp, Homo sapiens
cataatattggtagaacaagtagacagaaatcagtaagaatacagaggttttgaacaacactctcaaccgtcttgacttgattggtatttatagaatgctccacccaagcaaaatacacgttctgtccccatccagctcacacagaasgtttaccaagtcagaccttattctaggatactagtaaatgcaaaagaatttgaatcatacaaagtatgttctttaaccacattagaattaaattagaaacccaaaccagaaagatctctggaaaattctcaaatatttagaaataatataacatactgctaaataacccatgcataaaaaagaaatcaaagggatatgagaaagtacgttgaactgaagaaaaatgaaaacacaatgtattgaattgtgtgggatcctgttaaagcagtactcagagaaaaatttatagcactaaataattttattagtaaagaagaacgatcttaaatcaatttctactcttccgcctaaagatacttaaaaaagaccaaattaaccctaaataagcagaaaaagggaaatagtaaa

SEQ ID NO: 262668 - DNA, 592 bp, Homo sapiens
cagtgctgtacaataaatgtttgatgaattaatatataaacaagaattgagaaaagataaatttttctccttcagaaaatcacctttagcctcctcactgcttattactttgataacaaatggaaaagtaactaaaatatgaaacaaaacgtccaggctttaaaaacaactgcacgatcataggcaataacttaacttttttgaacctcagtttctttatcagtcaagggaaactggtgaaccctgccctgtctaactcaagataaatgagaatgagtatgcaaaaatgctttcgtaagctstaaagcacagtagaaagccagccattttattatgtcaaaacccaaacttaggatcagaaattaatgtccttcattttctccatatcagcccagtaaagagtcagagaaaagtgtggacgtgaatatgactagagagaaacagatcaaatattatttggtaaaacagatgcttaaaattccatttagaatacataatgttctgagaggttcttgtcctagatttctctatcatctgatatttgttttacccaggattctgtagcatagatcagtaaactaattctgcgaag

SEQ ID NO: 262669 - DNA, 610 bp, Homo sapiens
gcttgaactcgggaggcagaggttttggtgagccgagattgtgccactgtactccagcctggacgacagagcaagactccatctcaaaaaaaaaaaaaaaaaaaaagaatcttatgtttttattgctattataaatgggatcatttcttgatttctttttggatagtttgatgttagtgtatataaatactactgattgttctgtgtttattttgtatcccacaacctcactgaattcatttattagccctaaacatgttttggtggagtctttaraattttctgtatgcaacctcttcaaacagagccagtttttcttcttcctttcttatttgaatgcctttattaaattgaattggcatcattgtcttattccagatcttagaagaaaaccttttagcttttcgccatcgagtatgttgttagctgtgggcttggcacatatggcttttatcatgttgaggtatattccttcttcacctaatctgttaagagtttttaattatgaagtgatgttgaattttgccagatgctttttctgcatcttttgagataatcatgtgatttcatcctttattctgttaatgtgtatattacatttattgatttg

SEQ ID NO: 262670 - DNA, 627 bp, Homo sapiens
tatctatttttaaaagtggaagaagtttagaggaataatttgaaatctggtattttgtttttccagcctgattagaaatagagcatttttccaattttagaatgaatgaatatttacataatatgtaagtgatagaaatgtaagataatatataatgaatatatgtaatatattatacatatatatatctttagacatatatagagagaatctgaatatcttctttaccagtttacataaaccccaagtmttcatgctttaataataataaactggtaaaaaagacatccagattgttttcctccctttatgttaaccaaatcaaaagtattttaatttgtttctactatgatagtggaaacgctttacctctgtatattgttctatattgcctcaatgttacttctttaattatatgataattgtaggttttccttcttatgtatcaatatctaccatgtttccctttaataataataataattattattattattattttgagacagagtcttgctctgtcacacagactgaagtgtagtggcacggtctcggctcactacaacctctgcctcccgggttcaagcgattttggtgcctcaacctcctgagtagctgggactgcag

SEQ ID NO: 262671 - DNA, 600 bp, Homo sapiens
catctgtcccagccatcacagaacagagtaggactgcagagaaacaggaaacagattgcaacccttgcatgggtttctgacttcgtatcagcccgtccaagattcccctcatattgcattatattatttcatagactgacgtgccaggaaatttttcctctttctttaccccaccttccaggaacggctggaaaatcatcttcaatcatttcacctggaagtctcccaagaggacatgagtatcctgttaagacatccttttatgttttcagtagctttgcagttttgtctttggtatgtttttgcagtattgtgcttttccttcattttttcccctgtgattcattagtctttctcctgttgtagagggttataattatatccaaattaatagtcaagaaagcattcacatttaggatagcagtttttctacaggaaattaggttagctgctttctttcccagcaaaacctcatttkgtggggtttttaatttttttccccgatttctgaaatagctttattgttttcatctgtttatatattgaaatacatactgtttggaacatcttatgaaaattctgaaacatggaaagaggtta

SEQ ID NO: 262672 - DNA, 520 bp, Homo sapiens
ccatgcccagccaaaaatgtatttaaaaaaaaattagttgggtttgatggcatacaccggtggtcccagctacttgagtggctgagcagtaaagcatattggagatttttttgtattaatcttacaacttttctgtaagtctgaaattatgccaaaatgaaaagctcaaaataaaagataaacttcaaataaagacattttagataaacaaagatggcgagatttcaggatcagcagacttgaaccaatgaacatgttaaagtacatattttaagcagaaagaaaatgattccacatggaatgtcagagatacaagaaggggtgaagaggaaagaaagtgttgagcaggtcatcagtgtaaatgaacaccaacttcataaagtacagcaagtcctcaaatcatgttgtttcattataatgatgagaaaaaaaatcactttccagtctacacatcctccccttayctgtgtgggttttctccgggtcctctggtttcctcctgcattccaaagatgtgcat

SEQ ID NO: 262673 - DNA, 571 bp, Homo sapiens
gtatgtctaagttagcaacaaaagaaaacaactaataaatgctctaaaaacttatcatagaattaatatccaagtaaatataaattaaaattaaaaatatttctacaacactgatctcatttaaagtcagcacacatttgatttgaattttttctccctttctctctctctatttacctccatgcaatccttccttcctctctacaaatagaagaattatggttgattaacttgtttttctgtaaaagtttcaagaatttttgtaggtgataatggcccaaaatgttttagtgattkgtaaatataagtatttcttaactgcattttcccttcataattttttgaaagtctgatatctttacttcattaggacttctcttttgtattcacaaaagccagctacttcaaataaaaaaagcattattgatcaaactcattgagcattagttacagctatcccagcgcagtttgcttttccaaacagaatctcaagaaattattgagtaatcaaagttaaattctaaatgtttacatcactgttctgctgaaagaaataagaataatgaagtgt

SEQ ID NO: 262674 - DNA, 561 bp, Homo sapiens
ccagctggtctcactagctcctaagccccccaagttcactggctctgagctaaacacagcaccatgacttgactaagagttacagtcattgtaacctagattgcctttcaagtttattttgttccccagagcactttagctcacagtggcaaggcttgccaaaacttatgttgaaactactgggataggtaattgccttctggctagggctcatataaatgcttcctctgtgagcatgaactgagttctgtccaatattggcagcactgagttccaatraaaagtcccaccgtcactgctccctccctcccccaaggacacagattctctctcctgccatgtagctgctgcaggggtttgggtaaggagtggggttagcaattcaagactgtctttctaaccctcttctgtacctctttcactgatatgaagttaaaaccaagtactatgatcactcacctgatttttggttcttatgaaggtgttttattgtatagatagttttaaaatttggtgatcctgtggacaggatgatcggtagaggcttctatttggcaacct

SEQ ID NO: 262675 - DNA, 570 bp, Homo sapiens
gcactgagttccaatgaaaagtcccaccgtcactgctccctccctcccccaaggacacagattctctctcctgccatgtagctgctgcaggggtttgggtaaggagtggggttagcaattcaagactgtctttctaaccctcttctgtacctctttcactgatatgaagttaaaaccaagtactatgatcactcacctgatttttggttcttatgaaggtgttttattgtatagatagttttaaaatttggtgatcctgtggacaggatgatcggtaraggcttctatttggcaaccttgccccacctccttctcctctattcctttatttttgtttaaattttcttggatgtttactagattttttaaatggcatatgtgagctaatgtgagtagagattcaagaattttcacacaagtactttaataagcatattttaatggaacatcatttcttactctgaaaaaattatcatgttagactgtgccattttgcaatttgcaatcttttttattttcaaaaaagacaccggatgaatgattgctaaatgtcaagtagttggttatgca

SEQ ID NO: 262676 - DNA, 541 bp, Homo sapiens
tttggcaaactgcagactcaaactacctatctgaaatttgaattcaagtaattaggccataaagatagaaatgtttgattatatcctagaatgtttccagtctagtcaaaagcataggcatttgatcttttcattatctttatttggtctttctagtgacattagaagcaatatatgcctkcccacagttttggaattacacatgttgttcatactagcgcagaacataaactattgtcccctaagatattaacttttagaggctttctattttataatttcagagacagtaatttactttataatttcttttttatttccatggtttacttttctttcttcagtggaaattatttattttacttcttttagttccaagtaagcaatgtagccaattccagatttcatttatttctctgaaatgttgttggtgtttaactcttctggtacaaaaatttctaggtttctttgttctgaacaataactattatcagttaaaatcaaaccaaatttatgtattgaatcaaaaaggaaagcaggg

SEQ ID NO: 262677 - DNA, 541 bp, Homo sapiens
tttggcaaactgcagactcaaactacctatctgaaatttgaattcaagtaattaggccataaagatagaaatgtttgattatatcctagaatgtttccagtctagtcaaaagcataggcatttgatcttttcattatctttatttggtctttctagtgacattagaagcaatatatgccttcccacagttttggaattacacatgttgttcatactagcgcagaacataaactattgtcccctaagatattaacttttagaggctttctattttataatttcagagacagtaatttactttataatttcttttttatttccatggtttacttttctttcttcagtggaaattatttattttacttcttttagttccaagtaagcaatgtagccaattccagatttcatttatttctctgaaatgttgttggtgtttaactcttctggtacaaaaatttctaggtttctttgttctgaacaataactattatcagttaaaatcaaascaaatttatgtattgaatcaaaaaggaaagcaggg

SEQ ID NO: 262678 - DNA, 586 bp, Homo sapiens
tctaatcccagtaaaaccattacatcagagaagtatgctcagcaaatcgatgagatgaaccaaaaactgcaatgcctgcagccagcattggtcaacagaaaggtcccaattcttctccatgacaacgcccaaaccgcaagtcatacaaccaacacttcaaaagttgaacgaattgggctacaaagtgttgcttcatctgccatattcacctggcctcttgccaaccaaccaatgactactkcttaaagcaccttcacaactttttgcaggaaaaacacttccacaaccagcaggatgcaaaaaataaaaaaataaaaaaaaaaaaaggtgcttttcaagagttcattgaatcccaaagcatggattcttacactccagggataaacaaacattttttgttggcaaaaacgtgttgattgtaatggtttctattttggttaataaagatgtgtttaatcctagttataatgattaaaaattcacaagccaaaaccgcaattacttttgcatcaacctatttgaagaataatagtattctaaatgctccttgaagcacaaactaatagttaagagagaccaggggatc

SEQ ID NO: 262679 - DNA, 586 bp, Homo sapiens
tctaatcccagtaaaaccattacatcagagaagtatgctcagcaaatcgatgagatgaaccaaaaactgcaatgcctgcagccagcattggtcaacagaaaggtcccaattcttctccatgacaacgcccaaaccgcaagtcatacaaccaacacttcaaaagttgaacgaattgggctacaaagtgttgcttcatctgccatattcacctggcctcttgccaaccaaccaatgactacttcttaaagcaccttcacaactttttgcaggaaaaacacttccacaaccagcaggatgcaaaaaawaaaaaaataaaaaaaaaaaaaggtgcttttcaagagttcattgaatcccaaagcatggattcttacactccagggataaacaaacattttttgttggcaaaaacgtgttgattgtaatggtttctattttggttaataaagatgtgtttaatcctagttataatgattaaaaattcacaagccaaaaccgcaattacttttgcatcaacctatttgaagaataatagtattctaaatgctccttgaagcacaaactaatagttaagagagaccaggggatc

SEQ ID NO: 262680 - DNA, 599 bp, Homo sapiens
aagcctagacaaggggaaggagctgagtgttattaaatgttgaagtaaataaatgtaatgatacttttaagtaaaacagagttgagaggttgatttctttgtaaacatgtttctgttgcgttctcatccttcmaacactgctactgtttaagttttgtaccactatgatcctgtaagctaatattgtaatattctggtttcttttcactttgaaaaacaaaaatagcctactgaatttttaaaaacctattgtccttagctattcttatgctaaaagtttaacataactgaaaagaaaaatagacaattatttctcactagatcatcagggtgttttttttctaattaaaaaattacattttgtcaaatttcatttcgttttatcatttattcttagaacattgtttataataccatttttccaaagttccacagcaaatatattgactatacaagctagaccctattgtgggaggatgtggtcatgagtatgtttaaagttctattttcatgcatatttctgaatatttttaaaccaaaaaatattctaaagtagtttgttagtacctaatgttctatctttttttgatatactgttt

SEQ ID NO: 262681 - DNA, 532 bp, Homo sapiens
gataatcaaggagtgggtacttccttcccagtccaataaagattcttaacctatwttattgcacttggtagtagaaatgaaagattgagcagagaaatcctaagtataaaggcaccccaaaccaaaccgaagaggatgagtctttcattgaaactatacagattttaactgtgcttttcctttcactgaatgtacaaatttgtcctagaaatctatattttggtcaatattatactttttaataatattatttaggtatcttggttgcaaataacagactccagttctggctaatatatcactctacctccagccactccaagatactgtgaagacatatgctaactcataggcttataggcaaaattggcctaagtctctgaaggacaggcattttgtagctacagggatctagaaattagaagctaatgaacagattaatcaggcagaaaatagcttttatttttttttgtcgtatccctcaggattgcattttctgccagagagaattcaagtgttttgtattagattg

SEQ ID NO: 262682 - DNA, 558 bp, Homo sapiens
aaaaaaaacttttaggtagatattattgtttccatttgaaagatgagacagcctgctcaaagtcacacagctgctgtgtagggggatatggatataaaacaaggtaacttggcttccagaccctgtacttttaagcagtattgtaatgccactttcttcattgagaccatcttaaaaataatcaccaaaataatgtttgttcaagtcatagccacacaaatagtctgtttaattaaaaattatcagcccaataatgtgtgaaagttgttttcagtaattcatgtctaagcagctgatttttcaggttgtgctgaatcctgatcagtaataagtaatgaacatatttatgttcatttctaattactattaaatatattttgtcaaaagttataycatctccattttctctgtcttgaacttttaaactttatttactaattaataaagcaaatatatattgaggacctatatattaggcaccaagagagaaagattaaatatgtttagttgccacagcccagaagatcacaatcttgtgatagttagtgtcttcattat

SEQ ID NO: 262683 - DNA, 454 bp, Homo sapiens
caagcttatgctataaatgaacctccaaagcctgttattagttttctattgctgcattaacatattactacaaacttagtgatttaaaacaacacatatttattatcttaaattgtgtagatataattctratgaaaggtagctatacaaaaaaaaagtatagctttagagttttcactcagatctcattgagttaaatcaaggtgtaggtaggactgatcactcctggagtctctaatggaaaatctgcttccttgccttttccaccttctaaaagcagccaacagtccttcgtccatggtcccttctgccccttcaaagccagccacactgcatctctctgaccatccttcagaagtcatattctccctcttttacaaaagcatgtaaagattctccatttttaagagcctagatgtttagaatttgttcacctgaacaatgcaggatattt

SEQ ID NO: 262684 - DNA, 454 bp, Homo sapiens
caagcttatgctataaatgaacctccaaagcctgttattagttttctattgctgcattaacatattactacaaacttagtgatttaaaacaacacatatttattatcttaaattgtgtagatataattctaatgaaaggtagctatacaaaaaaaaagtatagctttagagttttcactcagatctcattgagttaaaycaaggtgtaggtaggactgatcactcctggagtctctaatggaaaatctgcttccttgccttttccaccttctaaaagcagccaacagtccttcgtccatggtcccttctgccccttcaaagccagccacactgcatctctctgaccatccttcagaagtcatattctccctcttttacaaaagcatgtaaagattctccatttttaagagcctagatgtttagaatttgttcacctgaacaatgcaggatattt

SEQ ID NO: 262685 - DNA, 586 bp, Homo sapiens
actagtactatccatatactcaaagatttgctttacattggtaattcaaacacccaatttgtgtattataatgttttaccctaattatatgattttaaatatgtcatatcttttatgaagataatatgatatagtaatggtcctatttttcttataaaacttgaaaaatcctaccattacactatttcaaataatataaacccaaatgaccagtaaaaatatatttttgctttcattcaagtaatccccttaccaatgttttttatgttgcctgaactcacacatggtgagcaatgagagtaggtactgcctgccctgtcttgacctctgcagcctactcagcaccacccagtctttgtgctaaatccctgacaggtacagtttcttcttccataacaggagtacctattycttttctgctgtctctctggtcttgaaagtccctttgtaatctcacagatcaaatacctttcactgttacagtccagccacatcaggctctatagttctccactggcttgacacaagttcacaatgctacctgattcaagcagcctttatacatgtaggatttgataaattcaga

SEQ ID NO: 262686 - DNA, 623 bp, Homo sapiens
tgtggttaatagctttctattcatcatcatatttttgatatgtggaagacaaataacttgattttatttcacagttctctgtaacaaaaggagtctcaactggactcagtgtcagtcacaatatactgaaccctgagtgttttgtggcyataaatggagaagaattttaggagctttttaatgttactaagtatatcttgcatgcacgaaggacatggatattaatatatccatgaactgtcatggatagttcagaatgaagtctgataaattggattgttgtttagcaattactctgtttttatgtctcacatctataaaaacagcatacttcctttccctttgatactaggcttggcatatgacatgttttggacatagaatattagaaactgaattgtgaagtgggatgtgaaagtgtttgcatagttggatttggctccttggacttctgctattcccatgaagtagcatgttctagtatcccactggcttggaagaattagacacactgagcagtctggaactcattccacgcttggtagtcaagccaagcagcatgcagcctagaaattccagatattagatgactcacagaggcataagcaaaaaatacatgatta

SEQ ID NO: 262687 - DNA, 623 bp, Homo sapiens
tgtggttaatagctttctattcatcatcatatttttgatatgtggaagacaaataacttgattttatttcacagttctctgtaacaaaaggagtctcaactggactcagtgtcagtcacaatatactgaaccctgagtgttttgtggccataaatggagaagaattttaggagctttttaatgttactaagtatatcttgcatgcacgaaggacatggatattaatatatccatgaactgtcatggatagttcagaatgaagtctgataaattggattgttgtttagcaattactctgtttttatgtctcacatctataaaaacagcatacttcctttccctttgatactaggcttggcatatgacatgttttggacatagaatattagaaactgaattgtgaagtgggatgtgaaagtgtttgcatagttggatttggctccttggacttctgctattcccatgaagtagcatgttctagtatcccactggcttggaagaattagacacactgagcagtctggaactcattccacrcttggtagtcaagccaagcagcatgcagcctagaaattccagatattagatgactcacagaggcataagcaaaaaatacatgatta

SEQ ID NO: 262688 - DNA, 303 bp, Homo sapiens
actggggctgctgcctttctttcagagatgcccttcgcagagaggaggaatctagagatgcagtctggctacagcggctttacagagctgtggtgggctccacccagttcaaacttccaggtggctttgtttacactgtgaggggaaaaccacctactcaggcctcagtaatggtggacacccctccccacaccaagcttgagcatcccaggttgactacagactgctgtgctggcagcaagaatttcaagccagtggatcttarcttgctgggctctgtgggggtgggatccactgagctag

SEQ ID NO: 262689 - DNA, 514 bp, Homo sapiens
cagaaataaaaggcaacccakggaatgatagaaaatatttaccaatcatacatcttataaggaatggatatccaaaatgtaaaataactcctaaacttagtaacaacaaaaacaaataatccagtctaaaaatgggcaaaggacttgaatagacatttttccaaagaaaatatgcaaatggccaataaacacatgattattgctaattattagtgaaatgcaaataaaaaatagataagataccactgtacacccattaggattcccaatattaaaaaaaataaagtaacaagtattggcaaggatatgtagaaactggaattcttgtacattgctagtgggaatattaaatggtgtagccactatggaaaacagcgtgacaattgctaaaaaaaaaaatattaaacacagaattaccatatgatttagcaattcccttttgggaatatatcccaaagaaattaaagactcaaacagatatttgtatactcatgcttaacagtgatgtaattca

SEQ ID NO: 262690 - DNA, 612 bp, Homo sapiens
ttttcattgtttaattattttattttatgtttttatttttgtgggtacataattggtctatatattcatagggtacatgaggtaataactaagacttccatctgcttttaagatttatttttatatttyactctcagcagtttgactatgatgtgtgtagctctcttttttaaaatttattcttcaaggcattttccttcatgtgaatctataaggggacgtttttgaaacgattttggagttttatcatcatttctcaactaatgttttctactccattctctatctccttgattttggaattcacattcaatctatgtttgtctgcttgacattgtcccatgagtcagtgaggctctagtcagtttttttctcttggttcttcagcatggatagcttttattgacctctttttaagtttatcagttctttctactgccgtatctaattcactgttaagcccattcattttatttttcaattcgaatgctgtaatttttagttctagaattgccatttaattatttgtcatagtttttatgtctctggagatcttttccgtcagtttatacattataatcttttccttaaagttcttgaatatatttaata

SEQ ID NO: 262691 - DNA, 612 bp, Homo sapiens
ttttcattgtttaattattttattttatgtttttatttttgtgggtacataattggtctatatattcatagggtacatgaggtaataactaagacttccatctgcttttaagatttatttttatattttactctcagcagtttgactatgatgtgtgtagctctcttttttaaaatttattcttcaaggcattttccttcatgtgaatctataaggggacgtttttgaaacgattttggagttttatcatcatttctcaactaatgttttctactccattctctatctccttgattttggaattcacattcaatctatgtttgtctgcttgacattgtcccatgagtcagtgaggctctagtcagtttttttctcttggttcttcagcatggatagcttttattgacctctttttaartttatcagttctttctactgccgtatctaattcactgttaagcccattcattttatttttcaattcgaatgctgtaatttttagttctagaattgccatttaattatttgtcatagtttttatgtctctggagatcttttccgtcagtttatacattataatcttttccttaaagttcttgaatatatttaata

SEQ ID NO: 262692 - DNA, 604 bp, Homo sapiens
  misc_feature (1)...(604): n = A,T,C or G
catagattcatttgattaaaaaaataaagatttcacattttcatttgtgtcagatgtttttaaaaatcctaatgtacaggttggattcactgggaagcagcctctgaaatacagatgaacatcctggaagttttttagggagtgatcacaggaccaatacctatgaatggaggggaagagaggagaatcgggcagaggaagaaaccgggttgaggtgcagccccagtgagatctctgctaaccctacagggagcagaccttatatctaaaatgccccctaagagcgttctagagttggtgtgaggagacagagcctatatactactgcattaaccagtcattgtcaaggctgcccagaaggcagcaggaccttgggcaaggtgactctcagccaaggcaattcctgaagatctaccagcccaaaatgttttcggcagccagggaaatkgagtccttctgttctggaaggggatctgggaggtggagccctacacccttgaaagcccactgttgtggcctctctgatagggtcactacatgtgagacctgggagcagctcacccnnnnnnnnnnnnnnnnnnnnnnnnnnnnnnnnnnnnnnnnn

SEQ ID NO: 262693 - DNA, 583 bp, Homo sapiens
tattccttcctggaataattgtattttaacttctccagaatgctgacagagcacttcagaattgggcaatttaaaacgatacatgggttttgcccatttcttaatgatgcttaaaatgatgcagaaaacgatgcgaaagcactggaaaggaatacacacgtgagcccaggcttagggaagcataaagcctcctggcagcccgcactgtgttagtcattgtgaccctgccgcctttgtccacaaggatggcttgggtggctcggggccaccaggccatgtggtttgagttgcctcccactgggagtgatggatttgaactggtccrgccacaatctcccacccagtcccccttgtggccaaaggcatgtgtttgtgagagagctggatgttgtcaggggtgaaaggggtgatcacgaaacagagcaaaaaacaaaaaacggtcagcgcggcaacgactcccaaggcactggccttctctatggcgtgtgctcaccaactgtgccagagcctctcttgcctggagcctgagaatagaggccaccacacaggccactggcatgatgacaactgcagccataaaggc

SEQ ID NO: 262694 - DNA, 544 bp, Homo sapiens
gcaggtcgatctcagactgctgtgctagcagtgagaaagactccatgggcatgggacctgccaaaccaggcacgggagagaacctcctggtcaactggttgctactaccatgggaaaagcacagtgtttgagcaggagtgtcccatttttccaggtacactctgtcatggcttcccttggctaggaaagggaaatcccctgacccctggtgaggcgacaccccaccctgtttcggctcaccctccatggkctgcacccacgtcaaccagtcccaatgacatgaaccaggtacctcagttggaaagggagaaatcacccatcttctgcatcaatcatgctgggagctgcagaccagagctgttcctatttggccatcttggaacggaatccaataattgcaattttaaaaattgtatccaaatgacttgtatttccactactaagcatagaattgaaattatatggatataactcaaattctctgtgaaggattattttatcaactgtttgtatatccctatgattttatgtttagttgtgtatt

SEQ ID NO: 262695 - DNA, 521 bp, Homo sapiens
aaatgaacacaaatttttctaatttcgaaaactacaaacacatagattcaaaaaactcagaaacatgaggacgagaaacataaagaaaactacgtcaagacattttataataaaactgctcaaaaccaatgataaagataaaggcttagaaacaactggagagaaaaatgattacataaagaagatcatggttatgatgacagcaggtttcttgttagaaacaacacagccaaaaagacagtgtaatagcatctttaaagtactgaaagaaaaaactgtcagccaacagttttatacccacaggaaagatcttctgaaagtaaaaattaaataaagactttcagacataaaaagctgtagagatgtattaccagtagaatattggtaccagaaatatttttaaaagttcttctgggagacaggaaatgaccggatagaaatgtggatctatggcaagagaatgaagagtactaaaaaytgtactacatgggtagatacacgagaccattctgattattaaa

SEQ ID NO: 262696 - DNA, 587 bp, Homo sapiens
cagatctaaattcaggttctggcggcccccatagagtgctctgggaaagagaacaataatattttcttgtgcactttaaaaacaatacacagttctaaaattgtcaaagttagtggggaggtaaacctagctagggccaataattctctcttcaactgtgaaaaactgatttgagagatcacagggcataaaaaagaatgtgcacccccagggtgtagaatatatcattctacacagggtgcagagtatatcattctacacagggtgcagaatatacacagggtgtagaatatatcattattgyagctatttgcatcacaataaaatatgaatgcaaattccttaggcacagtaaataatggatcacatatgcaacactggaatcagactagcatctgtagttgctctaaatatgataaaatgtcaaagcccattaatgatcacatttaggatctcagttgctgcctagctgggaagatgagagcattccccatggaggagtattgtcctcagctctgcagcaaagacgctctgcctttctcagagtgtccggtcatgtactgaaacttctggagacaggagactga

SEQ ID NO: 262697 - DNA, 587 bp, Homo sapiens
cagatctaaattcaggttctggcggcccccatagagtgctctgggaaagagaacaataatattttcttgtgcactttaaaaacaatacacagttctaaaattgtcaaagttagtggggaggtaaacctagctagggccaataattctctcttcaactgtgaaaaactgatttgagagatcacagggcataaaaaagaatgtgcacccccagggtgtagaatatatcattctacacagggtgcagagtatatcattctacacagggtgcagaatatacacagggtgtagaatatatcattattgtagctatttkcatcacaataaaatatgaatgcaaattccttaggcacagtaaataatggatcacatatgcaacactggaatcagactagcatctgtagttgctctaaatatgataaaatgtcaaagcccattaatgatcacatttaggatctcagttgctgcctagctgggaagatgagagcattccccatggaggagtattgtcctcagctctgcagcaaagacgctctgcctttctcagagtgtccggtcatgtactgaaacttctggagacaggagactga

SEQ ID NO: 262698 - DNA, 543 bp, Homo sapiens
atgctatccaaatccagtgtgtgtgtctgtgtgcagggggcaggcgggggggtggtggtctaggtcactgctcttccatgtgtaatcccagaccagtgacatcagcatcacctggaaactggaagacaccctgggattcctgagtcagaaactctagcaacagaacgcagcaatcttgtctgaagaatccctccaggtcrttctacctatgctaaagttcagaaaccactgatctaggtcacactccctagagactgaacaattttgctggaagctgcttaattcaagatcaacacaggacacatgcctgtgaagcactggaagaaaaatagaaatggtggaatctggtttttatatatgccaaagataggaccaagtccaacagcttcaagactccttcaaggccagaaaataacatcttacaaatcacagttctgggtaggaaagaactaagcacagcactggagaggtgatgatgtccttcagcagtttatggtctttggggatcctctagtacaaacagcttcaggtgtttttcaaggt

SEQ ID NO: 262699 - DNA, 606 bp, Homo sapiens
tgctatccaaatccagtgtgtgtgtctgtgtgcagggggcaggcgggggggtggtggtctaggtcactgctcttccatgtgtaatcccagaccagtgacatcagcatcacctggaaactggaagacaccctgggattcctgagtcagaaactctagcaacagaacgcagcaatcttgtctgaagaatccctccaggtcattctacctatgctaaagttcagaaaccactgatctaggtcacactccctagagactgaacaattttgctggaagctgcttaattcaagatcaacacaggacacatgcctgtgaagcactggaagaaaaatagaaatggtggaatctggtttttatatatgccaaagatagraccaagtccaacagcttcaagactccttcaaggccagaaaataacatcttacaaatcacagttctgggtaggaaagaactaagcacagcactggagaggtgatgatgtccttcagcagtttatggtctttggggatcctctagtacaaacagcttcaggtgtttttcaaggttatctgtgttattaagagtctgttaaataagctaagtgttttattttacgtattcctattggtg

SEQ ID NO: 262700 - DNA, 556 bp, Homo sapiens
ggtcttgctgtgttgaccaggttgctcttgaactcatagcctcaagcaatcctcctgcctcagcctcccaaagtgatggaattacaagtatgaaccactgcacctcacctaactattaatacttccttgatagaaagaagttgaaaagatagctcttgctaaaagaatgagagaaagggtctatagctgtaaaatctaactctaacagcaaacttcattagatgaaaccaggcttctcatgagtctgagaatgatagtagctgaaagtgagcccagaactgtgattctatattgaatgtggcagctcagatcatggtgtgccaaaagattcttggcgtcagaggtgttcagggtgggttccatacaagcaccataaaataataataataataataataawaaatcagtgattttaaacctgacagtggtacttggcttgggatcagaataatcctgatgagtgtcccaactatgtgaagagaacctcagggcatagctggacaaagtacacaggtcaagagaaagctgagctgctctgcagtccagagcatgggga

SEQ ID NO: 262701 - DNA, 556 bp, Homo sapiens
ggtcttgctgtgttgaccaggttgctcttgaactcatagcctcaagcaatcctcctgcctcagcctcccaaagtgatggaattacaagtatgaaccactgcacctcacctaactattaatacttccttgatagaaagaagttgaaaagatagctcttgctaaaagaatgagagaaagggtctatagctgtaaaatctaactctaacagcaaacttcattagatgaaaccaggcttctcatgagtctgagaatgatagtagctgaaagtgagcccagaactgtgattctatattgaatgtggcagctcagatcatggtgtgccaaaagattcttggcgtcagaggtgttcagggtgggttccatacaagcaccataaaataataataataataataataataaatcagtgattttaaacctgacagtggtacttggcttgggatcagaataatcctgatgwgtgtcccaactatgtgaagagaacctcagggcatagctggacaaagtacacaggtcaagagaaagctgagctgctctgcagtccagagcatgggga

SEQ ID NO: 262702 - DNA, 490 bp, Homo sapiens
gatgctgcctgaacccagaccctcttctttcaagacccacatcaagaggccatttctcatggtccctacaagtagacactgccagtgacctagtgacactcagcacttccaggcccatgcagggagccttccacatgattgaatctttccctatcccctcccaggattgaatgcagaattctctgagcaaccgaaaaagggcacagtccttgctggagggggctgggaacctgagtgagcacatggaaggcgygccaatgaaaacacctggtattggactagagtgtgaaggagaaataagcttctgttgtgttaggccagtgacagttgggggtttatgtgttaaatgaccttatgttacctttgtgcaaacggacatctcttttaagtttttcaaactaaaatatatttgaggcgttcaagggtaaaacttcagttccctctccttaacctgaaacttacgcattgctcacttcatgagcctacactg

SEQ ID NO: 262703 - DNA, 480 bp, Homo sapiens
ttaatcgacttaaaatttaattttttctctcagtctcaaaattgtagaaattaaaatagaatatatataaatacatatatatatatatatatatatatatgtatttatatctggaggactttatcaccttatgccagtaccacacattcctgaatactataaactgtactaagttttgcaatcaaaacgtgtgaattttccatctttgttcttttcaagattgttttggctattccgggtcccttaaatttctctaagaatcttaagatcagcttattaatttccacwcataactatctggaattttgatggaggcatgttaaattcatagatgaatttaggaagtgttgtcattttttaaaaatattttttaaattttttgtttttaattgacaataattgtacttatttatgaggtttaatgtaatgttttgatacctttatacattgtggaatgattaaatcaagccaattaacagt

SEQ ID NO: 262704 - DNA, 477 bp, Homo sapiens
gtgttgggaaaactggctagccatatgcagaaaactgaaactggacccttttcttacatcttagacaaaaattaactcaagatggattaaagccttaaatgtaagagctaaaaccataaaaatcctagaagaaaacctaggcaataccattcaggacaaaagcatgggcaaattttatagtatattttaaaaaatcaaacaccatgatgaagtaggacttatccctgtgayatatagatagttcaatgtgtgcatattaaacagtgcaatacactagattaacagaatgaaggataaaaagtcccataatcatgtgatctcaaatcattttgacaaaattcaacactcttttatagtaaaaaaaaattccaacaaattaggaatagaagaaactttcttcaatgcaataaagggaaaataggaaaagcaagaagctaacatcatcatcctcagtgattagaaactgaaagctttttt

SEQ ID NO: 262705 - DNA, 632 bp, Homo sapiens
  misc_feature (1)...(632): n = A,T,C or G
acagaatgaaggataaaaagtcccataatcatgtgatctcaaatcattttgacaaaattcaacactcttttatagtaaaaaaaaattccaacaaattaggaatagaagaaactttcttcaatgcaataaagggaaaataggaaaagcaagaagctaacatcatcatcctcagtgattagaaactgaaagcttttttctctgcaatcctggaataaggaaaggatgccacctcttaccacttctattcaacayatttctgtaaagtattaccagagcaattatccaagagaaagaaaatgcattcaactctgaaaggaagaagtaaaattatctctcttttcagatgtcataattttatagtgttagacaaaacccataagtgtggttacacattacgagcacacagcaacgtggttaagcaactacnataaacaaattcagtaaggttgcataatacataattgacaagcaaaaacctattgtatttctgtgcactaacaataaaatatcctaatagcaaattaagaaaacaatcacatttgcaatagcatccaaaagaataaaagacttggaaataaacttaaccagaaatgttgtcttagtctgttttgtgctgctgtaacagaatacca

SEQ ID NO: 262706 - DNA, 600 bp, Homo sapiens
taagactctggggggactgctggaaatgcatgactgtgctctaaaatgtgaggatatgagatctgagaggggcctggaatagaatggtatggtttggtggtgtccccactcaaatctcatcttgaattgtagttcccataatccccatgtgtgatagggggcacccctgtgggagataattgaatcatgagggcagtttcctccatgctattctcacgatagtgagtacgttctcaggagacctgatggttttaaataatgggcttccccttttactcagctctcattcttctctttcttgccatcatgtgaagaaagatgtgcttgtttccccttccaccatgattgtaagtttcctgaggcctccccagcctgtggaactgtgagtcaattaaactttttttctttgtagattactcagtcttgggcagttctttacagcagcgtgtgaatggactaacacaccagttacataaagaattgaaaatagtcaaactcctagaagcagagagtggaatggtgattaccaggggcttagggaagcaggaaaccaggaggtacacagcytctgctatgcaagacgagtaagtcctaaagagc

SEQ ID NO: 262707 - DNA, 612 bp, Homo sapiens
ttttcattgtttaattattttattttatgtttttatttttgtgggtacataattggtstatatattcatagggtacatgaggtaataactaagacttccatctgcttttaagatttatttttatattttactctcagcagtttgactatgatgtgtgtagctctcttttttaaaatttattcttcaaggcattttccttcatgtgaatctataaggggacgtttttgaaacgattttggagttttatcatcatttctcaactaatgttttctactccattctctatctccttgattttggaattcacattcaatctatgtttgtctgcttgacattgtcccatgagtcagtgaggctctagtcagtttttttctcttggttcttcagcatggatagcttttattgacctctttttaagtttatcagttctttctactgccgtatctaattcactgttaagcccattcattttatttttcaattcgaatgctgtaatttttagttctagaattgccatttaattatttgtcatagtttttatgtctctggagatcttttccgtcagtttatacattataatcttttccttaaagttcttgaatatatttaata

SEQ ID NO: 262708 - DNA, 594 bp, Homo sapiens
ggaactcataccttgctccatggttggagattactaaaatagcatggtttcatgtttgggaagcaaagctaaaaggactgcctcctgaaaggaaaggwagatagatcctatttgagtttgcaggcccagtgttgggaaaagaaggtacaaaaatatgatggctgcatcatatattggttctctccaacatgaggcaaggagatgtgtgtatcagaggaattcatgtgggatgcacacagttgggatcagtttggatatgtaacctagtctcaaagagttgggtggtaccttgaaatctctttgagattgtattacatcactaggacctgttgggcctcacttacctgagacctagacaaaggcctaggtcagttgtgatgactaacagaaatgtgacggcaaattcatgaccaccaacatagaagttcacataaaagacataaattgaagtacagaagcaaacatttaacttgcaatggaaagccctcttccagcaccaaaatgagactattagccacagaggagggatggggtgagcaataggagactaagtccatgatatttttttcctacccctcaacacccttcacacac

SEQ ID NO: 262709 - DNA, 594 bp, Homo sapiens
ggaactcataccttgctccatggttggagattactaaaatagcatggtttcatgtttgggaagcaaagctaaaaggactgcctcctgaaaggaaaggaagatagatcctatttgagtttgcaggcccagtgttgggaaaagaaggtacaaaaatatgatggctgcatcatatattggttctctccaacatgaggcaargagatgtgtgtatcagaggaattcatgtgggatgcacacagttgggatcagtttggatatgtaacctagtctcaaagagttgggtggtaccttgaaatctctttgagattgtattacatcactaggacctgttgggcctcacttacctgagacctagacaaaggcctaggtcagttgtgatgactaacagaaatgtgacggcaaattcatgaccaccaacatagaagttcacataaaagacataaattgaagtacagaagcaaacatttaacttgcaatggaaagccctcttccagcaccaaaatgagactattagccacagaggagggatggggtgagcaataggagactaagtccatgatatttttttcctacccctcaacacccttcacacac

SEQ ID NO: 262710 - DNA, 520 bp, Homo sapiens
ccagatataaaattctgggttggaatttcttttctttaagaatgttgaatattgaccccccaaactcttctcacttgtagggcttctgccgagaggttcactgttagtctgatgggctcccttttgtaggtgacctgacttttctctctagctgcctctaacattttttctttcattttgaccttggagaatctgatgattrtgtgtcttgtggataatcttgtgaagtatcttactgggattctctgcattttctgaatttgaatgttggccgctctagctaggctggggaagttctcatggatgatatcctaaaatatgttttcaaagtttgttccattttccccatccctttcagggactcagtctcctcacataatctcatatttctcagaggttttgtttgttcttcttcattttttcctctacttttatctgtcttatttcagaaagccagtcttcaagctgagagtctttcctctgcttcctgtgcttcatctattttgctattaatacttgt

SEQ ID NO: 262711 - DNA, 581 bp, Homo sapiens
gcaacattaacatacaaaaatgagtaccactgctatacaccaaaaataaacaagctgagaatcaaatcaagaactcaatcccttttacaacagctgaaaataaataatattcttaggaatatacttaaccaaggaactgaaagatctctacagggaaaactgtaaaacactgctgaaagaaatcatagatgacacaaacaaatgggaacacctcccatgcacatgggtgggaagaatcaatactgtgaaaatgaccatagtgcccaaagcaatccacagatttaatgcaattcccatcaaaatgctatcatcattttccacagaactagaaaaacaatcctaaaattcatatggaaccaaaaaagagcctggatagccaaagcaatactaagcaaaaagaacaaatttggagacatcacattaccygacttaaaattatactgcaaggctatagttaccaaaacagcatggtgctcgaataaaaataggcacttagactagaaaactcagaaacaaagccaaatacttacagccaactggtcttcgacaaagcatacaaaaatgtaaattaagaaaggaca

SEQ ID NO: 262712 - DNA, 590 bp, Homo sapiens
gctgcccttcggctaatacagtgtaagaattcattttgtttatctgctccaacacagaataactccagtgaggataaagttataaggattgtaaggaagagggaaagaaaaatgtatacaaaaatarccatggaagtttcagaataatagcatgagaagaaaaaatttgtttaggttggttttctgatattatccaaataaatattactttcaaaatcataatatctgccttgagcttaaatggagagaaaggaaatggaaaagttccttactgaatctgagatctagtgttttgtttacacttgaatataggtagtaaatcttaggagcagttcagttagaataatcattttaaaattacttatgggactaaaaagcttatgcttttagcagacccattcagtaaattggggtgagaggagaaaatggggctctttagcaaatgaccaacatctacagattttgcctaataagacatttctatggggcagatgccttatcaaactttcaaacaattaaacttggttttattataaagtcaagctgatagtaaatgtctttactttttaaagtagattttattggttata

SEQ ID NO: 262713 - DNA, 611 bp, Homo sapiens
gctcatgactctgtatatattctcacttcaagctacttcttccacacaaaatagctgtaccacttgaaactctgacattggaaagatttctctcaccattgtctgagctgtagcttataaagcaaccacgtctatttttggtttgacccayatactgaaccaacccatctgtagttaagcttggacttgttctgcttcttcagcagtcatgaaggacacctgcattgcccctatggtcatagatgtgagctgaggaaagctgctggtgcaaccctgtggctgacgtgaaaagtcaatgacgtctaagctacctgctcatgcagatttctcatcctcacttgtctgctcagggtcaatgcagattaatcatttattatgatcaactgatgctggtttcactcaatgccttgagggatccaacagaacccagctcatatgagtctctacaagggtctagtaacatcatgaggcagatgctacccctctgttgatggcatagcctttctctataaccctagagcctttggttctctagaaccctagagcctttgggatgattctcccaatgggcttgacataagttttacactgtaccttttcccaccactgac

SEQ ID NO: 262714 - DNA, 552 bp, Homo sapiens
gctgtgatgtgagcccctggggcatccgaggctgccctgcaagcaggcgtggccagacytgggccccagaacgggccagcagaccaaggggtgcttgagtcacactagccccatctgataggcaagactaccctgcagagttcacgccccacagctcccatagggctagtctcctatgggagcaagtcgagccaaggggagttggcaatccctgagcatgctccactatagatgctctgggctcttacatcaactggcttgttgcccctaccacttttctaagcagctctccctgacaacttgagtgtccatagtggtcaaggggtctccgtctgctggggtcccagagaggccttgatgagggcaagttgctccttgccagctcaactcacccattcctctggagtcattggggatcaggcatgagtactggtgcatggtagcctctagctccatgtagggttcccagcttcctccccattcagcccacttcagtgtcttccctctgtccactggtggtgccttccctctgaagatctgttggaagtatgc

SEQ ID NO: 262715 - DNA, 568 bp, Homo sapiens
aatccctgcctataaggagaagcaataataatagatatacaaaaagaactattgcaacaatcatggacatggctaggcatggtccagttaaattggcccaggatggcacagaatgggagatactagacttgaaactggatgtctagtctgaggcaaagaaagctggagaaaagaatactggcaatggtgttagtgcagtattgcaaatagcagcaaatacatggaacatgcagcagcagggcctgctgagaggcaagtagagaaagtatgggcaaaggartcaaggagcaggcactatccagagatgagaagtaggtcccacaaaatctgtaagtgggaatagggtctgagcagaaattcatgtctagaagtctcttcccagagtgggatggataggtggatgtacaggtcaaagcaaggtggatgccagttctagaaggatcaatgtgccaggcaaattttcagactggaactcagacacaaggccagacagaaattagtgtctcaaaacctaccttgcataatgcacataacaactcaggggattgtacctgaacaacaagcaaaa

SEQ ID NO: 262716 - DNA, 568 bp, Homo sapiens
aatccctgcctataaggagaagcaataataatagatatacaaaaagaactattgcaacaatcatggacatggctaggcatggtccagttaaattggcccaggatggcacagaatgggagatactagacttgaaactggatgtctagtctgaggcaaagaaagctggagaaaagaatactggcaatggtgttagtgcagtattgcaaatagcagcaaatacatggaacatgcagcagcagggcctgctgagaggcaagtagagaaagtatgggcaaaggaatcaaggagcaggcactatccagagatgagaagtaggtcccacaaaatctgtaagtgggaatagggtctgagcagaaattcatgtctagaagtctcttcccagagtgggatggataggtggatgtacargtcaaagcaaggtggatgccagttctagaaggatcaatgtgccaggcaaattttcagactggaactcagacacaaggccagacagaaattagtgtctcaaaacctaccttgcataatgcacataacaactcaggggattgtacctgaacaacaagcaaaa

SEQ ID NO: 262717 - DNA, 554 bp, Homo sapiens
ggcaactggtaaagggttaagctctgcctgaagagttgaaatcagtagaaagaaatgtttgtagttaagataaaggggactatggaaaccaaggtccttgttatrtagatgaaacctcccggtaacaggcttcagagaatagattgtaaatatctcttaccgggccctggaaggtgccagacttttagttaaatctctcctggatcaggaaaagacccagaaaggaaagggaattacctatagaatgtagattttccccacaaaagacagctttgcaaggccgtttcaaaatacgttataaaaatatattttgggataaaaaatttcattttctttcagggcttgctatctgctatgtgattttatactagagtcaggttggagtttggtatcttattgctacaaagtctgttttttcagtcttaagatctctgttttaatgttaatgctggtcagttgtgtctcaattccaaagaggaggataaaatgaggcaagccctccttcacatcatggcctgaactagtttttcaggtttactttggaatgcccttga

SEQ ID NO: 262718 - DNA, 588 bp, Homo sapiens
taaattcctacagtccacagtgcagggaagtccctaggcccaggatacaatcgctcctgattttgagggcatgtatccaaacacatggcctactgaaaacaaatgcattttaatctcaatgactctctaagattaaggctttgaaatgactttactattcttaaaatcatggcattttccctccttgcaccaggttgaaggatggcccttctgaccctgctggccctargcagtccctcctccatggggtgcagacttggctcatgatcatggtgacccctcaccaccacgaggccagcccagagcccaccagttctggactcctccctaagcaaggcagaataatgtggtaggcaggataatggcccccaaagatatctgcttcctcatccctagaacctataaatattaccttatatgggaaaagaaacttggcagatgtgagaaagttaaggatcttaaaatgaggaggttattctggattatctgagtgagctctaaatgcaattacaagtaccctttaaaaggaaggcagaagagtcagagaaagagatgtgatggtggaggcagagattggagtgatgcaac

SEQ ID NO: 262719 - DNA, 419 bp, Homo sapiens
agttcagtaactgcaggaaaccaatgctgatatttaggacacacttgagtcatttgatcacatcattatatgtaccaaaagataataatataatatgtcttttttaaatttttggtactttgagttttttaatattttagagagtcatttatagggagacatatttaaatgttgaatagaggaaaaaagtacttgggattagttgaaatagtctgcctagatwaacagaaatgacttgtgtatcaaattcaaatatatctgaaagtttttcaatctcctgtctttcattactcagataaagacactaaacttatccagagacccaaagtagaaatctcagaatcatccttgattcttctctttctcttctaccttaactttggttaattaaggcctatcaaacataactatgaactgtt

SEQ ID NO: 262720 - DNA, 591 bp, Homo sapiens
tgtatcccctcttaatacctagtcttcagactccattcaagtgtagttagttgtccccagagtggtctttgtaagaaattgatctggtccagaatcgtgttatgtttagttgaactagtctgaaacagttcctcagtatttytttgactttggtgacctagacaaattatagaatgttttgtagaatttggattgctctgatctttccttttggttagattcaggctattcctctttggcagaaacatcacagagcgagatagtgttcttatggagtcctatcaagtgacatataattttgatttgttcctttactgatgatattcactttgatcaattgatgaaggggatgtctattaggctttccactgtaaatttactatgtatccccttgtaataaatatttcgtgtagtgatattttgaaactgttttgttcttcatcaaactttgaatttaattactatcagtataggctcatgccttcatattttacttagctttaatccattaatattattttttattttgatgctcaaattgtttcagattttgtggataggggcaccttcaagatttccatgtctttttaa

SEQ ID NO: 262721 - DNA, 604 bp, Homo sapiens
aaattaacacaccacaagttacaaaatatttggcttatacaccaaaatatgaatatgcatagaattaatgatggatgcttgaacatacgtgggcatttcaaagctaataggaatagcctttttcatgacctaaatttgtatcacaccataccactctcktagttctgaacatttatatcttcatgtcatggttgttctgcatctcttgtctttcccagtaaattaatagttccacgaaagcaagaagttcctatttcaaatgctttggatcattactgctatgttccctgtgactgtctttaataccagatacaggtagggctgtagaatgtacttagtgagtaaacacatttctggaactttgttttctacaatttcagacattttgctatcttttagatgataatgcacttatttgtgagacattctattatatttttcaaatagaacctgtgattcaaaaggatgattcaacagatctaaaagttagttttacatttagtaagaggatttgtgtaggaagagatttacttccattgcattcccatgccctagaaagagactgcctttaacattaaaacctggggtagagccaagattgcca

SEQ ID NO: 262722 - DNA, 597 bp, Homo sapiens
agggaactgagttgaactcgtatatgggagggtcagttctccatcttatatctctctgcttcctattagaacattccctaaaccttaggaaatcatcctgattggattgcatctggtaagatagagaagccttcctagggcttgagtctgaagtgatgtgtttgatccaggttacgagaaagtcttgcatttgggtattcctactctcccactaagaattaaagcaacattttgggtttctgtttcatagtactgtatgtatttagcttcctcagcaatcatataagaaatatttgatgaaaggggaatgtggggtcctagacttttaatcaaattttaccaaattgtgcctcaaataccatcgcaataactaatatttgcttttgaagattagatatccagagacttaaaaaaatgaacaccatctgagcttgggcttattaaagaatttatcacatatttaaaatggyattaatcctagctcaaagggtttaaagaataaaatgagacactatacattgcacttgcctattggcatatagtcaaaccctaagtatttgagggcaggaaattggtttattcactattgtctcttca

SEQ ID NO: 262723 - DNA, 622 bp, Homo sapiens
gatctggacgtgagtactttgttaaaagctcctcatgggttttttgtattctgttatggttgagaaaccctgttttagaggaaaacaattttcatttgatcttataatcctgaacagtttcccaatgctgattaattgtatttctgtgtggtttaaattgtcagggtcatggtagaaatgagttcttgtaggagccacgtctgttttaatcccattcctaggttatatttttatagaagattctttaaaaccagtaagcatgatccaaagttagttcccaaaggtcaatgtgagaatggtcttttagtctatttgtctcaataattattatcatgcattactacagaaagttattggaacagaagtttcacctgcaacatcccttgatttgaccacattaaacagttgtgaataaaacaatgatgtttctattttaaaaattgaggaactgaacaaaaacattgacttacgtctaaacaagccatctctttagagttcactatggttggttagaactgcttyaagacctactttgctgaaaggaattagcttcatattgacataaaccaatagaagaggttgatattggcagttaatgcaaaatgttaattagaaaggcaga

SEQ ID NO: 262724 - DNA, 606 bp, Homo sapiens
atcaatattttatagtttttcagtgtacatatattatgcccacttgaataaatttattcctgagtattttttgatgctattgcaaatgagattgttttcttaatttctttatcgatagtctgttgttactgtacagaaatactactgatttttgtgtgctgatcttgtatcctgcaacttgcctgcattttcttatcrtttataagaggtttttggtagagtctttagtgtcttctatatatgaactaatgttatatgcacacagaaacaatttagcttcttcctttttaatttggatgccttttcttcctttttcttttctttctctctttgctttttgccgacatgctctagtgaggactttcagacctatgttgaatagaaaggataagagtgggaatccttgtcttattcctgatcttagaggaggattttcagctcttcaccactgagtatgatgttaggtgtgggcttgtcatatatagcatttattatattgaagaacattccttctttacctagctgttgagagttctaatcatgaaaagatgttgaattttgtcaaaagtttttctaaatctgtggggatgatcataagatttttat

SEQ ID NO: 262725 - DNA, 606 bp, Homo sapiens
atcaatattttatagtttttcagtgtacatatattatgcccacttgaataaatttattcctgagtattttttgatgctattgcaaatgagattgttttcttaatttctttatcgatagtctgttgttactgtacagaaatactactgatttttgtgtgctgatcttgtatcctgcaacttgcctgcattttcttatcgtttataagaggtttttggtagagtctttagtgtcttctatatatgaactaatgttatatgcacacagaaacaatttagcttcttcctttttaatttggatgccttttcttcctttttcttttctttctctctttgctttttgcckacatgctctagtgaggactttcagacctatgttgaatagaaaggataagagtgggaatccttgtcttattcctgatcttagaggaggattttcagctcttcaccactgagtatgatgttaggtgtgggcttgtcatatatagcatttattatattgaagaacattccttctttacctagctgttgagagttctaatcatgaaaagatgttgaattttgtcaaaagtttttctaaatctgtggggatgatcataagatttttat

SEQ ID NO: 262726 - DNA, 548 bp, Homo sapiens
gttcaataaagggacgctgttgttattaagaggatcagtaagtgcaagaaaacgaccatgtgtcacggaggtttgtttgtctaggcgcttctgtagtagtggcattctggttgtacagtcgtatacgggtctctctcttcaaaggtgcacgcagtctgattgatccctgtgcctcggaatccgtgctaaataaatattgagtcggtgaatgaatgaacgaacgacaaaaggcaaggtttgtctctcacttaattaagacgttcagatggggagaaggtccatcacccatgacatcgatacaatccccctactaatcaagttagccacttcaagtttcagtgaacttaaactacaaaatgggcaaamggacacctcatgcctcacagcgcagttctgagatctgataaaacgctagatttgaagcctttgtaaaaaggaacatcctctcccatcctgggcgtgctgccgggtatcgcagacggcccacgcccacactgcagaggccggcaccgagcccccgctccgccctctcttcctggtttttcccg

SEQ ID NO: 262727 - DNA, 441 bp, Homo sapiens
ggtgggagctgacaacccattcctggggttggcccccctgccacagctggaaaccgcccaggggtgggctcaagcgggctgygcacacgctcagcaccagccctgtccagagattcaccggccgtccccggtgcaaggatacttaagacgctctccaaatgcagtggacttgaaccttctccttggctgctgcagggctgcagggcctgcagtctccggtaggcgcagagttgctgcggcttctccaggtgctcgtccccttttctgcgtctgacctggttgtcaggatgagacctgatccttgtcaccggcctccggaagatgcagctggtgagtctcatggggagagcagacctcgcagctcgtctccgatgggccttggccatgtggatttctcgtttcttctgtaaagcccagggcatcatgtttcttttgagcttc

SEQ ID NO: 262728 - DNA, 441 bp, Homo sapiens
ggtgggagctgacaacccattcctggggttggcccccctgccacagctggaaaccgcccaggggtgggctcaagcgggctgtgcacacgctcagcaccagcyctgtccagagattcaccggccgtccccggtgcaaggatacttaagacgctctccaaatgcagtggacttgaaccttctccttggctgctgcagggctgcagggcctgcagtctccggtaggcgcagagttgctgcggcttctccaggtgctcgtccccttttctgcgtctgacctggttgtcaggatgagacctgatccttgtcaccggcctccggaagatgcagctggtgagtctcatggggagagcagacctcgcagctcgtctccgatgggccttggccatgtggatttctcgtttcttctgtaaagcccagggcatcatgtttcttttgagcttc

SEQ ID NO: 262729 - DNA, 438 bp, Homo sapiens
gctcaaaagaaacatgatgccctgggctttacagaagaaacgagaaatccacatggccaaggcccatcggagacgagctgcgaggtctgctctccccatgagactcaccagctgcatcttccggaggccggtgacaaggatcaggtctcatcctgacaaccaggtcagacgcagaaaaggggacgagcacctggagaagccgcagcaactctgcgcctaccggagactgcaggccctgcagccctgcagcagccaaggagaaggttcaagtccactgcatttggagagcgtcttaagtatccttgcaccggggacggccggtgaatctctggacagagctggtgctgagcgtgtgcgcakcccgcttgagcccacccctgggcggtttccagctgtggcaggggggccaaccccaggaatgggttgtcagctcccacc

SEQ ID NO: 262730 - DNA, 573 bp, Homo sapiens
agcctggccaacatgatgaaactccgtctctactaaaaatgcaaaaaattagctgggcgcagtggtgggtgcctgtaatcccagctacttgggaggctgggcaggagaatcacttgaacccggaggacagaggttgcagtgagccaagatcataccactgcactccagcccaggcaacagggcaagactctgtctcaacaaaaacaacaaaaaaaaacggcgggggttggggggtggtggcatcatcacaggtataaaatgagtatgacaaaygcagcgctaacgcgagccacaaggatgagggagcactgtgagctggggcacaaccctaagattcagaaatgaaggggaaggtgaaatctaagacttctcccctgcagagacagccaccctcagcaggggacctgaagtggtagcagccagtccccaagcatccctggacacccaggcatcccccatagcagtcggtggccttcataggtccttgccatagagtactcaaacagagtagggcacccacgacagctaaatgagtccctctgactcaattccttgtcttgagactacagggtt

SEQ ID NO: 262731 - DNA, 569 bp, Homo sapiens
taaattataaaggaaagaggtttaattgmctcatagtttcccagggctggggaggcctcaggtaacttacgatcatggcagaaggggaagaaaacatgtccttcttcacaatggtgggaggaatgagaagaatgagagccgagcaaagggggaaaccccttataaaaccatcggatctcgtgagaacttactatcacaagaatatcatgggggaaactgcccccatgattcaattacttcccatcgggtccctcctaccacacgtggggattatgggaactacaattcaagatgagatttgggtgggaacacagccaaaccgtatcaatcatttacccccaaaagacctggtcctccccccgaaactccctgtattagtgtttagtgcctctgtccaggtgaaaaaggcaggaatctaggaagtatccctgaagctcctttttcactttccatatccagtaagtcaccatatctgatcaaaacgctcctcaaacatagggaaaaataggtagaatccatctatttctcctatgcctaccattgtactattccaaaccacaagtgttgct

SEQ ID NO: 262732 - DNA, 580 bp, Homo sapiens
gctagaacaaataatcaagacaaagacatagttgtgggaaatgttcctaaagactgaagcatagattaaaagcattcatcatgttccagaagaaaaaatggtaagaaatcgatactacacttacccaaataaacatttggataatgaagacaaaggacaagtggttctagcattttagccagmaaaccacaaaacaatttattttttaaacaaaggaaacaaaccaggcctcccttagacttttattctggaatacaaaatactggaagataatggaccaatgtctacatagttgtaagggaaagtacttttatttaggaagtataataaggaagctcgtctttactatataaaagtaatactttgtattcttggacatgcagtattcaagacaatataacacccatgcattcttcattcaaaaacatcgcttgaaaatgtaacattaatataattaacctaagaaaagaaaattaacatctgaaactataatatagaagaatccccgataagccatgcaaccaaataaataacagataaatctaaataaatgctataatgttggttaataagctgaata

SEQ ID NO: 262733 - DNA, 602 bp, Homo sapiens
ttgccttccttttgtatagattccccatttcttcaggtcttcctgatacccacagttgtttaccctgagaaccacaaaagtttttaatatggaaagtttgttcctttaaaattgctaggagaatgtttattgagacaakcctggcacataaacgagatcttcatgtcactgaaatttggcagggggcagaggtggggacactggcgagaaggaacccaggcagaagtggagagacagaaaggtgtgaccgagaaatatggacgtttttcttcctgtgcaacgaagccctcaccctgtgtttcacgtggcattggcggggactttcttcctttgtaatgtgctcactggggttgtcacgtcacatagccacgtggagacagccactgaagttcaaagacaagatgggtgtaaatgtgattcatttcattaaaacaactggatatacaatatttgatgtctgcggtaactctaacttctcctcatttccctttaggggagtgagagtttttaggtacctgctgtctgatcagttgcaagtgccaagtctggtggaggaggaaggaatgcagccataacatcagcaaagctgcatgaagtctttc

SEQ ID NO: 262734 - DNA, 508 bp, Homo sapiens
cctgtccattcattgtatcttggaagtagataactcattttgattccacaagctgctcataggtaaractttggatttttgagtttgtgctggaacaagttaagacctttgggactattagaatggaataattgtattttgcattgtgagaagaacatgaaattctggggggcaggtgtgaaatgctatggtttcagtgtgtcccccagaattcatgtgttagaaatttggtccccagtgtggtggtgttgggagatgggggctttaagaggtgattgggttgttaagagggattaacactgctcttacaggactgggttaattcttatgaatgtgggagtcctccccttcatgggactggattaattaccacaaaagcgagttgctataaagtgaggctgtccttgcatttgcccttttggcaagcactcagctcacccccatgttatgatgaagcatgagaccctcaccagaagatgatcagatttggcaacctgagcctctggaa

SEQ ID NO: 262735 - DNA, 604 bp, Homo sapiens
gatggcttaagcattatcgtacaacaaacggatgaatccattcatttaaagaaaaagaacggtgtctttcattttgaattttsccatgtgtccctctccagttctattccctcattgccacacagagaccgtcattagcctgaattttgtgtttatcattcttttggtttatctcacctttgtatttctatgcagtatgttgttttccatgtttttgaactttatataaatgaatcacactctatgtactcatcagagactttcttcttttgctctcccacgatatttagttacacccatgtctgcatatagtggtgattcattcattgtccttatagtacccccacataaacatgttatttatttagtttatattagattgtttatttgcctttttctgtggtcctctttctctcttttggttccttattttgaatcaaatacttcaccctgattttcttcttctgctcatataaaaattaaatatctcttttattcttctactgtttatctcaaattttaaaatgtataattaagccaaagtctataatcaacactttaaccctccccatgaagaaccttagaacaccttagaacctttcct

SEQ ID NO: 262736 - DNA, 582 bp, Homo sapiens
caacacattctctgatgctccttcctctgagacgtagagtacaatttttctcctctcaaattaggtgtggccttagtaacttgcttgaacaatagaatggaacagccaagacttgacttctgaagctaagaaggcttgcagcttccacatgaatgtcttggaacactcactcttagacccctgagccaccatgtaggagatctgactaccctgcaggagagaccgggaggagatactctgagactacaaggggtggaggagtatagctaagcccagccttccagctgaccctgtcaagatgctagatgtgtgggtaacactggataaggccctcaattatagcccagccagcagctgaatgctactgacactactgagtaaccccagtcaatgccacctgaagcagaaaaatcacccagctgagccctgtcttaattccttattcacacaatcatgaamtaaaatacaatggtagttgttttaagctgctagggtttgggggtaatttgttacacatcagtaaataacctgaataccacacaaaacaaaacgcattggccacctgggtctaggtaaaaattg

SEQ ID NO: 262737 - DNA, 661 bp, Homo sapiens
gcctaagtacagcaggaacaagataaattgtttatagtctagtggcgaaatatgtatggggcagtacaccaggagttttagttcataaaaaggtgtaatgaatcaattcatctctttttttattattattatacttgaagttctggggtacatgtgcagaacatgaaggtttgttacatgggtatacatgtgccatggtggtttgctgcacccataaacctgtcatctacattaggtatttctcctaatcctatctctcccctagccccccacccactgacagaccctggtgtgtgatgtatccatgttcctggtgtgtgatgtgtccatgtgttcttgttgttcatctcccacttatgagtgagaacatgcagtgtttggttttctattcctgtgttagtttgctgagaatgatgttttccagctttatccatgtccctrcaaaggacatgaactcatccttttaccaacccaaattcccatcaatgatagactggacaaagaaaatgtggcacatatacgccatggaatactatgcaggaattcatctcttaaaggtcctatacttattagataaaaagactctaaatacacctagaaataatacagctattgtttcaaaaacagcacacaaaaaaagtgaaaaatagcaagaaaatgt

SEQ ID NO: 262738 - DNA, 563 bp, Homo sapiens
tacttctgtgtctatttcctaagacacagagtatacacttatctaaccacagtacaattaccgaagtcatgagatttaagatctacataacactattacttaactgcagatcttattcaaattgtatcggttgtcccaataatgtatattataacaaaaaatatttttttgtatgggtcaagatccagcccaggatcaccactgtatttagttaccatrtgtctttaatctattactattattttttttgagatggagtttcgctcttgttgcccaggctggagttcaatggtgcaatcttggctcacagcaacctctgcctcctgggttcaagcaattctcctgcctcagcctcccaagtatctgggactacaggcgtgtgccatcacacccggataattctgtatttttagtagagacggtggtttcaccatgttggtcagcctggtctcaaactcctgatctcaggtgatccacctgcctcagcctcccaaagtgttgagactacaggtgtgggccactgcgcccgacctctttagtcttttttaatgtggaccaatttc

SEQ ID NO: 262739 - DNA, 563 bp, Homo sapiens
tacttctgtgtctatttcctaagacacagagtatacacttatctaaccacagtacaattaccgaagtcatgagatttaagatctacataacactattacttaactgcagatcttattcaaattgtatcggttgtcccaataatgtatattataacaaaaaatatttttttgtatgggtcaagatccagcccaggatcaccactgtatttagttaccatgtgtctttaatctattactattattttttttgagatggagtttcgctcttgttgcccaggctggagttcaatggtgcaatcttggctcacagcaacctctgcctcctgggttcaagcaattctcctgcmtcagcctcccaagtatctgggactacaggcgtgtgccatcacacccggataattctgtatttttagtagagacggtggtttcaccatgttggtcagcctggtctcaaactcctgatctcaggtgatccacctgcctcagcctcccaaagtgttgagactacaggtgtgggccactgcgcccgacctctttagtcttttttaatgtggaccaatttc

SEQ ID NO: 262740 - DNA, 560 bp, Homo sapiens
attggtaggccgggggcggtggctcatgcctgtaatcccagcacttttggaggccgaggcaggtggatcacgaggtcaagagtttgagaccagcctggccaatatgctgaaaccctgtctctactaaaactacacacacamaaaaaaattagccgggtgtggtggtacatgcctgtagtcccagctactcgggaggctgaggcacaagaatcgcttgaacccaggaggtggagggtgcagtgagccgagatcgtgccactgctctccagcctgggcaacagagcgagactctgtctcaaaaaaaaaaaaaaaaaaaaaaaaaaggaattggtaaaaaataatagcaacttgtctgttaaaggcaggttgatttcactactgaaatatgaaacataataaaaaaagaagtggcgattttacttaaaaagctctgtttgctgttctcctcattgtgaaatttcctctactggaaaaaaagattaatattcagtgtctattttctataaggaaacatttttgtgtgataatcaacattttttccactttagtactatcatttt

SEQ ID NO: 262741 - DNA, 537 bp, Homo sapiens
atggattctcattctgtctcccaggctggagtgcagtggtgtgagcttggcccactgcaacctccacctcccaggttcaagcgattctcctgccccagcctcccgagtagctggaatcacaggcgcctgccaccacacccagctaatttcttgtatttttagtagagatggggtttcaccatgttggccaggttggtcttgaactcctgacctcaggtgatcagcccaccttggcctcccaatcaaagtgctgggattacaggcytgagccactgcggccggcccatgcaactattttaaaaatgaggtagatttgcatgtgctggtatgaaaagatcttcaatgtgtattaatatcattaaaaattaaaagcaagatgcagaacagaatggatccacttggtacaagtgaaaaaaggatgcatttgcacaggtataacttttatttatgatacacaagaaggtattaatagtgatcactttttttttttttttgagacagagtcttgctctgtcgctcaggctagagtgaagtggc

SEQ ID NO: 262742 - DNA, 581 bp, Homo sapiens
atgagaagttatgtgtctgctacccatgggaaaaggacatctccacgtttctaaaaaaatagcagttttcagctttctcctctggtaaggcagagtaggggagaactggagctttcaagtagggcagaytcaggtttgcatcctaacctcattccttatcagctgtgcaacctgaggcaagtgtctcaacctctcagttgcctcatttttcaaaagcgacataagaatagtctctgaatcattaagttaattaagagaattttttaaaattacataaacctactagcaaatgctagtagcaatggctcatgcctataatcccaacactttgggaggccaaagaaggagggtcgcctgaggccaggagttcaacaacagtctgggtaacatagtgaggccctgtctctacaaaaaaattttaaaagttagccaggtgtggtggcacatgcccgtagtaccagccactccggaggctgaggcaggaggatcagttgagcctggggggttgaggttgcagtgagtcattatcatgtccctgcactctgggtgatagagtgagacactgtctcaaacaaaacaag

SEQ ID NO: 262743 - DNA, 575 bp, Homo sapiens
cattagcagtgagcagcagctagagagcacctgccacctgctcatctgtatccatgggggttcaagtacatgacagtctctctcatgttcttcttgagggatagcctttttcttcatagattctaataaagtaattcagtgtgcttttatatgggtatatttatcttataagtgaaatgataactcaggaataatgtccaagccccattcttactagawcaaggtaacatgatcctagcatgttgaaaacatgtgtgtttagattttcttacaaaagggagcagagagaaaaggacttatgtggaaattaggagcaagaactaagtgatattttccaagcataaagtagattctcaaggcatcctctgtattgtttctgtcagtatctctgagctgtgaatattccttcaaagaccttcctcccagaataagaaatatgaaatgttaaatgagtttgaaagaacgtattttttgtgtcttctttttaagcactgaaggaccagtagccaaaatacataagtgcataaaaacttcattgcatttcaggaaataactgcttgcactgaggcgatgtt

SEQ ID NO: 262744 - DNA, 575 bp, Homo sapiens
cattagcagtgagcagcagctagagagcacctgccacctgctcatctgtatccatgggggttcaagtacatgacagtctctctcatgttcttcttgagggatagcctttttcttcatagattctaataaagtaattcagtgtgcttttatatgggtatatttatcttataagtgaaatgataactcaggaataatgtccaagccccattcttactagatcaaggtaacatgatcctagcatgttgaaaacatgtgtgtttagattttcttacaaaagggagcagagagaaaaggacttatgtggaaattaggagcaagaactaagtgatattttccaagcataaagtagattctcaaggcatcctctgtattgtttctgtcagtatctctgagctgtgaatrttccttcaaagaccttcctcccagaataagaaatatgaaatgttaaatgagtttgaaagaacgtattttttgtgtcttctttttaagcactgaaggaccagtagccaaaatacataagtgcataaaaacttcattgcatttcaggaaataactgcttgcactgaggcgatgtt

SEQ ID NO: 262745 - DNA, 534 bp, Homo sapiens
atagtgctcattacgtacaaatccagtcatggtacatattactttgggaaggaaagagagctatagccttaggctccccatttatggtaaaggagactgagagattatctggggcattttagaagctcttccactgaatacacttgtctttccatagacgcttctgtaggcagtttgctgtcttgcccagaagagtgatttggtgggagagtagtgttccaacgacactgttrcggtcattgtgtaactcgtgtggccccttctctcctctgtcctaagataggtattgtcaaatggctccttctccagtgcagctccgcttacaataaacaccttagatgctcctgctgtcaaattggttctccttccttagccttagagccccacagccaatttcccttttctgttttatcttcaataattttcctgaactgtctcatattctagccacactgaaacacacatcttccttgttttcttgtgcattccttttcagtgttccctgtttctggaatgttccttcttcatctctga

SEQ ID NO: 262746 - DNA, 595 bp, Homo sapiens
gatgccatgtagtgtaatggattagagtayatcatccgaagtcctgtgacctggactgtgaactgagatcagagaaaagatacttaacttctgtgactttccttttccttacctgtaaaagggaataacaatagttcctatctcaaaaggttgttgtgaaaattaaatgagatgcagtgcaaaaagtcttagcacagataaggcaccttactacatgcctatcatatagtaaggtctcaacaaatgttagctattattattattatttaaaaaatatttttagatttctggctagatgtttttgtgtttttttcttagaatgcaacatatgttcttttaaagcattttacatacagtaaaatttactatttttttgcatatagttctaatgagcttttggcaaatacatgcagtcacataatcaccaccacaatcaaaattcagaacagttccatcaccacaagaaagtactacttttttgcccttctagtcaaccccacatccactctcagacttggaaaccactgatctattttctattcttgtaatttcgcccttttgagaatgtcatttaaatggaaccatataatatgta

SEQ ID NO: 262747 - DNA, 509 bp, Homo sapiens
catatatatgttccgaagtgtagtataccataatggtgacttgcacacgtgagcactaaaagtttagagctgaatgaagttgatccttttttccagatttgctccaacagactttaaaattcttatcagagtataaataactgactagagcagtaatgatgtgcaatatttattttcttaaaacatgtacacactaccaaaagagaaaaacacactaccctttgtcacacatgctaatgaaaagcttagttgattttcactctccttcatttcctctaaaatctctctggcttaggactctgtcagctgaaaaacaaacatgtggctaccacatttggggacaatacagtgtttgcaakccctgcgggagataatctagccacacattgtgttccctgttcaataacaaaactattattcacaaaattggagaaaccatagttcctttccactcaaatctgagatgataatgatgatgacaataataataataagccacggctacatca

SEQ ID NO: 262748 - DNA, 607 bp, Homo sapiens
tcaaacaatgaattttttttttgaggcagagtttcactcttgtctcccaggctggagtacagtgatgaaatctcagcttactgcaacctccacctcccaggttcaagtggttctcctgcctcagcctccccagtagccaggattacaggtgcatgacaccacactcagctaatttttttatttttatttttagtagagacagtgtttcgctatgttggccaggatggtcttgaactccttacctcaaatgatcagcctgtctcagcctcccaaaktgctagctgggattacaggtgtgagccactgcgcccagcctgaaatttttttatataatggctcttgaagccgtgagtcttttaaacaggctcagttagttataattagtcctataactatattgcagtaaacatgggtttctctgacttttatatattttctaatatttcagctgttttatggatcacagttatctctttcaggaggcacagagaaaaaaacttaagccctgtgtcataaagtctgtgggaactgtgtctccaataggtcacataatggcactggactctttgaccctattctaggctgcttatgtgaagaagacaggctt

SEQ ID NO: 262749 - DNA, 607 bp, Homo sapiens
tcaaacaatgaattttttttttgaggcagagtttcactcttgtctcccaggctggagtacagtgatgaaatctcagcttactgcaacctccacctcccaggttcaagtggttctcctgcctcagcctccccagtagccaggattacaggtgcatgacaccacactcagctaatttttttatttttatttttagtagagacagtgtttcgctatgttggccaggatggtcttgaactccttacctcaaatgatcagcctgtctcagcctcccaaagtgctagctgggattacaggtgtgagccactgygcccagcctgaaatttttttatataatggctcttgaagccgtgagtcttttaaacaggctcagttagttataattagtcctataactatattgcagtaaacatgggtttctctgacttttatatattttctaatatttcagctgttttatggatcacagttatctctttcaggaggcacagagaaaaaaacttaagccctgtgtcataaagtctgtgggaactgtgtctccaataggtcacataatggcactggactctttgaccctattctaggctgcttatgtgaagaagacaggctt

SEQ ID NO: 262750 - DNA, 607 bp, Homo sapiens
tcaaacaatgaattttttttttgaggcagagtttcactcttgtctcccaggctggagtacagtgatgaaatctcagcttactgcaacctccacctcccaggttcaagtggttctcctgcctcagcctccccagtagccaggattacaggtgcatgacaccacactcagctaatttttttatttttatttttagtagagacagtgtttcgctatgttggccaggatggtcttgaactccttacctcaaatgatcagcctgtctcagcctcccaaagtgctagctgggattacaggtgtgagccactgcgcccagcctgaaatttttttatataatggctcttgaagccgtgagtcttttaaacaggctcagttagttataattagtcctataactatattgcagtaaacatgggtttctctgacttttatatattttctaatatttcagctgttttatggatcacagttatctctttcagraggcacagagaaaaaaacttaagccctgtgtcataaagtctgtgggaactgtgtctccaataggtcacataatggcactggactctttgaccctattctaggctgcttatgtgaagaagacaggctt

SEQ ID NO: 262751 - DNA, 620 bp, Homo sapiens
ctcctctacagccccaaatggctctgttgcaagctcggctcgttaacatgcaggcagtaaagtatgtcaggagctctgatttgtcatattaaggaggctatatgactgtggagaggaacattaaaagattttattctaagatattccctccaatccccacccactgcagacaaagtctcttgggacaagcctctgcttcagtgctcttgattgcacagatttctgataaatgttttcatcagtgccataggcctgggtgctgctcctgctccactggggccttctctttggggtctcaggattggcttttgaggtgtttctgggccttaagcagctcccatggtaaaacattcaccgtcattctttctctcttctcactcactcaattacagttaaagccctgttccagggaggagtggagggagactccatctccaccacggaacgcyttactcctggaactaatcacagcatttctctaccctcctcggaacaatctgataccattatcactgacatcatcaaaagaagttccctttatagattgcattgtacaaatagaattgcctagatgtgatggctttgcccattaggagtgtacaagcatatttacacaacgc

SEQ ID NO: 262752 - DNA, 469 bp, Homo sapiens
cattgggttcattctgtgtttcattggtatgatcacttagcttccatcttcataccacaactgagtgttgaagatgttatttggcatatagaggtcctaaccaattatacccaaaagatagctacataagtattccattattaaacaatagttattcttatggaaaaggccattattacaaaaccgtatggcttttgacatactcaccgaagcccagggaggaacttgcattatcataaaaactgtgtgttatgtctgtatcccagatgaatcagataatatcactacgttaatggataatatgaaaaccttaacaactwacctttcagatccaacacatctttaaacaactggctaagcagctagttttgatcttgaagacttggtggcaaaagctttacttattctaggaatcataatcatttgttgttgtcttgtttttgtctgcactattagactgccactgcgc

SEQ ID NO: 262753 - DNA, 565 bp, Homo sapiens
ccttaaaataaaacacataatattatttcacaaatcctggtaggataggctgagttgttcttctgctrttatcacctggggctccctcatataactgcattcagctatatcttgtttcagaattatatgtgatatatattttattctatttgtgagtagatcaatttatttggggaatataattttgaccacagaaattcctattgaatagaacatgaataatttgttttacatctcacaatattagaaataactagatacttccaaaatattcagttgctatttaaaagattaatacttttgtaacaattatggtgactcataaaaatttaaaagcaaaaaggatagcatagctttattcgctttttaaataaagttaacctgtcatagaatcagtagcagagctgcttcacagaagatagaaatatttgtatatatgaaagcattattcatttaataatagatgaaagggatataattttaaataaaatattatagtgcattcatacaaacatacagctctgtgtgtgtgtattttaaaacccttaatatgcaacattacatg

SEQ ID NO: 262754 - DNA, 514 bp, Homo sapiens
ccatgggaaaataaagatttatcagttaagacaaaccaatggaggggagaaatgaaaggtcatatgttgaacattcaaatgctacttatagtcaggcagagtatacttaagtaaagcaatatttaaactgtggatattcctaaatctctgccctgggccctccttctgttgaatttactttctctccctagttcacagtatccaggtcgagagcctccctcaccctgctcggtagacctgcagcttgcctgcaaggttttcactcaggtcaagacatctctcatctgcatcccaggctaaaagcccactgtctcctcacacttatgctcccttccagcgctccaggacagcagtractggaagcgcctctccagctcagagccaggatcccagtttcagagctagacacctctgagcagaggaccagaaagctcacagtactcctcagtaatccagtaatcatcaacattcttaactgtcctcgcttgctccaccaccatctgcctttggccag

SEQ ID NO: 262755 - DNA, 390 bp, Homo sapiens
caggtctagtctctataggactccctctggttcccaaatkcactcctttctgcccttctgcttaagcttctgtttgcttcctattgaccatcatttcatttttcatggaagaaacaccttaattaccagtggtgttagtcagctcaggatgccataaccaaatactatggaatggtgacttaaacaacaaaaatttcttttttcacagttctggaaactggaagtgcgagatcatggtgccactatggtgaggttctcttcctgacttgccaatggccgccatcttgctgtgtgttctcatgaccttactttggtgcatgtgcacagaaaaagagaaagagcaagtattctggtgtctcttatagagtattaatccattatgaggatgac

SEQ ID NO: 262756 - DNA, 555 bp, Homo sapiens
tcaaacctgccattacaggaaggtgtgtggggtgtgtgtgtgtgtatacaaatatatacatatatattttcccatctacatcctacctatctttccaaattcaactcaatgtccttgttttatgaaacctaaatccctccaactaaaggttttccttccttcctctgaatgtgtgtgtgtgtgtrtgtgtgtgtgtgtgtgtgtgtgtgtgtgtatgtaagagggggagagagagagagagagagagagagagaaagagaggcagatttggtttatgcctatttcctttataagaacctgagccccttaagaggaaaatcaatgcctaatgcattttatttttctcaatttctagtgcaatgccttgtaatgaaaaatggatttcatctcttgcatcagctgtcaccaatttgaggccacgtgtagattcagtgggaaaaaattctgtaatcaactaatgctgtctacaaaggtatggagtggggcagtgacagtacatatccccatagaaggtgataataaaagggtttcggatgaatgaatgaatgaacaaat

SEQ ID NO: 262757 - DNA, 606 bp, Homo sapiens
ccgttgggctatttcactgctatggtacttttctctgtccatatattcatagttttttttttttttttttttttttttctgagacaaattctcgctctgtcaatcaggctggagtgcagtggcgtgatcttgggctcaatgcaacctcyacctcctgagttcaagcaattctcctggcctcagcctcctgagtagctgggactacaggtgcgtgccaccacgcccagctaagtttttgtatttttagtagagatggggtttcactgtattagccaggatggtgtcaatctcctgacctcatgatctgcccacctcggccttccaaagtgctgggattacaagtgtgagccactgcccctggccatattcatagatctttaaaaggagaatgctcattgagttttggagccccccaaactggctttaaatactagcttaggtttttatttgttgcataatataaagaagacacaatctctctcagtctcagtaccatcatcaatgaaatggggataatcacctttcaagacagttataaaacttaagacaacatctgcaaagtatttggcacatagtaggtcttcaaaataattcttgtttatccca

SEQ ID NO: 262758 - DNA, 606 bp, Homo sapiens
ccgttgggctatttcactgctatggtacttttctctgtccatatattcatagttttttttttttttttttttttttttctgagacaaattctcgctctgtcaatcaggctggagtgcagtggcgtgatcttgggctcaatgcaacctccrcctcctgagttcaagcaattctcctggcctcagcctcctgagtagctgggactacaggtgcgtgccaccacgcccagctaagtttttgtatttttagtagagatggggtttcactgtattagccaggatggtgtcaatctcctgacctcatgatctgcccacctcggccttccaaagtgctgggattacaagtgtgagccactgcccctggccatattcatagatctttaaaaggagaatgctcattgagttttggagccccccaaactggctttaaatactagcttaggtttttatttgttgcataatataaagaagacacaatctctctcagtctcagtaccatcatcaatgaaatggggataatcacctttcaagacagttataaaacttaagacaacatctgcaaagtatttggcacatagtaggtcttcaaaataattcttgtttatccca

SEQ ID NO: 262759 - DNA, 606 bp, Homo sapiens
ccgttgggctatttcactgctatggtacttttctctgtccatatattcatagttttttttttttttttttttttttttctgagacaaattctcgctctgtcaatcaggctggagtgcagtggcgtgatcttgggctcaatgcaacctccacctcctgagttcaagcaattctcctggcctcagcctcctgagtagctgggactacaggtgcgtgccaccacgcccagctaagtttttgtatttttagtagagatggggtttcactgtattagccaggatggtgtcaatctcctgacctcatgatctgcccacctcggccttccaaagtgctgggattacaagtgtgagccactgcccctggccatattcatagatctttaaaaggagaatgctcattgagttttggagccccccaaactggctttaaatactagcttaggtttttatttgttgcataatataaagaagacacaatctctctcagtctcagtaccatcatcaatgaaatggggataatcacctttcaagayagttataaaacttaagacaacatctgcaaagtatttggcacatagtaggtcttcaaaataattcttgtttatccca

SEQ ID NO: 262760 - DNA, 624 bp, Homo sapiens
atgagtcttgctttaaacaagctccctgagtgaattttaagtgcactgaagtttgtgaacctctgggctaaactgttagctccacaaggaaagaggctgtgccttctttcctggcccctatattcctagcgtctggcccagtgtttggcatgaagtaggcattcagtatrtacttgctgaatgaatgaatgaataaataggtgaataaattaaaaggtaagaattaagctgcaactatgctactcagacctctaatagtaataatctcaatcagcatttcatttattcctttatttacacttaccacaaaggcaccaaaataagctgggtagctgatcagtaaatatcttctctatgcacaatctccccaaactctacccctgtaagcttggaaaagtgcttaaaggagatcccaggcattgggttgctgattcaatggctttactctttaacaatggcagaccagggaagcaagaaagattgaacacgaagaaggcaccaaactctcaccttggccagtagtagtagccatagtcctcttctatcttccccaccttccctaccatataaccacctctcctcatttttagtcccctgctgctaacatgtctagcatgaacaggt

SEQ ID NO: 262761 - DNA, 619 bp, Homo sapiens
gggattacaaatgcaaatgcttccttgagccaggcagggaaatgaatgaagtgagccaagttggggagaatggggaagacaaamggaactagagagactgtgccctgttaaaggtggccacagggactcaataggcagcagattattaccatgaggaattgtaggcctagagtggctagatcctcagattcttttctcaaggaaaagtagaaatatggaatatatatatatatacacacacatatatgggatatggaatatagtgacttagggaaaaaaggggtagggtaagagtagtgcctctgagcttgatctgactgacaggccacggagtgccagtggaatcctggagacaagagtccaaccacttctcatgcccagtatcaatttaggggccaagtccatttcctctacaagactgtttcctcatctattaaatgacaagattagatgtggtgatggctacagacccttctggttctgacactctgtaactccatttgacagcaggggctggggtaagggagagaaaggacagatgtcaggtctggggaggcccattctctcctctacctcctattacctgtgatagtggtattggcaagttccttcccttctt

SEQ ID NO: 262762 - DNA, 619 bp, Homo sapiens
gggattacaaatgcaaatgcttccttgagccaggcagggaaatgaatgaagtgagccaagttggggagaatggggaagacaaacggaactagagagactgtgccctgttaaaggtggccacagggactcaataggcagcagattattaccatgaggaattgtaggcctagagtggctagatcctcagattcttttctcaaggaaaagtagaaatatggaatatatatatatayacacacacatatatgggatatggaatatagtgacttagggaaaaaaggggtagggtaagagtagtgcctctgagcttgatctgactgacaggccacggagtgccagtggaatcctggagacaagagtccaaccacttctcatgcccagtatcaatttaggggccaagtccatttcctctacaagactgtttcctcatctattaaatgacaagattagatgtggtgatggctacagacccttctggttctgacactctgtaactccatttgacagcaggggctggggtaagggagagaaaggacagatgtcaggtctggggaggcccattctctcctctacctcctattacctgtgatagtggtattggcaagttccttcccttctt

SEQ ID NO: 262763 - DNA, 481 bp, Homo sapiens
gaacagggtaataaggctcagagaggggaagcatattgcccaagattacccagcagagggcctgaaatgagagggctcattttattgtgtgaattccagaaaactgctcttttcatacaaacatcacctccaagaaaagcaaaargttggggagtttgcaactgttctgcccaaagcctcaggatatccatttaccccaaggccaggcatcagttacgaataaccctcagagtttataaccattactaagtgcctctttgggattccaagtctgcaatcctgcacgtttcttctcatctggacttgaattgccctcaacttttagggtgttggtattcttccttatctgttcatcaaaaccaactctcagaagattttatgatgctcatcatgaatacttcgatgtgatgagaccaacttatactgtccaggggctggtactgttttaagtttcaactcaccttttgaccaagtatttgag

SEQ ID NO: 262764 - DNA, 586 bp, Homo sapiens
gtgtctctgtgtgtccctccccagacccaaccctggcgtcccccagaggtaacccctcccaggaactgggcgtttgccactcccctgcacgggtctacacctctgctacaaacgtgtgtccctaagcagcggacgccttttgaaaacaagtcaactgtatcatgctacgatattttttctgatgtttgtgctgtttctgagacrgccttatgacaccttcccctattctgtagcattctgttggctcactttgccacagtgtatgcacccattctcccacaaatggacttttcatttgcttctcaatgtttgctaccaaaaatctccctgcaataaatttattttatatatccccttgtatgtgtgtgagggtcccctaactgctcacaaatatctcagcaactccgccctccccactcagacctcatttccctcctaccagacatgctcaaaggaaactgggagcaacacaaagatgactttgaatctctgtccaccacccctagactgtatgacacccgcaagtgacaacctcccctctctggcctcggtttccccctctgtaaaatgggggatggcctacctt

SEQ ID NO: 262765 - DNA, 499 bp, Homo sapiens
ttgccaggcctgtagacaaaaccctggggcaaggcaggtccccaaagccatcgtggagacaggattggtctaggatgaagctttcgctgtccattcatgggaggagaaacccctggaaaatgaaggcaaggtaagcrgccagctgcctctgtttgaaaagggccatcctgcaatctgagctcagaattctttgagtacttcctttgtattaaaatatccctttttagcagcctggccaacatgatgaaaccccatctctactaaaaatacaaaaattagctgggcgtgatgcatacacctgtaatcccagctactgaggaggctgagtcatgagaattgcttgaatccgggaggcaaaggttgcagtgagctgtgatcatgccactgcactccagcctgggtgacagagtgagactctgtctcaaagaataaaataacataacacaaaataaaataaaataaaatgtcttttttaaaagtaaaaaaaaagttagaaagg

SEQ ID NO: 262766 - DNA, 585 bp, Homo sapiens
ctctagcctaggaggctagaaggcagtgatgtattcaaagtgctgaaagacaataaaccaaggatactatatgcaacaaaattgtcattccaaaattaagaagaaattaagactttcctggataaacaaaaagtgagacactatgtggttagcaactttcctttccagaaatactaaaaggagtctttcagggtgaaatgaaagaacattagagagtaacttgaatccacagaaaaaaatgtaaagygccagaaaaggtcacatgacagataaatataaaagatggcataaatttacttttattataactacttttagcctctctgattgaaaagacaactacataaagcaataataatagatttgtgctaaagagtatatactgtataaaaaaggaatttgtaccacaataacagcacaaagcaggggcagaaatgaaactatataggagcaaaattattgcacgctattgaaattaagttgttattaatctgagctagattattataggttaggatattaaatgtaatccccagggtaaccaataataaaattaatgaaaagaatataataaaagaaacaacc

SEQ ID NO: 262767 - DNA, 585 bp, Homo sapiens
ctctagcctaggaggctagaaggcagtgatgtattcaaagtgctgaaagacaataaaccaaggatactatatgcaacaaaattgtcattccaaaattaagaagaaattaagactttcctggataaacaaaaagtgagacactatgtggttagcaactttcctttccagaaatactaaaaggagtctttcagggtgaaatgaaagaacattagagagtaacttgaatccacagaaaaaaatgtaaagtgccagaaaaggtcacatgacagataaatataaaagatggcataaatktacttttattataactacttttagcctctctgattgaaaagacaactacataaagcaataataatagatttgtgctaaagagtatatactgtataaaaaaggaatttgtaccacaataacagcacaaagcaggggcagaaatgaaactatataggagcaaaattattgcacgctattgaaattaagttgttattaatctgagctagattattataggttaggatattaaatgtaatccccagggtaaccaataataaaattaatgaaaagaatataataaaagaaacaacc

SEQ ID NO: 262768 - DNA, 282 bp, Homo sapiens
gctctgctccaataggacccatggctcccggggcagcgctcacctgaccagcggagcgggggtggccgccccgggctgcgcactctgctctgcgcagcgggcagccaggtccgcgctctggcgtcgggaacaccctgccttggccatccctaatggactcttccagcagccaggcgcctaggctgacctgcctcggcttaggagcgcgcgagtcytgcctctgcctgcgcgtcccaatgtaagtgcgcggtcagtgctttctaatcgtctcctttggctaaa

SEQ ID NO: 262769 - DNA, 484 bp, Homo sapiens
taacagttagcatggttgtcaaagtgcaacgtctctaatatcaacactgagagacatcagactcattaaaatgctttacattcattaattaggttggtgcaaaagtagttgcggcttttgccaaagtcatacataaattcaaacacattatgatactcatttaacacattggtgataaaaatcatgtatgaagtcatgagtttatttaayaagctaatattccatagagtccaatggtgactaccaatgactcagttaattttcaaaccaaaataagttagattacaatttgttgactcccttgactcctcgagccagggaaaacatttcctggggcctgactctaggtggctcacttccctcacctaaaaacaggaagggtgagacaaccccctccaaccctcgtcctcggtcccccaaggatttctctccagaattctgcctcttctgcagcagtctggagtcttcagcatgaaaagggtaa

SEQ ID NO: 262770 - DNA, 589 bp, Homo sapiens
acaaggctaaaaaacatcaaggtacagatccgagaggagagtttgtgattcagtagttttataagacattagctttcttttaatgaacctagaaaattytcttagggaaatttaacataccatctgaataattaaaaataggtcatatttccaatgaggtgtaaagatgtttcaggcattcaacagtgatgtgaagaagatttcaaggaggaaatatggtaaacaacaaagggaattttcatagttatttccgaagtgagtggcatttgggatgaaatgctttgagacactatggaaaagtttgatccatacagtaagagaacaaatattgtaaggttttaacaggagtgatacagaatggaaaagtttgatccatatagtaagagaatacaattattgtagagttttaacaggagtgatacagaatagcagaggggcctgctgatgaattgaaggggatccaataaagagattactggaataataaagatgatcaggacttagactaaaatatttgtgataaggatagagaagaagtgttaatgtattgggggaaatcacaggatatatcagctgaatgcttatgtga

SEQ ID NO: 262771 - DNA, 582 bp, Homo sapiens
tgtgatctaccacaaatgtgacatatttaatttttaaatgtttagacttaaaatgtatctgaaagaatagacagaatattcaggaaaattgtgaaaaaagaataggaaggaagacataccctaccaacattaacaaataatcagaagcttctactacttgcaacagcttagtgttggttcaaaatagatcaatggaacagagaacagaagtagaaatgagaatctaatagctgataccagaagaatttcaaaatcaacgaggaaagcaaattaagaaatgaggttagcagctggctagccacttggaaacagataaaaaatgtatccacacttctctgtttatactaatacaaatttcaaaagaataccaaatttaatgcaaaataattatagtaaagatttcatagttggaagtttccrgagaagcaaaatttgagaatgtggtataagaggctgaaatggaatgaagacaaaggtcaccagaatggagaagaaactctccacctagggttacggtctgaggtgtctacaaagtcccgaagaggctgtggtctgcaaagttaccctactaaaaatacctga

SEQ ID NO: 262772 - DNA, 380 bp, Homo sapiens
tcacctcagctaaaatgtgattattcctaaacagaaattggaatactaatgcatgaatctgcaaacactccatctctattataaggtatttgctttgtagattacatayagagagaaagcagattttatatctggagtaactacaacttagctattcctttactggttcttaaacgcttatctttaaaaatccttgtaattaaattcaaatttgaatttaaggaaatcaaagacaacagagagactacattagataggctcaatttctaatcaaaattcaaactccacctttcctgtctgcttaacccactcaggcagaacaaataagaccaaggtaacagacataagatgatttatcttgatactgactcatatgttgt

SEQ ID NO: 262773 - DNA, 512 bp, Homo sapiens
tggttctgtaaggttattttcatacttctttttagaggacctcaactgaagtaatcctggctttttagcccctttcgagtaggagctaggtatttctcactgttatatccttagatgctcatggtggcttgtacacaggaaaagcccaataaatatgcactgaacgttgttattgggggctttttttgctyctaaacagtaaagtaataagcaaatccaagccttagatttatttcactctgcgaagttgtcacaacagcagattttcttcactaatcatgtggaccacaatcaaatggatgtcatcacaataaaaagttcaaaatccaatttccttttgcctgtgctatccacttcccccatatcctattaaattcaacagttataaaaaccagtgaaggaattacaattcagaatgcaaatgaatatacacctaagattaagtgaccttaagcaattaataacaggatgcttaaaaagaaagataatatgaaaatatacattgcttttac

SEQ ID NO: 262774 - DNA, 508 bp, Homo sapiens
tctgtaaggttattttcatacttctttttagaggacctcaactgaagtaatcctggctttttagcccctttcgagtaggagctaggtatttctcactgttatatccttagatgctcatggtggcttgtacacaggaaaagcccaataaatatgcactgaacgttgttattgggggctttttttgcttctaaacagtaaagtaataagcaaatccaagccttagatttatttcactctgcraagttgtcacaacagcagattttcttcactaatcatgtggaccacaatcaaatggatgtcatcacaataaaaagttcaaaatccaatttccttttgcctgtgctatccacttcccccatatcctattaaattcaacagttataaaaaccagtgaaggaattacaattcagaatgcaaatgaatatacacctaagattaagtgaccttaagcaattaataacaggatgcttaaaaagaaagataatatgaaaatatacattgcttttac

SEQ ID NO: 262775 - DNA, 589 bp, Homo sapiens
ggagggaaatggagtgtttgaatttcaaagggtccagagagcaaacataggtgtttcctttcattgagattggccacgtttcacaaataacatcactggaccaaattcctctcttaaaatttatcaaaaatcattcttgctgttggattgaatgtgggaggatctgcttgtcttaccttccttctcttgctatactgattttggtgggctactctcaacatctctcatatcartcaggctgcagggacaggattgagatgtaaaaatctgcttctatgctcaaaccatgtccagtacttccctggtccacaactcatccacatgtttatgtgtgcccatctgttttctcacaagatagagaacccctttgtaggcaaagattatattcctcacagtatctagcagcaagcttcaatttcagtgaacatttaataaatgtcggtagagggaattacttctaaaaaataaatatgaaaggtaaataaacaatacaaatggcaggtaatatggtaccattttatttgtatacttcatttttaattaaaaatcatttacacttacacttacatgctctcaaaggtacacagat

SEQ ID NO: 262776 - DNA, 589 bp, Homo sapiens
ggagggaaatggagtgtttgaatttcaaagggtccagagagcaaacataggtgtttcctttcattgagattggccacgtttcacaaataacatcactggaccaaattcctctcttaaaatttatcaaaaatcattcttgctgttggattgaatgtgggaggatctgcttgtcttaccttccttctcttgctatactgattttggtgggctactctcaacatctctcatatcagtcaggctgcagggacaggattgagatgtaaaaatctgcttctatgctcaaaccatgtccagtacttccctggtccacaactcatccacatgtttatgtgtgcccatctgttttctcacaagatagagaacccctttgtaggcaaagattatrttcctcacagtatctagcagcaagcttcaatttcagtgaacatttaataaatgtcggtagagggaattacttctaaaaaataaatatgaaaggtaaataaacaatacaaatggcaggtaatatggtaccattttatttgtatacttcatttttaattaaaaatcatttacacttacacttacatgctctcaaaggtacacagat

SEQ ID NO: 262777 - DNA, 493 bp, Homo sapiens
ctgctgtaggacaacagaagagttcattgtagtttgcttaagatgtattcttttaaaatggaagagtatttggatttttcatgtggtaaaaacaatatggattgatgaaacattygtctgtaaagtcaaaagcctgaaattcaaaaacctgtagctgtacacctgttcttgctttctgacaaaacatatatctacataggaaagagctaagaagggtataatgccaaggttaaaatgctaaaagagggactgagttgcttgaagaaacatgagtcaaatacaaaatgtaaacatccatacagtgcttgtagaagacagattcctatgcttttaagttatttatatgttttaagattttttggcaaatgcacatcaggctacgtgccctaaggcattgcctttgatgtttggttataaagcaatattactgccatgtcaggcactgatttttatttgagagataaatcatagtaccaaacccaattaccagcta

SEQ ID NO: 262778 - DNA, 511 bp, Homo sapiens
tgtactatatatttcaaaatagctagaagagagaacttgaattgttaccaacacatagaaatgataaacactcaaagtaatggacaactcaaaactatgacttcattattattcattctatgcttgtaacaaatacaagtacmccataaatatgtaaaatactatgtatcaataaatgaaaacaactaaagacaaaaataataacttatttaaaaatgagtctaaagaagtgtctgacacaagttctggggagctaacgtacaacacgagtgatgatgatggatgtgttactaaactggattatcataatgattacaaaatacatgtatatatggaattatcgtgtggtatatcttgaatagatacaatttttacttctcaattaaatattttaaaatataaacaaaaagcaaacaaaaaagagatgactgacaaatgcattctttgcatttgaagatctacttaattgtaagaattacttatgatgtatacatcataaacaatgtacaga

SEQ ID NO: 262779 - DNA, 551 bp, Homo sapiens
ccacatgttctcactcatatatggcatctaaaatactttatctcatcaacatactatagtaatagaataatagatactagaggttgggaaggtgtgaggctaggagaaagaaatgaagagaggttgggaaatgagtacatacagttatatagaagaaataaatactaaagttcaatagcagtgactatagttagcaacaatgtactatatatttcaaaatagctagaagagagaacttgaattgttaccaacacatagaaatgataaacactcaaagtaatggacaactcaaaactatgacttcattattattcattctatgcttgtaacaaatacaagtacaccataaatatgtaaaatactatgtatcaataaatgaaaacaactaaagacaaaaataataacttatttaaaaatgagtctaaagaagtgtctgacacaagttctggggagctaacgtacaacacgagtgatgatgatggatgtgttactaaactggattatsataatgattacaaaatacatgtatatatggaattatcgtgtggtat

SEQ ID NO: 262780 - DNA, 584 bp, Homo sapiens
caattattttcaatgctaacatcttcaaacatgaaaccagcatctgggcaattatgacattagtctgatttagcattaaaaggtaaaagtttatgtataaatttcaaaattttaakcattattttatcaagaattttgtgtcccaaccacagatcatttttgttgctgtggttaaatttgtttctaatagtcttgtgtttcatgtatgtacacaacaatccttaaatgaataagcaaataccaattaaacattcatatatgcataaacttggattttgcctgtatatttctcttttctatcatattcacgttaatgtagagccaaggctcattatctgtgtcaacagattagaaagtaaattgagtaaaataaatcaattgattatgtttacttcacacaccttgcaatcatttgaaaagttagttttaactcccatttctcaaaagcatgactaattaataacatgaattattaactgaaacatgatttttataggtttttacttctctctagtactttattgttaaggtagaatactaaaaaaacatcatttcaatgagtaataaaagcagccttgtagaca

SEQ ID NO: 262781 - DNA, 560 bp, Homo sapiens
atgcttagtgtaaatgaaaaaaatgcatttggctactcagattgcattgaaatttgaagctgaagagatttgttcttttcaagaaacaactgggtatcaaggttcccattagtcttattagacttttcctctgcactgtatactgtggacccatttactaactgacatggggtaaaatgacaaattatctcattattaatgaaaaaacccataaaattatttccatatttaaatcacttgcaagattacagttcaaatgacacaatagcactgcacaatttaaactcaaacctttctgtaaagctgaaaagcagattaaatttgaataattaattttaatgttttcatttatatgtagtgcattaaaattttacttactctgagccattaacsatggactgtaactcaatttctaggatttagagattatttcagcacagattagctttggtatttataccaggcaaaccttatcagaggcaatgcaaaatttgtaagtatacttcattcttaattggcctgatgcagcatgctatgactaagcagaccattcatagaaa

SEQ ID NO: 262782 - DNA, 405 bp, Homo sapiens
atggtcatttttaaacttgagaaagtaacagcagattatttagtacctgtggctgctaatgaaagtgtggtgctgctcagagctctcttggagaaaaccagctgccaggagtgtggttagctgacaacattcagctactgaaccacaggatctgctgtggcagcatttattttaaggccaggctccccagccaaaaactaaataccaaaggggcatagagytagctgggccagtcgtgcctgacctgagacttctctaataaacattctgtactctgaggtgccccaatggtgtggctgagatttttcttaaaaccatagcagtttgagactttttctatgccatgttctctccttccttttctcccttcaaagtgacaggctatgtcacggtctgtaggctcat

SEQ ID NO: 262783 - DNA, 545 bp, Homo sapiens
acatacaaacacatatatgtatgtatatgtgtgtaaaatatacagtcacacacatgtatatattcatgtaaacacggagtcttaaatatatatatatacatagatatactagtatatataatattgctttgtacaatctcaaacttgaataagattcatgatatggtttggctgtgtccccacccaaatttcatcttgaattcccacgtgttgtgggagggacctggtgggaggtaattgaatcatgggggcaagtctttcccrtgttgttctcatgacagtgaataaatctcacaagaagaggagttccagctggatgtggtggctcatgcctgtaatcccagcactttgggaggctgaggcaggtggatcacgaggtcaggagatcgagaccatcctggctaacatggtgaaaccccatctctactaaaaatacaaaaaattagccaggtgtggtggcaggtgcctgtagtcccagctactctggaggctgaagcaagagaatggcatgaacctgggaggtggagtttgcagtgagccaattg

SEQ ID NO: 262784 - DNA, 572 bp, Homo sapiens
gccgtattttcaagtcttctggctgtcagcccaacaggtatacccatcaaggaatttccaagttgtccttcagactctctgctttacataatttgcttctctgatccactattccagtgtaggatgcttctctggagatgacaactcctaactcctatgctttctytactacttccatgttgcatggctctgcctcttgctagtttggtcattaatttcaacttgattatttcctgatcaagaaaataactttacacatgagaaatcaaatcacttgaccactgaggattagtaatttattttcttcatctttgccatacttaaattttttttctaacgtaacttcaaaattgttctagacaatctacaagacacatagaattcaaagatattaaaatactaggccaggcatagtggctcatgcctgtaatcccagcattttgggaggccaaggcaggcagattgcttgagctcaggagttcaagaccagcatgacaaaaccccgtctctacctaaaagaacaataaaattagctgggtgtggtggcacacgcctgtagtcccagctacttg

SEQ ID NO: 262785 - DNA, 570 bp, Homo sapiens
aaatcatcaactaaaaagagttaaacaactccctttcctacaggactcttaagagtctttactatgttaatatgcatgtgagaaattaagaacataaaagaggatatagaatttacaaaatgtatttcagcccagaaccattttttttttggaattactgcttaccttatgggagtagtgattttcaggatacatcttggaaaatgctgatacaatttgttattcggagagaaagagaatgtaatttgttttaaaggactgcatttttaggacgaaattttcctaattagatcagttcaaaatcaaagcaggaaaagaaggtcatttgaaaactgggtctgtcgtcagaagaacccaaatctcgtagtggaactatctgaagaaagggtcatctggataatggaaattttgtgttgggctagtagttttggattcacaaaaaggactaggaaccaagagctctgcgggyggtagaaagcctaaggtggatgtcagctatggcagcaagctagacccatgtgtactaagaagccagaagtcgaagtggcagcagttggcaccataagagcc

SEQ ID NO: 262786 - DNA, 563 bp, Homo sapiens
gtttcaataccacttctaagcagaagcattcaacatcctacacttctgtttcttgcttttggaattttgaattaatgacaattatggcatcagtaatcatacatgcaggcagacataatactgaatatgtctttcagttccttgcacctgacattgtgttttgttataacaggtgccccaaatatacttattttaattcaaaaagtataaagtcatttaaaataacctccaaaccataaaggttccatgcattttttaatgtaccactagagcttgtctttctgagattgtaccctgtatctggggttaatctatttccttctctttggcaccagaaactattactttgggcctttttcatgattttctatatgcaagcacttacttattaaatattaagtaagtatttaataatcacttactatatcttacttccttgycttatggaagtttttgttttctaagctgtttttagagagatgtaagatactaaaccaaataaatgactcaaaattagaagggatggaaaggtaggggcaatattttgagtattaagtagatgt

SEQ ID NO: 262787 - DNA, 640 bp, Homo sapiens
agggaaaatatagagtatatctcatcagttaaaaatagtaattttgccaaacagatgttggcagttaggaaatcttttaaaaactcacatattctatgttttataaagttttatttctacttcctctaaatagcataatataatmtgatctaacgttttctaacgttgaagaataaattattataaattgagagaacatcattcttttattttttgatttcattactctgacctaaatttagaaaacaaattatttttaatgatcaaaagctacctcattctcatcactgactagattcattcataaaagaattgcatctgtaacacaagttttacagttaattttatgaagagtgaatagaacaatatatatgtttctggcattcacaaattccctcaaggtcattacaacttatttttccagctgtatctctgattattattacacgtgcattttgcttttaaataacaactaaaagtatttaattcatcaattttttttgcctgtctacagagtccaaacactatgctagatgcatggaaatctataaagacaggagagatctttgcacttgtcacatgtattctagaaaagaaaagacgcataaacaacaaattgaaacacaagaacattataaat

SEQ ID NO: 262788 - DNA, 648 bp, Homo sapiens
ctttgtgttctgtattttatgagaaacagtaataaaaatagtttgtatatctgacatttttacaagggtaaatattacaaatttcataagctataaatatactagtattttagagcttcttttctaaaataagttaatcttggagaagataattttacattaacaatattacatctaaagtttctaaactcatggtgtgattataataatacatttataaaaatgtgcaagaagctaaatcaaacatttattcttttaacatttgaggaaaaaaaaaacaaaaacaaacaaacaaaaaacagaagtgggataggagaaggcagaagttttacaaggtttaactggtagacttcctggcaaacatcctacaaatactgcccaagcccatctagccttgcstataaaagtggtttgcagtgattatggagtaaagtatgggtcactaggatttacaggaagtatggttcctctgctctctggattggtgaggcactccccgtataaatataaatgcaccacatgtggtaccaatggatcatgcttagccaattaaaatgtgaatctataacagccgaacatagtaaactgagtcgccagggcattcttagtatcacacagtgcagaataattgccatgtgaaaacaaata

SEQ ID NO: 262789 - DNA, 550 bp, Homo sapiens
tggaaacagacaggggaacatcacacactggggactgttgartggggcagctaggggagggatcgcattaggagaaatacctaatgcagatgatggattgatgggtgtagcaaaccaccatggcatgtgtatacatatgtaataaacctgcatgttttgcacatgtatcccagaacttaaagtataataaattaaaaaacatctgataatatttcttagcgatacctatatttctttgagaaattgtgtttgtttttcaataaatacaccaattttgatttcagtctgaaaaattcagctcaatttactctgatagtttggaaatagtcctgttatgctattccatttaaattgttaaatatattattactattagaaaattatagaacatgagaacttaaggccctttttctttcgccaaaaaaaattagtggaaaccaagtcatctcacttttagcttgaattgaaaacaaacctacaacaccaatagttttatttttaatttgtgtaatccttttagaattattaatattcaatctgagttcagtac

SEQ ID NO: 262790 - DNA, 624 bp, Homo sapiens
atgctactttaaacctacatgtattctagatagggtgatttaggctagttgtctttctgcctcttcgactaactattgtaaatacattgtactgcctaaaggtatagatagtttttttttttttaatttttatagattttcatactagtggcttaaaaggctatcttttgcttgtgttgcttataagtgatcctggatcatcttaaatatatgacagtaccaaggcaataaattattttyacatatatgaaatttcaggtgttactagcactgcaaatatgcagataatcattagaaagagataatgaacccattgagacaaacatatatcaaagcataattagcctggaataacctccccaaatgaaagttactataaataacatcccttatttctgtttatgtgtagcacaaatgagttcttgcaagcaggttctatcttgagtagtacatatggggaattggaggagattcataattatagctatgtgagaaggaaagggactgataacaggatcttaccttccatttcctatcttgcaatgggaaagttcaatataaggaattctaaactagaacaaagaagtagagtaacaagggattggctaggaggaaataaagata

SEQ ID NO: 262791 - DNA, 606 bp, Homo sapiens
ccaagtcaatgtggggaacccccacattaaaaagggtaaattctgattctttttatcctttccccagggcagaactatgacctcaatgagaaatacaattatagcttcattgcaggagatttacagatattacccacatattctcactataaacatgtagcctctctttcagaaaagggcatggtgaccatggcatactttcctgaagaacaatggttttgacctaatgatcttcaatgagaagaaaaaatgatatggaaatgtcagaggtctcaagccatttggaaattttcaggaaagtgttctcataacaagaagtggcgtggtataattagaaaagagttgtcctaaagtgagatctgaattcttgtctggttaccccattttgtkctgtgtaacctttgtaagttacaacacttgcaggctctgcttccttaccaccaatgcatgcctacaatctctaagcccgcttacaaggccaacacactatggtttttctaatcatagctgtctttaatattttgaatcctgatgtaacttactggaggggagaacaaaatgaagtttgagtctctcaatgtttttcagtgagtttttaaaaactga

SEQ ID NO: 262792 - DNA, 624 bp, Homo sapiens
atgctactttaaacctacatgtattctagatagggtgatttaggctagttgtctttctgcctcttcgactaactattgtaaatacattgtactgcctaaaggtatagatagtttttttttttttaatttttatagattttcatactagtggcttaaaaggctatcttttgcttgtgttgcttataagtgatcctggatcatcttaaatatatgacagtaccaaggcaataaattatttttacatatatgaaatttcaggtgttactagcactgcaaatatgcagataatcattagaaagagataatgaacccattgagacaaacatatatcaaagcataattagcctggaataacctccccaaatgaaagttactataaataacatcccttatttctgtttatgtgtagcacaaatgagttcttgcaagcaggttctrtcttgagtagtacatatggggaattggaggagattcataattatagctatgtgagaaggaaagggactgataacaggatcttaccttccatttcctatcttgcaatgggaaagttcaatataaggaattctaaactagaacaaagaagtagagtaacaagggattggctaggaggaaataaagata

SEQ ID NO: 262793 - DNA, 491 bp, Homo sapiens
ggttcccaaacctcaattcttgacttgtgtgcactcacaggtacaacaccacatggaagctgccaaggcttggggcttgcaccctctgaagccatggcctgagctctatgttggcccctttcagtcacagctggagtggctgagacacagggtaccaagtcagtggactgcacacagcataggcaccctgggcctggcccaggaaactattttttcctcctgggcctccagacctatgaatggaaggggctgccgtgaagacatctgacatgscctggagacatcttccagattaacattcagctcctcattacttatgcatatttctgaagctggtcagaatttctcttcaggaaatgagattttcttttcgattgcattgtcaggctgcaaattttccaaacttttatgctctgcttcccttataaaactgaatgcctttaacagcacccaagtcacctcttgaatgctttgctgcttagaaatttctt

SEQ ID NO: 262794 - DNA, 594 bp, Homo sapiens
tcatatgtaaagccagaaaaaaaatccttggtttacctgtttggattgtttggaaactaacacttcaacaaataatcctttgaaatcagaattctatcattttcattacctcatttccccaaatggaaaactgtctttttaacattcttactttattagataaagtaygtgatggacataaagattttatccctccttaggtacatataaatcttgtatttctgttgcatttcacctaccttaagaaaaaaaaaagaaagaaaagtaaagtaagaaaagattgcagaagctttgtagcattgagaaaatgcattatagcatttcagaatattttgtttgcttgactgagagccagaaatgattaaacactaaaatacaaataaaatgtttctcaatccaaatagattggaaaagattttctgtgttccaatacagtataattaacaaatgcaataatgatttttgccaaggatttattacatgaatttcatcaaaatgttgatttagatcatttgacccattaaacccaattttaattttatataaaaattttggaagtttgtatatcttgctaatttgatatgaatattagag

SEQ ID NO: 262795 - DNA, 585 bp, Homo sapiens
tcttttcagcatcaatggaagtgatcatgatggttttttacttttgccctgatcatgaagaattgttctataattagatttgctaatattcaacttcccttgctccttgaaataawccaaatctgatcacagtcatggtttattgttattttaatgggctgctggattctaatattttacatgggatttttataatgagattcctagatgcaaattgtcttttagttttttgtttcaatatcagtttggtacttgctttgctaaaaagatgtgtattctttttcttttttgtccttgcatctgttgcttaaatagcttatttattcctttaaagtttgttagtattcccttgtgaaaccatctaggcctcttgttttattgtagaatatctttttgataatttaatttttttctatgataattggttctaattcttagtctcatgggaactattttggtaaattatgtttttttttaggaaaagaactttttcagtgtagactaatattaaaacttgtacttctcaaagcatatacattttcagcttgagattaatcctataagaaaatctaggaataaaatata

SEQ ID NO: 262796 - DNA, 562 bp, Homo sapiens
aaccctcctcttagatttgtatttcctaccttttttctttttttaaaaaaatctgctttgttttttcatttttctctgaaatttcttaatttgtatttcctacctttttttctttttctttttaaaatctgctttgttttttcatttttctctgaaatttcttcatttttctttcatctctccatcttccaattttctacttcttgttttttggggwacctttatttttaagatgtgtttctttttctataaacatctgaattgggtaattactgtacctgcttgcaaatattcctcaactcagaaatctaaaaaaaaaaaatacaaaatcataactatcacaattaacagctcctcatcttccctgtgctctacctaggtaccctgagtgttagatacagtatctcacttaattcttcaccaccatcctatttaattaatttgcctgaagtcctacagctggaaagtggcagagctgagtttcctagtggtcttactcccagtgccagtgctcttagagtaaaatcttgggcaattatacagtttgtctcattggctcaca

SEQ ID NO: 262797 - DNA, 572 bp, Homo sapiens
atgggtaccatgggacagtacacagttctcaggcaagcaaaatgaaagtttgcaccaagtcctgtgtttttccaagactgtaaaattctttaataatgtggattccagtgtataaataaaagtctgaggtaggtttctgccacctgaaaagtgtctctctcagggagtaactctgctccaaatccttagcagtgcaagtagttatttgtgtgcagcatcacccaccagatgaataataattacttcaacactagccttacccagttcttggatttcagtttgactctacccaaaatgtatctcatagcattccagcagcttagcaactaaatatttatctagaatcagaaagcacaaaaagttcaatttctcttaraagtcatacttgtgagcagtattttaagataaaacttttgtaagttaagtatcttgttcttctttgctcccctgaccacccaactaatttgtacacatatgtatctatttcccatcccctggctttaggtcaggagttctcttaaatcatgttcttttagtaggctataaaaatactggaggggagatttatccag

SEQ ID NO: 262798 - DNA, 625 bp, Homo sapiens
acccaactaatttgtacacatatgtatctatttcccatcccctggctttaggtcaggagttctcttaaatcatgttcttttagtaggctataaaaatactggaggggagatttatccaggctctattctttgaggacctgatgctgagtttcaggcaagagtgccttgtcaccgtctagaatccgagacggatacagcagctggagtgtgacttatagctaggattcgggaagatgtgcagagttcagggaaaacctgcatgccatgtggtgtcgttgaaaactgtaaatataattaagccaggtggattccatgacaacaaagaggattagggcctgggtggatctggtagaccattgagacctatgtgaatagatgtcaatttatttatatcccctctccccaggggaaaaaaacaacaacaacatagtttgatgtctaaatgaagtaatctctggaaagaaaagggagattatatttgttaaactgtataaaaaaatcagaagataatatggctttgttcacastattacataaagaagattaaagacgaggaacaagctgcttaaacactgtaaactaattagttctacgaattgttttcccgaggttcatgagatatgaa

SEQ ID NO: 262799 - DNA, 556 bp, Homo sapiens
tatctgttttccctggcttctgtgtatccccagccctgctcatgcagagctctgtgaagcagtctttaaggctttatttgctttttatacacttaagaaaggaagccaggtattcacgtaattggtgtattggatacctcccctctccactagaatgctcctgaggacagtgcctgtgtctttagtcttgatccatatagtgcctaggccagcgctttacgtatagcctggcgcattaacatttttaggaacttgaactctacccttttttacactctaccagatattatagttgatgctatttcttgtgccagttaataaacaatttcttagaagcagagagcatctttgatacatctttgtacccccttcacagggcaagaagttgtaggtagatacaaaatacagttgaatttaattttaaataaaagtaatgactgttgagtggataaaartgtatactgttttagcaatacattgatttatggaaaaattgaatgtgagtattagtatatatttcattaagcattcatattaaaatagtaatctgttggct

SEQ ID NO: 262800 - DNA, 630 bp, Homo sapiens
atccttgtaccccacagtccaaggtgatacawagcacatagttaaagctcagggaaggtgtttgaatgactgattaaaggcatatcagatgaaactgttcaaataattataacaactgtaaaaactgtaaagaggtcagagaaaacaaatatatcaaaagtagtatcttactctcattgagcattacatttagctctgactggtagccaagcccaacaataaatatgatatgatcaacgtatagtagaaaatagtgtggtttagagggaacagcatgggatttggaagaggagataaggggacttgaatcttggtgccactatagaaaccttgaacacgttctaaaatctctctttgtctgttactacatctgcaaaatgaaaataacaacacccacttcttagagttgttttaaggagcaaacgaattaacatatgtgaagtgaacatagttgctgctcctatgtgaagcaattcagaggatcactatgtttttgttgttgctgttttgttttaaattagtagaacaattgtgtgtttatagaaattgagcagatagtacagagcattcccatattctctctcctgctcacacttttccttattattagctatttttttaaactaggta

SEQ ID NO: 262801 - DNA, 590 bp, Homo sapiens
aactcctgctcaaactttgactcgggtaagccttttcttatctccaaggctatatttgggatcccacctttacatctcaaaatgtaattacaagtttatgggtctgtccccctgaccaggccgaaatctttgaggaaaggaattattttctattcatccttgtaccccacagtccaaggtgatacatagcacatagttaaagctcagggaaggtgtttgaatgactgattaaaggcatatcagatgaaactgttcaaataattataacaactgtaaaaactgtaaagaggtcagagaaaacaaatatatcaaaagtagtatcttactctcattgagcattacatttagctctgactggtagccaagcccarcaataaatatgatatgatcaacgtatagtagaaaatagtgtggtttagagggaacagcatgggatttggaagaggagataaggggacttgaatcttggtgccactatagaaaccttgaacacgttctaaaatctctctttgtctgttactacatctgcaaaatgaaaataacaacacccacttcttagagttgttttaaggagcaaacgaattaacata

SEQ ID NO: 262802 - DNA, 630 bp, Homo sapiens
atccttgtaccccacagtccaaggtgatacatagcacatagttaaagctcagggaaggtgtttgaatgactgattaaaggcatatcagatgaaactgttcaaataattataacaactgtaaaaactgtaaagaggtcagagaaaacaaatatatcaaaagtagtatcttactctcattgagcattacatttagctctgactggtagccaagcccaacaataaatatgatatgatcaacgtatagtagaaaatagtgtggtttagagggaacagcatgggatttggaagaggagataaggggacttgaatcttggtgccactatagaaaccttgaacacgttctaaaatctctctttgtctgttactacatctgcaaaatgaaaataacaacacccacttcttagagttgttttaaggagcaaaygaattaacatatgtgaagtgaacatagttgctgctcctatgtgaagcaattcagaggatcactatgtttttgttgttgctgttttgttttaaattagtagaacaattgtgtgtttatagaaattgagcagatagtacagagcattcccatattctctctcctgctcacacttttccttattattagctatttttttaaactaggta

SEQ ID NO: 262803 - DNA, 527 bp, Homo sapiens
gattttaatgtagtcctttggatgattaaatatatattcttaatcttaattttaaaaacaaaggtataatttttatacattttcattaacatattgatgaaatagtagcaaaagctttaagaaaaaatgttactaatttatcttaaaacgatgtcttgttgagtttaatataaagtattttaaagtaactactcaaaaatgacttgtagaattgtatgacttcaattttcagtgacaaaatatgaatgcatttggacttttggaaagcctgaatatcagcatttcctttagattgtataaaagcaattataaagtgacagaaggaaaaacgttcatgctagttagctatgaagggaattaytggcttttgttcatattggaacccctttaatgttttaagagtgggataatattgatctggcattcattctgctatgcatctgtcacacacacacatacacacacacacacacacactcacactccttcagtttgcatttttgcctacaggctgctgagagctgatt

SEQ ID NO: 262804 - DNA, 527 bp, Homo sapiens
gattttaatgtagtcctttggatgattaaatatatattcttaatcttaattttaaaaacaaaggtataatttttatacattttcattaacatattgatgaaatagtagcaaaagctttaagaaaaaatgttactaatttatcttaaaacgatgtcttgttgagtttaatataaagtattttaaagtaactactcaaaaatgacttgtagaattgtatgacttcaattttcagtgacaaaatatgaatgcatttggacttttggaaagcctgaatatcagcatttcctttagattgtataaaagcaattataaagtgacagaaggaaaaacgttcatgctagttagctatgaagggaattattggcttttgttcatattggaacccctttaatgttttaagagtgggwtaatattgatctggcattcattctgctatgcatctgtcacacacacacatacacacacacacacacacactcacactccttcagtttgcatttttgcctacaggctgctgagagctgatt

SEQ ID NO: 262805 - DNA, 423 bp, Homo sapiens
taagtaggaaaaatctttgaaatttatccttgaatacttttttaacttgtgaaccttcacttctctaggaatattcattgattttagcatgttctaaagcctggaagagctggattggtctgaaattatgtgttttggtcatcatataaggtctcattcagccttcacacctggtggggtaacagtgaaactatccatgagtcctcttctctcagagctgaacattgaggttgattaccaatacatctgaaagatagacatgtttcagtccatgagagagaagagaaatttaaaattaacaaaacaaatatttgttcagccyttagtgatgctagtattattatctaccctgtttgatgtgctgtttgtattcgatgctttaacctccacagaaaagcaaaaaaaaaaaagaaagaaaaaaag

SEQ ID NO: 262806 - DNA, 410 bp, Homo sapiens
gttgccttgtaattaaagaagtgacattggatttctgttcaagtaggaatattaaaacaatcacctctttgacagattaaaatatatttaaaatgtaataatcaactatccagttcatgagaaataacattttcattattgaattctttaaaacataatgtgaagggggatgaaagtatctcacagcttcctaacctctaataacactgtctcctttcagtaatgctgtttctatatttatggagtgaagaaacttcactcaggagcttcttgataaaatacctccatacatatttccctggaagcaggytctctgctgtgccagcaacatatgctaaaggccaatttagaacattttaaatatgcaccatacccttccttttccagctactaaaatgaaatgcattttg

SEQ ID NO: 262807 - DNA, 561 bp, Homo sapiens
aggtcatggaatgtgccaagattacacagttagtagcagcagagcccagattcgaagataggcagacaactgtgtattcctttctcttaacctctttcctgaactgtctgccacaaccaataaaatagttgtttattctcagttatcagatggatgtctataaagtctgaaaaatgaagataaagttgaaacatctttaatcaactctgatttactcgataactaccagacattaacaaactttatgtaccatatgtgctgaaaaagccagccgccacaagaaggattagaggtgaaattttctttccattttgatttccactttttattagtgacacctcccaagtggttcagaggacgcctattagtgttcgtggacatcttgtgctatttgcagccatccttggagagrtctgggtggctgaactccacacctgctaggtgtccctctgcctctgtcgaacatccctggcctgaacaactctagcatcctcaataagctgagaagcctcccttttcgtgacttgtgagcatcttgcgatttctccattgtcaagtctc

SEQ ID NO: 262808 - DNA, 606 bp, Homo sapiens
tcatcagggacactttaagggatgttactggacagtagtccagtagtccaggggacagaaggtttgtttattcatttattcatttattaagtgagtatccatacagcaccaaaagatcctgacactgcaagggggattgtggatacagcagtgaacaaggcacagagcttaaggtgtgggggaggaagatgggcagtaagagcgcagacaagtggtcaagtacataacagtttcagaacgacagggccatgaataaggagaagtgccttgaatgccaggcccagggagctgaggtgctggagagcccactacctcagaggaggtgtgggcagaggagggatgaggttagatttgtgtttcagaggcttgccctatgcaggagggaagggacctgggggagcaggagccacatggtggccagacacattgcggctgttcagggaatgctgtggaatctgggtctcggtatggcatgcctcctgatcagggcctgcaccaacctgcttctggctgctgrgtccccaaggacatctgcaggcagggctagacgcctccaaatcacagctgaccccgagccaggagaaagggggaaagggacatcttgat

SEQ ID NO: 262809 - DNA, 539 bp, Homo sapiens
cagagttggggcgtgatgcagtacatagggcatatgaattggaaaagaagtcagattatcccttttcaagcctgggcattctactcggatttcagccagcctgacaaagatggtagagaaggctcggtctgggaagtgggtgaaaccttcagaaggaaagagaggctgggcgcagtggttcatgcctataatcctagcactttgggaagccaaggcaggaggattgcttgagcccaggagtttcagattcgcttgggcaacatggcaagaccctaactctaccaaaaatttaaaaactttaaaaggctgcagggcggtcragggaaacagtctgaaagtgtctaacactgtaactgacatttgtataatgctcagaactactgctctaagtacagaggtggctctcctaaagtggtaacatttcttgaaaggaatataatctacgaagatcattgggagagtacattttaatagtcatataaataatcacattttaaatgaaatataatgaacatatgtagtaactgaataacataatt

SEQ ID NO: 262810 - DNA, 558 bp, Homo sapiens
ctaggaggatgaaggtgctttttaatataattaggaaaatktccctccttcaatgcaggtgattttaataatccattgaaaaaatccaatgaaataattaattcacacaaccatgatggtgtttgataagcttctacacatcttaaagatatttgtaattttacagagagcttactgacagaaatgaatttctacttgatgtgatttcaggcaacatgaccaaattggtagaacagtataagagatattttggggaaggaataatgcttaggcagcctctcttttcttgggaccccatctaggagtcagctctgttctgctatttctgcctttaaaaaatttgctttcttttttcaagagatggtatctttctgtgttgtccaggctggactccaattcctggcttcaagcaatcctcctgcctcagcctccttaatagctgggattacaggcatgagccaccatgcctgacttatttctgccttttttttagcttttttcctctccaattcagtggcttcatgatactcataggggaaattttgacaatggagtaga

SEQ ID NO: 262811 - DNA, 558 bp, Homo sapiens
tcatgctcacatctgtcacatcttattggtcaaaagaagctgcaagctcagccagatattagggtgtgaataaatagaccctacctcttgagcagcaatatcacattgcaaagggaatacaaacatggtgaggcataatttactggaagccattatcatcattacctcctttaatatctcttgatatccaaatgttctacctgaaaacaagaatgagtaggtttagacaaatattttagataaattctttactatctgaccttttgctacttgctaccagaaactcaagatcccgataaattaggattatgttgtaagcttgctatgtaaatttggygactatacttgcactatcctaactcagaaatacaatagctttatcactgactttaagcaatttgattatgcttggtgtagttttcttcatatttcttgttcttgaggttcattgaacttgttacatatgtggttttataattttaaacatatttatctctctccccatttctcttctttggggactccaattacacatatattaggccactggagattgcc

SEQ ID NO: 262812 - DNA, 558 bp, Homo sapiens
tcatgctcacatctgtcacatcttattggtcaaaagaagctgcaagctcagccagatattagggtgtgaataaatagaccctacctcttgagcagcaatatcacattgcaaagggaatacaaacatggtgaggcataatttactggaagccattatcatcattacctcctttaatatctcttgatatccaaatgttctacctgaaaacaagaatgagtaggtttagacaaatattttagataaattctttactatctgaccttttgctacttgctaccagaaactcaagatcccgataaattaggattatgttgtaagcttgctatgtaaatttggcgactatacttgcactatcctaactcagaaatacaatagctttatcactgactttaagcaatttgattatgcttggtgtagttttcttcatrtttcttgttcttgaggttcattgaacttgttacatatgtggttttataattttaaacatatttatctctctccccatttctcttctttggggactccaattacacatatattaggccactggagattgcc

SEQ ID NO: 262813 - DNA, 598 bp, Homo sapiens
tccattcaattttaatgttgtaaacataagaaaatgaattaaattgaagccttatttcatagtgtgccccagaataaaatcctaaatagactgaataattacatttttaaagtgaagctgtagaactagtagatgaaaacactggtgatcctcaaatctttctacaaatggcctcaaatagaaactatgaagggatgatctgtaagtttttctgcatcaaaaagaaaaaccagaagacattacaaaaaaactaactattaatgtgaaaggacaaattacaataggtaaaatatttacagcrtgatagatgatggatatttgtgttcatatatctgttttgttcatggtgaaactaacactacaaaagaaaagtggttaaagggcatacagggacaattcacaagtggaaaaattcaaaagaagagaaaactcctactcatttaatatacttttgataaatcagaaagaaattttttttctgttttgaacacaggttttataataagtagttacatatgttgggttaaataaacatgagcatctcttcaagctttgaaattctgtggtttggggatgtgtatgtattatccttgctgtt

SEQ ID NO: 262814 - DNA, 598 bp, Homo sapiens
tccattcaattttaatgttgtaaacataagaaaatgaattaaattgaagccttatttcatagtgtgccccagaataaaatcctaaatagactgaataattacatttttaaagtgaagctgtagaactagtagatgaaaacactggtgatcctcaaatctttctacaaatggcctcaaatagaaactatgaagggatgatctgtaagtttttctgcatcaaaaagaaaaaccagaagacattacaaaaaaactaactattaatgtgaaaggacaaattacaataggtaaaatatttacagcgtgatagatgatggatatttgtgttcatatatctgttttgttcatggtgaaactaacactacaaaagaaaagtggttaaagggcatacagggacaattcacaagtggaaaaattcaaaagaagagaaaactcctactcatttaatatacttttgataaatcagaaagaaattttttttctgttttgaacacaggttttataataagtagttacatatgttgggktaaataaacatgagcatctcttcaagctttgaaattctgtggtttggggatgtgtatgtattatccttgctgtt

SEQ ID NO: 262815 - DNA, 497 bp, Homo sapiens
taaataaaataagtttagttttctgtagcattttattttctgaatagatttacatrtttggaacccagggctctttgacttggtgcagattaggacagggttctttatgaagagaaaggaaattacctctggctctttagagtctactttgaattaaggctgccgccccaggactactgagcatatgggatctagacatttgatttttgggtgtctgatcatccacgactgtgagcaggactggctggctgctcagcagcactgactctgaagcgtggagtcctgggaaaaccaggtaacagtgtgctcatttgcctgctatttacatctgtcacattttgaggtgctaacttttcaatgggcaccttaaaatcaacatttctgcaactttattcaatcacaaccactggcgcagaaatctaagagccaaataggcaagaagctcaatgaagggtgagggtagagggccagccaaggccttttggtgcctgagcaaa

SEQ ID NO: 262816 - DNA, 581 bp, Homo sapiens
gttaagtgattcacttaatttaaatggaagggtataacatcacttgcgttattccatgtttcttaacactgtgtgtggacagtttaagatgattcataattgctcctttatgtgctattgggcatatgttcataaaaatagattgtaacacacataaactttctcatgtaattaaaaaccatgttaacatctattttttctattcaagactgctagacaaatatataacattttaagctgataattttgaaaatatttattaagcaagacttttaaaccatctatttgtgctatattagatgtgtacccctggttgcaaataatttgataagcaggaaaaggcttattgaarggtagatcgtagagtcaactgaaggtggtagaatgacaaggcaagggaatatctgcctccctttagctttggtggtagaaatggggctctgcctcctacttattttggaatttatctcccaaattggaagtgtgtttggatactgagaaatcacatatctgctatagctgcatctgcttaatgctatggatttatgtgagtatgagggtttttaaaaatataaatgtaa

SEQ ID NO: 262817 - DNA, 531 bp, Homo sapiens
gtggtgttaactcaatatacataattttttaacccagaaacacaataacatttttcagacagcttgacataaatgtggacgggacacctacttgatttctctaaaattggtttaaggaactgattgacccatccttcattaatcacccctgagtttttctccctaacaattttggtcatgcaaaatctccagaagtctttgtgccaagtgtctaacccaactctattttgtatacctcaaaatccaattcaaattcaactttcttcatatgatttttctttcccactcagaattaaagtgatttctccttctagcagttmgattggcaaaaataaaaactatgatcctgtctacaatagttacctccacccctttatgtttatataatattacaccattgacatcctttgccccacctgtcatggtactttgctgagctatgtgtttgtttgcttactgtgtatttctgccactagaatggaagtctcatgatggcaggaaccttgcctgctctgatactttaaggagcat

SEQ ID NO: 262818 - DNA, 572 bp, Homo sapiens
gactgaagggagccgtttctccaggtcatggttgctcagggaaaagaaaaaaggccttcttacctccatgaagagatactcagggmgtgacaaggttcaggctgtacccgttagtgtgaagagagccacactttctcaaaggaagacaaaaggggcaagtcatccattttattagactaatttttagagcggttttgtgttcactgcaaaattgaacagaaagtacagagagttcccatatatccctggtacccctccacacacagcctctcccactatcaacatcaggcaccagagtggtacttttgttacaaaaataaacctacacttaacacatcattatcacccaaagtctacagtttacattaggattcactcttggtgttgtacattctatgggttttgtataatgacatctatccaccattagagtatcacatgcagtaatttgttactgcatatgatactctattactctattatgcagtttattactgcatatgatactctgtgacatccaccaattttcatgggttactatattcatttgctaggtcactcataataaatta

SEQ ID NO: 262819 - DNA, 572 bp, Homo sapiens
gactgaagggagccgtttctccaggtcatggttgctcagggaaaagaaaaaaggccttcttacctccatgaagagatactcagggcgtgacaaggttcaggctgtacccgttagtgtgaagagagccacactttctcaaaggaagacaaaaggggcaagtcatccattttattagactaatttttagagcggttttgtgttcactgcaaaattgaacagaaagtacagagagttcccatatatccctggtacccctccacacacagcctctcccastatcaacatcaggcaccagagtggtacttttgttacaaaaataaacctacacttaacacatcattatcacccaaagtctacagtttacattaggattcactcttggtgttgtacattctatgggttttgtataatgacatctatccaccattagagtatcacatgcagtaatttgttactgcatatgatactctattactctattatgcagtttattactgcatatgatactctgtgacatccaccaattttcatgggttactatattcatttgctaggtcactcataataaatta

SEQ ID NO: 262820 - DNA, 577 bp, Homo sapiens
attctctcacagacagaatccaaattcacagaggccatccaaaatcaaggtgttgggaaggtcattccccctcccaaagctctggggaagaatctgccctttgggtcttccagtgtctggyggccactggtgtcctctgtattctttggcttgaagacacaatctctgcctccatcttctcaccaccttctcctctgtggctgcttctccttggtgtgtctcttataagcatccacccagatataaagacccaccagatagcccagataaatcatgtcaagattcttatttgcacctgcaaagatcctttctttaaataaggtcacattcaccaggtttcaaggattaagacatggacatgacttattagaggtctctgttcatcccactgtagttactcagaggtggggcagagctggacagaaatatctctggccttctccacaaatggagagagatgaggatactagatgctgggcatgagtgagaacagaggccatgctgggctccattaataatgatgggtgaggtggggaaactggagtgcatgatgataaattaattaataggtacaatg

SEQ ID NO: 262821 - DNA, 577 bp, Homo sapiens
attctctcacagacagaatccaaattcacagaggccatccaaaatcaaggtgttgggaaggtcattccccctcccaaagctctggggaagaatctgccctttgggtcttccagtgtctggcggccactggtgtcctctgtattctttggcttgaagacacaatctctgcctccatcttctcaccaccttctcctctgtggctgcttctccttgrtgtgtctcttataagcatccacccagatataaagacccaccagatagcccagataaatcatgtcaagattcttatttgcacctgcaaagatcctttctttaaataaggtcacattcaccaggtttcaaggattaagacatggacatgacttattagaggtctctgttcatcccactgtagttactcagaggtggggcagagctggacagaaatatctctggccttctccacaaatggagagagatgaggatactagatgctgggcatgagtgagaacagaggccatgctgggctccattaataatgatgggtgaggtggggaaactggagtgcatgatgataaattaattaataggtacaatg

SEQ ID NO: 262822 - DNA, 498 bp, Homo sapiens
tgacaaggcatctggctctattttcctccaaatccaatcttcatagygtaaatgttatgaacacaggaacttctttagcttttgatagtcaaagacaagttattgaatctcaagcaccatttttgctttcaaaaagcccaattcttgcaagtcaatagtttggatctcaagactatggtcacttcataaactccaaaaactatccaagaaactcatgatgagacatgacttcattatctgtgctgttcactgttcatggctattatgggggaaggaggtggccattaccaccttcatggagacctaagatcaaggaaacgcgggtgtgagaagcatcaaagtgtttgtgtttgcaggtgtattaccctggctaataaatctaaatgttttcccaataaagcagttgggtaacaactacaaaatattttatatgcttacagaatgtccaagatgtgtgtaggtgtgaatgtgcgcatttgcctataacacagaggtatc

SEQ ID NO: 262823 - DNA, 498 bp, Homo sapiens
tgacaaggcatctggctctattttcctccaaatccaatcttcatagcgtaaatgttatgaacacaggaacttctttagcttttgatagtcaaagacaagttattgaatctcaagcaccatttttgctttcaaaaagcccaattcttgcaagtcaatagtttggatctcaagactatggtcacttcataaactccaaaaactatccaagaaactcatgatgagacatgacttcattatctgtgctgttcactgttcatggctattatgggggaaggaggtggccattaccaccttcatggagamctaagatcaaggaaacgcgggtgtgagaagcatcaaagtgtttgtgtttgcaggtgtattaccctggctaataaatctaaatgttttcccaataaagcagttgggtaacaactacaaaatattttatatgcttacagaatgtccaagatgtgtgtaggtgtgaatgtgcgcatttgcctataacacagaggtatc

SEQ ID NO: 262824 - DNA, 581 bp, Homo sapiens
tccacagagggcactaagtagggagcaagacattgtttgttttttatttcacttgcttcccaagcaggaatttcaatgctgaaatcctatcatcactatagagaagctgagtgtaagttctgttggcagcaaaaattagcaatcagtggctactccctactcagagggagcagacaagttcaaagtcagctgtgcagaaagaagtcacggatggctagggatgctgggcttagatgtggctggctccagttctggtcgtggctgtcctcgtgacccatccagtatcatgcaaggtaacctttaaatagtttgcatttccagcttttcaactgtgtgatcagaatcagttatgccttctctccagaggtgctgcaaaaycagttacgttaagtctgtgctaattttcacactgtttgtaactagccagtgactcaagtacagcctgataagtgggggttgcaaacaccctggagcgaggtgagtgagcaggaccattgttgcgtatttcctgaaacatgcatatttgacatgtagcttggcaatgcagccaaagacaggaaagcaagactgctggctcatat

SEQ ID NO: 262825 - DNA, 635 bp, Homo sapiens
ctgccgattggcatctacaaagcaggccccctctctgcactattttagatctttcttttctcatctttgcagatagagaacagcaggaagaataaatgattggattcaaatatgaaggaatgttctcttttagcagacctaatttcattatgtttcacagagatggactgatgaagtcaacacatttacaccgaaaatctctacgtctcaaatgcaaatgtcaacgtatgtcacaaacctttataatttgcattccttagaactacacttctagaaatcaatcctagggaaataccagaaaagtgcaaaaagacatatatcaagggtattaatcacagtagtgtttatacagcaggaagaaaaaaaaatctggaagcattctaaagtgaggcaggataggtcatcaaggaaggttcttggatgcagcaaccatggtgacccaagagtcaacacaatcacattgtaattgagctcgatcaggcaaagctatcttcagtacagactttctcctctagagagcatgtgcgctttgattttacctgtcctcaaattgacctttygctcattataatagtaaattataaatctccctgggtggagatttaaggtgctaatgagacatgcgatgtatgaac

SEQ ID NO: 262826 - DNA, 533 bp, Homo sapiens
aaaaagcaatggtgagccactgaggggtttaagcagagggtcaacatgatgaaatgtatgttttaaaaacctgactgcactgcagtgtcaacaataaacaggagggagctaaggaaatttggggaggaaacatcgattgctatttccacgatatgattctggatctgacccagatgatggtatgggggcggagagaagtggacaggtatttasgaagatgaactctgcctcagggacgatgcccaagtgtccagcttgagcaacctgatgttgctttgaaccaataaggagtggtgaaggatctaattagaggacaagggaagggaagtatgagggtacggcatgagtttagtttcacttatgtagtcccaattttgtctcctgtctttataaactctcaacatctctcagaaaatctgctattttggtaccaaaccacatttccaggcttctttcagtataaaagtattcccaaggttcttttttcttttttaatcagaccaagagcctttgggtacaaaaatacagccata

SEQ ID NO: 262827 - DNA, 522 bp, Homo sapiens
gagaccaaaacctgtgcctactgctagacatcctctccatgagcagtgaagttcctacaccagaaatattctgctcgcaaaagtctygatctctgagccccttgtttataatctgatctcttaacaacaaggtcttttctcagatgaggtggtttagaatagactaagtacaactttagacatgctaatacaccataatttcctgaaagccactgactctccttcctaatcactgacaacatgactatactctaaaactcccctaatacccatttatagatcaatgcatagggtgagtgttctgggctgaattgtgtctcccaaaatgcatatgttgaagtcctctcccctcagttcctcagtgtacgactgtatttgaagacagggtctttaacgaggtgattaagttaaaatgagatcattttaagtgaggtcctcatccattacaaatggtggccttataaaagggaaattcagacacagagacaggtacaaatagaaggaagaccatgagaaagcacg

SEQ ID NO: 262828 - DNA, 569 bp, Homo sapiens
tgacctaaaaagagctacttgtcttcctaagattgaaaaagcactccttctctttagctttcaatgaatcatactcaggcagaattctaccatattccatgttccctctgtatgttacaaacgccactattgcagtgtttatatactgtgtcatggtcatttgcttatgaatctgccttctccatcactgcatgagccactgcaggaagtggccactgctctctcaactccaaagtctcttaagccccctaccatcatcaacatggtgactcagtgctcctgmagggaattcagctcttcagaggagggagtatgcacggcccacataagactaagagaaagaaatggctttgcaaagaaataaaaaatgatattcaccagagaatcagcacaccacttacccttttcaggatttatgactttctgaatataaaaacgtctaggatatatcatggagaatggcaccatccaaggctgggacctggtctctgaaattcctgacaggcagttctgctaactacaacttcaaatgaccccttcttcaatttagctatgtggaagtaaaaact

SEQ ID NO: 262829 - DNA, 540 bp, Homo sapiens
ccccttcttcaatttagctatgtggaagtaaaaactgacctttcatctgcctgacaaggttgatgtcaagatcaacacaccttgtgaaatttagctcttgatattagtgtgagaagtcgccctaagacttctggagcagcagaatggtctcaaaaaggggagtcttggggatggctcatttgtttgagggagtctctgaacacatccttttggttcctatgatgtaaactaatgcctgcccattgttctagcggaaaactatgagactccctgatgcaaattcaggttatatgattagtctgaactgtgtctttgtcgactctttataggagggtgtggaagaggaggagcrgaaataaatgactcctgatttagtgcaattttagaaagaactattgcctattgaagataaatgtcagtgtttcacagtaactcactagatcccccaacttgagacctggaatatcaagaaagatgccaagacatggatcaccctctaacgctggagtttgggctacagaaggaaataagcttggcctg

SEQ ID NO: 262830 - DNA, 584 bp, Homo sapiens
gatgctggatccaaagatgtgagggagtgaagcacacagagctcaaatccccagaaatccctcaaatacccaaggatccactggaggggaacaggcacctgcagggggacatttgaagtcatgtcactttgcaaattcaagaaaatataatttctatttgtacctgcaagctgatgagggctggacaccccagttaccatttcaaaccacttattttccatgcagatgcttggttgcacttttccactcacctaaggtgcactccagcaaccaggacgtagaggaacatactcatcccgtctgagccccacrtctcctggctgtgaaatccatggcttcttctcaggaggagaatctggggagcatagcacattgcaaacaagtgcccattgtaggaacagtaacttttctgtcggctctccctcaccttgcccatttatgaatctgaagtaagaaacgtgtgggggtgtgtgtgtttacagtttatattggaaggtattgtaggataaaatgttcggttggagagctataacctttttcggcagtttcatataaccaatgaaaagttactcatgtaacatttt

SEQ ID NO: 262831 - DNA, 585 bp, Homo sapiens
acattttctgggcaattttaattgacaatcagatggaactaatacctgatcaaccaattgacgtgataaaccagaaaaaagcaagaacacagaccgaaggccatgccaggaagaaacccaaaactactgacaaaacagataacaaattttttaacattttaatcattatcaactttggcatatgaataaatgtttgacatcttaccagttgtaatcctaccttgaactgccataagatgttatcagaaacatatgagaggaaattaggaggaaaagcctaaatcaaaaaatatcatcatttttatggcatttgtgctggaattatttctagaataatgcagtttcacagctataattcaaactatgttttagtctattggtttaactgcagcatatctgaagttaagaagtttttatrgtgctcagtcccacagaatgatggttaaaaaccttagaaaaaatgcaattataatagacggcagttttgtcctttcttttttcttaaaaatggacttcatttgcagacctgctaaaccaatagctgctttctaactcccaactgtgttagtctgttctcatgttgcc

SEQ ID NO: 262832 - DNA, 484 bp, Homo sapiens
ctggaattatttctagaataatgcagtttcacagctataattcaaactatgttttagtctattggtttaactgcagcatatctgaagttaagaagtttttatagtgctcagtcccacagaatgatggttaaaaaccttagaaaaaatgcaattataatagacggcagttttgtcctttcttttttcttaaaaatggacttcatttgcagacctgctaaaccaatagctgctttctaactcccaactgtgttagtctgttctcatgttgccatgaagaaatacccaagactgagtataatggaaaraggtttaattgattcacagttccacatggctggggaggcctcaggaaacttacagtcatggcagaaggcacctcttcacagggtggcaggagagagaatgagtgcccaacaaagagggaaactcctaaaaacatcataagatcttatgagaactaattcactatcgtgagaactaattc

SEQ ID NO: 262833 - DNA, 511 bp, Homo sapiens
aattatttaatactcttattcaggtaaaatagaatctgatcctaatgcagttttaaatatatcacatgataaaataattacacagatttctacaaatacatgtggcatcaataagaatccagaaaaggcccaatcatgctgagggctggaggtctcatcttttatcttaaggcaacgaagaagcagaactgaaagattccctaggcttgtgggatgctggtgttctggctgccaaggacagcttcatgcatgcccagtagctgtgctgatggcccctgctgtcctataggaggtgatgagagcaactggccgcagaggtggctyggcacctcttgttttcctttccacatccgcctcttaattagggccattttaaaaagctatttggaaatgggccgagcaggaagtgagtatcaggtagagttttgaggaaaggatttcagaattatttagagttcattcttagagattatttaatccaaatatctctgtttgatccaaggacatgaag

SEQ ID NO: 262834 - DNA, 642 bp, Homo sapiens
cacactcttctcttctaagataaacatcctctgatcagaaccttctctcctccaggctgtgaaggtcttgggctggctgaagcaccaggccaacatgtctgaagggtgacaatgggctctcaggctgagtttgtactcaaatgaagagtagatctttattggtaggactcagctgagaagtaagttcaagtgagtcacatttattaatgtctatcttagagcctccatgtgcagtgctttattagtatacatgcattatgcagcatgagttstttgcaatctggggcacagagaagaaccaatggctccagcagcctggcagtagtttcagtctttgtaagctcccacaccctgcagcaaagacctgcagcctttaactatggtctagtccttcctacaatgagatagtattaaatagattatgtcaaaatcaaatatttaagaaaggatacagcaaatatgaaatatacagtagatttatctcattaacaaagccaactttctcccttggagttacaattgtggggggcaggatttgcgcatttaagcaaagtagcatcatgccaagagctgtaatttatttcaaaactatgaagactccattactcttggtgaattttagaaatttcctttaaggggatc

SEQ ID NO: 262835 - DNA, 642 bp, Homo sapiens
cacactcttctcttctaagataaacatcctctgatcagaaccttctctcctccaggctgtgaaggtcttgggctggctgaagcaccaggccaacatgtctgaagggtgacaatgggctctcaggctgagtttgtactcaaatgaagagtagatctttattggtaggactcagctgagaagtaagttcaagtgagtcacatttattaatgtctatcttagagcctccatgtgcagtgctttattagtatacatgcattatgcagcatgagttgtttgcaatctggggcacagagaagaaccaatggctccagcagcctggcagtagtttcagtctttgtragctcccacaccctgcagcaaagacctgcagcctttaactatggtctagtccttcctacaatgagatagtattaaatagattatgtcaaaatcaaatatttaagaaaggatacagcaaatatgaaatatacagtagatttatctcattaacaaagccaactttctcccttggagttacaattgtggggggcaggatttgcgcatttaagcaaagtagcatcatgccaagagctgtaatttatttcaaaactatgaagactccattactcttggtgaattttagaaatttcctttaaggggatc

SEQ ID NO: 262836 - DNA, 639 bp, Homo sapiens
ttttctggaagtctgacataaaatggttaagaacaatacacaccattgtgaaaacagcactgatgtctgctaaatatttaatttatgactgagatattctggataaaatccgttcccttcatgatgaaagcccatctgtgccctcaggagcattttctagtaaaaacactttctcattcttaagtgcctgcagcctgcccatccccctctttcgtcttccctgccagaggttttaggagaagaggaccacttctacayccttgataaaaacaattctgagaattagttaactgagacaggttgtaatttcctaccatggctaagttgctaagtaaatattgcaaagcaaacagaaaagatagaagcattcatttctcttccaacaaagaaaaacaaaaaggtagtttcttggatatgagaaacaaagggaaaaggggaaatcatcctatgtttgcttttttaaaataggctttgagtctcatatgcctttttttattattttgttccagttttattttggttttgcttcaggtaaaaaaaaaattggaggcctgatattacgctaagtgaaatattacataatctcacttttgtgtggaatacttctttaaaaggtcaaatatagacagaatggtacca

SEQ ID NO: 262837 - DNA, 639 bp, Homo sapiens
ttttctggaagtctgacataaaatggttaagaacaatacacaccattgtgaaaacagcactgatgtctgctaaatatttaatttatgactgagatattctggataaaatccgttcccttcatgatgaaagcccatctgtgccctcaggagcattttctagtaaaaacactttctcattcttaagtgcctgcagcctgcccatccccctctttcgtcttccctgccagaggttttaggagaagaggaccacttctacacccttgataaaaacarttctgagaattagttaactgagacaggttgtaatttcctaccatggctaagttgctaagtaaatattgcaaagcaaacagaaaagatagaagcattcatttctcttccaacaaagaaaaacaaaaaggtagtttcttggatatgagaaacaaagggaaaaggggaaatcatcctatgtttgcttttttaaaataggctttgagtctcatatgcctttttttattattttgttccagttttattttggttttgcttcaggtaaaaaaaaaattggaggcctgatattacgctaagtgaaatattacataatctcacttttgtgtggaatacttctttaaaaggtcaaatatagacagaatggtacca

SEQ ID NO: 262838 - DNA, 582 bp, Homo sapiens
aagagccattctcatccttctgctaccagctcagatgttctctactccccacccatccagatcagctaatcggaaggarcagtgggtcactctctgttgctccatccaatcttacctcagaactttattacaatctgctatgttattatttaataatttacacgttgactgcctgtcttcccatttaggatgtgcattccagagagcagagaccgaatcctactggcttgtcactatggattgagtacctggaataaagcctggaatatagtaggcacttaataaatgttggttaaataagtaactagatgaatgattgttcctctctacactgaaatcaaccaacacgtcaacataaaaaaaaatggaagcacccacagatttttgtaggaaggccctccttgcctttacacattcacgtccaactcactgctccctggtcccaggctccctctctcagtatgatcctgctcctgcccttggatcctgcttaggccccaccacctcctgcctctccacttattctcaagttcctggggaacactcccacagggaagctcaagaggtatcctgcagcaggtg

SEQ ID NO: 262839 - DNA, 582 bp, Homo sapiens
aagagccattctcatccttctgctaccagctcagatgttctctactccccacccatccagatcagctaatcggaaggaacagtgggtcactctctgttgctccatccaatcttacctcagaactttattacaatctgctatgttattatttaataatttacacgttgactgcctgtcttcccatttaggatgtrcattccagagagcagagaccgaatcctactggcttgtcactatggattgagtacctggaataaagcctggaatatagtaggcacttaataaatgttggttaaataagtaactagatgaatgattgttcctctctacactgaaatcaaccaacacgtcaacataaaaaaaaatggaagcacccacagatttttgtaggaaggccctccttgcctttacacattcacgtccaactcactgctccctggtcccaggctccctctctcagtatgatcctgctcctgcccttggatcctgcttaggccccaccacctcctgcctctccacttattctcaagttcctggggaacactcccacagggaagctcaagaggtatcctgcagcaggtg

SEQ ID NO: 262840 - DNA, 564 bp, Homo sapiens
tgcctggcataaaacacacctttcctctacctgtgcggaacagcccatgcttcctcctctgccctgccccctcccacttccctctcacattctgaacaggcgacaccacctctgggtgcatccaacacctcattcgcactactgagcacccatggactgaaacgtggtggcacattactgcaaatcacaggcaacttaacaccaccattcaacagctgcaagcaagccattccaagcagaggaattctcacagtcacggtgcttcaataacgcattagagctttttgagtttcttgtctgtcttayagttgttgttatttttgtgttagctagcaaacaaagctacataaactgttatgaaaagtatgccctctaagacctgcctaattttatctaattccaggatcctaaaaatttttctgggtgtgaattttgttccattttcttccaggaaagtctaagagtgtgttacccaaatagtgctccaccaggagaaatccaaagctggtaagatgtgcctgaggatctggcaaaaatcagcatccatggtcttggggattgcaa

SEQ ID NO: 262841 - DNA, 593 bp, Homo sapiens
cacacacagtgtgatgccataatatgttagtttaagttataaactaggcacagccagtggcctgatggagactccctagccagtcagcaggtcaccagcaaatccacacaccagagagggctacagtaagagcgtsagccaggcacatcttcatcaacatcaaaggcttttctaactgacctagtgaagatcagtggtttctgttggtggaattaatggtattcaagttgtatgatagagtaagatatttcagtaaatatccccacacttcatgaacagcacaagcatcccaggaaatgatgccactcaacatttaatgtcccaagagtcccaggtcccccaccaagtcaggagcagtctggactgcagataccatcatatctaccttagatgaacctgccatgcaatcggtcagactacgcacaagacagagaacatacaaaaaatgacccgtataggagataacgcatatgttaattagctcaattcagccattacacaatttatacatattttaaaacatcatgttatacatgacaaatatatacaactttgtgaattttttagttactttttttaagaaaacagaatag

SEQ ID NO: 262842 - DNA, 593 bp, Homo sapiens
cacacacagtgtgatgccataatatgttagtttaagttataaactaggcacagccagtggcctgatggagactccctagccagtcagcaggtcaccagcaaatccacacaccagagagggctacagtaagagcgtcagccaggcacatcttcatcaacatcaaaggcttttctaactgacctagtgaagatcagtggtttctgttggtggaattaatggtattcaagttgtatgatagagtaagatatttcagtaaatatccccacacttcatgaacagcacaagcatcccaggaaatgatgccactcaacatttaatgtcccaagagtcccaggtcccccaccaagtcaggagcagtctggactgcagataccatcatatctaccttagatgaacctgccaygcaatcggtcagactacgcacaagacagagaacatacaaaaaatgacccgtataggagataacgcatatgttaattagctcaattcagccattacacaatttatacatattttaaaacatcatgttatacatgacaaatatatacaactttgtgaattttttagttactttttttaagaaaacagaatag

SEQ ID NO: 262843 - DNA, 592 bp, Homo sapiens
aaccggctaatttttgtatttttggtagagatggagtttcattatttggccaggatggtctcgatctcctgacctcgtcgtgatccacccatctcagcctcccaaagtgctggaattacaagcatgagccaccgtgcccggccaactcttcctcttcttataargctaccaatcctagtggactaggtcccactcttatgaatttgtttaaccttaattgcctccacaaagtccagtctccaaatacagtcacactaggggttaggccttcgatatatgaatctaggaaaacacagttcagtccatcacactcaccttccatacacagccttcttttacctccctaatcagacataatatgccctggggaaaaaaaaaaaaaagatgaaagaggatattttttctttgagggagacattttagacacttttacctaaacctttttctaaatactgaaagagttgaacatgtaaatcaataatgaaaagataacctgctcatatccaagtggacaactaactcacgaaggctatgggacaaaaagcaaggtcaaaagaagacaattcttatgaatttgcagatttaagcttcc

SEQ ID NO: 262844 - DNA, 592 bp, Homo sapiens
aaccggctaatttttgtatttttggtagagatggagtttcattatttggccaggatggtctcgatctcctgacctcgtcgtgatccacccatctcagcctcccaaagtgctggaattacaagcatgagccaccgtgcccggccaactcttcctcttcttataaggctaccaatcctagtggactaggtcccactcttatgaatttgtttaaccttaattgcctccacaaagtccagtctccaaatacagtcacactaggggttaggccttcgatatatgaatctaggaaaacacagttcagtccatcacactcaccttccatacacagccttcttttacctccctaatcagacataatatkccctggggaaaaaaaaaaaaaagatgaaagaggatattttttctttgagggagacattttagacacttttacctaaacctttttctaaatactgaaagagttgaacatgtaaatcaataatgaaaagataacctgctcatatccaagtggacaactaactcacgaaggctatgggacaaaaagcaaggtcaaaagaagacaattcttatgaatttgcagatttaagcttcc

SEQ ID NO: 262845 - DNA, 434 bp, Homo sapiens
aattcagtttaatatatacccaatttaattaaaatttataagtggttgtggactaaaccaagtgtatcttaattaaatcagaacatggctcacagatgttaaggtcaaccccagttttaataaagaagatgcaaatataatcattagggacttggctgagtaattgtggtcaggtggaaagtaagatgaaaggaaggccaggaagaccccttctactcaaggctaaaaagtaaaacgacctacggagtgcaagtgcagaaagatggggttgcctgctcagtgagccgctgaaatggaggtaggaaattcaggtatgaaaaaccaagtcaacaatcaattaataaacttacattagataaggaaggaggaggcactttctstgacagttcacacatcatggaaggttgcaatgggttctgctatcaccaaaacaa

SEQ ID NO: 262846 - DNA, 552 bp, Homo sapiens
atcatcatggaagtatggatattaggtayggctactccactgatttaagcaattttcttttcttttcttttccttttttttttgagacagagtttcacactgtcacccgagctggagtgcaatggcgggatcccggctcactgcaacctccgcctcccgggttcatgcgattctcctgccgcctcccaagtagctgggattacaggtgcacaccaccacacccagctaattttttgtatttttagtagaaacaagatttcactatgttggccagacaggtctcgaactcctgacctcgtgatctgcctgcctcggcttcccaaagcgctgggattacaggcgtgggccactgcacccggccaattttcttaatcttcatttccaattaccttccttaaaataaagaccaacttacatttactttataaaaatgcaaatatttgaaaatttcaggcaaggtaacactattttattttgaccattataaactaaaattattagagtagcaagccaacaaacagatagctcatcaaacaaatgtgtacttgcttg

SEQ ID NO: 262847 - DNA, 552 bp, Homo sapiens
atcatcatggaagtatggatattaggtatggctactccactgatttaagcaattttcttttcttttcttttccttttttttttgagacagagtttcacactgtcacccgagctggagtgcaatggcgggatcccggctcactgcaacctccgcctcccgggttcatgcgattctcctgccgcctcccaagtagctgggattacaggtgcacaccaccacacccagctaattttttgtatttttagtagaaacaagatttcactatgttggccagacaggtctcgaactcctgacctcgtgatcygcctgcctcggcttcccaaagcgctgggattacaggcgtgggccactgcacccggccaattttcttaatcttcatttccaattaccttccttaaaataaagaccaacttacatttactttataaaaatgcaaatatttgaaaatttcaggcaaggtaacactattttattttgaccattataaactaaaattattagagtagcaagccaacaaacagatagctcatcaaacaaatgtgtacttgcttg

SEQ ID NO: 262848 - DNA, 497 bp, Homo sapiens
gtcactgtggtctacttgagggtggagggtggaaggagggagaggagcagaaaaaattattgagcactgggcttaatacctggatgatgaaataatctgtacaacaaacccccatgacatgaattatctatgtaacaaaccttcacatgtacccctggacctacaataaaagttggaaaaaaataaagaatacatagataggagaattcagctgtcttctattaaagcagacattaaaaaggtttgaaaaatgtaaaacaatgccactcttctcaccaattttttggaaaaatattttatcataaaaatgcatcattttgccttcaatctcggtttctaagaaaaaaatgcgtcatttctattaacmtaatgggcttataattatttttaaatgaatctcaaaataccaaatttctcaggtttaatttataatgtggatagtaataaaagcattttacagtccttaataatctttaagaatgtaaagggactcaaga

SEQ ID NO: 262849 - DNA, 519 bp, Homo sapiens
agaaaacaaaatatattacaagactaaggtacctaacagatttgcaggaagaattgcacaaatrttaggaaaggaggtgaccagggaacctctaagaactttagcagcagacattcatagaccacctcaattgagtgtgctgttgataaggtaaatcaactccagtaacacccagcttctgcaagcactgatatgctttttgtctctgtctatacatttacctctgctggaaagtatatataaatggaattatacaacatatagtctttagtgtctggcttctatcattgagcatgtttctgaggttcattcatgttggagcatgtatcagtagtttattaatttttgttgctgaatagcaatccattgttgaatattcaacattttggtttttattcatcagttgatggacatttggattgtttccagttttgagctatatgaataatacccttgcaaacattcacatacaagccttgtttctcttgggtagatatttatgaggggaatttctgagtc

SEQ ID NO: 262850 - DNA, 519 bp, Homo sapiens
agaaaacaaaatatattacaagactaaggtacctaacagatttgcaggaagaattgcacaaatgttaggaaaggaggtgaccagggaacctctaagaactttagcagcagacattcatagaccacctcaattgagtgtgctgttgataaggtaaatcaactccagtaacacccagctyctgcaagcactgatatgctttttgtctctgtctatacatttacctctgctggaaagtatatataaatggaattatacaacatatagtctttagtgtctggcttctatcattgagcatgtttctgaggttcattcatgttggagcatgtatcagtagtttattaatttttgttgctgaatagcaatccattgttgaatattcaacattttggtttttattcatcagttgatggacatttggattgtttccagttttgagctatatgaataatacccttgcaaacattcacatacaagccttgtttctcttgggtagatatttatgaggggaatttctgagtc

SEQ ID NO: 262851 - DNA, 617 bp, Homo sapiens
ctcagaccactcgatcagtctcacacaggtgaagttgacccacacctctactcagccctctctgctcatctctcacttcctgctccaggccttctctgataccaagactggcacatcaacagaaaccccctggacacacacacagggccaccagaagaactggagggaggtaactaatccctctgggccccttgtggattaagtttccccccttgtcccctgtgcagaccctgctgaggcacatttcacaaaactccatggacgtttcagctgctcaaacaccagtggcctgagcacyggccagctccaaaaagcatccttgtgtattggttctccctcctttcctgagtctctttctggaatcatttccaaataaaccatctatgtgtatattttctagggctccattttcagagaaatgcaacctaaaatattgtgcttattttgtattatattggggtaaaccatgtgaaattgccaatatttgaccattttgacctacaaagatgacaatttcatacaatccaattaatgcttgtttatatttatgtcttttcaaacagaagggaagcctcttgaggtcaggagcagcaccttactcatttctgcatccccag

SEQ ID NO: 262852 - DNA, 617 bp, Homo sapiens
ctcagaccactcgatcagtctcacacaggtgaagttgacccacacctctactcagccctctctgctcatctctcacttcctgctccaggccttctctgataccaagactggcacatcaacagaaaccccctggacacacacacagggccaccagaagaactggagggaggtaactaatccctctgggccccttgtggattaagtttccccccttgtcccctgtgcagaccctgctgaggcacatttcacaaaactccatggacgtttcagctgctcaaacaccagtggcctgagcactggccagctccaaaaagcatccttgtgtattggttctccctcctttcctgagtctctttctggaatcatttccaaataaaccatctatgtgtatattttctagggctccattttcagagaaatgcaacctaaaatattgtgcttattttgtattatattggggtaaaccatgtgaaattgccaatatttgaccattttkacctacaaagatgacaatttcatacaatccaattaatgcttgtttatatttatgtcttttcaaacagaagggaagcctcttgaggtcaggagcagcaccttactcatttctgcatccccag

SEQ ID NO: 262853 - DNA, 613 bp, Homo sapiens
ttctccccttttgtcaggccctctcagaaatgtgctgtctgcaaagctattgctcaagcaaaataaaaggcagccaaactgaaggccttctggacattttagagacaaaacaagcatgatttccaccagttaattttatctcagtgcccacatgatgagatccattatgcaggccacatggcaaacctagttacattgcctggtggtggccaagggggctatgtctggatcgtcaacaccatttgattatgccaaccagcctcctccaatacacacttggcttccatggtccagtgagactcaaagaagaacaactatttccctcccactcactgcccagacttgtctctaagccctttttctgctacagagatgacctagcacataggatctcgtaaaactctgcaggatacaaaatcaaaaggttagcttttcctctaaaagacaaagcaagagtggaaaatggaagttataaacaataaggcttttcgctaaataggtaggctgtttttctctattaagcaatgaagatgtgcttcttcataacrcctttgaaaggatcaatgccgtcctgcagagtaatggagtaatgttgactggtctccaaaacaca

SEQ ID NO: 262854 - DNA, 393 bp, Homo sapiens
aaggacactaaatagatttttaaatgttctatcttcctagtaatcaaaggaatacagattaaaatatgataccatgttcatttaccaaatgttaatgtttcttctttagtaagaatgtgctggctatcggctgggtgccccagcactcctcagtctccaacaggctagcctcagcctgtcaccatggcagcagcagcaggaagtacacaaggcctcttgaggcccggccttagaactggcacacagtcacttccaatgcatcttaatyagccaaaacaagtcaaagatcagcaaagattggagggaactaacactgacttttgatgggaggagtttcaaattatattgcaaaagttgtggttacagggaaaggtggacaattagggccaattt

SEQ ID NO: 262855 - DNA, 370 bp, Homo sapiens
tttgttcacagccataacctaggtgatgacacatatcaggtgctgaaaaaatatttgttgaataattaagtgaacaatgaatgggaacaggatagagcagaggtgaccctggaggctgggaagccagatgagctcagagcactgcgtaatgctctgactctaaaatgatgtaacccatggcaagcctttaaatgtcaactcgaaaggatgacaaaaaaaaatattggttctgaaaatacactaattagcccmcaatgtttgctggactatattatgtcaatgttcagatagatttcggtaaacattctgaacattgggcttaaaagtcatttaacaaatatggattaagctattatgatagtgaaggaca

SEQ ID NO: 262856 - DNA, 573 bp, Homo sapiens
actgactctcccctgtcatctccactctgcttttaagcctctttaatgaaggggcttaaatttaaaattacagttactgcattttttgtttgaaattttccattggctcttctatcttctgttcctttgctgacatttcctatctttccattcatttcaaggatgttcacccttacttggtgaactatttcaattgacttttaatatacatcttagttgatgatacctaatttggcatcagtgcagggatatgcaaatcccraagaaaatatatccgtatacgcctcagagttttaacaatacttaaattttcacaatagtcaaaatgttcaatattaggccaggcacagtggctcatgcctctaattctcaacactttgagaggccaaggtaggaggattgcttgggacctaaagtttgagaccagcctgggcatcacagggagacagggagactctgtctcaacaaaaaaaagaaattgtaattagccaggtgtagtagctcacacctctggtcttagctacttggcaggctgaggcaggagggcagcttgagcccaggagtttgagtctg

SEQ ID NO: 262857 - DNA, 573 bp, Homo sapiens
actgactctcccctgtcatctccactctgcttttaagcctctttaatgaaggggcttaaatttaaaattacagttactgcattttttgtttgaaattttccattggctcttctatcttctgttcctttgctgacatttcctatctttccattcatttcaaggatgttcacccttacttggtgaactatttcaattgacttttaatatacatcttagttgatgatacctaatttggcatcagtgcagggatatgcaaatcccaaagaaaatatatccgtatacgcctcagagttttaacaatacttaamttttcacaatagtcaaaatgttcaatattaggccaggcacagtggctcatgcctctaattctcaacactttgagaggccaaggtaggaggattgcttgggacctaaagtttgagaccagcctgggcatcacagggagacagggagactctgtctcaacaaaaaaaagaaattgtaattagccaggtgtagtagctcacacctctggtcttagctacttggcaggctgaggcaggagggcagcttgagcccaggagtttgagtctg

SEQ ID NO: 262858 - DNA, 618 bp, Homo sapiens
catttgtaccaaccccttccaaaattctgggagggaccttagcratgtgtttacatggtcaatttttttgtagtaactaaaatatattatcagcaaaaactatacagccaaaaaagacaggcaaaaaattatgacactggacttctactttgggccaaaatttaataacaggaactgtgtttaccatcccacctgaaacaacaaaaaactagatatgtatatgtgtatgtgcacgtgtgtggggggtggtgggcggggggagttcagacattggacatcaggcagtgcaggttagtgatcccttattaacaaaggatgtaagccctatgagtgccccagcttactgccttgaaaaagtgtacaggctcaagtagagggaagccaaacccagtggtctgagttgagttgatgaagctgggagtccactgaggccaagatggcaggacagagtgtggagaaaagaggtgcacagagaaaaagctttgaagatctgtaggtaggtctatttgtgtcttcagctaagtaatgatcaacatatgtatagggagaaaccaaccaagggccaggaaaaaacatctgaatgattaaaaaaaaaaatccctagagctcaaacaagga

SEQ ID NO: 262859 - DNA, 546 bp, Homo sapiens
tgaggatcatgtatgaaaaggaggataaactcactaattacatttaggtattaactaggagtaaaaagatatgacttcagatcagaagctggaagtgtatgggatgaagttgtcactatctaatttcaacatcactcttactagacaaccaacagacaatagccacaaaaaggtgtaactaagggttttatgtaaagatactaatataaaggtaaccattaacacacaatttcaagctttcctaaataccaaatatgtaccagtcaggggagcagagcagtgagagagagagaccaaactaaaaacaatgtagtaaaaaaaactagatkaatattaaaagatttatatttttataaagaaaagagaatgatagcttataagtatttgtttatattgtctaaattgtgcagcagccataaataaaaagaataaaatgttacttacgggaaagaggagaaagggatacaagagagagggaagagacagaatttggacttcattgaatgggccttattttgtggatgtcactttcagaccaaatatata

SEQ ID NO: 262860 - DNA, 457 bp, Homo sapiens
gacatcttgaacaacactatctgttaacttgtcctaattggtatttataaaacactccacacaataacaacagaatatacaatatttccaagtgcacacggaacacttatcaaagtagaccacattctgagcaatgaaacaaaactgtatacatttaagaggattatattatacaaaggatttatattatactgacttctaatttaatttcattgtaggatgcagccaaaatggtacttggagatgcaagtatagcagtagccacctatattagaaggaagaccgctattgaatcaatgatttcaacttgcaccttaagaaattctaaaarcagcaaattaaactgaggaagtaaagcagaaggaagtaatgataaatatcaaagccaaaatcaacaaatacacaacagaaaaacaatagaggaaagcaatgaaaccaaaagctgcttgcttgagaa

SEQ ID NO: 262861 - DNA, 483 bp, Homo sapiens
aataccttttgtttgtcttaggtgtgagaggattcttgctcttatccgtgtgatacatgttttggctaaagctttgaagtcataagatatgtagtctaggtattgtaattgtgcatttcatatttcaaaaattgtaaaattcaaatgttaagtctttggctacactaaaataattgttgaaatcccttaaaatgtagatggtaaactcatcagttataactttttgttgcactaaaatatgastttatttctttagttgtagtgaataaaaataaagttaattacaaaagtaaagcaggtaacacaactatttgaatatgcttaacactattgaactggtacctctaaaaatagttaagatggcacattttattatgtgttttataccataattaaaattttcaaaaataaggcagatataaatattttaatgtcaattcttttgagtggactattctaaatgattatttgcttatcagtcta

SEQ ID NO: 262862 - DNA, 367 bp, Homo sapiens
agtttgcggtgtcatatttgtggtctctctagagagacaattccgtaagtggttcctaagccttggaaaattctcttttrcaatagtacccacaaataatgttcaaagagctatttttgaggaaaggattcctcacatttttgcaggtgtaagtcattcctgcctcagtggagtacaaagagtgatgtgagggaagcagagctgctggcaggaattttaaaagtatactatatttgtcccacattaactgtgcttctggggtataaaggtcagggatagaactggtcctgtgggatgtttctcatcgaaaccacctctattccaaagccttggtgtcactagccaagatgtatctattctaataaaa

SEQ ID NO: 262863 - DNA, 367 bp, Homo sapiens
agtttgcggtgtcatatttgtggtctctctagagagacaattccgtaagtggttcctaagccttggaaaattctcttttacaatagtacccacaaataatgttcaaagagytatttttgaggaaaggattcctcacatttttgcaggtgtaagtcattcctgcctcagtggagtacaaagagtgatgtgagggaagcagagctgctggcaggaattttaaaagtatactatatttgtcccacattaactgtgcttctggggtataaaggtcagggatagaactggtcctgtgggatgtttctcatcgaaaccacctctattccaaagccttggtgtcactagccaagatgtatctattctaataaaa

SEQ ID NO: 262864 - DNA, 607 bp, Homo sapiens
tgtttttaaagtttgaattccaaggaccatccagctttattaaaatcccagcattttgagaggccaaggcgggcagatcacctgaggtcaggagtttgagaccaccctggccaacatggtgaaattccgtctctactaaaaataccaaaaattagccaggtatagtggcaggcacctgcaattccagctactcaggaggctgagacaggagaatcacttgaacccgrgaggtggaggttgcagtgagccgagatcacgccattgcactccagcctgggcaacaagagcgaaactctgtctcaaaaaaaaaaaaaaaatccccttgaaaccaggggatgtgaacggtcatatgcatatttatgtgcagtatgctgagttctgtcctgaagaggaaaggagaggtggacagaaagggagggcacaggcagcaagcttagcggagctaccaaaagtgctacagacacaaaaaactttcacttgccaccctctccccaggcaatacacaggatacaaagtaagtgaaatccattttctttactcctggcccgacataaatattcactggcctgaagcagaagaacttgttccagctagcttgccagttaca

SEQ ID NO: 262865 - DNA, 606 bp, Homo sapiens
  misc_feature (1)...(606): n = A,T,C or G
ccatcctaatgaatatggatggtatctcattgtggctttgatttgcatttcccttgatggctaatgatgctgagcatcttttcatgtgcttactggccatctggatatctttttctgaagaaatgcccannnnnnnnnnnnnnnnnnnnnnnnnnnnnnnnnnnnnnnnnnnnnnnnnnnnnnnnnnnnnnnnnnnnnnnnnnnnnnnnnnnnnnnnnnnnnnnnnnnntttttcttgcattctgcasgttgtgttttcactttcttgatggtgtcctttgaagcacaaaagttttaattttgattatatctaatttatattttcttttgttctttttgcttttgatttcgtttctaagaaaccagccattgcccaatcaaaggttgccaagatttatgcctctgttttcttctcagagttttgtagtttcagcttttacctttagttatttgatacattttagttactttttgtgtatagtgtgaggtaaggattcaactttattcttttgcatgtggatatccagttgtcccagcatcatttgttgaaaagatcattctttcccccattgaattgtcatggctttctcataaaaaatcagttga

SEQ ID NO: 262866 - DNA, 619 bp, Homo sapiens
aaaaatgcaaatttaatcagggactccaggctctccactcatccagaataatcttcctaaaaagtccctttcactacccattgctcagaagcctgcacagtcctctcaagtccgatataaatgctttataaacagccttgctgacgtaagcttgctcctggggacacaagtactctgttcatttgaggaaggtttccacattctcccatgtatcttgttgacgtccatacctgtgcctgagcacagactacccttctctgctaggtgcacctgctcatctccatttaggcctcaagaggaacataagtcctgactttttcatgcaaccctttctcccatcattgacaaacacttgatttctacccaatttttcacaggtatcttcacatcagggagcgaggagcctctgagatccacgtaaccccaagatcgtggtgtctgtgacttaaagtaaacatgtgcagaaaactagttgcccaaaaccttgtacagactccagcataagaaagacagggtattcacaaccaaactktcccatgcatgtccaatctcccgaccctcccagaatctttgggacataaagattattaaagtctctagggccatacaagtgtcagcc

SEQ ID NO: 262867 - DNA, 622 bp, Homo sapiens
tgcttgtggaaagcaggtagtttgatagtgagattcaatctttggtcactgctgcaagaacagtggtgatttatcatacttgtgctggccacccgtcactaagaaagggacctgggcaccattcacatcaatgctactggtttggcaggagtttcttaaggtgaattaaaaaaaaaaaaaaagacatgtaaaagtcaacaacagtcactacacaacaaaggcacattttctagttacctggctcattctgaacaatcacacacagatgttttccagatgtatgtccacagtgccaggaagggtccatcaggaggaaccttacagcctcggccacatcctgagctcccagccagctctttcyttgatgatctggccttggttcctttctctcatagtgaatgtacacatctaccagttgaccctcaatctgagccacctcaattcatcagatataatctcttcatgttaatctgcaaaacagagggtattggtgtctccattctatttcttctagaaagctctttggttttgtgcaaattgttcactcttacaacccagacccaaatcctagccaaggagaatgtctcagtcagagtcctgacagtaaagagatggcacatgt

SEQ ID NO: 262868 - DNA, 622 bp, Homo sapiens
tgcttgtggaaagcaggtagtttgatagtgagattcaatctttggtcactgctgcaagaacagtggtgatttatcatacttgtgctggccacccgtcactaagaaagggacctgggcaccattcacatcaatgctactggtttggcaggagtttcttaaggtgaattaaaaaaaaaaaaaaagacatgtaaaagtcaacaacagtcactacacaacaaaggcacattttctagttacctggctcattctgaacaatcacacacagatgttttccagatgtatgtccacagtgccaggaagggtccatcaggaggaaccttacagcctcggccacatcctgagctcccagccagctctttccttgatgatctggccttggttcctttctctcatagtgaatgtacacatctaccagttgaccctcaatctgagccacctcaattcatcagakataatctcttcatgttaatctgcaaaacagagggtattggtgtctccattctatttcttctagaaagctctttggttttgtgcaaattgttcactcttacaacccagacccaaatcctagccaaggagaatgtctcagtcagagtcctgacagtaaagagatggcacatgt

SEQ ID NO: 262869 - DNA, 563 bp, Homo sapiens
  misc_feature (1)...(563): n = A,T,C or G
agatcttgacagattttttcagcaggaacagcatttgctgctggtgtttgtgtttttttcatttgataatactaacaytaatatgatcccccagcttctgtgtctcccacccgagtagcttaaatgaaatacagcatacagagactgttcataatttcttgatctttcatttatttagtgtttctagaaggaaaaaaaaagatgttttaaagctcaagggacttaactataaagtagannnnnnnnnnnnnnnnnnnnnnnnnnnnnnnnnnnnnnnnnnnnnnnnnnnnnnnnnnnnnnnnnnnnnnnnnnnnnnnnnnnnnnnnnnnnnnnnnnnntgtttccctccagactaaaattggatgaactctgaactgagactctttgcatctcagtttctcattaggttttattacagccgacgaaactttcagtggtgaattacttcccgttctcaacagaataccagactcccataatgtctacacaaactgaaataatgaaatggtttttaaccaagctttagggattagagaggaaaaaaaaagtgaaaaagaaagggc

SEQ ID NO: 262870 - DNA, 552 bp, Homo sapiens
tgaatcaccaaatctcaagtgtactttgcactcttggtcttaaaatgcttttcattttctagtttggcaaaaattccagtctctttacatttgctaccttttccgtctttgcaacacaggcagtgtgagctaaattaggtttgttaaaatgaagttttgaagtttmaactgctgaaatagaggcatgtccctaactttagacaaatttagagaatcgtagtaagcattattttttttctacatacttgtctgcattcagtgtcttcccaagaaacgtcagttaattccccgattcgaaaaaggaactttctcgtaacagttgtacaaccaggctaaagagcacaccctcgtcttccctgaaagggaggaaacatgcaataatgtgaggtaattaaatttagccttagaaaagtctttgaaacgttctaatcaagactttcagctttccgattgtgtgcgctttatttttcaattcttcctagtcccggttttgcatttctaatgacagtgaactgacaaagcgtgaaagtggtctaaggagcaaaacaaagc

SEQ ID NO: 262871 - DNA, 581 bp, Homo sapiens
cagagaccgaatattttatgtgtttgcactctctcacccagcaactgggaaaggtagattggggaaaatgttaacacagatctctttcattcattgctttgcagagcctgccataaccagctatacctttttttgaatcatttccatctcttactaatttagcagggttgacagcaatctgtactaataaaatattattgttttgttttgtttattgatcttaaaagttatagtttattacttatgggtggcattgatcctactttaaaatatagctgaaaaaacctacttatttggaatttttgaccaaaccaatacagaaatccttagaytgacaaacatatacgccaatgccaggttgtaaaaatattccaacttaacctaccaatttgccaccaaaaaagaggcattcagtaccgttttaatctctactttggagtttgccaagatttccatcaactttaaagaggtaatgatttaataaagattaagaaaattctgtagtgtgtaaatataacttttttcaagaaaattgaattcttaaattgtagacaaatgaagtatagcaggagagtttgtca

SEQ ID NO: 262872 - DNA, 571 bp, Homo sapiens
ggttgtggccgggagaggtggttcacgcctgtaatcccaaaactttgggaggctgaggtgggtggatcacraggtcagaagattgagactaccgtgaccaacaatgtgaaataccgtctctactaaaaatacaaaaaaaaaaaaaaattagccatgcatggtggcgcatgcctgtaatcccagctacttgtgaggctgaggcaggagaatcgcttgaacccagaggcagaggttgcagtgagccgagattgcgccactgcactccagcctgggcgacagagcaagacaccgtctcaaaaaaaaaaaaaaaaagaaaagaaaaagaaagactggtcatgctacgtctccttggtcggaaagacagagcaaagagggctctgagaagtctgtgtatcaggctgtgtttccatgaaggcttttttcattgctggggtagaatgtaataggaaactagaactgcctaccaagataagcagccttcgtattcaccgcatttcctcttgatttgatgctgatagctggccgaccctacctctggcttcagctctaacgtggcttgtaggagcagaaa

SEQ ID NO: 262873 - DNA, 557 bp, Homo sapiens
tgtgttaatcctgtgggctgccactgtaattttttcttaattactatttcagatgccataagaggttaaataaattgatgaccaagaaatctctatttgatttaccaacatgtaagtcattggccacctgagaaagattcactgaagcaatcaagaccaagctgattgcaatgatgtcgctcatcaggctttctggaaacagatgggatagagtttgagggaagagatgtctattaaggatcaatatttgtgaaaggaaggggaggaggaaagattggtcagagaaagaggttgaacatgatgcaagcctgacaaaaattcagccgaccagactgaggcctctggagtaaatgcggcccaatacttatcgtccttcaggccaacatagccagcctttgtgattttgccttgctcgtggttatctgtgggccatcctgggaaggtcatgatctgtacaagatgacattgcacaatcatgaacagtttccattctgttctctccaggaaaacagtasgctatatgtacattctcctaaagtagtctggagcataagcac

SEQ ID NO: 262874 - DNA, 518 bp, Homo sapiens
ttcttaccacaattaaaaaaaattaaaaaaggaagtaggagatcatgtagtaatccatgagcctcgattaaggaggtagacatggagatgagaaaagaggttgggtttggagatacttacactagaaaataatggattggttgtgtggatgagaatgagtaggtgtcaaggatgatgcctaagattctagtttaaacaattacagggtcacaggttttgagagagtgaccaggattcaggggaggaccatgatttttattttgaacatgttcaatttgaggaatctttgagaccttggagatgtcaaataagcaggcagtgcaagggcccagagctcacaggagcttcagttctcgctacattgttaacactccagcctacctcttgggacctgatgcttctctgagtttttataattctacctgcctgacagactatagmtctatcagttctatactgtcctatatagtatccactaaccacagtggatgtttaaattaaattaaattgaaattcaa

SEQ ID NO: 262875 - DNA, 586 bp, Homo sapiens
ttcccctcctccttattgtttatttgtcaatcttgcttactcctaaataatcatcccaccacaaacgcacacacacaggtaagagcaagcaaacaaatagaaccataacttttaaraaattttacagtactcctcatcacaaagaaaagctgagacactggtttctctatgggagaagaggtctccctgcttctgttcgcccttagtctattagttgttgactttgcattttgcctagtctcttcttagcttcctctttcatcttagagagtaacatgtaccttttcagttatttcaccattgagatgctgaaaacactaacaaaaataagatgcttatgttttatctttttaaggtttttaaacaaactaaaaagagagaaagagcttattttgatttcatggcatgatagaaagaacttcagacttaaagaagaaaaacaggattttagtccgggagctcatgtttttaagctttgtgtccttgagtaaatcatttattaaacttatctggaccttggatttttcatctttgataaaaagggagagtgtttttcagggtttccttatgctatgtcatccctaag

SEQ ID NO: 262876 - DNA, 579 bp, Homo sapiens
gtttgactaattttttttcactaaaatatccataataagggaagagaattaacatttataaagtgtcttttgtgagtttgtgatgggcactgttgttaaataatataattgtcataactttattgtggagtagaatttttgcctttttacagagtaagctgatgccctggaggattaagtgattgtgctaatgaaattaaaaagtgattacaaacgtccagtgacggagagggtatgaggagacaagacttcattgaggcacattgctgaagcctcactggaggacaattggcagatcctacaggaaaataaaatatgcaaatctttcatctcagcaattctacttttagatctctgtcctagaacacttccccccaccactgccctgcagttacacagaaaagcacaagtagatgcttaacattacattgtttttagtcaagggggaagactgaacaaacctggactatccctaacacagaatmctctggaacatttacaaagaacaagataggcccagaataggcagcacaatattcagcatgcagagcatttaggtttttaatcagatattcctgt

SEQ ID NO: 262877 - DNA, 544 bp, Homo sapiens
tcccagctactcaggaggctgaggcagaagaatcgcttgaacctgggaagtggatgttgcagtcagctgagatcacatcactgcactccaacctgggcaacagggcaaaactccatctcaacaacaacaacaaaaaaagaacgtagcccaaaaatgtgctgtgttgggtgtgcagagttttttgtttgattgatttcttttgttttaatagttgccaacattcaaaaagtagaggattttatagaaaaatctagtctttttcttcacatatttacagtgggctggagccccacagtggccacccactgagacagggcattagtttcctgttcaccatggtcacgtgctcccagctcagtgcacacaggcatgctcctgcctggcacccacagacagctgaatttggagcacatgctttatttctcctctgtttgcccctctctctccctgaggatgtgctattgcctctgcacatcaaggtttattccttctctgcttatagatgttayattactggcttatattgattttatcctaaaagtgt

SEQ ID NO: 262878 - DNA, 642 bp, Homo sapiens
gtggcaattagcatgtcatttcgagcacaggtggcagtttagaaaacttctaataaaagttactgaagtatgatgatcccaatctctctgcacagatggaaataaacatgtcctatygatctttaaagcgcctatcccatacagaacacaactgtcttagttcctagagtaattcataagtagcactgaatacctactgtgtgcttggcagatagacatattttgaattcttatagcagccctgcaagttaagagtcagtagtcccattttaataggcatagaatctaaaacccagagaagcaaaataaattacccagtgccttacagctaatactgggtgggattagtagtcaagccctggcctcaataacttcagcacaaacattctttctgccagtctttcaaatcctcatgttgaaaattgtttctggtgtgttttggagtgaagaatctggaagtagtatttggttgttttggtgcctactggggtagatctagggatttaaacttcttcattcttagactattctaagattctcgaacaaatctaggattagacatgactaatttgaggaaaaagtggtttctgtttgtttattgttttctttgcaattgaggggagtagactgtagtgtatgaat

SEQ ID NO: 262879 - DNA, 539 bp, Homo sapiens
tataatatgcacagtattcacactgtgataatcacctaaatttagctgtcctttgaaccttaataagaaagtactaaaaataattattatattaggttggtgaggttatgaatgatgtttgtccctcaacattttctttaatattcctacattatatttcgaaaacactgaattatctctttagcaaatamctttttaataaatccatccataaataagttgtttcaataatgcacataaaccaataatttaaatattgttcttttttttttagtatgatggtgaaattagagtcctatattcaactaaagttacaacttccataacttctaaaaagtggggaaccagagatctacaggtaaaacctggtgaatctctagaagttatacaaaccacagatgacacaaaagttctctgcagaaatgaagaagggaaatgtaagtcactgcttatactataatatgtgcatatatatgtcactccagaatttaacaaccaaacaagttttagtgactactctgtgtttactaactcttatc

SEQ ID NO: 262880 - DNA, 524 bp, Homo sapiens
ttgggaccaattagtgacttcayagtaggtgctaatatcacctgttaacagttcataatttagcccttaattaagggctttgcttcactcacactaggcatagtagagtactatgttgccttttatggaagcatgccagaaaaaaagacagtcatcaatgattcttctattcttatgaataagacattgtcacagtctgtcacagtgtggtactagtgtgcctttggagtcccctgaaacataagattctgtcccaagtaacccagtgcaagaaacgaactccattatcaggttaggtcacgtgccaatgcaaagatttacagaatttagcacaatgaaaagatccagaaggagtcacaaactgtgtacccatcaacaacctgacaccaatcagaaaaacacaaatcagtgtgaagagctttgctggcaaactagtaaaggccaaagaaaaataatcataatacctttgttctcctgagcacattaatcacagtgggaggcaagagactttcaataggttttgt

SEQ ID NO: 262881 - DNA, 644 bp, Homo sapiens
cctcggccagaaagggtgaagtaagatcctgctcccatccccaaggggaactgggctcatgttggtgagattcaaggaaggacaaattatttattctacatggttcctcctgaggatacaagaattagttaagattcataagaatgactgaaataatattatgtaggccaggcacatctgccaggaaaatgttaaatcctttctccaaagccatttattttatttaacaaacactttaaaactgaataacaaaagacataaattgatttaagcattttccaaatagtgagtcatttgatacccacaacatccctagtaaggaagatactaatattattcctgtgttgtacatgaagaaaccgaggcagagagggatcaggtaattgacccaaggttgtgtagctaccagatgatacagcagggagccgaacccaygcaggcactttccagaatctggtgcatattcatgaggctacgctaccttcagactaacgtgtaagtttcagaaaataatgtattttgcaaaatgttatgtttatggggattatgttacatgaagatcttttctgtaaaattttctgtatctccagcagccatcggtcctattaaataacataactcacctaaagcagagaatccatgga

SEQ ID NO: 262882 - DNA, 622 bp, Homo sapiens
agacacatgcacacagacacactattctcctgcagaagagtggatccgagcttctcaggatggtgcagatcagctgacagtggagttgcagccccatcagggccgggggcaacagatgttaagccccactgtttccttggccctgtgacggtggagaggaagacatgttccaaggcaactctctcagctccaagccaaaggattccttgaaycagcattgtgagtgaaaatatgcacctatgggaatttcaaagaccgctggaggagggagattttgtgcagatagggtgagctgggctccgccaagtttaaagtgttgccatttatgggactgcatggacactcaccagccagtcattctgagatactcaaatgacaatcgcatccactgggctcttgtctgggcctttgttcacctgcatgctgacctctgtctccacattggaggggggcctctctctccctgacactggcaaaccccaccctgttagcctttcttgtgtttccctcttggggaagacaaatgataaaaacaggcagaggaacgtggaaagactagactagctagtcttctggcctccatctttctcccgtgctggatgcttcctgccttcaaacatca

SEQ ID NO: 262883 - DNA, 451 bp, Homo sapiens
aattcaaatttatggtaaatttaaggaattattatcaatatcttcatagtaatcaaacattgtgtttttctttctcagtttcttgtggagctcttggtataatagtgaatgcatatttattatgttcatattaaatgtgmgtgtaattatggctgcattatcatgaaaaatgttcctttacatgcaggagagttctaacacttgtagaggctctgaagggaacttcttgggatagaatcggaaagtttgctctcttacaagaaaggttagtacacacattctgttctggtggaatggcagcacctatggccccttagatgaattacagctttttacagcaggaatatgtctggtggccctatttcatatccattcttaaaatacggtaatcaccttcctgatatacataaatgtattgtctatgttttaataagacacaacatagaatgac

SEQ ID NO: 262884 - DNA, 451 bp, Homo sapiens
aattcaaatttatggtaaatttaaggaattattatcaatatcttcatagtaatcaaacattgtgtttttctttctcagtttcttgtggagctcttggtataatagtgaatgcatatttattatgttcatattaaatgtgagtgtaattatggctgcattatcatgaaaaatgttcctttacatgcaggagagttctaacacttgtagaggctctgaagggaacttcttgggatagaatcggaaagtttgctytcttacaagaaaggttagtacacacattctgttctggtggaatggcagcacctatggccccttagatgaattacagctttttacagcaggaatatgtctggtggccctatttcatatccattcttaaaatacggtaatcaccttcctgatatacataaatgtattgtctatgttttaataagacacaacatagaatgac

SEQ ID NO: 262885 - DNA, 494 bp, Homo sapiens
attttagccttaaaatctttaactaattatatctgcaaatattctctttgtaaataaggacacatgctgaggttctcagtggacacaaattttgtgggacactatttagcctactacactttctaactatttactcattgaattctctatgaggtaaataatattgttactccttttttgtaaatgagaaaaccaagggtacagagagtttaaaacacttgcttaatatcacacatgtagaaagaaaccggtgtctggcaccaagtccagggctctgtctactttttcatattcacaaaaactggggcagctgccctgagttctttaccaagattgtctcacatcctaaatggggaaggcacaaatgattgactttgaaacacacaggcaaaggcactgcttctcctaytgctgctcctggcccatacccacaagtatcacataaacgtgcgactttcacacacacatgaacacagcacagtgcatcctgcagc

SEQ ID NO: 262886 - DNA, 571 bp, Homo sapiens
gaggtagggagggaggagaaggaaggtggggtggctcaggacatgcctcctggagccattggggatgggactctgcataaaccatgattggccaagctctcctttccaaagtgggcttccatgtccccacaggtaaaggtcagagtcctgtgacattgacagaagcctgcaggggtaggggaaggtccacctttaagcttcagcctggtctcagaattcacagtgggtttgagagagagatctagtcttgaagcattcagaggttttactttttcttaccatttctaaaatcattcccctgtgccatgtgttacactaagcagttatcaagtgtttaaattcaaagcaaacctgggagaaaggccctattgtgcccattgttcaagaggtgcaaatcaagctggactgttgtcccatggcttatgttgaatttatatttggttcctcatgcacagttttgaataatataygatactactgatagtggtgtattttttttaaaaaaaattttatttcatttgattttaagttccaggatacatgtgcaggatgtgcaggtttttttacgtag

SEQ ID NO: 262887 - DNA, 621 bp, Homo sapiens
tgtcacaaaacacaatcttgttttaactaccagaagcatatgttcattgacayagcgtaatgttggtgacacttgaagaaaacagtgaaagaagaaacgagagaataaatgtattttttacgtgtgcttgggatttcatgtttccttcatccattcaatggtataatcttttaagttaccaattgatggaatgtaatcctttaaataaagggatgattacttttaaatgaacagtagagctttggaataaggaaaaatatgttgatttaggataaaatgcttttgtcttaatggttgcttatagaagtgctttatttctcaaaggaaaaatgaaacacattcaaatggttaaataaagtaaatttagaggaaaactttcggcactgatagatatcttagtcccactaaaacattccaatctgcccaacaagcaagactacagtgtaatttttaaagctgaaaaaagtctgggctagttttgagtcaaagggaacaaggaaattggtgtttaagttgagatcctcagaggtttgggaagttaatttatttttaaatgcctgcatcatacccagtgaagaggaaagctttcagtttgcctctgtccttgtttttgtgttgtcc

SEQ ID NO: 262888 - DNA, 604 bp, Homo sapiens
agtttttcttttctcttacctttcagacttctgagaaactctaacccatcatcacaggacccatccccaacacgtcaatgaaataaattccttacacggagactaaagagatattctctttctttctttctctctctctctttcttttctttcttctttttctctgtctttctctttcttttcttatcttttccttccttccttcctccctccctccytctttctttctctttctttctccttcctttctttctctgtctttcttccttttttttttttttggcaggatctaattctgttgcccaggttggagtgcagtggcacaatcagggctcactgcagcctcaatctcacaggctcaagtgattctcccacctcagcaccctgagtagctgggactataggcatgtgccaccaaacccagctaattttttggagagacggggtttcaccatgttgcccagactcgtctcaaactcctagagtcaagcgatctacccaccttggcctcccaaagtgctgggatcacaggcctgagccacctcatgcagctaagactatagagattttctgtcaagataaaacttcctccactgtgatacag

SEQ ID NO: 262889 - DNA, 604 bp, Homo sapiens
agtttttcttttctcttacctttcagacttctgagaaactctaacccatcatcacaggacccatccccaacacgtcaatgaaataaattccttacacggagactaaagagatattctctttctttctttctctctctctctttcttttctttcttctttttctctgtctttctctttcttttcttatcttttccttccttccttcctccctccctccttctttctttctctttctttctccttcctttctttctctgtctttcttccttttttttttttttggcaggatctaattctgttgcccaggttggagtgcagtggcayaatcagggctcactgcagcctcaatctcacaggctcaagtgattctcccacctcagcaccctgagtagctgggactataggcatgtgccaccaaacccagctaattttttggagagacggggtttcaccatgttgcccagactcgtctcaaactcctagagtcaagcgatctacccaccttggcctcccaaagtgctgggatcacaggcctgagccacctcatgcagctaagactatagagattttctgtcaagataaaacttcctccactgtgatacag

SEQ ID NO: 262890 - DNA, 604 bp, Homo sapiens
agtttttcttttctcttacctttcagacttctgagaaactctaacccatcatcacaggacccatccccaacacgtcaatgaaataaattccttacacggagactaaagagatattctctttctttctttctctctctctctttcttttctttcttctttttctctgtctttctctttcttttcttatcttttccttccttccttcctccctccctccttctttctttctctttctttctccttcctttctttctctgtctttcttccttttttttttttttggcaggatctaattctgttgcccaggttggagtgcagtggcacaatcagggctcactgcagcctcaatctcacaggctcaagtgattctcccayctcagcaccctgagtagctgggactataggcatgtgccaccaaacccagctaattttttggagagacggggtttcaccatgttgcccagactcgtctcaaactcctagagtcaagcgatctacccaccttggcctcccaaagtgctgggatcacaggcctgagccacctcatgcagctaagactatagagattttctgtcaagataaaacttcctccactgtgatacag

SEQ ID NO: 262891 - DNA, 576 bp, Homo sapiens
gcgtcttcaaagcaggtcctcccagagctcacccttctaaatgcagaaactggccaagtggagctaggagtctgtgtcatttcctaggacattcccagggtccctattgtgtgacagctactaggaaggcacacgaggcaccaagttcctccgcaggagacccctctcccctggcggttctctgctggcactgagccactgtgtgcagccgtgatgcccaggcaggccctcaccccaggtacctctggggcctcctgggtgctgcagcttcttgctgggctgttcatggaacaggttgcccttggtgcctacatgycccgccctcagcaccagctcctgtgagggcagggaccccaatgccctcgacctaaggctctcccttctttcctgtctgccccatggccatcctggaaggcatcaccaacagaaagccattccagaaagcgtcctctctgcccagatggacgcagctgccctgtgtgagctccaggctaccatctaatgacatcttatcttcttcctgaaaccaagatacccctggctggtggaaagtgaatggccttggagtcgaaagag

SEQ ID NO: 262892 - DNA, 379 bp, Homo sapiens
gtcttcgccgatcagtccccactttccagcctgcacaagtgccttggagccctaccctttggatgcagccaaagccattcctagcagcccttgagggttctaacaacacaactgtggagtcagaggtgggtgctcctttttctcacctctcraaaggtagggaatgcagcatcaggaaaaacacatagtaggcactatggaagggatgtggaaggagggtgtgagaaatgaactctgaatgaatggaggctactaagctgctctaagtgtcttcctcctctccactgggacacttcactgaccagatttccttctccttccctggaggaagtcctgtctcctgggatcccaaggcttcatccagggacagctacatgta

SEQ ID NO: 262893 - DNA, 618 bp, Homo sapiens
tattttgtatgcatggcaactttgtggaagatcatctgatcatatacagaagggttcatttctgagttctctattctgttctttcatttgtttatctttgtgtcagtgtcacattgtttatgttactgtaggtggtggttttttttttttttttttttgagacggagtctcgctgtgtcaccctggctggagtgcagtgacgcaatctcagcttactgcaagctccgcctcccaggttcatgccattctcctgcctcagcctctgaagtagctgggactacaggcgcctgctaccatgcccggctaattttttgtatttttagtagagatggggtttcactatattagccaggatggtctcaatctcctgacctcgtgatccacctgcctcggcctccaaaagtgctgggattacaggcatgagccaccatgcctggccatgttactgtaggttttaactgtaggttgtattgacaactttgaaaaataaaawtttttgccccctgagcaagaatatgttgtagagtgtatttcatattcatttattttagaatttgccagtttgacttttgcttttaattcctagtttcattcagtttttgttagaaaacacacagt

SEQ ID NO: 262894 - DNA, 367 bp, Homo sapiens
attttatgtattattaatatgagagcaaaatacttctgttcaccttttgaatacattcaaaaagagagagagtaaagaaaagatagaattctcccatgctctggggtgggcctggctcagctcaggaaggaagccctgcctgaaaaggctgcagcttaggctgtcactctttcttcwctcagctcagcgtctgatcacatctactgtcactcagggcctcagggggcggggccttaagcattatccaatcagggatggtgggctggaaaccatccaatcaggaacgcagctggagcgaagaggacggtttccgggtttggtgcggcctttgtctctcgctgcagtcagagctccaggtctggttctt

SEQ ID NO: 262895 - DNA, 668 bp, Homo sapiens
gctactatcaaacatattgataattctgaattggctttttttattttcaagtttacaacaggtggttcgccaatgtagacaccctttctatactacacatatcagatctcataccactttactgggacccatgcctgctggtaatcaaaaggttgaccggtctcttttgcaaaccaagaagctcagagttccataatctcactcatgtcaatgctactggattaaaatataaatttgctctcacctggaaagaggctaagcttattatccactgctgccctcagtgmcaagtttttgtacttccaaatcaggaatctggcattaatcccagaggcctaactcctaatgacttatggcaaatgcatgtgactcatgttagctcctttggcagactttcatatatgcatgtttctgtagacatcttttcaggctttatctgggctacttgccaaacaggggaaggcactgcccatgttaaaagacataagtattcttgctttgtagttatggggcttccatgtcagataaaaacagacaacacccctggatatgtaagtcttttgatttatttatgcaacaaggggaatttcccatattaccggaatcccttacaatcctcagggacagactgtggtggaacaggccaattgcactttaaaaactcaatt

SEQ ID NO: 262896 - DNA, 539 bp, Homo sapiens
tatatatatattgtagaatagggttagatcctctgatatgtaaaacaaatattaggaaatgaactatgttattatttagatataggctgaaaatagtagacgaaaatcctataattcctttttgcctggagcaaacataaatttrtaagtaactattttagtaaatatggggtgcctactaatatctcatttacttcaggtataccatgcaaattctagcatatgtgctaaatgactgaatccaaaattatagacaaatttgaaatagaaaataaaaagtaaaaatgtaaaaggacagtgacatcagtaagatgaaaagattaaaagtgccctattttcatattcccttatggcataaaaagtcagccacccctgacaaaaatgcctttatgagagaaccaggattatggcttacacctgtaatgacagctacatggtacattaaggttggagaactagttcaggccaggattttgagaccagcctgggttatgtagcaagacaccatctccaaaataagtacctctaagagagatttg

SEQ ID NO: 262897 - DNA, 539 bp, Homo sapiens
tatatatatattgtagaatagggttagatcctctgatatgtaaaacaaatattaggaaatgaactatgttattatttagatataggctgaaaatagtagacgaaaatcctataattcctttttgcctggagcaaacataaatttgtaagtaactattttagtaaatatggggtgcctactaatatctcatttacttcaggtataccatgcaaattctagcatatgtgctaaatgactgaatccaaaattatagacaaatttgaaatagaaaataaaaagtaaaaatgtaaaaggacagtgacatyagtaagatgaaaagattaaaagtgccctattttcatattcccttatggcataaaaagtcagccacccctgacaaaaatgcctttatgagagaaccaggattatggcttacacctgtaatgacagctacatggtacattaaggttggagaactagttcaggccaggattttgagaccagcctgggttatgtagcaagacaccatctccaaaataagtacctctaagagagatttg

SEQ ID NO: 262898 - DNA, 694 bp, Homo sapiens
gctttgtagtcatctctgtcccaccacaaagttttccttaatggttcattataatattgctgtcctaagcaggtttgttcttctactgggtctgtaaaatcctttccccagcaagcaacacagtatctcccaataatagaagtttttaagagccagacgcttgaacctgtgsgcatctgtttgggaaaagagtcagtcagagtaaagttatcttgaggcattaactcttttacttcccaaggccattggtctcccatgttagtcccttcacaaacataacatgaggaaacgcctaggctgctggcagtgttttcagccagctgagcaaataggtttttgcctaaaggaggaggctctggtaacttctggtttatatgctcaaagaatgacttaaagactcagaattgctgctgggctgactgcttggtttgagtcctctttagaatatacaaagttattttagttttttgaccatagctttgtaatgcaatggagtaacctgtagtccatataggtagatctggctttaagatagtaagacttacaggattgcaagtgcttgtcttacaatccagttttgctggtactttgatgagcaagattggctttgacctcggtgatgatcagtcagtgaactgcattgtacagttccagcaagctattgctagggccttggaaggacaaacagagggtg

SEQ ID NO: 262899 - DNA, 694 bp, Homo sapiens
gctttgtagtcatctctgtcccaccacaaagttttccttaatggttcattataatattgctgtcctaagcaggtttgttcttctactgggtctgtaaaatcctttccccagcaagcaacacagtatctcccaataatagaagtttttaagagccagacgcttgaacctgtgggcatctgtttgggaaaagagtcagtcagagtaaagttatcttgaggcattaactcttttacttcccaaggccattggtctcccatgttagtccctycacaaacataacatgaggaaacgcctaggctgctggcagtgttttcagccagctgagcaaataggtttttgcctaaaggaggaggctctggtaacttctggtttatatgctcaaagaatgacttaaagactcagaattgctgctgggctgactgcttggtttgagtcctctttagaatatacaaagttattttagttttttgaccatagctttgtaatgcaatggagtaacctgtagtccatataggtagatctggctttaagatagtaagacttacaggattgcaagtgcttgtcttacaatccagttttgctggtactttgatgagcaagattggctttgacctcggtgatgatcagtcagtgaactgcattgtacagttccagcaagctattgctagggccttggaaggacaaacagagggtg

SEQ ID NO: 262900 - DNA, 694 bp, Homo sapiens
gctttgtagtcatctctgtcccaccacaaagttttccttaatggttcattataatattgctgtcctaagcaggtttgttcttctactgggtctgtaaaatcctttccccagcaagcaacacagtatctcccaataatagaagtttttaagagccagacgcttgaacctgtgggcatctgtttgggaaaagagtcagtcagagtaaagttatcttgaggcattaactcttttacttcccaaggccattggtctcccatgttagtcccttcacaaacataacatgaggaaacgcctaggctgctggcartgttttcagccagctgagcaaataggtttttgcctaaaggaggaggctctggtaacttctggtttatatgctcaaagaatgacttaaagactcagaattgctgctgggctgactgcttggtttgagtcctctttagaatatacaaagttattttagttttttgaccatagctttgtaatgcaatggagtaacctgtagtccatataggtagatctggctttaagatagtaagacttacaggattgcaagtgcttgtcttacaatccagttttgctggtactttgatgagcaagattggctttgacctcggtgatgatcagtcagtgaactgcattgtacagttccagcaagctattgctagggccttggaaggacaaacagagggtg

SEQ ID NO: 262901 - DNA, 618 bp, Homo sapiens
taactcttttacttcccaaggccattggtctcccatgttagtcccttcacaaacataacatgaggaaacgcctaggctgctggcagtgttttcagccagctgagcaaataggtttttgcctaaaggaggaggctctggtaacttctggtttatatgctcaaagaatgacttaaagactcagaattgctgctgggctgactgcttggtttgagtcctctttagaatatacaaagttattttagttttttgaccatagctttgtaatgcaatggagtaacctgtagtccatataggtagatctggctttaagatagtaagacttacaggattgcaagtgcttgtcttacaatccagttttgctggtactttgatgagcaagattggctttgacctcggtgatgatcagtcagtgaactgcattgtacagttccagcaagctattgctagggccttggaaggacaaacagagggtgcacacacaattttgtactggcagtttgtatagtactctgtaggaccagagattgtgagatagtttgggttcatagatgttaactgacaaatatcaaagtatatgcatatagytccaggaagagaggcttgggtttgacctataaa

SEQ ID NO: 262902 - DNA, 308 bp, Homo sapiens
acgacgttggccacgctggtctggaacccctgacctcgggtcatcagcccacctcggccttccaaagtgytggggttacaagcgtgagccaccgcgcctggccggaaactttcttctgtagatttagaaacagatatgagacatatatgtaggaaaacacatataaaaactaaggcttatatacataagtctaattaatgtctatttgtgagtatgtcttgaaaaaaagccccaaaagaaaagtatgtaagaggtcattaccttactcattctcctcaagacgcagtcaatgaactcagcccatgtga

SEQ ID NO: 262903 - DNA, 565 bp, Homo sapiens
taaatattcagaatcaaaattatttataaatatattttatttcaaacacaattattcatcttattcatagccaaaacacctgatctgtctaataagcacatatttcacagagctacatagagttatcaatggctaaatacattttatagggaaaagtatactctatagaaattctkccttaattgaagaactcaaagccccaagtgttataaacacttttatggctgcattaagttaaaaataagtgttccatcaagtgttgggtcaatctaactccttcctcctgagtatcaacatttgaagttttcacctattcaccaaaggctcaaagggcaccctctggtatctctggactattcatagacagatggtaagaagctgcccagctcatttcaagttcaggctcagatggtttgttctagaagttccaggttaccatgtaccagccatgtgattctgtatattcatttattctaagcagcagtctccacctgtgtaaaatcaggatgatgagtttctctatctttgggttatcccaaataagaagtcaatttgagcttaagtt

SEQ ID NO: 262904 - DNA, 565 bp, Homo sapiens
taaatattcagaatcaaaattatttataaatatattttatttcaaacacaattattcatcttattcatagccaaaacacctgatctgtctaataagcacatatttcacagagctacatagagttatcaatggctaaatacattttatagggaaaagtatactctatagaaattcttccttaattgaagaactcaaagccccaagtgttataaacacttttatggctgcattaagttaaaaataagtgttccatcaagtgttgggtcaatctaactccttcctcctgagtatcaacatttgaagttttcacytattcaccaaaggctcaaagggcaccctctggtatctctggactattcatagacagatggtaagaagctgcccagctcatttcaagttcaggctcagatggtttgttctagaagttccaggttaccatgtaccagccatgtgattctgtatattcatttattctaagcagcagtctccacctgtgtaaaatcaggatgatgagtttctctatctttgggttatcccaaataagaagtcaatttgagcttaagtt

SEQ ID NO: 262905 - DNA, 565 bp, Homo sapiens
taaatattcagaatcaaaattatttataaatatattttatttcaaacacaattattcatcttattcatagccaaaacacctgatctgtctaataagcacatatttcacagagctacatagagttatcaatggctaaatacattttatagggaaaagtatactctatagaaattcttccttaattgaagaactcaaagccccaagtgttataaacacttttatggctgcattaagttaaaaataagtgttccatcaagtgttgggtcaatctaactccttcctcctgagtatcaacatttgaagttttcacctattcaccaaaggctcaaagggcaccctctggtatctctggactwttcatagacagatggtaagaagctgcccagctcatttcaagttcaggctcagatggtttgttctagaagttccaggttaccatgtaccagccatgtgattctgtatattcatttattctaagcagcagtctccacctgtgtaaaatcaggatgatgagtttctctatctttgggttatcccaaataagaagtcaatttgagcttaagtt

SEQ ID NO: 262906 - DNA, 608 bp, Homo sapiens
acagaagccagggcttattgtaaaaggcaatggaagaatgaccctgaaggcattttagagattgtctatgctgccattcccatcacgagcccagaattccagggtctggggggcagaagtttatcaaaagagagaccaccactgattataacagcctcctcacattgcagtctccactccccgcactctgcagttctcctcctcagtcaccccaccagtgaaatcagcagccttagcgaagtgtgtatttcacccaggaaagcagaggggatgtgactagatttcaaaggatgccctgagagagctagaaggtccaggcagagaacccacagggatgggcccacytcagagaactgccatggggacaggctatcacagagagcaccaactaaggtaatgccagcagagccatgggggcaaggctgcctccatgaacccagatttcagcactggagagctgcagcccttacaatttgatatattttgccctgttggtgttggacttgatctgggcctgtgtgtatatgaatgcacatacatacatgcatgcatccatatctacatctacataaacatatatacatataaataatatcagattttcagca

SEQ ID NO: 262907 - DNA, 608 bp, Homo sapiens
acagaagccagggcttattgtaaaaggcaatggaagaatgaccctgaaggcattttagagattgtctatgctgccattcccatcacgagcccagaattccagggtctggggggcagaagtttatcaaaagagagaccaccactgattataacagcctcctcacattgcagtctccactccccgcactctgcagttctcctcctcagtcaccccaccagtgaaatcagcagccttagcgaagtgtgtatttcacccaggaaagcagaggggatgtgactagatttcaaaggatgccctgagagagctagaaggtccaggcagagaacccacagggatgggcccacctcagagaactgccatggggacaggctatcacagagagcaccaactaaggtaatgccagcagagccatgggggcaaggctgcctccatgaacccagatttcagcactggagagctgcagcccttacaatttgatatatwttgccctgttggtgttggacttgatctgggcctgtgtgtatatgaatgcacatacatacatgcatgcatccatatctacatctacataaacatatatacatataaataatatcagattttcagca

SEQ ID NO: 262908 - DNA, 608 bp, Homo sapiens
acagaagccagggcttattgtaaaaggcaatggaagaatgaccctgaaggcattttagagattgtctatgctgccattcccatcacgagcccagaattccagggtctggggggcagaagtttatcaaaagagagaccaccactgattataacagcctcctcacattgcagtctccactccccgcactctgcagttctcctcctcagtcaccccaccagtgaaatcagcagccttagcgaagtgtgtatttcacccaggaaagcagaggggatgtgactagatttcaaaggatgccctgagagagctagaaggtccaggcagagaacccacagggatgggcccacctcagagaactgccatggggacaggctatcacagagagcaccaactaaggtaatgccagcagagccatgggggcaaggctgcctccatgaacccagatttcagcactggagagctgcagcccttacaatttgatatattttgccctgttggtgttggacttgatctgggcctgtgtgtatatgratgcacatacatacatgcatgcatccatatctacatctacataaacatatatacatataaataatatcagattttcagca

SEQ ID NO: 262909 - DNA, 555 bp, Homo sapiens
tgattgattctccactaaattgtatagtttcatgattcctaaaaatgggtttatgctatagagatttgatatctcctrtacgccactctcaggttggccctctccattacaagggcaaggaaggggaggaaatggactcaaatctctcagcctcacctctatcctttctgactccaagaggtgatggagagaggaaagaaaggaaagagaaggcaagcatgacaaaacttctctacctttgagtcatttttaaagccacaaaaggtggaattcagctatcttcatcagcaaaatgagatgggtgatgagtgggttggccagatgacaaattgctaagcatcactctcactaaatgttgtatacgtaacctccacagctccagcaagctctcaggaatataacccaagggtccatgcatataagctaaggaaattttataatatttctccatttacttctcatatcttcaacaataagttatatgaggtacctgccaaaagcagaggtaacttctattttttagtattttaaaataattaacaaagtatacatttt

SEQ ID NO: 262910 - DNA, 555 bp, Homo sapiens
tgattgattctccactaaattgtatagtttcatgattcctaaaaatgggtttatgctatagagatttgatatctcctatacrccactctcaggttggccctctccattacaagggcaaggaaggggaggaaatggactcaaatctctcagcctcacctctatcctttctgactccaagaggtgatggagagaggaaagaaaggaaagagaaggcaagcatgacaaaacttctctacctttgagtcatttttaaagccacaaaaggtggaattcagctatcttcatcagcaaaatgagatgggtgatgagtgggttggccagatgacaaattgctaagcatcactctcactaaatgttgtatacgtaacctccacagctccagcaagctctcaggaatataacccaagggtccatgcatataagctaaggaaattttataatatttctccatttacttctcatatcttcaacaataagttatatgaggtacctgccaaaagcagaggtaacttctattttttagtattttaaaataattaacaaagtatacatttt

SEQ ID NO: 262911 - DNA, 555 bp, Homo sapiens
tgattgattctccactaaattgtatagtttcatgattcctaaaaatgggtttatgctatagagatttgatatctcctatacgccactctcaggttggccctctccattacaagggcaaggaaggggaggaaatggactcaaatctctcagcctcacctctatcctttctgactccaagaggtgatggagagaggaargaaaggaaagagaaggcaagcatgacaaaacttctctacctttgagtcatttttaaagccacaaaaggtggaattcagctatcttcatcagcaaaatgagatgggtgatgagtgggttggccagatgacaaattgctaagcatcactctcactaaatgttgtatacgtaacctccacagctccagcaagctctcaggaatataacccaagggtccatgcatataagctaaggaaattttataatatttctccatttacttctcatatcttcaacaataagttatatgaggtacctgccaaaagcagaggtaacttctattttttagtattttaaaataattaacaaagtatacatttt

SEQ ID NO: 262912 - DNA, 555 bp, Homo sapiens
tgattgattctccactaaattgtatagtttcatgattcctaaaaatgggtttatgctatagagatttgatatctcctatacgccactctcaggttggccctctccattacaagggcaaggaaggggaggaaatggactcaaatctctcagcctcacctctatcctttctgactccaagaggtgatggagagaggaaagaaaggaaagagaaggcaagcatgacaaaacttctctacctttgagtcatttttaaagccacaaaaggtggaattcagctatcttcatcagcaaaatgagatgggtgatgagtgggttggccagatgacaaattgctaagcatcwctctcactaaatgttgtatacgtaacctccacagctccagcaagctctcaggaatataacccaagggtccatgcatataagctaaggaaattttataatatttctccatttacttctcatatcttcaacaataagttatatgaggtacctgccaaaagcagaggtaacttctattttttagtattttaaaataattaacaaagtatacatttt

SEQ ID NO: 262913 - DNA, 482 bp, Homo sapiens
tatccaggcagaagtgtgctgcaggaatggagctgtcgtggaaacctctatgagggcagtgcacaggagaaatgtggggttggagccctcacacagagttcccactggggcactgcctagtggagctgtgagaagagggccacagtcctatagaacycagaatgataaattcaccgatagctcgccctggctgcctggaaaagctgtcggcactcaatgccaagccctgaaagcaatcaaaggggctgtatcttgcagagacacaagagtagaattgcctaaggccttgagagcccacttgttgcatcagcattccctggatgtgagacatggagtcaaaggagattatttcagagctttgagacttaatgactgtcctgctgggttttggatttggatggggcccatagcccctttgttttgaccaatttctcccttttggaacaggagttatctacccaatgcctgtaaccccattgtaa

SEQ ID NO: 262914 - DNA, 482 bp, Homo sapiens
tatccaggcagaagtgtgctgcaggaatggagctgtcgtggaaacctctatgagggcagtgcacaggagaaatgtggggttggagccctcacacagagttcccactggggcactgcctagtggagctgtgagaagagggccacagtcctatagaacccagaatgataaattcaccgatagctcgccctggctgcctggaaaagctgtcggcactcaatgccaakccctgaaagcaatcaaaggggctgtatcttgcagagacacaagagtagaattgcctaaggccttgagagcccacttgttgcatcagcattccctggatgtgagacatggagtcaaaggagattatttcagagctttgagacttaatgactgtcctgctgggttttggatttggatggggcccatagcccctttgttttgaccaatttctcccttttggaacaggagttatctacccaatgcctgtaaccccattgtaa

SEQ ID NO: 262915 - DNA, 482 bp, Homo sapiens
tatccaggcagaagtgtgctgcaggaatggagctgtcgtggaaacctctatgagggcagtgcacaggagaaatgtggggttggagccctcacacagagttcccactggggcactgcctagtggagctgtgagaagagggccacagtcctatagaacccagaatgataaattcaccgatagctcgccctggctgcctggaaaagctgtcggcactcaatgccaagccmtgaaagcaatcaaaggggctgtatcttgcagagacacaagagtagaattgcctaaggccttgagagcccacttgttgcatcagcattccctggatgtgagacatggagtcaaaggagattatttcagagctttgagacttaatgactgtcctgctgggttttggatttggatggggcccatagcccctttgttttgaccaatttctcccttttggaacaggagttatctacccaatgcctgtaaccccattgtaa

SEQ ID NO: 262916 - DNA, 482 bp, Homo sapiens
tatccaggcagaagtgtgctgcaggaatggagctgtcgtggaaacctctatgagggcagtgcacaggagaaatgtggggttggagccctcacacagagttcccactggggcactgcctagtggagctgtgagaagagggccacagtcctatagaacccagaatgataaattcaccgatagctcgccctggctgcctggaaaagctgtcggcactcaatgccaagccctgaaagcaatcaaaggggctgtatcttgcagagacacaagagtagaattgcctaaggccttgagagcccacttgttgcatcagcattccctggatgtgagacatggagtcaaaggagattatttcagagctttgagacttaatgactgtcctgctgggttttggatttggatggggcccatagcccctttgttttgaccaatttctcccttttggaacaggagttatctacccaaygcctgtaaccccattgtaa

SEQ ID NO: 262917 - DNA, 359 bp, Homo sapiens
gttaccagagatttaggagtgagaggaatgaagagatattgttgaaagagtgcaatrtttctgtgagacaggagaaataaatggtaattattagaggcgatgggtatgaacttgatttagtcattccaaattggatgcatatattaaagcataactctataccctataaatgtaagtgattataatctgtcaatattcaatataatatacacatatatgtaattatatacagatacctataatatatagaaaatgcatctactgaggctgaatgaacctttctttaaactggaagctgtaaaattgatcaatataaatatatataatgatatataaaggttatagtgggcctattgggt

SEQ ID NO: 262918 - DNA, 359 bp, Homo sapiens
gttaccagagatttaggagtgagaggaatgaagagatattgttgaaagagtgcaatatttctgtgagacaggagaaataaatggtaattattagaggcgatgggtatgaacttgatttagtcattccaaattggatgcatatattaaagcataactctataccctataaatgtaagtgattataatctgtcaatattcaatataatatacacatatatgtaattatatacagatacctataatatatagaaaatgcatctactgaggctgaatgaacctttmtttaaactggaagctgtaaaattgatcaatataaatatatataatgatatataaaggttatagtgggcctattgggt

SEQ ID NO: 262919 - DNA, 427 bp, Homo sapiens
ggactattactattactataattactattttyattatgctgaaggtatatgataaattttgagatgtgattgatggatgcttaggtttgaagaagcaaaattagagaaagagcttaaaggtgtctccgatatcttcctttctccctggatatgggctctgtaactactacattcaaatataatctggaatatctaaggtcctttcttcacaatcttccacaaggggctgagaatcataatgagacacattaatgaagcctagttatcatctgataatactgtcattaacatttattatcacataattagattgtgcattagccgtttctcagagccactttaaaaggaaaaaaaatacgaagacatatatgagaacaaacactgtaaggagtgcctgtatagtgataatgtttcggagtgaatgaga

SEQ ID NO: 262920 - DNA, 427 bp, Homo sapiens
ggactattactattactataattactattttcattatgctgaaggtatatgataaattttgagatgtgattgatggatgcttaggtttgaagaagcaaaattagagaaagagcttaaaggtgtctccgatatcttcctttctccctggatatgggctctgtaactactacattcaaatataatctggaatatctaaggtcctttcttcacaatcttccacaagggrctgagaatcataatgagacacattaatgaagcctagttatcatctgataatactgtcattaacatttattatcacataattagattgtgcattagccgtttctcagagccactttaaaaggaaaaaaaatacgaagacatatatgagaacaaacactgtaaggagtgcctgtatagtgataatgtttcggagtgaatgaga

SEQ ID NO: 262921 - DNA, 427 bp, Homo sapiens
ggactattactattactataattactattttcattatgctgaaggtatatgataaattttgagatgtgattgatggatgcttaggtttgaagaagcaaaattagagaaagagcttaaaggtgtctccgatatcttcctttctccctggatatgggctctgtaactactacattcaaatataatctggaatatctaaggtcctttcttcacaatcttccacaaggggctgagaatcataatgagacacattaatgaagcctagttatcatctgataatactgtcattaacatttattatcacataattagattgtgcattagccgtttctcagagccactttaaaaggaaaaaaaatacgargacatatatgagaacaaacactgtaaggagtgcctgtatagtgataatgtttcggagtgaatgaga

SEQ ID NO: 262922 - DNA, 578 bp, Homo sapiens
atgtgttttcagtaattaaggtaatctttataatacatatttttctttagcccagctgactatccaaatgagtgagtgtttggtgactaatgtaaatagctgtatgaaccaattccagatattttagctgtgaatgacttgatgataattataayagaagcaaaatgagtgttcctcattttaatgtgacctaataacaccatatcatttaagacaatatttattttttagtataatatgaactggtcctaattctgaggtatgctcataccttagagtatcaacactagagagttattacaattaatgactggctttctattgtgttcgagccaattaaatttttttttcaaaattctcttctgcaagtcatttctgaggtctccttgcaaaccatttgcacagtcataacatctatacaagtatttgcttatcaccttggccagaaaaatctcttttcaaggctgcttcacagggtttcttgagtatgcatgagtcaacacacatgttcatagaggagaagattgtgctgatttgctctacaccaacgttctgttaaaggtggacccaagtcactt

SEQ ID NO: 262923 - DNA, 578 bp, Homo sapiens
atgtgttttcagtaattaaggtaatctttataatacatatttttctttagcccagctgactatccaaatgagtgagtgtttggtgactaatgtaaatagctgtatgaaccaattccagatattttagctgtgaatgacttgatgataattataacagaagcaaaatgagtgttcctcattttaatgtgacctaataacaccatatcatttaagacaatatttattttttagtataatatgaactggtcctaattctgaggtatgctcataccttagagtatcaacactagagagttattacaattaatgactggctttctattgtgttmgagccaattaaatttttttttcaaaattctcttctgcaagtcatttctgaggtctccttgcaaaccatttgcacagtcataacatctatacaagtatttgcttatcaccttggccagaaaaatctcttttcaaggctgcttcacagggtttcttgagtatgcatgagtcaacacacatgttcatagaggagaagattgtgctgatttgctctacaccaacgttctgttaaaggtggacccaagtcactt

SEQ ID NO: 262924 - DNA, 578 bp, Homo sapiens
atgtgttttcagtaattaaggtaatctttataatacatatttttctttagcccagctgactatccaaatgagtgagtgtttggtgactaatgtaaatagctgtatgaaccaattccagatattttagctgtgaatgacttgatgataattataacagaagcaaaatgagtgttcctcattttaatgtgacctaataacaccatatcatttaagacaatatttattttttagtataatatgaactggtcctaattctgaggtatgctcataccttagagtatcaacactagagagttattacaattaatgactggctttctattgtgttcgagccaattaaatttttttttcaaaattctcttctgcaagtcatttctgaggtctccttgcaaaccatttgcacagtcataacatctatacaagtatttgcttatcaccttggccagaaaaatctcttttcaaggctgcttcacagggtttcttgagtatgcatgagtcaacacacatgttcatagaggagaagattgtgctgatttgctstacaccaacgttctgttaaaggtggacccaagtcactt

SEQ ID NO: 262925 - DNA, 480 bp, Homo sapiens
ggcagccatctgcaagccaaggagaggcctcagcaaaaaccaaacccgctgacaccttgatgtcagatttcccaactccagaactgtgggaaaatacattgctgttgtttaagccatccagtctcttgtattttgttgtggcagccctggtaaaataatatgtggtgcttaatagattttgaattaaaattatcttaacaagcatagtaatactaacgtgaacaytattttttttccacctggtacctattaccttatatacagataataatatatacaacatataaaataattactccataaattacagaaaaatatcactatcattgactcatgtactttaacatacgactatattgtaactttttcttacagcttagatagaaacttgaaacctagaaaggtttgagtatttgtttttttttataaatttaaatttaattgactttctgaagttcaaagtgatgctttatatatgac

SEQ ID NO: 262926 - DNA, 480 bp, Homo sapiens
ggcagccatctgcaagccaaggagaggcctcagcaaaaaccaaacccgctgacaccttgatgtcagatttcccaactccagaactgtgggaaaatacattgctgttgtttaagccatccagtctcttgtattttgttgtggcagccctggtaaaataatatgtggtgcttaatagattttgaattaaaattatcttaacaagcatagtaatactaacgtgaacactattttttttccacctggtacctattaccttatrtacagataataatatatacaacatataaaataattactccataaattacagaaaaatatcactatcattgactcatgtactttaacatacgactatattgtaactttttcttacagcttagatagaaacttgaaacctagaaaggtttgagtatttgtttttttttataaatttaaatttaattgactttctgaagttcaaagtgatgctttatatatgac

SEQ ID NO: 262927 - DNA, 480 bp, Homo sapiens
ggcagccatctgcaagccaaggagaggcctcagcaaaaaccaaacccgctgacaccttgatgtcagatttcccaactccagaactgtgggaaaatacattgctgttgtttaagccatccagtctcttgtattttgttgtggcagccctggtaaaataatatgtggtgcttaatagattttgaattaaaattatcttaacaagcatagtaatactaacgtgaacactattttttttccacctggtacctattaccttatatacagataataatatatayaacatataaaataattactccataaattacagaaaaatatcactatcattgactcatgtactttaacatacgactatattgtaactttttcttacagcttagatagaaacttgaaacctagaaaggtttgagtatttgtttttttttataaatttaaatttaattgactttctgaagttcaaagtgatgctttatatatgac

SEQ ID NO: 262928 - DNA, 480 bp, Homo sapiens
ggcagccatctgcaagccaaggagaggcctcagcaaaaaccaaacccgctgacaccttgatgtcagatttcccaactccagaactgtgggaaaatacattgctgttgtttaagccatccagtctcttgtattttgttgtggcagccctggtaaaataatatgtggtgcttaatagattttgaattaaaattatcttaacaagcatagtaatactaacgtgaacactattttttttccacctggtacctattaccttatatacagataataatatatacaacatataaaataattactccataaattacagaaaaatatcactatcattgactcatgtactttaacatacgactatattgtaactttttcttayagcttagatagaaacttgaaacctagaaaggtttgagtatttgtttttttttataaatttaaatttaattgactttctgaagttcaaagtgatgctttatatatgac

SEQ ID NO: 262929 - DNA, 528 bp, Homo sapiens
agatctgattatccagtgatgtattggagtctgttgaaatgggttaacattaataaatgaaaagaatatgtttatctgaagtaccgtcttatttctggtcagaaaatgagcaaatcacgtaggtgcttacacttgctaaactggacaccacagaccaaagctgggacataaatctagtagaacaaaatgtcaatattcattattggttatagcttaatatagaagtacagacacccgctgattttactctctgcaccagcacatcctcaacaaagaattcagggcacactgtcacaatggargctatagccattgaagttgtgagcaatacctatgactcagcggagagttgaagatttgaggagctttcttttgggagaaccagagctatatgaaatgaaaggagaaataaaaatgtcactgcagaaggaagaattagaatctttattctaggattggcagactgtaccagtaattcgtgaatattgtttgggagatgcgtgtgcttccagtctgagccagctggga

SEQ ID NO: 262930 - DNA, 551 bp, Homo sapiens
ttctttttttttcagatccaattccccaccacacccctttacctttgctcattttctttgaagttctctgaagaccacgtgctcctgaattatggttttgtcatcatcacttgaaggttgctgatttagggtgaagagtggaagagcagagcaaaggtgtgggagaagagaaagggaagaggagcaaggagcaagatggagacttgtttcatcacttttctgtcgtatttccggccaaagtattaaycacactttgctttcccggctcactgggcagtcactcagtatacagacccccaggggtcccagagaaatgtcattctcctcaaaatgtaatagccttcagcccagacaaaagcctgagtcagacaaatgataggctggtgagagagacttcgctggctctcagagcagactggagcaaggaggaggcagaaatgttacctggcaggcaagctctgagtttttcccctttctctaggagtgggtcaggtcacaggcctagtcaatgtgttaggttgcacaaagtagactttcaaaggccactattg

SEQ ID NO: 262931 - DNA, 600 bp, Homo sapiens
atctgttctcacactgctgataaagacatacctgagactgggcaatttccaaaagaaagaaagttaattggacttacagttccacatggctgggaagcctcactatcatggcagaaggcaaggaggagcaagtcacatcttacatgaatggcggcaggcgaagagaggaaacttgtgcaggggaattcatctttataaaaccatcagatctcatgagacttattcagtgtcatgagaacagcatgggaaagacttgcccccatgattcaagtaccccccactgggtccctcccacaacatgtgagaattcaagatgagatttggatagggacacattaaaaccatatcagcatgacatctaggattttcttcaaacatctagtccaagatgaaaaaagtggagaagaatatgaaacaaatttggagaatatgttgattattcttgaagctgggagctaaatacattaaactgtttactgttttatttttgtrtacatttttaaatgttcataataataatattttaatatatgcatgcagttgaaccattgtaatgactgaataaactaaaatcgttccttatcttataaaatctaaata

SEQ ID NO: 262932 - DNA, 629 bp, Homo sapiens
tatattccaccagaaactgaaaaaaaaacattcgtacaatgtacagccattgaggaagattaggcatatcgtttttaaaataaactttaaataatagattaaaggagcttaggatgatagaacaagttttaccatcctctgggatggyagatgtcaccttcagccaggggtgctctaatctataatagcatcagtgatcatctactgagtgctgaattagggaaaagcaagattcaaaccttaaaagaagaaagaaatattgctgagaaaagaagatgtgggaatgctgaagttctaggccactggaatagaactgttccaagctgaagttccaggccattggaacagaaatagaaattaccgggaaagaaacggagttcacaagaagggatgcaaagctattgtgatattactttgtagattctctactttccattgctggggatgaccaacgtgtcttcaatcttgatttggaagaattcctggccagaaactagtttacagcatttcctctaaacttttgataagaaagattgattataattaaagatttatatcagttactcagtttccatttttaacaagtaaacggagaatgatagttacaattcacttgttgtgaattatta

SEQ ID NO: 262933 - DNA, 419 bp, Homo sapiens
atagaacaagttttaccatcctctgggatggtagatgtcaccttcagccaggggtgctctaatctataatagcatcagtgatcatctactgagtgctgaattagggaaaagcaagattcaaaccttaaaagaagaaagaaatattgctgagaaaagaagatgtgggaatgstgaagttctaggccactggaatagaactgttccaagctgaagttccaggccattggaacagaaatagaaattaccgggaaagaaacggagttcacaagaagggatgcaaagctattgtgatattactttgtagattctctactttccattgctggggatgaccaacgtgtcttcaatcttgatttggaagaattcctggccagaaactagtttacagcatttcctctaaacttttgataagaaagatt

SEQ ID NO: 262934 - DNA, 629 bp, Homo sapiens
tatattccaccagaaactgaaaaaaaaacattcgtacaatgtacagccattgaggaagattaggcatatcgtttttaaaataaactttaaataatagattaaaggagcttaggatgatagaacaagttttaccatcctctgggatggtagatgtcaccttcagccaggggtgctctaatctataatagcatcagtgatcatctactgagtgctgaattagggaaaagcaagattcaaaccttaaaagaagaaagaaatattgctgagaaaagaagatgtgggaatgctgaagttctaggccaytggaatagaactgttccaagctgaagttccaggccattggaacagaaatagaaattaccgggaaagaaacggagttcacaagaagggatgcaaagctattgtgatattactttgtagattctctactttccattgctggggatgaccaacgtgtcttcaatcttgatttggaagaattcctggccagaaactagtttacagcatttcctctaaacttttgataagaaagattgattataattaaagatttatatcagttactcagtttccatttttaacaagtaaacggagaatgatagttacaattcacttgttgtgaattatta

SEQ ID NO: 262935 - DNA, 629 bp, Homo sapiens
tatattccaccagaaactgaaaaaaaaacattcgtacaatgtacagccattgaggaagattaggcatatcgtttttaaaataaactttaaataatagattaaaggagcttaggatgatagaacaagttttaccatcctctgggatggtagatgtcaccttcagccaggggtgctctaatctataatagcatcagtgatcatctactgagtgctgaattagggaaaagcaagattcaaaccttaaaagaagaaagaaatattgctgagaaaagaagatgtgggaatgctgaagttctaggccactggaatagaactgttccaagctgaagttccaggccattggaayagaaatagaaattaccgggaaagaaacggagttcacaagaagggatgcaaagctattgtgatattactttgtagattctctactttccattgctggggatgaccaacgtgtcttcaatcttgatttggaagaattcctggccagaaactagtttacagcatttcctctaaacttttgataagaaagattgattataattaaagatttatatcagttactcagtttccatttttaacaagtaaacggagaatgatagttacaattcacttgttgtgaattatta

SEQ ID NO: 262936 - DNA, 629 bp, Homo sapiens
tatattccaccagaaactgaaaaaaaaacattcgtacaatgtacagccattgaggaagattaggcatatcgtttttaaaataaactttaaataatagattaaaggagcttaggatgatagaacaagttttaccatcctctgggatggtagatgtcaccttcagccaggggtgctctaatctataatagcatcagtgatcatctactgagtgctgaattagggaaaagcaagattcaaaccttaaaagaagaaagaaatattgctgagaaaagaagatgtgggaatgctgaagttctaggccactggaatagaactgttccaagctgaagttccaggccattggaacagaawtagaaattaccgggaaagaaacggagttcacaagaagggatgcaaagctattgtgatattactttgtagattctctactttccattgctggggatgaccaacgtgtcttcaatcttgatttggaagaattcctggccagaaactagtttacagcatttcctctaaacttttgataagaaagattgattataattaaagatttatatcagttactcagtttccatttttaacaagtaaacggagaatgatagttacaattcacttgttgtgaattatta

SEQ ID NO: 262937 - DNA, 529 bp, Homo sapiens
gtataatattgttggcaattgcagcctgattaactaaactcaattattccttcacaatgtattttattctctagctccccaaataaaattgtaacgacatgcatgtttctaagcaaagctcagaaagtagtgcatatttttgactctcatttgaatctattatatttttcacagaacgtgcccctttcacctaaaacgtgtcctgattttccaaaagtatatttgagaaaattatggattttccttgaaacaagtgaaatcgtatgcttcaaaaatcagatcatcagttgattcctataaccaggacttaccttatttmtctcattcaatcatttttttgatttattagttcgataaattggcacactatgagaaacaatagtgattgtcaaacatccaatattatgtagtaagtagcatttattgaattcttactatgccctagttgcaatgctaattttgtgatatttcctaatcaatgtaatactcaaaacaaactatcagatattattattgtactggtgagaaa

SEQ ID NO: 262938 - DNA, 529 bp, Homo sapiens
gtataatattgttggcaattgcagcctgattaactaaactcaattattccttcacaatgtattttattctctagctccccaaataaaattgtaacgacatgcatgtttctaagcaaagctcagaaagtagtgcatatttttgactctcatttgaatctattatatttttcacagaacgtgcccctttcacctaaaacgtgtcctgattttccaaaagtatatttgagaaaattatggattttccttgaaacaagtgaaatcgtatgcttcaaaaatcagatcatcagttgattcctataaccaggacttaccttatttatctcattcaatcatttttttgatttattagttcgataaattggcacactatgagaaacaatagtgattgtcaaacatccaatattatgtagtaagtagcatttattgaattcttactatgccctagttgcaatgctaattttgtgatatttcctaatcaatktaatactcaaaacaaactatcagatattattattgtactggtgagaaa

SEQ ID NO: 262939 - DNA, 572 bp, Homo sapiens
aataagtgggagttgaagaatgagaacacatgggcacagggaggggaacatcacacaccagggcctgtcaggggttagggggctaagggagggatrgcattaggagaaatacctaatatagatgacaggttgatgggtgcagcaaaccaccatggcccatgtatacgtctgtaacaaacctgcacattctgcaaatgtatcccagaactcagagtataataaaaaaattaaaaataaaaataaataaacgtggctttttctctgacccagaagttttgtgtgttgtgtaagagtgtgtgctctgtgtaggcacacatacacagagcatacacagtatcagcacacgcacctactctctgttgtcttgtaggtagaataaaataccagattcttcaatgtttctgacctaacagaggataagttgggttatgttgcaataacaccacaacagcaaaatcaaaaacttggtggcttgtgataaaatgtgatacagcatttgtaagaaataagccattggtggcataagccagtaatgtgtgtctgtatttgtgttggagtaacgtaatctagcc

SEQ ID NO: 262940 - DNA, 572 bp, Homo sapiens
aataagtgggagttgaagaatgagaacacatgggcacagggaggggaacatcacacaccagggcctgtcaggggttagggggctaagggagggatagcattaggagaaatacctaatatagatgacaggttgatgggtgcagcaaaccaccatggcccatgtatacgtctgtaacaaacctgcacattctgcaaatgtatcccagaactcagagtataataaaaaaattaaaaataaaaataaataaacgtggctttttctctgacccagaagttttgtgtgttgtgtaagagtgtgtgctctgtgtaggcacacatacacagagcatacacagtatcagcacacgcacctactctctgttgtcttgtaggtagaataaaataccagattcttcaatgtttctgacctaacagaggataagttgggttatgttgcaataacaccacaacagcaaaatcaaaaacttggtggcttrtgataaaatgtgatacagcatttgtaagaaataagccattggtggcataagccagtaatgtgtgtctgtatttgtgttggagtaacgtaatctagcc

SEQ ID NO: 262941 - DNA, 411 bp, Homo sapiens
gtgggatgtgtatgaagctggtatcgtctctaacagagttgaattcgcaaactcattaayagaaataaaatgttgccaatctagatgcaaatgttaaataatcaaatctacttctgtgatttcaattttcttttctaggaccttgttatgatcaaaatgtttgtgtcctcccaaatgtatatgctgacattctgattcccaaggtatcaggtatggggtcatatagtatcaggatgtgaggcctttgagaagtgattaggtcatgggggcataaatggtatgaatggaattggtgctcttataaaagaagtcccagagagctaccctgccccttgcatcatgggttgtgaagacacagctagatgcaaccattagtctacaaggaaaaagcccctcagcagacactgaatc

SEQ ID NO: 262942 - DNA, 512 bp, Homo sapiens
ggatgtgtatgaagctggtatcgtctctaacagagttgaattcgcaaactcattaacagaaataaaatgttgccaatctagatgcaaatgttaaataatcaaatctacttctgtgatttcaattttcttttctaggaccttgttatgatcaaaatgtttgtgtcctcccaaatgtatatgctgacattctgattcccaaggtatcaggtatggggtcatatagtatcaggatgtgaggcctttgagaagtgattaggtcatgggggcataaatggtatgaatggaattggtgctcttataaaagaagtcccrgagagctaccctgccccttgcatcatgggttgtgaagacacagctagatgcaaccattagtctacaaggaaaaagcccctcagcagacactgaatctgctgatgacttgatctttgatttctcagcctccaaaaccgtgagaaagaaatttgtttataagttacccagtgtatggtatttttctatagcgttctgcacag

SEQ ID NO: 262943 - DNA, 512 bp, Homo sapiens
ggatgtgtatgaagctggtatcgtctctaacagagttgaattcgcaaactcattaacagaaataaaatgttgccaatctagatgcaaatgttaaataatcaaatctacttctgtgatttcaattttcttttctaggaccttgttatgatcaaaatgtttgtgtcctcccaaatgtatatgctgacattctgattcccaaggtatcaggtatggggtcatatagtatcaggatgtgaggcctttgagaagtgattaggtcatgggggcataaatggtatgaatggaattggtgctcttataaaagaagtcccagagagctaccctgccccttgyatcatgggttgtgaagacacagctagatgcaaccattagtctacaaggaaaaagcccctcagcagacactgaatctgctgatgacttgatctttgatttctcagcctccaaaaccgtgagaaagaaatttgtttataagttacccagtgtatggtatttttctatagcgttctgcacag

SEQ ID NO: 262944 - DNA, 512 bp, Homo sapiens
ggatgtgtatgaagctggtatcgtctctaacagagttgaattcgcaaactcattaacagaaataaaatgttgccaatctagatgcaaatgttaaataatcaaatctacttctgtgatttcaattttcttttctaggaccttgttatgatcaaaatgtttgtgtcctcccaaatgtatatgctgacattctgattcccaaggtatcaggtatggggtcatatagtatcaggatgtgaggcctttgagaagtgattaggtcatgggggcataaatggtatgaatggaattggtgctcttataaaagaagtcccagagagctaccctgccccttgcatcatgggttgtgaagacacagctagaygcaaccattagtctacaaggaaaaagcccctcagcagacactgaatctgctgatgacttgatctttgatttctcagcctccaaaaccgtgagaaagaaatttgtttataagttacccagtgtatggtatttttctatagcgttctgcacag

SEQ ID NO: 262945 - DNA, 483 bp, Homo sapiens
aagatctctagaagatttttcatagagcagatactcacccccaaaagcctttgttttaacaataaaacaattaacttattcrtttacaatattatgattgctcttctattttttgtttatttaggccaagcatgtttgtatcccccaaaatttatctgttgaaaccttatcgccagtgatgatatttggaggtggggtctttggtaggtagttaggttataagcgtggagccctaattaatgcaattagtgcccttataaaagagacttcagggagccccttctttccttctgccacgtaatgacacattgaaaagacagccatctgcgaagcaggttgtggaccctcaatagacaccaaatctgctaatgccttgatcttggattttccagcctccagaactgtgtaataaacttgtttataaagcacccaatttatggtattttattattacaacctgaatagactaagacaagctccatt

SEQ ID NO: 262946 - DNA, 483 bp, Homo sapiens
aagatctctagaagatttttcatagagcagatactcacccccaaaagcctttgttttaacaataaaacaattaacttattcgtttacaatattatgattgctcttctattttttgtttatttaggccaagcatgtttgtatcccccaaaatttatctgttgaaaccttatcgccagtgatgatatttggaggtggggtctttggtaggtrgttaggttataagcgtggagccctaattaatgcaattagtgcccttataaaagagacttcagggagccccttctttccttctgccacgtaatgacacattgaaaagacagccatctgcgaagcaggttgtggaccctcaatagacaccaaatctgctaatgccttgatcttggattttccagcctccagaactgtgtaataaacttgtttataaagcacccaatttatggtattttattattacaacctgaatagactaagacaagctccatt

SEQ ID NO: 262947 - DNA, 483 bp, Homo sapiens
aagatctctagaagatttttcatagagcagatactcacccccaaaagcctttgttttaacaataaaacaattaacttattcgtttacaatattatgattgctcttctattttttgtttatttaggccaagcatgtttgtatcccccaaaatttatctgttgaaaccttatcgccagtgatgatatttggaggtggggtctttggtaggtagttaggttataagcgtggagccctaattaatgcaattagtgcccttataaaagagacttcagggagccccttctttccttctgccacgtaatgacacattgaaaagacagccatctgcgaagcaggttgtggaccytcaatagacaccaaatctgctaatgccttgatcttggattttccagcctccagaactgtgtaataaacttgtttataaagcacccaatttatggtattttattattacaacctgaatagactaagacaagctccatt

SEQ ID NO: 262948 - DNA, 596 bp, Homo sapiens
gctagtgtataaactgacttaaaaccttctcttttctttaagatcacagtaagccttataatattttctagcatgatgtctcgttttataagcatagtattatttattaatttaaattaatagtataatgtaaatgaataacactagtttaactggcaaatatttaaataggattctattttgtaattattttttatatgtcaatgaaatttgcatgatgagatcatcattcaatatttagtgacaattcatctctcagrccaaaatcattgtgctttaaaaaaaagtttattcaattgttaacgttgactacaagatgattaaaaaagatgaggcacataggtgatcgatagcctaataatctaagacaaatagatattgagctccttaaagacaggaacaaattatttatagtcccatggaaactgaatttttctgtaaatcataatcgttactcaataattgctttgatttctaagacactatatttgcatctgtcttatagatatattattgttcaaattattcaacagaaaatcgagaaacaaaactaatctatctatttgagaagaatatttgatgtaatgagagcaatt

SEQ ID NO: 262949 - DNA, 596 bp, Homo sapiens
gctagtgtataaactgacttaaaaccttctcttttctttaagatcacagtaagccttataatattttctagcatgatgtctcgttttataagcatagtattatttattaatttaaattaatagtataatgtaaatgaataacactagtttaactggcaaatatttaaataggattctattttgtaattattttttatatgtcaatgaaatttgcatgatgagatcatcattcaatatttagtgacaattcatctctcagaccaaaakcattgtgctttaaaaaaaagtttattcaattgttaacgttgactacaagatgattaaaaaagatgaggcacataggtgatcgatagcctaataatctaagacaaatagatattgagctccttaaagacaggaacaaattatttatagtcccatggaaactgaatttttctgtaaatcataatcgttactcaataattgctttgatttctaagacactatatttgcatctgtcttatagatatattattgttcaaattattcaacagaaaatcgagaaacaaaactaatctatctatttgagaagaatatttgatgtaatgagagcaatt

SEQ ID NO: 262950 - DNA, 586 bp, Homo sapiens
tgtgctttaaaaaaaagtttattcaattgttaacgttgactacaagatgattaaaaaagatgaggcacataggtgatcgatagcctaataatctaagacaaatagatattgagctccttaaagacaggaacaaattatttatagtcccatggaaactgaatttttctgtaaatcataatcgttactcaataattgctttgatttctaagacactatatttgcatctgtcttatagatatattattgttcaaattattcaacagaaaatckagaaacaaaactaatctatctatttgagaagaatatttgatgtaatgagagcaattttccaaatagttgcattggggaaaagaaaaattaaataatatactcatggcatcatggaagacatgggaaaaaatggatgctactcaaattttacatttataagtgtattcatctgcttctttaaacacagtctttgacatttaatttataacatatttaacattttataaaggatttgttccaatatatttaacctctctttagctgaaaattaatctccaaattatacttattaaacactttatcccatatcctgtga

SEQ ID NO: 262951 - DNA, 586 bp, Homo sapiens
tgtgctttaaaaaaaagtttattcaattgttaacgttgactacaagatgattaaaaaagatgaggcacataggtgatcgatagcctaataatctaagacaaatagatattgagctccttaaagacaggaacaaattatttatagtcccatggaaactgaatttttctgtaaatcataatcgttactcaataattgctttgatttctaagacactatatttgcatctgtcttatagatatattattgttcaaattattcaacagaaaatcgagaaacaaaactaatctatctatttgagaagaatatttgatgtaatgagagcaattttccaaatagttgcattggggaaaagaaaaattaaataatatactcatggcatcatggaagacatgggaaaaaatggatgctactcaaattttacatttataagtgtattcatctgcttmtttaaacacagtctttgacatttaatttataacatatttaacattttataaaggatttgttccaatatatttaacctctctttagctgaaaattaatctccaaattatacttattaaacactttatcccatatcctgtga

SEQ ID NO: 262952 - DNA, 628 bp, Homo sapiens
atttttaagggatataatttcagacattagctgactgcatttagtttttacctttttgcactattttttcttccaattattttggaaattgctacygcagccaacaatagctacaatatatgttttgaaataatatttttactatttcaaccaccaaaagtatctcatttattatctaggtgtagcagccctcattgcttctagcttgcttacaaatccaaccactaaaacctattctttgttttttttaaaaaattactataattagagtcttgcttccttattatacttagctatagattttttcatctatattttttctgtttaattattcttctctcacttctaaaatatgctttgtaaaaacatcaccagtgacgtccttattactaaattcagtgaacaaatttagtcattctctgccttgacctttatgaaatatttaccactgttaatcaaggaggtagcaatctaccaaccagtgatagaggcaggaggcaaaggcctaggcagataggggcggttcctggtgaaatccaaccttcaagctggaaacagtcctgggtaaaacctcgaacaagattgagaacctgccttcccatttggcacactttcctctgattgatcc

SEQ ID NO: 262953 - DNA, 628 bp, Homo sapiens
atttttaagggatataatttcagacattagctgactgcatttagtttttacctttttgcactattttttcttccaattattttggaaattgctaccgcagccaacaatagctacartatatgttttgaaataatatttttactatttcaaccaccaaaagtatctcatttattatctaggtgtagcagccctcattgcttctagcttgcttacaaatccaaccactaaaacctattctttgttttttttaaaaaattactataattagagtcttgcttccttattatacttagctatagattttttcatctatattttttctgtttaattattcttctctcacttctaaaatatgctttgtaaaaacatcaccagtgacgtccttattactaaattcagtgaacaaatttagtcattctctgccttgacctttatgaaatatttaccactgttaatcaaggaggtagcaatctaccaaccagtgatagaggcaggaggcaaaggcctaggcagataggggcggttcctggtgaaatccaaccttcaagctggaaacagtcctgggtaaaacctcgaacaagattgagaacctgccttcccatttggcacactttcctctgattgatcc

SEQ ID NO: 262954 - DNA, 350 bp, Homo sapiens
gaaacacggcggggttagccatattgggaactctccraccttcgggtagggataccacacccatgtctcctttctgctaacagctgcttcatcactcaataaaacttcctacctggctcactcttcaagtgtccatgtgcctacttcttcctggtcataagaaaacagcccagacctagctgagctaaggagcaatcctgcatcaccaggatgcccagaaaacacccttgtagaagactgtggtttgagagggtccactaaggcccttaaatataattgaaggttcaaactcttctattttccatctttgcttagcatcaattttgctgcaatagaatggggtcacccaa

SEQ ID NO: 262955 - DNA, 608 bp, Homo sapiens
aaaccatggcaggaaggcttaattaatctaaacagaggcagggaagaaacaaaagatagatgggaaaaattaaaatagctaaataagtagagataggaacgagcaagttagacgtgattatcaaaaatctartgggtacatataaacctgggttaatggaggaatatgatatatttcctccaaaaggaaagctgtgaagtttatgaacaaataccactcttgttatcagcttatttcagaattttagctactgtctttggatgcaaatcttgaaaacaaaaagggatgatgaaggatgatagaaaggtaagaaggactctgatattcagtaaatttctgagttttatctccaacacaaaacaataaaaaacccattgaaagaatgaagtatgaacaagtaaattaacaaattttagccaaattcacactgcaaagatttttatctttctgtttggaaaattaacttggcaatgtgtgagtcaatctcatctcccaaaaatgttttcaatagtccatgaagttttgatcatctggtttaaaattctgaatataaactatgtaaaacccacattttagtaggcacaaaaaaaaaaccgaaacattttgca

SEQ ID NO: 262956 - DNA, 608 bp, Homo sapiens
aaaccatggcaggaaggcttaattaatctaaacagaggcagggaagaaacaaaagatagatgggaaaaattaaaatagctaaataagtagagataggaacgagcaagttagacgtgattatcaaaaatctagtgggtacatataaacctgggttaatggaggmatatgatatatttcctccaaaaggaaagctgtgaagtttatgaacaaataccactcttgttatcagcttatttcagaattttagctactgtctttggatgcaaatcttgaaaacaaaaagggatgatgaaggatgatagaaaggtaagaaggactctgatattcagtaaatttctgagttttatctccaacacaaaacaataaaaaacccattgaaagaatgaagtatgaacaagtaaattaacaaattttagccaaattcacactgcaaagatttttatctttctgtttggaaaattaacttggcaatgtgtgagtcaatctcatctcccaaaaatgttttcaatagtccatgaagttttgatcatctggtttaaaattctgaatataaactatgtaaaacccacattttagtaggcacaaaaaaaaaaccgaaacattttgca

SEQ ID NO: 262957 - DNA, 608 bp, Homo sapiens
aaaccatggcaggaaggcttaattaatctaaacagaggcagggaagaaacaaaagatagatgggaaaaattaaaatagctaaataagtagagataggaacgagcaagttagacgtgattatcaaaaatctagtgggtacatataaacctgggttaatggaggaatatgatatatttcctccaaaaggaaagctgtgaagtttatgaacaaataccactcttgttatcagcttatttcagaattttagctactgtctttggatgcaaatcttgaaaacaaaaagggatgatgaaggatgatagaaaggtaagaaggactctgatattcagtaaatttctgagttttatctccaacacaaaacaataaaaaacccattgaaagaatgaagtatgaacaagtaaattaacaaattttagccaaattcacactgcaaagatttttatctttctgtttggaaaattaacttggcaatgtgygagtcaatctcatctcccaaaaatgttttcaatagtccatgaagttttgatcatctggtttaaaattctgaatataaactatgtaaaacccacattttagtaggcacaaaaaaaaaaccgaaacattttgca

SEQ ID NO: 262958 - DNA, 610 bp, Homo sapiens
gattatcaaaaatctagtgggtacatataaacctgggttaatggaggaatatgatatatttcctccaaaaggaaagctgtgaagtttatgaacaaataccactcttgttatcagcttatttcagaattttagctactgtctttggatgcaaatcttgaaaacaaaaagggatgatgaaggatgatagaaaggtaagaaggactctgatattcagtaaatttctgagttttatctccaacacaaaacaataaaaaacccattgaaagaatgaagtatgaacaagtaaattaacaaattttagccaaattcacactgcaaagatttttatctttctgtttggaaaattaacttggcaatgtgtgagtcaatctcatctcccaaaaatgttttcaatagtccatgaagttttgatcatctggtttaaaattctgaatataaactatgtaaaacccacattttagtaggcacaaaaaaaaaaccgaaacattttgcaaatatctggtgttcatattcayttgatgttttacttgtttgaacattcaccatcctcttcgtcttcatcatcatcattgtatctgacatttatatagtgctaacatgtgtcaggtat

SEQ ID NO: 262959 - DNA, 576 bp, Homo sapiens
gagagagaagtttcatttcatagatcatttccctgtattttactgaacttaaaattgaattacagcagttcactttgttccagactcaccttgaacaccattcaaagctttgcaagttaagcaagttaagtgtgaggacatgttcatatgatttggggaacagccagtcattcacactgttcactgtcattcaacttggttagtycacaataattttcatcgttgacactaaggaatgatagacagaactaaaggctgggcctgcggaggaaacaggcttttatgtcaccaggttctaaagtggattctcagaaatgcgctgagttatttgtttgtatcaccactgttacttttgtctgagaaggaggtaggtacaaagccagagtcttcagaataatcaggcacgaagtggggaggatacaaaactctcacaatcagaggaggagagcttttcctctctagtggatcctcactgagggtggctgagtctatccacatctgacagttccaacagttccaataaggaactagggaaatctgaggagtatgtgtttcactattacttggtttatgtaa

SEQ ID NO: 262960 - DNA, 576 bp, Homo sapiens
gagagagaagtttcatttcatagatcatttccctgtattttactgaacttaaaattgaattacagcagttcactttgttccagactcaccttgaacaccattcaaagctttgcaagttaagcaagttaagtgtgaggacatgttcatatgatttggggaacagccagtcattcacactgttcactgtcattcaacttggttagttcacaataattttcatcgttgacactaaggaatgatagacagaactaaaggctgggcctgcggaggaaacaggcttttatgtcaccaggttctaaagtggattctcagaaatgcgctgagttatttgtttgtatcaccactgttacttttgtctgagaaggaggtaggtacaaagccagagtcttcagaataatcaggcacgaagtggggaggatacaaaactctcacaatcagaggaggagagcttttcctctctagtggatcctcactgagggtggctgagtctatccacatctgacagttccaacagttccaataaggaactagggaaatctgaggagtatrtgtttcactattacttggtttatgtaa

SEQ ID NO: 262961 - DNA, 408 bp, Homo sapiens
ttccagatatgaatattggtggcagaaagaaacctgtaaattaaatggcaccgagagactttaaagtttaatgctctaaaattaagattggatgcatgtgacttgttaagtatttgtatgaaattactgttttgaaatgaaagtaaattagactgttattaacatttaaaaataacagatggatcatcattttttaaacrgcatgttaaattataaaactatactttaatgttctttaatgctcatcaacatatttacttagttaatgtgaaatatatatcactaaagacgttttaactattctgagatgacggaatgactttataagttaaaagagaaaatatagctacatttaattgcttatttaattgttgctaaatttaaaaaatcataccatatgaaaaacag

SEQ ID NO: 262962 - DNA, 408 bp, Homo sapiens
ttccagatatgaatattggtggcagaaagaaacctgtaaattaaatggcaccgagagactttaaagtttaatgctctaaaattaagattggatgcatgtgacttgttaagtatttgtatgaaattactgttttgaaatgaaagtaaattagactgttattaacatttaaaaataacagatggatcatcattttttaaacggcatgttaaattataaaactatactttaatgttctttaatgctcatcaacatatttacttagttaatgtgaaatatatatcactaaagacgttttaactattctgagatgayggaatgactttataagttaaaagagaaaatatagctacatttaattgcttatttaattgttgctaaatttaaaaaatcataccatatgaaaaacag

SEQ ID NO: 262963 - DNA, 610 bp, Homo sapiens
acaataataaaaaagtcaggccaaatctgaaatacattttctaagtcatcaattcacaataagatgctttcaatattcctacagaaaatgcatgtttgtgtgcactgcatgagactgaatagtggcttcctaaagatgtttctgttacaatcccaggaacctgtgaatacattaccttgcatggtaaaagggaatttgcagattttattgtgttaaggatcttgasatgatgagattttcctgaattatccaggtgagtgtgatgtaatcacaattacaaaggtccttataagagggaaactagaggttgagacggcaggttgggaggaggccggacaaagtttcaatagaaccagaggttggtgtgaggcactgtgagtcaaggaattcaagcagtccctagaagctggaaaaggcaaggaaatggattactccacaagcctccaagagtaactcaatccaaccaacactttgatttttaaactccaacctccagaactctaatttttttcctaagagaattaatgtgtgctgttttaagccacaaagtttgtggcattttgttacagcagcaataggaaagtaatacaaggacaaagatcatgcatag

SEQ ID NO: 262964 - DNA, 477 bp, Homo sapiens
atgtctacccacttcccaagaaagacaagccatagttacactcaggcatggtatacagttcagatgtcaggatatttgggtacagtcctctctatcacaaaagtttcctacgtatcattaatagcaactatatattacttaaaattacaataaaatgtctcatttgagaaaaaaaagaatgaccacgcagtcactgctcagagcaataaaattttgcaggacaaaaattgcagagactctctgctctaccagtggagaaagtttcttgcttaaaactgatcgctgcttattgaaaagaatttcctgtcctctatcctctgcggtcctggctttctctctgaaaaaatttgttcttgtaatacattctccctcaccacatctgcatgaatattaaagakatttcttttgtcagaagcactgcagttttcatagcctgcttctgcacccactaatttgggaacttgggactttttgaag

SEQ ID NO: 262965 - DNA, 477 bp, Homo sapiens
atgtctacccacttcccaagaaagacaagccatagttacactcaggcatggtatacagttcagatgtcaggatatttgggtacagtcctctctatcacaaaagtttcctacgtatcattaatagcaactatatattacttaaaattacaataaaatgtctcatttgagaaaaaaaagaatgaccacgcagtcactgctcagagcaataaaattttgcaggacaaaaattgcagagactctctgctctaccagtggagaaagtttcttgcttaaaactgatcgctgcttattgaaaagaatttcctgtcctctatcctctgcggtcctggctttctctctgaaaaaatttgttcttgtaatacattctccctcaccacatctgcatgaatattaaagagatttcttttgtcagaagcactgcagttttcatagcctgcttctgcacccacwaatttgggaacttgggactttttgaag

SEQ ID NO: 262966 - DNA, 477 bp, Homo sapiens
atgtctacccacttcccaagaaagacaagccatagttacactcaggcatggtatacagttcagatgtcaggatatttgggtacagtcctctctatcacaaaagtttcctacgtatcattaatagcaactatatattacttaaaattacaataaaatgtctcatttgagaaaaaaaagaatgaccacgcagtcactgctcagagcaataaaattttgcaggacaaaaattgcagagactctctgctctaccagtggagaaagtttcttgcttaaaactgatcgctgcttattgaaaagaatttcctgtcctctatcctctgcggtcctggctttctctctgaaaaaatttgttcttgtaatacattctccctcaccacatctgcatgaatattaaagagatttcttttgtcagaagcactgcagttttcatagcctgcttctgcacccactwatttgggaacttgggactttttgaag

SEQ ID NO: 262967 - DNA, 603 bp, Homo sapiens
ctagttattattaatagaaagacagacagcagtatcttttataatctgcacacccttcttcctcaagttagaacatgtctacccacttcccaagaaagacaagccatagttacactcaggcatggtatacagttcagatgtcaggatatttgggtacagtcctctctatcacaaaagtttcctacgtatcattaatagcaactatatattacttaaaattacaataaaatgtctcatttgagaaaaaaaagaatgaccacgcagtcactgctcagagcaataaaattttgcaggacaaaaattgcagagactctctgctctaccagtggagaaagtttcttgcttaaaactgatcgctgcttattgaaaagaatttcctgtcctctatcctctgcggtcctggctttctctctgaaaaaatttgttcttgtaatacattctccctcaccacatctgcatgaatattaaagagatttcttttgtcagaagcactgcagttttcatagcctgcttctgcacccactaatttgggaacttgggactttttgaaggctaaatatttgayttctttagtaaaaaaaaaaaattattagaagattcaat

SEQ ID NO: 262968 - DNA, 550 bp, Homo sapiens
tgagttggaggagagccagaagtctgttacttgtgtaaatgtaacatattatatctgatctttgccatagagatgtgtcacactgtctaaggactctcaataggagacccttgacaagggctctagatgatcattgtttccctattatttggagtataaaagtagttgatttttacaacattgcaagatatcaaattactagaaatttatgcaatttatattataggccatggacagacagagattttattaccaagatgtattctcttccatttccattgttgtttgcacactgattatttccaaccaatcaattacaacccctttatatcccatactgaargatctgaggagctgccaaaaaaaaacaacatgctagtctttttcaacaactttcctggcagggtgcagtggctcatacctataatcccatcacattggaaggctgaggctggaggatcacttgacctcaggagttctagaccagcctaggcaacataaggatactccatctctaccaaaaaaaaaaaaaaaagttagccaagcctgg

SEQ ID NO: 262969 - DNA, 600 bp, Homo sapiens
caaataatttgggtcaagatatctcatttcatgtttcttagttataaaatattttggttgtgagtagatttgaaagagcatgcgaatgcaaaactacttattaaaatgagagcatccaaatcatggtggcagtgaacgttcagcagcatctgaggaaaatgccatatccatcatagacacattcataaatttcttttgattaggctttgcgatcttcaatggaaattttcagggycattgaaaaaatctcacacattttttttctgtctcaatcttaattcttcagagaataattaaggaaagtgaatagctctgttaggcatttctcaatcatctttaaatgggtcatggttttaaataggatgtgtcaaattgaaattatatgaactaaattatacctaagttacactgtaccgtctgcttaatgacttctttacagggggtcagtgagtcatcaactattaattgcaattcatctttgaaacagtcaaaatcaatgtatatttttcactaaagtcaaataactagcctcaagaaacactgaaaaagaggtaactaaataacagtcataaatattcagtatctataagcaaacaaaaa

SEQ ID NO: 262970 - DNA, 552 bp, Homo sapiens
aaggtacagtagttttgaaaactgtgctgcctgaggtgaggacggacatcttccgycaattctggaaaaacttcagctggtggccggacacggtggctcatgcctgtaatctcagcactttgggaggcctaggcgggaggatcacaaggtcaggagatcgagaccatcctggctaacacggtgaaaccccatctctactaaaaaatacaaaaaattagctgggcgtggtggcgagcacctgcagtcccagctattcgggaggctgaggcaggagaatggcgtgaacccgggaggcgaagcttgcagtgagctgagatggcgccactgtactccagcctgggtgacagagcgagactctgtgtcaaaaaaaaaaaaaaaaaactttcagctggtatgtcttgattagtatggcctttttcacaccctataattctttaaaccttttgttagatatatcttagatgttcttattatatatctgcacatttcaaactctcatattctctgaattctaaactctctgcagtaaatctttgatcatgtttttaattt

SEQ ID NO: 262971 - DNA, 600 bp, Homo sapiens
tctcttatttgtcagatcctgtacaactttaaagattagatgtcagggacatagtgccatagagattcctccatgcctctctgccacccctcacaagcaacygtctctctattatactctgcttagggaatctcccttttataaacaactgtattgttttctattgcagctataagcacttacaacaaactttctggcataaaacaacacaaacttatgaccttacagatctggaagccaaaggtccaaaatatgtctcactgtgctaaaatcaaggtgtccacagggatgcattcatttttggaaactctagggaagaatctgttttcttgccttttccaactttgagaggctgcccagattctttgggtcatgatcccattttatcctgaaaaccagctacagacagttgagtctttctcacattgcgcatcactgtgatactaactcccctaactccctcttccatattttagggatccttgtgatacattatgcctacccagataatccagtataatcttcatttttaaacgccaaattccatctgaacccttaactcccttaagcgatgtaacataataacatattcacagactc

SEQ ID NO: 262972 - DNA, 600 bp, Homo sapiens
tctcttatttgtcagatcctgtacaactttaaagattagatgtcagggacatagtgccatagagattcctccatgcctctctgccacccctcacaagcaaccgtctctctattatactctgcttagggaatctcccttttataaacaactgtattgttttctattgcagctrtaagcacttacaacaaactttctggcataaaacaacacaaacttatgaccttacagatctggaagccaaaggtccaaaatatgtctcactgtgctaaaatcaaggtgtccacagggatgcattcatttttggaaactctagggaagaatctgttttcttgccttttccaactttgagaggctgcccagattctttgggtcatgatcccattttatcctgaaaaccagctacagacagttgagtctttctcacattgcgcatcactgtgatactaactcccctaactccctcttccatattttagggatccttgtgatacattatgcctacccagataatccagtataatcttcatttttaaacgccaaattccatctgaacccttaactcccttaagcgatgtaacataataacatattcacagactc

SEQ ID NO: 262973 - DNA, 600 bp, Homo sapiens
tctcttatttgtcagatcctgtacaactttaaagattagatgtcagggacatagtgccatagagattcctccatgcctctctgccacccctcacaagcaaccgtctctctattatactctgcttagggaatctcccttttataaacaactgtattgttttctattgcagctataagcacttacaacaaactttctggcataaaacaacacaaacttatgaccttacagatctggaagccaaaggtccaaaatatgtctcactgtgctaaaatcaaggtgtccacagggatgcattcatttttggaaactctagggaagaatctgttttcttgccttttccaactttgagaggctgcccagattctttgggtcatgatcccattttatcctgaaaaccagctacagacagttgagtctttctcacattgcgcatcactgtgatactaactcccctaactccctcttccatattttagggatccttgtgatacattatgcctacccagataatccagtataatcttcatttttaaacgccaaattccmtctgaacccttaactcccttaagcgatgtaacataataacatattcacagactc

SEQ ID NO: 262974 - DNA, 613 bp, Homo sapiens
ccttacaacaattacaatggcaaattttgtgttatgtacattttaccacaatttaaaaaaattaaaaatagcaagcaccctaaaccagatcttgcttctgaatggtggcttcactttgtcatttggcaatggmgcaaatgctaaaatatgtctttggccttcttagactggacataaacccagtagaatgacagcatcttaggggaagagaccctgtcccaagtcaagtgctaatgtgaaatatgtgctcaatcattgtaaaatatatgtatatctgattatcacataatacaccttaaatatgtaatttttatctgtcaattaattattttaacattacaaaaagaagaggctgataaaattgactcagctggtcccatgtaacagggcatggttattcttatgaaggtttcagttcatccttagaaatatgctacctcactagagggctatcttttctttttctattttataggttttttgatcagttttctttctagaggttaactctgacccgttatcctagaaggcctttatcatgtcttcatgctgtgactctagcagaacacacatacatgcgcacgtgcacacacacacacacacaatgtacatg

SEQ ID NO: 262975 - DNA, 593 bp, Homo sapiens
gttggtaaccatatgaccccactgatttgttttctgttatgccctttatcttgcttgtgtcataatattaataaattaactgtcttgagcactagaaatgagaaaagagaagaaacttagttttgcatagtacctatgggaattcttaaattaaaagaaacgtaaagtccctcactaaaaggactccccattaaatgaacattatcttcaagccttaggaaaacctggcacgctctaacagacagcccaagggaatgcgtgataggaagaaaaaaccaggacattcttctgctaacattgctgagttaatagtgtgtcccatttgaccaaaattatcgatccactaactgatttcagcggctcagaattgtatgtgtatatattagcctattacagataacatttaccaaacttagtgtgttcrttttcccttgctttgatgtttgtttgtatttgatacctacttgttttttcatttgtcttcctttgggcctttggcccacttgcgaggaaattaaagaaggcacaaaattttactttaccgaatctgaccagcacagttccagtgtactaatggcccctaatgggggttt

SEQ ID NO: 262976 - DNA, 562 bp, Homo sapiens
aaaaaaaaaagaaaacaaaaataaaaacaaaatctttacttccttaattaattaaattctcaggcatttaaaaatgttttacttatcaaaggacatagattttcagtggtggtgatattgctcctaaggggacacaatccacccccccaagaaacaatgtattaagcagaatcacatacatagtacataagagatatacagtatatctgtagtgttgcgatttcattgggggtggggtacttagggaaaaaaaagtctaaacagtttccttggagggtaaaataatgagaaaatgattgagaaatactgtcatagggcataatgactatttaataagagaaagcatgtaaagcatttattagagtgctcaatgaaacatatgcacttagtgttagctattattataaataacattattattgtttcctcaaccttatactctttcttcataaacaagcaatttttaaattggagtttgcagccctttgagggatcagcacacatgttctyacgtgtgtctgagaagtttctctgaaatttgttgttttattttgtgctttca

SEQ ID NO: 262977 - DNA, 621 bp, Homo sapiens
tgcagccacgggattttcagagttacaaagggtcttgtcaatttttggatccaatacactcatttttttttacattaattaatgaaatcaccatctgtttattgaatatgagtcattgtgttasgtgctaaaagatgcaaagataaatgagaaacagttattgtcaaggaacagcagtagaaagacatgcacaaatagctagaatatgaggtatcattttgttataaaacatgataaaatgtataatatatattgcatgttattattactttttatattgggcctgatttatttcagtatccccacatatagcacaattgtttcacatggtgtatttgctcaataaatactgattaaatgtgaaaaatagaaaggatataaaccaaatgcttgggcaggacttttcttttttattttattttattttttatttttatttatttatttcatatatttttattatactttaagttctagggtacgtgtgcacaatgtgcaggtttgttacatatgtatacatgtgccatgttggtgtgctgcacccattaactcatcatttacattaggtatatctcctaatgctatccctccctgctctccccacccgacacaggccccggt

SEQ ID NO: 262978 - DNA, 634 bp, Homo sapiens
ctgttgttggccaaagattcatctgatgaattcagyttttctgaagtagatgattctgatgattcagatgtttctgatgttagttttgtttagaaataactccaagaacagtttttatattttattttcacattgaaaatcagtcagatttgcttcagcctcaaataactgtttatgtaaaattaaatgagtgttggctgtgaggtacatgtttgtttttttttttttttcctagatgagaaaagcattaaaaagagtctggcttcttgatctctctctctcttgcttcctctcttgccacgtgatctctttgcacatgccccctcccctcctgctttttcccatgagttggagtatccagaggtcctcaccggatgcagctgtcattcatttttggacttttcggtgaccagaattataagcccaataagtgtcttttctttataaattacctggcctcagacattctgttatagcaacagaaaatggactaagacagttatggaaggcaaatattagtattctaagctgcctttatacttgaattgttgaagatttagtctgcaagttaccacaactgtattcttaacacatggcagtcagacttagtaaaattaatatttaagttagtcat

SEQ ID NO: 262979 - DNA, 542 bp, Homo sapiens
ttattttactgattttccctttaaaaaaaactgagccacaggctgggcacggtgggtcacacctgtaatcccagcaatttgggaagccgaggtggccgatcacatgaggtcaggagtttgagaccagtttggccaatatggtgaaaccccgtctctactaaaaatacaaaaaattagctgagtgtagtggcatgcatctgtaatttcagctattcagatggctgaggcccartaatcccttgaacctaggaggcagaggttgcagtgagccaacattacaccactgcacaccagcctgggtgatggagtgagactctgtctcaaaaaaatcaaccagccaaccagacaaacaaacaaaagccaaatcaaaactaaaacccaactgagccatggaatttttctttaattggaaatatatgaaagtggaagataataatttcagcatgtaccttaggagactggaaatataccttgaagctgtctattacaatagaaggaaactcaatctatgacaccaaaaaagtagagtaaaaacatgtaac

SEQ ID NO: 262980 - DNA, 598 bp, Homo sapiens
cacatgaggtcaggagtttgagaccagtttggccaatatggtgaaaccccgtctctactaaaaatacaaaaaattagctgagtgtagtggcatgcatctgtaatttcagctattcagatggctgaggcccagtaatcccttgaacctaggaggcagaggttgcagtgagccaacattacaccactgcacaccagcctgggtgayggagtgagactctgtctcaaaaaaatcaaccagccaaccagacaaacaaacaaaagccaaatcaaaactaaaacccaactgagccatggaatttttctttaattggaaatatatgaaagtggaagataataatttcagcatgtaccttaggagactggaaatataccttgaagctgtctattacaatagaaggaaactcaatctatgacaccaaaaaagtagagtaaaaacatgtaacataggaataggaataaaaagcaaagaatgagagaaagaaaatgatgctgaagaaatctcttaaaaaatagtgctaaaatgacaactattgcgtggggggccttaagaggaagagattctgaagtcagaaatgtggtattaggagcttttagtctgt

SEQ ID NO: 262981 - DNA, 598 bp, Homo sapiens
cacatgaggtcaggagtttgagaccagtttggccaatatggtgaaaccccgtctctactaaaaatacaaaaaattagctgagtgtagtggcatgcatctgtaatttcagctattcagatggctgaggcccagtaatcccttgaacctaggaggcagaggttgcagtgagccaacattacaccactgcacaccagcctgggtgatggagtgagactctgtctcaaaaaaaycaaccagccaaccagacaaacaaacaaaagccaaatcaaaactaaaacccaactgagccatggaatttttctttaattggaaatatatgaaagtggaagataataatttcagcatgtaccttaggagactggaaatataccttgaagctgtctattacaatagaaggaaactcaatctatgacaccaaaaaagtagagtaaaaacatgtaacataggaataggaataaaaagcaaagaatgagagaaagaaaatgatgctgaagaaatctcttaaaaaatagtgctaaaatgacaactattgcgtggggggccttaagaggaagagattctgaagtcagaaatgtggtattaggagcttttagtctgt

SEQ ID NO: 262982 - DNA, 466 bp, Homo sapiens
ctctccagaaattactctcatccaagacagggaggttcagggagcggggagccacatgcagtgastagtttaggcaggggtacaatttgggacaattctgaagggtcattttgggtccagagcgccccatggagtttgcagagtcccatgttgcaactacatcatagaccaccttctctctgtccagtttgccttctctccttgcctttcataaggtgatcccacgggtattttccaataaaccacctgcactcagaccatctcagaggctgtttaccaaggaacccaacataagacagcaaagaaattggaacaggatgctgttttggcagtggccatggatggaccggatgccactgttaggcaagtcatcatcttcctgggaatctcagccattcttaaaggggagccttcagctgacagttaagagatatgcactggttttctgtttggggacctagtctaa

SEQ ID NO: 262983 - DNA, 520 bp, Homo sapiens
tcctctttttcttaacttgcactagtatgttgaagtatcccttccacagatggtgttgtatatactctcgttgcctacaacatccatatcccctgccatcttgctagaagtaacccaaattggggtggtagtttgccaagtaaaatagtttccccataactaggggtggcttcacggtagctgtaaccaaggaagtgtatattgatatctgtgggagttctgggaaaacttagctgacattgcagtgtttggaactgtagcaggaattttgtatctcttagataatacccttgatgatgaaatctagcatgctggaraaggtacagcagaatgatagaaacaactttgttccctgtggtaatactgagtagttgaactaatgtcaacaattccttacctccttactttacattaagtgagaaaaatgaacttgtttgtttgagtcatttttcatgaggtttgcctttatattctgacagatgcaggtggtttaaaaaactgtcaaccatcctggttaccc

SEQ ID NO: 262984 - DNA, 552 bp, Homo sapiens
aaatggcctcagttagtcatccttcctttaaaattatactagcaacaatgaaaggggcttttgttgggaatctccaaaaacttctaaaccttgaccctccagggtcctgggaaaatgaagagatgtaggatgtgaaaagatgaaggtgtttgctttaagatagtcaggtggaaatagggttagagaaagtgatttgaacccagtggcttttcctctttacaaatgtgtaaactaaaatgatttgaccaggtgagagacattttcttgggaaatattttcccaagaaaatatcactgtttaatgaatttaaatcactgtttaaattcatatgagttggtagyctggcattgttaagcagatgacatttcgacagagttgctgtgggtgggtctggagttgcctgggtccacctcaatgccataagggaagagtgcttggaggcttttgggtgaggtattgtcagtcactggtggacatgtgccttctccatggtgcttgctcccattgcagaagggttcagccgtgccgtcgcagatgccagtgccctcaggg

SEQ ID NO: 262985 - DNA, 488 bp, Homo sapiens
gatgaaaggttgaaatgcatgcactgaaaattgaagaggtactagaagaacataagcagagacttttttctaytctggataagagaaatcggcttaatattaggatatgctgaatcataggaagcgatggatcaatttgatcttctctgttcttgtatgatggaaaaaaggaaagagaaatctcctatatgttcatacaagggtaactacatatatgccactccatacctgtggagttatcccatctgtgacctcttttcattcagcagtttcatagacaacattgccatgccaatgagagcatcaggacttcctcgagatgtcagtgacagtttacttgaccaattccatgttattcttcctcatttcttcactcatataaatgattagataaacagctttgagtataacacctttagaatgtgtgcagtttcttaggttaaattctgggaagtcttaggtgaaagactctgctgcgtttacattca

SEQ ID NO: 262986 - DNA, 575 bp, Homo sapiens
atgttattcttcctcatttcttcactcatataaatgattagataaacagctttgagtataacacctttagaatgtgtgcagtttcttaggttaaattctgggaagtcttaggtgaaagactctgctgcgtttacattcaatacatgatgtgcaattgcccttcatttccatactactagaggctaccaagtgcttgagccccctcaccctactaatgaagtttcagtcaatctttccaaatcttttatagtctgactaacaaaacaatttccttttatattaatcattatcatcatcgagacagaatattggtgactcacctaatcctstccttggctcatgtttttttttttttttgtggggatgttgtattagtctattttcatactgctataaagaacttccctgagactgggtaatttacaaaggaaagaggtttaattaattcacacttcagtatggctggagaggcctcagaaaacttacagtcatggcagaaggggaagcaggcatgtcttacatggtggcaggtgagagagagcaggggaaactgccacttataaaaacatcagatc

SEQ ID NO: 262987 - DNA, 547 bp, Homo sapiens
gtctgactaacaaaacaatttccttttatattaatcattatcatcatcgagacagaatattggtgactcacctaatcctctccttggctcatgtttttttttttttttgtggggatgttgtattagtctattttcatactgctataaagaacttccctgagactgggtaatttacaaaggaaagaggtttaattaattcacacttcagtatggctggagaggcctcagaaaacttacagtcatggcagaaggggaagcaggcatgtcttacatggtggcaggtgagagagagcaggggaaactgccacttataaaamcatcagatcttacgagaactcactcattatcacaagaacaacatgggggaaactgcccacatgatccagtcacctcccagcaggtctctccctcgacacctggggattacaatttgagatgagatttggatggggacacagaaccaaaccatatcattctgctcctggcccctcccaaatctctttccaacattcccccaaagtcttaacccatgtcagcattaattcaa

SEQ ID NO: 262988 - DNA, 547 bp, Homo sapiens
gtctgactaacaaaacaatttccttttatattaatcattatcatcatcgagacagaatattggtgactcacctaatcctctccttggctcatgtttttttttttttttgtggggatgttgtattagtctattttcatactgctataaagaacttccctgagactgggtaatttacaaaggaaagaggtttaattaattcacacttcagtatggctggagaggcctcagaaaacttacagtcatggcagaaggggaagcaggcatgtcttacatggtggcaggtgagagagagcaggggaaactgccacttataaaaacatcagatcttacgagaactcactcattatcacaagaacaacrtgggggaaactgcccacatgatccagtcacctcccagcaggtctctccctcgacacctggggattacaatttgagatgagatttggatggggacacagaaccaaaccatatcattctgctcctggcccctcccaaatctctttccaacattcccccaaagtcttaacccatgtcagcattaattcaa

SEQ ID NO: 262989 - DNA, 427 bp, Homo sapiens
tatgcattacacatgagcatgtatcttattaaacgcaaatcaaattcttgttcaaggctggtcacacaaatgtgatcttgtttttaattgttaaatgccagtgaatggctattcctggaggaagcttccctttggcttattttaaagtagatgatgtaaaaatgattaacttaggaatcaagaaaatatgtgaaactacaggcctggagccagtytccttagtgagagcccaataagcccttaaaaatatgtgctgtcattgcaaagctcatttttccaagttgggctccaatatttggctaagaactttcttttctttccatgtttgctctacacagaatctggggggtattaagattgatgagggaatcagagcttgaggtttgggagccagcgttagcacttctgggtgatgacaaatcatgtc

SEQ ID NO: 262990 - DNA, 631 bp, Homo sapiens
aaataagctatcactctgaaatattttaggctgattttactgcacattgtaaattactgatgtgtaaatcagtgacttcactcatcacacagagaaactgtggcacatggcaaaagctatgttgtaattttttttttttttttttgagatggagtttcgctcttcattgtccaggctggagtgcagtggcacratctcgggtcactgcaacctctgcctcccaggttcaagcgattctcctgtctcagcctcctgagtagctggggttacaggctcccaccaccacgtctggctaatttttgtatttttagtagagacagggtttcagcatgttggctaggctggtctcaaactcctgacctcaagggatctgcccaccttggcttcccaaagtgctgggattataggcgtgagccaccgcgcccggccgccatgttgtaattttgactcattaacaggttgtatgaaatcgggatatttgtatttaactttcttcccaattgtaatgtgtatctctgacttctctagatgatctgtttccatgcaggttatggtaaaattattaaactatgagtttttgaaggtctatacaattagatccttactttgttcaaactgtgaagattttaat

SEQ ID NO: 262991 - DNA, 631 bp, Homo sapiens
aaataagctatcactctgaaatattttaggctgattttactgcacattgtaaattactgatgtgtaaatcagtgacttcactcatcacacagagaaactgtggcacatggcaaaagctatgttgtaattttttttttttttttttgagatggagtttcgctcttcattgtccaggctggagtgcagtggcacgatctcgggtcactgcaacctctgcctcccaggttcaagcgattctcctgtctcagcctcctgagtagctggggttacaggctcccaccaccacgtctggctaatttttgtatttttagtagagacagggtttcagcatgttggctaggctggtctcaaactcctgacctcaagggatctgcccaccttggcttcccaaagtgctgggattayaggcgtgagccaccgcgcccggccgccatgttgtaattttgactcattaacaggttgtatgaaatcgggatatttgtatttaactttcttcccaattgtaatgtgtatctctgacttctctagatgatctgtttccatgcaggttatggtaaaattattaaactatgagtttttgaaggtctatacaattagatccttactttgttcaaactgtgaagattttaat

SEQ ID NO: 262992 - DNA, 598 bp, Homo sapiens
ttaactttcttcccaattgtaatgtgtatctctgacttctctagatgatctgtttccatgcaggttatggtaaaattattaaactatgagtttttgaaggtctatacaattagatccttactttgttcaaactgtgaagattttaatccaacctctttctttttttaaaactcaacttatttttgtgttccttctaacacagctaatctgttttctttatgtagaaatcagtgagctactgtggatcacagaagcccttttcctgagaaatttcagatgatttcttgttgttgtaactaatagaatgacgtacaaagtatrctaactgagaaagaaaggtggatatacaagaggaagaatagcgagaaactccatgctcctgacccagcgtctagtaactttgggtattagtaagcaaaccatttgttgtctgtatttctgcctggacactgtggatgcagtgaggggtacatcatgctgtatatttgatatggtttggatttctgtccccgcccaaatctcatgttgatttgtaatccccaatgttggaggaggagacttgtgggggatgattgaatctcgggggtggatttccccc

SEQ ID NO: 262993 - DNA, 521 bp, Homo sapiens
tatatatataaagtgccaactacacagcttgacgccatcacaaatattcttttttttctatagagtgcctgacacctacactattttgcagtttaagttcaggctttccattttaaatgtgagtactgctgacagcctcatggaaatgttgtgccatttgtccctaagtgtgttttataataacggatttgaagaccgggcttatcagagggaggagaagatttgtatacacatctagtccggacctttagtttttggagttgtttgttttctrtataaatttaaaatggaaaattatgctcctaacctttaggtcacacagagaaaagaagttttattagtgagaggtcattatttgaagtgtataatggatagtctgtttacctcagattttagcctcgagctaaaattttgtttgtacttgtaaatgaatagcaaaaagagtagtgatgaaagacagagtccaggataagatgcgtatcacacacaagggaagtatgatcagctgtaggctgctgtat

SEQ ID NO: 262994 - DNA, 494 bp, Homo sapiens
agaagaaaaaactttacattaaattaggtaaaattgaaattacataaaggcaacatataacatttaaaaatcaaccatgactttggaaaaatagattttttattataaataaattataaatattatcagactatraacagaatatctacaaataataagaaagataagattctaaatttgggcaaaaattttgatctggcaaatgtcaatatcagaaatttaaatgatcagtaagccaagaaaatgtaaagaaaatgaaattcattattttgaattgcctaggttaaaaaatcccaaattatgttttcaaggttgtaaacaaattttatttgacaacgactatcttcatcaaatacatgttgggaggatcccaaaactccaatttagaaaaccttgacctaaagtaatctattatgtatatacattaaacaagaatgaatgattctttgatcatttgtataatttagaaaataattttaaatattaaaaaacta

SEQ ID NO: 262995 - DNA, 576 bp, Homo sapiens
tctacttgcattcagattttagtgtatccttcatttgtggaattacatgaaatcccacagctatctgtttctaaaatatttgattctctaayaccatgtctgctttactcagagttggagccccaatgcctgacatggtgtgtgtgaaatagtaaacaacgcttacatgataagtgaatgtctatattgtttatacattttcttttctctttatttggttttcttgatattttcaagcttagtgtaataagggcatttgtatactggacttttggatcctaagccaaaaagcaacatcttcatctttcagtgccctgatttttttctcttggaaactaagatcatgatagttaaattatccttgtagaaaggtgcaattttagccagccctagctcctaacatttactcttttcagttaaacattttggagtggaatcaggaggtgtttgctttgtaataaaatgtgtaaaattcactaacccaaagtccaactgcattttattaatatagaaaatcaagttgaatattaagagtctgaatatgtttttgcctcttgaaattcttttgaattatca

SEQ ID NO: 262996 - DNA, 576 bp, Homo sapiens
tctacttgcattcagattttagtgtatccttcatttgtggaattacatgaaatcccacagctatctgtttctaaaatatttgattctctaacaccatgtctgctttactcagagttggagccccaatgcctgacatggtgtgtgtgaaatagtaaacaacgcttacatgataagtgaatgtctatattgtttatacattttcttttctctttatttggttttcttgatattttcaagcttagtgtaataagggcatttgtatactggacttttggatcctaagccaaaaagcaacatcttcatctttcagtgccctgatttttttctcttggaaactaagatcatgatagttaaattatccttgtagaaaggtgcaattttagccagccctagctcctaacatttactcttttcagttaaacattttggagtggaatcaggaggtgtttgctttgtaataaaatgtgtaaaattcactaamccaaagtccaactgcattttattaatatagaaaatcaagttgaatattaagagtctgaatatgtttttgcctcttgaaattcttttgaattatca

SEQ ID NO: 262997 - DNA, 615 bp, Homo sapiens
tgccaccattgctgatgataaatcagaccatcctctgagtttggggtgagagtttgggattccctgctaggtccttgttgggattccctttttccaggcctttggcctagaaagcagataactccaaagataagatatatagacaccgtcacaaactgtgtgatcttacaaagattgctgattttcactaagatttagtttcagtgtctactaaacagtgaaataatagcaccttccttataaggccattatcaagattcaaaccagcattacaagaaatgccaaagagagttctaaatattgaaacaaaacctcaaaatacaccaaaggagaacctctttaaagcataaatttcacatggtstataaaacaacacaatggaaaaaaacaaggtattcaggcaaaaactagcacaatgaatagaataatacctcacatctcaacactaacattgacttcaaatggcctaaattctcacttaaaagatacagaaaggcagaatggataagaattcaccaaccaagtatctgctgtcttcaagagactcacctaatacataaggactcacataaattcaaggtgaagaggtggaaaaagatattccatgcaaataga

SEQ ID NO: 262998 - DNA, 523 bp, Homo sapiens
aatggaaaaaaacaaggtattcaggcaaaaactagcacaatgaatagaataatacctcacatctcaacactaacattgacttcaaatggcctaaattctcacttaaaagatacagaaaggcagaatggataagaattcaccaaccaagtatctgctgtcttcaagagactcacctaatacataaggactcacataaattcaaggtgaagaggtggaaaaagatattccatgcaaatagacaccaaaagggagccggagtagctattcttacatcagacaaaacagactttgaagcaacaacagttaaaaaagacaaaaaccaagaaggacattctgtaatgaaaaaagtactagtccaacaggaaaatatcacaatcctaaatatatatgcagctaacactgaaactccaaaatatataaaataactacaactagacctaagaaatgagatagatkgcaatacaataatggtggaggattcagtactctatattggaggatactctactgacagtaccagata

SEQ ID NO: 262999 - DNA, 381 bp, Homo sapiens
gacgtggtggtgggcgcctgtagtcccagctactcgggaggctgaggcaggagaatggcacgaacccaggaggcrgagcttgcagtgagccgagatcgtgccactgcacttcagcctgggcgacagagtgagactccgtctctaaataaataaataaataaaataaaactgacaaattctagccttgcccagcaagttgtctcttggacaaacatcctttgtagggcatcaaaaagatgatagaacctatggttgtagcacaagttggaaaacaacagttcatgggtggccatgtgtttttctgaataattttaacaggacatatccgtgtccatttgtttacatattatctatggctgctgttgttctacaacagtagag

SEQ ID NO: 263000 - DNA, 594 bp, Homo sapiens
atataatatttttgttgttttgaggttaatacatttttcctacctgagttctatcaggataaaacttttttccagtctagacaattacatatatattttatgtttattcataccttgcttacttgcttgttttcttcaatccagatccatagtgaattccttctccaaaataagtaatgatgktggaaatcagttaagaatcgaggtcagcagaatcgaggacaacatttttcatgttgtctcactgataagatttaagagatgaatcatgataatatccaaagatgacttattgatttgctattctaattaagttagagctcttaaatttcactaaaaactaaaccgaggccatattgaaaggttgaacattttatgttctttttgattacatacgctatcttcaaatgtgcatattactcttaatatattgcttttacagaatagatacctgtgtaaatgtctataaccatgaatatatattgtatattttcaaatatcaggtaattgagagacatcaattactatgtatgtatgacagaaacaaatacaacaaccttcacctctctgtgagcacattcaggctttttaaat

SEQ ID NO: 263001 - DNA, 536 bp, Homo sapiens
agtacacaacagtcccacagctagaatcatgctgaaagtctttccaacaaaaactgaaagccttttctctaagaagtagaacatgacaaggatgcccactgtcatcacttttattcaacatagtactggaagtcctagctagagcaatcagacaagagaaagaaataaagaacgtccaaataagaaaggaaaaagtcaaattatccctgtttacatattgatatggtttggctctgtccccacccaaatctcatcatgaattgttatttccaatgttaggaaagggacctggtgggaggtaattggatygtggaggtggttcccttatgctgttctcatgatagtgagcaagttctcaagagagctgatagtcttaaagtgtgatacttacttgtgccatctctcttgctctctcctatcatcatgtaagacatgccttgcttccccttttgccttctgccataattggaggttttctaaggcctccctagccatgtaaaatttgagccaattaaacttcttttctttataagtta

SEQ ID NO: 263002 - DNA, 627 bp, Homo sapiens
tttcatactcaattgagatcttctctgtcattttcttactgtgttggaatctaaaaacagtttaccctccaaagcaatttacaacagcacggatgagcagttcctgatctgacaggcttgttgtatattatacctatttatttgcaaagaggcatgagtggttcattattcatgaaatcataataaaaaatatatttatggcatgtcacactgtacctcatattgaaktattcactcccagaaaagcactagattctgtgtttcttcctgttagcagcttatgatctaaaacaattctttaagccacaagggagaactaagctcaacactttatataaaagatgtgcactacataagatacagcaagaagaaaaaatgccaaactgtcaacactccttcagtttataagaagctcagcctcatgtgtgatgtggatgattacttgggaggttcagaggcactactacatagattatgaattagtgttgtgttcgattaaaataaactctaatttttcaaatatggtatgtgaaaatagctaccatcccaaaagttattcatatcctaatatgcagaattggtgagtgttacctgataaaggaaacaaaaaataattattgcctagat

SEQ ID NO: 263003 - DNA, 526 bp, Homo sapiens
gaattggtgagtgttacctgataaaggaaacaaaaaataattattgcctagattattcatgcgggttcaaaatataatcacagatgtcctcataaagggagccatataatttttttataattatatacatctaaggtgtacaacatgatgttttgatgtcatatatatagcaaaataattacactagagccaattaagatattcatcatttcacacagttgctttcttgtgtgtctgttaagagcccctaaaatctactgttttcacaagttttcagtatgccattcaatattaaagtagtccttaaatatctgcagggcttattccaggatgctcccctgcaacccatgaagatcaaaatactcaggtgctcaagttccttacataaaatgtagtatttgcatatarcctacatacatcctcctctatactttgaattacatgtgattacaggcatcttcttggtagaataatttatttccctttgggtatatacccagtaataggattgtggggtcaagtggta

SEQ ID NO: 263004 - DNA, 530 bp, Homo sapiens
atctccttaacaaattgtcttattttttctcctttcttttttgccttacttttcatcatttcttattctctggaattacacttcctataaaaatgtgacataagtatttgcttcagattggcttcattgggattccaggccaggatgctctcttgcactcattttgtttatgttgtttccttttctttcatatggtatttattcctctttatctttawttgtattcatagagcatttaatcttgtgctaatcttttacaaaaaacaggtcttaaattattaattttattgtagtttagttttctaattcaactgcttctttattgatgttgtactgggttcattttgtttttgtttataactctttgaacagcaaacatcatttattttcttttttttttggtaatgaaacaagtacgtaatgctgtgaatttattttggtcctgctttagttacatcacataggttttgatatcaaattttaaatgaacgtagttttcaaaaaaatttatacatttcttctacaagcca

SEQ ID NO: 263005 - DNA, 530 bp, Homo sapiens
atctccttaacaaattgtcttattttttctcctttcttttttgccttacttttcatcatttcttattctctggaattacacttcctataaaaatgtgacataagtatttgcttcagattggcttcattgggattccaggccaggatgctctcttgcactcattttgtttatgttgtttccttttctttcatatggtatttattcctctttatctttaattgtattcatagagcatttaatcttgtgctaatcttttacaaaaaacaggtcttaaattattaattttattgtagtttagttttctaattcaactgcttctttattgatgttgtactgggttcattttgtttttgtttataactctttgaacagcaaacatcatttattttcttttttttttrgtaatgaaacaagtacgtaatgctgtgaatttattttggtcctgctttagttacatcacataggttttgatatcaaattttaaatgaacgtagttttcaaaaaaatttatacatttcttctacaagcca

SEQ ID NO: 263006 - DNA, 575 bp, Homo sapiens
agataaatacattgtcataattttcttcatggaacaaaagaaatgatgctggaaactatatactgatgatataagccagttttcttaaacctgaacttctaaaagacacagtgttgcatggagagatttgtgtcccagatgttaaatgatctaaaatatagtccagcttttgttaatatctatatgctcttggccacattgttgtgcccctctaaaatctagtttcctgtaaaattcagtttaaattagakagaatgtgtaagacactgtctgacatcaaaaaaatatatgtacagtcaaaaccaaaaactctgatatatgaacttgatatatggtcattatgggatttcttcattgtacaaacatcatacaaggtacttagaaaaaactagatggtatagcctactacacacctaggctatatgatacagctcctgggctacaaacctgttactgtaatgaatactgtaggcaattgtaacacaatggtaagtgtgtatctaaacatagaaaaagtatataaaaatacaatgttataagcttatgggaccactattttatgtgcagtccatcac

SEQ ID NO: 263007 - DNA, 572 bp, Homo sapiens
ttggtcatgctggtcttgaactccagacctcaggtgatccgcccacctcagcctcccaaaatgctaggattacaggtgtgagccaccgcrccccctatctttttctcttgagatgctcatctatgcctattagttcaacacaccagctatacacattcccaccctagactactcctttgcacccaagatctatgcataggaaaatgtattgtgatttaaatatcacatagaaacttcagacttaacttgctaattcttcatctataacccatgacttgcaactgcactgaacatgaaggaaacatataatttatatcaactcactgacttattgaatgacacccctgaacctgctctgattttaaaccctaatctctattccttatcttggttaacacaagggagacaccacccccttgaaattatcctaggctccaaatattactttttatttctcattgtaaaaattgtctctccttttcaataagagattttcctcaaatttctagaagaatttgtcttcctatatctatttaagaataaagcacaaaaatctatctggaagctcagtg

SEQ ID NO: 263008 - DNA, 572 bp, Homo sapiens
tacaaattattttgctttagcaatctaaaaaaaaccctgttcctataaaagatgagttattaactctgggaaccctggagctttttttctcccattatatgattatagagtatcccattttatgtagattatgcgtttgaatttttccaatgaattctcttccctaaataaaaatgtaacaatctcctggaagaagcatgataatactgtaatttctatgaacgactcatctattgaaagattttatttttctagatcaaacaaaaaaatgaagcactttacttagtgtctttcacatactaggtactgaataaaatgtctgaacaaacaaaatacatgggaagaaagaactagatctaagaagagaataattctagttaatgctgcatggttccatcttcatgratattatatcaaccacttcaaaaggaaaagcattttatttctgttttccaccaagagccttggataaaggagtgtccacctgaaatttgtgtgcagccaaaaatgtaaaaaaaaaaaaaaaaaagaaatcttggttatgtctgagtgttgaataggctttgcatgtg

SEQ ID NO: 263009 - DNA, 526 bp, Homo sapiens
catgagcatcatgagagaacacccaatagttattttgctcccaagacgtccagaggaagtgttaaaagtcaaataggtaccaaagggrcacaacaggtacagggtggactgtgtggctggaagccacagaagagtctcaggaatcagccatgaagatagtaagaccaaggtcagtgtccaaagcctaggctggctaagccacatctctccagtgcaatgcaggcagggcccaatgactttgggccaagcactttcacacttgtcgtgagagcacataggccaccacgccaagggatgaaagacaaaaaggcccagagaaaaatgagacaactggaaggtatttactccaaatgttttgtttgactaatcaggaatttgactacattttcctaaatgtgactagatcgttttctatactcaggcaggaattaggtttcaaggaaaaaaataagttcaactatgacaaaataaagtggactttgaacctctgaattttttgactgaaattgtactattaacttttaaa

SEQ ID NO: 263010 - DNA, 526 bp, Homo sapiens
catgagcatcatgagagaacacccaatagttattttgctcccaagacgtccagaggaagtgttaaaagtcaaataggtaccaaagggacacaacaggtacagggtggactgtgtggctggaagccacagaagagtctcaggaatcagccatgaagayagtaagaccaaggtcagtgtccaaagcctaggctggctaagccacatctctccagtgcaatgcaggcagggcccaatgactttgggccaagcactttcacacttgtcgtgagagcacataggccaccacgccaagggatgaaagacaaaaaggcccagagaaaaatgagacaactggaaggtatttactccaaatgttttgtttgactaatcaggaatttgactacattttcctaaatgtgactagatcgttttctatactcaggcaggaattaggtttcaaggaaaaaaataagttcaactatgacaaaataaagtggactttgaacctctgaattttttgactgaaattgtactattaacttttaaa

SEQ ID NO: 263011 - DNA, 526 bp, Homo sapiens
catgagcatcatgagagaacacccaatagttattttgctcccaagacgtccagaggaagtgttaaaagtcaaataggtaccaaagggacacaacaggtacagggtggactgtgtggctggaagccacagaagagtctcaggaatcagccatgaagatagtaagaccaaggtcagtgtccaaagcctaggctggctaagccacatctctccagtgcaatgcaggcagggcccaatgactttgggccaagcactttcacacttgtcgtgagagcacataggccaccacgccaagggatgaaagacaaaaaggcccagagaaaaatgagacaactggaaggtrtttactccaaatgttttgtttgactaatcaggaatttgactacattttcctaaatgtgactagatcgttttctatactcaggcaggaattaggtttcaaggaaaaaaataagttcaactatgacaaaataaagtggactttgaacctctgaattttttgactgaaattgtactattaacttttaaa

SEQ ID NO: 263012 - DNA, 593 bp, Homo sapiens
  misc_feature (1)...(593): n = A,T,C or G
gaaacgtgaagtaagaaaatgagcatggaggtagaaattactattttacatgaggcgatctgggaaatcctcacctgtaagtcaatgcttgaacaaggacttgatggagagaagaaaacaagccattcaaatacttcgggaagaacagtccgagcacagagggcatccagtggaaatattctgaggtgagagtagacttggcaaatataaggaatggcaaaaggaccactgtggctaaatcagaaggagcaagggagcagacagtgggaatgggggtcacagaggtagcagactaaatcttagagttaacttcatacaatgaatgcaagaataagagttctttgaagagaaagaaaacgagatgacaagaacagaatctatggaaatgcctgcatttaggtagtggaaaaacataaagagaaaagaatgttaaaggaagatgacaggagaccccaggagaggagagtctccgtaagaaaatgtaataaaagaggggctgttcaacagtcttractactgcctagtgtcaactgttttacagtttgcatgaaaaacaggaactggtagaggtccggcnnnnnnnnnnnnnnnnn

SEQ ID NO: 263013 - DNA, 507 bp, Homo sapiens
agggtagctaaggtgggaggattgcttgagactgggaggcagaaagaaattgtagtgagccaagatcataccactgcattccagcctgggcaacagggcaagaccttgtctcaaaaaaatgggattcattcatttaacaaatattgattagttactgggtatcaattatgtgcttaacagtaggctaggctctacggcaaatggaaaggaagaaggtataatttcccctctccaagagcctgcaatctggttggcaagtctgcatacatttatataccaagtacaatctagactgtggacaggaccagcatgttttatgctcctggatatgtttcaaggaaacttkggggatctcatagcaaatcatcccaaagcatccaaaaggtgcaacataaatattactaagttcttcccaatttgctacttctctattctcctcttccaaagctgttctttcttgagcattttatactttaagcccatttattttaatgccaaagaatgcag

SEQ ID NO: 263014 - DNA, 610 bp, Homo sapiens
aattgaaattcaagactgaaattcaagactagagatttaaaaaaactggctgtcatcagcacataaatggtatttaagagaagaaatctaagccctccagacatcgtcactcagtcttctttgtcctctggcttgttgttggatttcgtcaatgggtggccctttcaggagagaagaaagaagagaaaagcaaggtctgggttttttccccatcagctcatgttaggcagcccctctgctgtagtgagaggtttcactgggttctcgtcactgctccttcccagcccctccaggcctggggctgatggagtgtcagttgcttctcactgttaccagccctggctgctgtatcctctcattggctcccttgaccctgtccactccgtttaactctcttcagttactgcttcagagtataacatctgtttcctaccaggaccctaatgacatagcagatctggtaaaaatakttggaaagcagtggcacttgagtcctgatgccacatctattgtcgatttgtgataaccattttgataattgataattatcatgattcctatatggttattgaaattattatttttattctcatttaatttaattaatttt

SEQ ID NO: 263015 - DNA, 528 bp, Homo sapiens
atccaaagctgctctctgcgatcccttcacttttaactctcagtctgcactttttttttttaactgagcrtctattatgtgctaggcactgttccagtgctcggggacgcagctgtgaatgaacagaaacgggggatggaggacaggggagaaacccccttcacgggccttagatggcagggggtagggaaggagagacagaaaataaacagaaatatctgtccccagctgccagaggaggaggaaatgggcttggtgatggtgacattaagttctttgaaagctgggtttgttggcctctgaactctggcctttgtgggatctgttcttttggaaaagatgggagcccctgtgttcctagatcccagcctggccgggtggagtagggtggggaggtggtgtccacctgtgtggccccgttctcactccctaacgcccgtcccttctcccccaggtgaggggccttcccatcccaggagggttttctgcttccaaccgatccaggacttacccataaattccaaccgt

SEQ ID NO: 263016 - DNA, 577 bp, Homo sapiens
gggagaatctcttgaacctgggaagtggaggttgcagtgagctgagatcgcaacactacactccggcctgggtgacagaggctccatatccccccccccaaaaaaaaaaaaagagagagaatggaatgagtgaaatgacccagggacaagcaagatgcatatagaagtacaaaggaaataaaccattcctggtcctgcaatacaatacccagcgtcctacatccttccttccttcttcgctctccaytgcttccaacccactgtctcatacctggcaacagtgcatcaagcctgtggttgtatgaagcggggtctaaagcctagtttctctgtatccactgtttaaccttaagcaaaaacaatgggtaagacctgtttgatagcacagtggggtgactatagtcaacagtaatttaattgtatattttaaaataactaaaagagtataattggattgtttgcaacacaaagagataatgcctgaggggatggatactgcattctccatgatgtgattactatctattgcatgcctgtatcaaaacatctcatgtaccccataaatatacatacttac

SEQ ID NO: 263017 - DNA, 579 bp, Homo sapiens
aacatgcagctgctctaaaaaggagctgagtgtttgaatcctttctctacccttccagtcgattaattcatggttcctgacattctacttttccagtcactcttccatctgggtcagaatcttggggctcacgcactttagactccagaagaagctacttggcaaaagccagaaattccagatctcaagcctacttgcaatgaacatgttacatttaaatacccactttatgttttagataatcatcaatccctcccaaagatggatattgttaatatgaggaatatctcacagatgactttggtagatgtgtttcttaattaaagtattactcatttcttctttttcaaagcttttaatttatcatctaacaggcgtagtgatccatggaattacccccctcttgatttttccccctttttacacggatatgcttattaycattcatagcataagccaagtgctatggttattaagtgctgtcatttgtaccctaatgactttgtgcctttcacaccattaaaaaggaagttggctactatgaagcactaaatgaagccccaaacaaagactgaggat

SEQ ID NO: 263018 - DNA, 500 bp, Homo sapiens
aatttcaactgggccccatcccaatctcaaaactgttatagctaaaaactgctccttactcagtacttaatatgtaccaggcagtgtagtaagcctttaaagagatgaattcactcctctaatcattcgtttacatgctggaatatgatcttgctttaaactgcyagtctgtcgatcagggtcatatatttcagggacctaaatcagctcccttgttaccacagtccctggattccctgctgcctgtgctctgattaaggagactccagcagctctgcaataaggattgagttgattaacatctggttgaaaatctcttcgcccatatgaacctgagacaaagccatccaaagagtaattgatggcaaagacccgaagttgtctctaagatggcaactcgagggcttagctgcacagatgagaagattaatagcagagtggccttggagtcacggatacctgcatttgacttccagctttctcattcacatgccaggtaa

SEQ ID NO: 263019 - DNA, 576 bp, Homo sapiens
actcccacaattgccatgtgttgtaggacgaacctggtgagaggtgattgaattataggggcgggtctttcctgcactgttctcctaatagggaatgagtatcacragatatgatggttttaaaaagaggagttccactgcacaagttctcttattttgcttgctgctaagaggtgaagccagctggacttcctgggttgagtgcagacttggagaacttttctgtcttacaagaggattataacatgcaccaatcaagcactctgtagctaggattgtaaaacacaccaatcagcgctctgtagctagctagagatttgtaaaatgcaacaatcagtgctctgtaaaaacgcaccaatcagcactctgtagctagctagaggtttgtaaaatggaccaatcagcactctgtaaaatggaccaatcagcaggacatgggtgaggacaaataagggaataaaagctggccatctcctagccagcagcggcaacccgctcgaggtccccttccacgccatggaagttttgttctttcactcttcaggataaatcttgctgctgctcactctttggttc

SEQ ID NO: 263020 - DNA, 576 bp, Homo sapiens
actcccacaattgccatgtgttgtaggacgaacctggtgagaggtgattgaattataggggcgggtctttcctgcactgttctcctaatagggaatgagtatcacaagatatgatggttttaaaaagaggagttccactgcacaagttctcttattttgcttgctgctaagaggtgaagccagctggacttcctgggttgagtgsagacttggagaacttttctgtcttacaagaggattataacatgcaccaatcaagcactctgtagctaggattgtaaaacacaccaatcagcgctctgtagctagctagagatttgtaaaatgcaacaatcagtgctctgtaaaaacgcaccaatcagcactctgtagctagctagaggtttgtaaaatggaccaatcagcactctgtaaaatggaccaatcagcaggacatgggtgaggacaaataagggaataaaagctggccatctcctagccagcagcggcaacccgctcgaggtccccttccacgccatggaagttttgttctttcactcttcaggataaatcttgctgctgctcactctttggttc

SEQ ID NO: 263021 - DNA, 516 bp, Homo sapiens
gggcacaggagcagagggccggtggagacacagtccctgcccccacagagctcacagatggggcaggcagaagccacagaggccgtggtggtcacgcttcgggagaaaagaaccacaagtcaaaggggcacaaaagggggcaaccaactctatctgggatgctggaaaggattcctggggatggagatgactgagtgggaatagccctgattggaagaagaaagaggaagggagggcataatgagaagggggaaagcatgtggggaaactggcgttgatgctaaaatagcatagtcacgcaggatctgatagcaggatagcagatatgctgctactgcaaatgtaataagaccaagaaaaatagtaagagaggacttargagtagtgatagcaagtatgtattgagcattgattgttctaggcactttgatgcattatatcacgtaatctcacagtaaacctagactgtgtagagtattgctaaccaaatattttagacgagtgaacagaggtgcc

SEQ ID NO: 263022 - DNA, 566 bp, Homo sapiens
gccaggcactgtggctcacgcctataattccagcattttgggaagccgagatggacagatcacttgaggtcaggagtttgagaccagcctggccaacaaggcgaaaccccatctctactaaaaataaaaaaaaaaaaaaaaaaaaaaaagattagctgggtgtggtggtacatgcctgtaatcccagctactcaggaggctgaggcaggagaattgctagaatcttggaggcagaggttgcagtgagccaagatcacgccactgcactccagcctgggcgacagagtgagactmcatctcgaaaataaataaataaataaataataataataataataataataataataataataaaatgtatcagggaacacaaaactccctaaatcctgccttggcccatctaaccctcttcctccacgcacagggacaatggtgaatggacacacagaccagctatgctggtacagagcttgtgccccaaaccccactgcagagaactgtgcagtgtgtgctgggctggaacagagtatctccccaaatttaggagcctctgcatctttcta

SEQ ID NO: 263023 - DNA, 577 bp, Homo sapiens
gggttcctatttccagaacgctttgtacctggaggtcaagaatgaggatgttttctttcagaggcctgctcaaacactgagggtcatttggaagaaaactgaagagagggcctacgaagaggtggaactttgctctgaaaagtcctagaaaaaaaatttttcaatgtattcaagaagggcttagaaattaaaggtcgactggaattatacaggaatttcccactcagytatcttaatgatgttgcatcttaaaatcgctgcagtttgtgcctcactatttgtcaaacatgctattttctttcacaccataacgatgatgatactaatagaagaagttaacatttacagagcaatctgactccaaatttggagctcttattcactaaaccaaaaacatcttgttcaaattaagataataaaagtggtgtatgtttatagagcacctcatgcgtggcagacactgtgctaagcacttgatatgcattaacacatttactcctcataaccaccccatgaggaacagtgaggaaattgagcacagagaagttaagagatttgcctaaagtcacacagctag

SEQ ID NO: 263024 - DNA, 577 bp, Homo sapiens
gggttcctatttccagaacgctttgtacctggaggtcaagaatgaggatgttttctttcagaggcctgctcaaacactgagggtcatttggaagaaaactgaagagagggcctacgaagaggtggaactttgctctgaaaagtcctagaaaaaaaatttttcaatgtattcaagaagggcttagaaattaaaggtcgactggaattatacaggaatttcccactcagctatcttaatgatgttgcatcttaaaatcgcwgcagtttgtgcctcactatttgtcaaacatgctattttctttcacaccataacgatgatgatactaatagaagaagttaacatttacagagcaatctgactccaaatttggagctcttattcactaaaccaaaaacatcttgttcaaattaagataataaaagtggtgtatgtttatagagcacctcatgcgtggcagacactgtgctaagcacttgatatgcattaacacatttactcctcataaccaccccatgaggaacagtgaggaaattgagcacagagaagttaagagatttgcctaaagtcacacagctag

SEQ ID NO: 263025 - DNA, 248 bp, Homo sapiens
aaggagccagccctgttgacaccttgatgttagccctaaagagacaatttcaggcttctgatttgcagaactgtaagagaataaatttttgtagttttaygtaaatttgagttaatttattgtagcaacaactggaaactaatacataccactaatgccactcaacaaatgcttacagagtgcctgcctgctgcgcgccaagcaccgggccaggctttgcaaacacagttgcaagtgagaaagcctgg

SEQ ID NO: 263026 - DNA, 502 bp, Homo sapiens
ttcaagtctcccctcctccagttatagctgtgatttcttaggagagtggcttcatttctttcctaagccttgctttgctatctgtgaaatgaagatgatagcagggcctcctctgtggggttgctgtgaaartatcatgaggctgtgtgtgcagggcttaaggcatgccctggcacccagtacgagccagcctctgttaccagatcagaaggggtgggttgggtggggccctgcctttccatcaccttgcagtcaaacctcccagagctggtttcctccctgatgtgctactgctgtgctgcaaacaggcttaccagtgccctttcctcgtgcttgtactcatttccaaaggcaactgtgggagctgctttatggaacagaagctctgaacagcacaaatgataaacacatgctggtgtttgcattcctctaaccctccaaccatctagtctctgattactaaactgttagcttgttttgggaggttctgccaggaaagtgc

SEQ ID NO: 263027 - DNA, 502 bp, Homo sapiens
ttcaagtctcccctcctccagttatagctgtgatttcttaggagagtggcttcatttctttcctaagccttgctttgctatctgtgaaatgaagatgatagcagggcctcctctgtggggttgctgtgaaaatatcatgaggctgtgygtgcagggcttaaggcatgccctggcacccagtacgagccagcctctgttaccagatcagaaggggtgggttgggtggggccctgcctttccatcaccttgcagtcaaacctcccagagctggtttcctccctgatgtgctactgctgtgctgcaaacaggcttaccagtgccctttcctcgtgcttgtactcatttccaaaggcaactgtgggagctgctttatggaacagaagctctgaacagcacaaatgataaacacatgctggtgtttgcattcctctaaccctccaaccatctagtctctgattactaaactgttagcttgttttgggaggttctgccaggaaagtgc

SEQ ID NO: 263028 - DNA, 606 bp, Homo sapiens
acaatattatataacacatctctgtaacgtttttgtcttgcaactctaaaactctatacccattggagttgtctatgctttttgtctctaattctttccttctattctcatttaaatttagtccaagcaaactcctgcccccacattctaccaaacccactcttgtcaaagtcaacagggacccccctcccccaacaaagttaaatccagtgatcagctctcgatcctcatcatcttgatacagagacccccctccctctactatgatgcttccttcagttggcttctaggatgcccttccttgcttgttagtctccattgttggttcttctccttgaccgctttatcttgcaatgtcccagggcyccgtccttgggactccactctgggacatgttggcatctggactgggccaggttattctttgacatggttggagggggacagtctatgcataaatgtgtattgtaacaaaggccaggagctgcctaagacaatattggacatcagatataaacagtaagtttaagatcctagtcagacatagaattaggacataaaaatacaataaatttggggatgtaagttaggggaggtgaaagagcc

SEQ ID NO: 263029 - DNA, 606 bp, Homo sapiens
acaatattatataacacatctctgtaacgtttttgtcttgcaactctaaaactctatacccattggagttgtctatgctttttgtctctaattctttccttctattctcatttaaatttagtccaagcaaactcctgcccccacattctaccaaacccactcttgtcaaagtcaacagggacccccctcccccaacaaagttaaatccagtgatcagctctcgatcctcatcatcttgatacagagacccccctccctctactatgatgcttccttcagttggcttctaggatgcccttccttgcttgttagtctccattgttggttcttctccttgaccgctttatcttgcaatgtcccagggctccgtccttgggactccactctgggacatgttggcatctggactgggccaggttattctttgacatggttggagggrgacagtctatgcataaatgtgtattgtaacaaaggccaggagctgcctaagacaatattggacatcagatataaacagtaagtttaagatcctagtcagacatagaattaggacataaaaatacaataaatttggggatgtaagttaggggaggtgaaagagcc

SEQ ID NO: 263030 - DNA, 606 bp, Homo sapiens
acaatattatataacacatctctgtaacgtttttgtcttgcaactctaaaactctatacccattggagttgtctatgctttttgtctctaattctttccttctattctcatttaaatttagtccaagcaaactcctgcccccacattctaccaaacccactcttgtcaaagtcaacagggacccccctcccccaacaaagttaaatccagtgatcagctctcgatcctcatcatcttgatacagagacccccctccctctactatgatgcttccttcagttggcttctaggatgcccttccttgcttgttagtctccattgttggttcttctccttgaccgctttatcttgcaatgtcccagggctccgtccttgggactccactctgggacatgttggcatctggactgggccaggttattctttgacatggttggagggggacagtctatgcataaatgtgtattgtaacaaaggccaggagctgcctaagacaatattggacatcagatataaacagtaagtttaagatcctagtcagacatagaattaggrcataaaaatacaataaatttggggatgtaagttaggggaggtgaaagagcc

SEQ ID NO: 263031 - DNA, 462 bp, Homo sapiens
tggcaaagagtgccctctgattagtagcgattgcactcatggtaatattagtcattttcacagcaacagccatgccagttgggagttctaatagacattgttttgacttctaaaaaaatcatctttgtgtattacttcggtgatcaaagtttattattcatccaccagcacttgaaggatttagataagagatattgttgagttaatttgtcccttggcctaatggagcctctgaaatataagctagattctcagagtcaccatgaaagcctcacttcattaattgaagaccaatcagagagacgataagaggggagaaaaagaaatctaagctcatcttcccagtagcagtaagacaagagacaggaggtaggaccagaaggggagaaaaattggaagcaacraaaaaggaaggggcaagccatcctgagctctaagatgtagccatttattgtggaaagg

SEQ ID NO: 263032 - DNA, 574 bp, Homo sapiens
gttctgactctctttctgcatggaaatcaaaagtcatttgacctctaattcaatccttcccatyaggatgggatgcctcttccatacaatatcagaataataaaacaatgcagtatcttcagtgtctactgggctcaagtgggccattttcacagcaggccttattgacaaagtcattttaatattgtttagttcaatcaaagaccccagagctggcctccttttgtaaagatgaaccagagcaagacctggctctggttcatttgtgacctgagaagtcccagggaagccaacatctctctggtcaccaggcttccctctagcaaatgtgtgtgtggagaatgctaaatgagaaaaattacataattgcttaacacacttgtaaaaactcagctgtttgctaatcctgctattgtgactgctattatttctctcttatgattattccatcatggttgggggagaattcagggatggagggagatggtcactcatcttttaaaagatcaagtattgagatttttcataacactatcctgtgagagacaaaagtcatagctgaatcttccataac

SEQ ID NO: 263033 - DNA, 574 bp, Homo sapiens
gttctgactctctttctgcatggaaatcaaaagtcatttgacctctaattcaatccttcccattaggatgggatgcctcttccatacaatatcagaataataaaacaatgcagtatcttcagtgtctactgggctcaagtgggccattttcacagcaggccttattgacaaagtcattttaatattgtttagttcaatcaaagaccccagagctggcctccttttgtaaagatgaaccagagcaagacctggctctggttcatttgtgacctgagaagtcccagggaagccracatctctctggtcaccaggcttccctctagcaaatgtgtgtgtggagaatgctaaatgagaaaaattacataattgcttaacacacttgtaaaaactcagctgtttgctaatcctgctattgtgactgctattatttctctcttatgattattccatcatggttgggggagaattcagggatggagggagatggtcactcatcttttaaaagatcaagtattgagatttttcataacactatcctgtgagagacaaaagtcatagctgaatcttccataac

SEQ ID NO: 263034 - DNA, 388 bp, Homo sapiens
acatttaaaatataaatgtaatttcaagtggaagaaaagagccccatttttccaaatagtcaacatatctcaagacactaacattttcaggayggagagggtgacagatagggagtcagatgggaatgctttggtgagatagagagccctcacagaaagaaacaaaggccactctccccctcactacatgcttaaatactcacaaggtgacatgaggtaggtgttggaattatccccattttatatttgatgaaacatttacaggttaagcaaactgtccgaggagacccagataataagtggaagaactggtatcggaagttagcacagtaactcaaaaactgccctctggctgggtgtgtaatcccagcactttgggaggcctcag

SEQ ID NO: 263035 - DNA, 369 bp, Homo sapiens
aactctttgggaaatacgaggtgagcatcttctttgggcacgagaattttttttcaaataccttccaattagcacaagccttgtgctcagtatttcctccactccccattcaatgacggtttataaaaaaaaaaaaaaaaactacccttattccaaatttaagaggcagagagagatgggggcggtggcggggaagggagaaaaggagaagaaaggagtgagagggacagagacrgagagggatgagtggggggaagagagagagagagaaggggaaaatgtgggaaagaggttcagactggttggatcgtgtctgcagtgattgctgactgcagggttgcacagtagaccagcactggctgtaatgtt

SEQ ID NO: 263036 - DNA, 577 bp, Homo sapiens
agaagaccaatgtgatttcatattaaatttaggtataaatgattatatttaaaatataaggaggagcatataagggcaagaatttgtgggttgcttctagggaaaagtgaaagaaagagacttgcgctgcaggattttcatgtcctgttaagagatactaaataggcctggccagtggctcataccttatcccaacactttgggaggccaacacgggtggatcgcttgaggtcaggagtttgagaccagcctggccaatatggtgaaaccccatctctcctaaaaatacaaaaattagccaggcgtggcaatttttgtgtgcctataatcccagctacttgggaggccaaggcacaagaatcacttgaatcctgaaggtggaggttgcagtgagctgagattgcaccactgcactgtagcctgggtgacagagtgagactctgtctcaaaaagtaaataaagagagagagagagattactaaaagtgagagaaggaargggagagagagagaattattattcagattctctttctctgtcaagaagaatagcctctagggtaggaaaggacaaaact

SEQ ID NO: 263037 - DNA, 606 bp, Homo sapiens
gaaatttatgcagatatgtatatcagatcaaaaatgtcttcatgtaatttcaactgaagtataaaattcttttagctgaattatgaaagtaatttgaactctgtccacctgcccaagggaagtaacaaaatctctttttttccgactactgcttctttgactttctttgttaatccttggagaccatgagtaatagtccaaatattttatcagttttgaatccacccaataggctcattcactctttgtccctctctatttattgtaaacatgcattaagccacactggtaattttaacattctgaaaatactagacaagtgcagttatcattatcatgagaattaaccaacrtaaatattatcaggcctccttaagcagccgatttcatctgctctttagcaatgtatactatgatagcaccaagaattccatctttcacaaatacctggatcagtaggcactctactgcatccccaaattagaagtagctgtgcttttggcttctgaactgtagacagctctgggggacaggcaccaagttgccgctgctttcctcagcctcagacctagaaaggcctgtctcagtgctcatcttggtataccc

SEQ ID NO: 263038 - DNA, 492 bp, Homo sapiens
ttttgaggttaggctctaagaaaggaaagcattattctgtagggtactttgaagtctctgcatggtcatagggaagayggagctcctatatgctaacgaggaacaaagggttccttccacaggcccacaagattcaaagtaatattttctatcaggaacttaactttggcatagaaaacttggctgggatgagaaagtagccttctcttaaattctgccacctcttaccattaactcacatttctattcttaaaccgtgtttgccttttaatttttattctttactgtaagttggtgtttaattgacctaacttgtcattctctttcttcattaaatcattggtgctcagcaataattacccagcttcaccgtcctaatacctactctcttacacaggctaataccatctttctgcattgtatcacatccccatttactgtaggtgaaagtcttataatttacactgcaacaacctgccagggactccacaa

SEQ ID NO: 263039 - DNA, 592 bp, Homo sapiens
catattttctctatcttcagaattaggttgctgccactagaaggtaaatgagcgtcttgagaaaaaatgacttttgacttctctttgggattaatgttccaagccaccagcctatgccatatgctctttcattaagaaagtttctccaccacttgggtgctctcatgatttccaccaagacagaagaggccacaaaatgaacttctcttttcccaatatatctgcactagtattagtattcctttggtggtaccagttcagtctgttcagagatccccatctgctggtcaagccccccacacaataaaaaataacagtacaaccacaaaatacaacattagaaagcttaattgtaataatacaaataaacaatatagcataacaaattacatagcatttacattgtattagatattaaatgtagagataaagtgtatgagaggatgtaaaaaagttacatgcaaatagtaaactattttatataaggaacttggacatccatggattttggtatccttkagggtcctggaacccagcagatcctgaaggatgagtggattctacagattcctttctgttgtttataagccat

SEQ ID NO: 263040 - DNA, 583 bp, Homo sapiens
agaatgggttgggatctcttccttctgtaatgatcaaagcccagggaggagatgctacttgagctaaactttgaagaacagatactccmcaaaaagaagggatcatttagcaatattaggtgcaatatatacataccaaaagtacaaggcacttaagaagaaaaggatttatgggacatagtggtaaaaataaaactagggacttaggaaagaattctagaggattttgttgttttgttttttgttaacagtgaaagtcttttttttttttttttttttttttttacaaggtctcactgtctttgtgttgcccacattggtcttgaactcatgggctcaagcagtcctccttcctcagcctcccaaagagctgggattccagacgtgagccaccgtgccctgctgtcattaacttttgataagggaaattttatgtcaggaagtttgatctgacaaaatggttacaatggataggatggatcagaggctataagacttattcacaggatgttgctacagatcaggttgggccattaacagcctgaatttgtgatagtgtcacacaaacataaggtaggtagat

SEQ ID NO: 263041 - DNA, 637 bp, Homo sapiens
actgcagacaaatagagaagagtaagaaaaagagatgttggctgggcacggtggctcatgcttgtaatcccagcacttggggaggccgaggtgggcggatcacgaggtcaagggattgagaccatccccgtcaacatggtgaaaccctgtctctactaaaaatacaaaaattagctgggcatggtggcatgcgcctgtattcccagytgttcaggaggctgaggcggtagaatcacttgaacccgggaggcagaggttgcagtgagccgagatcatgccactgcactccagcctagcaacagagtaagactccctctcaaagaaaaaaaaaaaaaagaaaaagagatgttatttttgaacaccaaagctgtttcacctgtaagagatatgataaaacggttcttggttaaaaggaaaactactgtcaattttaaattgcctgaattttatcttagggtgcattggcatgtttaagatgacagttaccttctaacttgattttttaagttaatttctacttcatactatttattcctccactcagctgatcacttttttaaattagattttttattttgagataattgtaggttcacaattgtaagaaataatttgcagaaaatactgtgtatctttt

SEQ ID NO: 263042 - DNA, 531 bp, Homo sapiens
ttatgctatttgtcacaagaataagttatgcctgctccttttatggctgccaattctatccaccctggaattcaaattagctaagaaaaaagaaactaatatcctttgaacagcatctttggggccaggcactgtgtagatctcttgcagcaagctctgtctgtttcagccgcactgaaatccttggaggaatgatgagaaaccatactcagagatgtggaaccactgccacaggcccacaaagccaaaactcacagagcaattcttgccaaaaacatagtactcccatcttctcacatctgtattatttctctaaaattttcataaacaatacacaaataccagtacagataggattcagcttatttctgtaacttttccatttgcaccaactgtgcattaagaggtgagcacttaaaaaaccagacatggctcctttaagctttgcaaagtgggracaacaaactagagacatgcatttacaactctagcaaatcattcacacaaaaaaatcatgtatgtaagtgtgga

SEQ ID NO: 263043 - DNA, 637 bp, Homo sapiens
ctttgccctgtggggctcacgtagcatgtgtggaaggcactctctatcatagtgaaaaaggtctaaatgacccacagatgtttgtattctggctctacatgcctagcagagcctcagcttccccatctgtaaaatggggataataacagctacctccatagggctgtcagatatgcctatgccatattcagcacatccgtggcatgagtaaacacttcataaatgttggttattagtggcamaaagaaggctctcagcacctgctgatttgtatcacctttaacactgacccaattcacttccagttacaaactcctcataattgatttcacagggattttaagcattttttacatttttgaatgaaagcactagagcccagataggggcttcaggtccccatgagctccagactttgtgggaccactgatacctcggatcccccatcttcaccgaaataaatcacatgtagcagaaggatgtaataggtgcctccagttactgtgacccaattataaggcaaatcctgagcaaacctctttgaaaataactgagcagtaactccagactaggagcagatggccccatagctggccttccgagcaccagactcaggtgctgcattttgttgcccacc

SEQ ID NO: 263044 - DNA, 518 bp, Homo sapiens
atgtaaatttggtaattattctctagcatgtctttatacttttagtacaaagaaaacccacccaaaatgatggtgctcctcggccacagtcctatcactttcatttgttttaacattttctttccttttttccttcatatagcaaaaaaacaaaaagcaacaaaaaactatcaatgtattcaagccataggaacaataatggaaatatatatatatacacacacacatatatatacatatacacatatatatacatatatacacacatatatacatatacatacatatatacatatatgtgtgtgtgtgtgtatatatatatatatatagagagagagaaagagatatggagtattgctctgtcacccaggctggcctgcagtggcaygatctcagctaactgcaacctctgcttcccaggtacaagcaattctcctggctcaggctcctgtgtagctgagactacaggtgcacaccaccatgccggctaatttttgtatttttagtagagatagggt

SEQ ID NO: 263045 - DNA, 658 bp, Homo sapiens
tatgtcatccagttccaattttttcccctatactccaccacggcaatgtcagagagtgggagacagtggtgatgtgagcaactgaaaggagaggtttgaataaatacacgagcagggagggctggtactgataataaagagggcactctttcccctaacgaggaagaaaggaacaggtgaaaacaggcacttttcaaagataagcaaagtaaaactgaagcaattcacttgaagttctgtaatttcagtaatacagaaggcaaaagtcttctaccaagggcaaaggcaagggcacatgtggggattaaagccaacaaaatgggtttcctttattcaatcacayactttttagtaaaggtggatatggctggtgctgtgccagacactggggagaaaggactttactcactgtaaaatacagtgtgaaaaggcctggaatagaggtcttttcaaagtatgcagtaatacaaaagggaggagggtggtcagtttctctgaggagggtcaggactgtttcttccccaatgtttcttgttattcatgctaacaaaatacagtggaactgatactaccttcaatctcaaggataagctccaattaaactaatgacaaaactcactgctttcatcaaagtaattggtttaaagatgacatgtga

SEQ ID NO: 263046 - DNA, 658 bp, Homo sapiens
tatgtcatccagttccaattttttcccctatactccaccacggcaatgtcagagagtgggagacagtggtgatgtgagcaactgaaaggagaggtttgaataaatacacgagcagggagggctggtactgataataaagagggcactctttcccctaacgaggaagaaaggaacaggtgaaaacaggcacttttcaaagataagcaaagtaaaactgaagcaattcacttgaagttctgtaatttcagtaatacagaaggcaaaagtcttctaccaagggcaaaggcaagggcacatgtggggattaaagccaacaaaatgggtttcctttattcaatcacacactttttagtaaaggtggatatggctggtgctgtgccagacactggggagaaaggactttactcactgtaaaatacagtgtgaaaaggcctggaatagaggtcttttcaaagtatgcagtaatacaaaagggaggagggtgrtcagtttctctgaggagggtcaggactgtttcttccccaatgtttcttgttattcatgctaacaaaatacagtggaactgatactaccttcaatctcaaggataagctccaattaaactaatgacaaaactcactgctttcatcaaagtaattggtttaaagatgacatgtga

SEQ ID NO: 263047 - DNA, 420 bp, Homo sapiens
aagatgttgtcttaactttaggtctcagttgttctcaactggggctgattgtgctttccccaccctgacatttaacgatatctggagacayttttggttgtgagtggggttggggtgaggggctacaggcatagtgggtagaggcagaaatactgccaatgtcctgcaatcacaagacaaggaattagctagcccagaatgccaagcctgaggaactctagtttgggccactgggagatgatgttttatctcagatctcttctctgtggctctccttgaacttggggaactgctcggtgaacgttgattagtggaggtggggcccaaaagaatgatatgtgttgacatttgcaagtgttatattgaggataacattttaatatccagaaaattccaatggaagtaactttatatcattat

SEQ ID NO: 263048 - DNA, 420 bp, Homo sapiens
aagatgttgtcttaactttaggtctcagttgttctcaactggggctgattgtgctttccccaccctgacatttaacgatatctggagacacttttggttgtgagtggggttggggtgaggggctacaggcatagtgggtagaggcagaaatactgccaaygtcctgcaatcacaagacaaggaattagctagcccagaatgccaagcctgaggaactctagtttgggccactgggagatgatgttttatctcagatctcttctctgtggctctccttgaacttggggaactgctcggtgaacgttgattagtggaggtggggcccaaaagaatgatatgtgttgacatttgcaagtgttatattgaggataacattttaatatccagaaaattccaatggaagtaactttatatcattat

SEQ ID NO: 263049 - DNA, 483 bp, Homo sapiens
tgtgtgggataacatgtccartgtgtccgaggagagaagaaaaaggcagcagaacattaaggaaggactgcagtttatacagtaagagcttcagagttcttgtgttcttgccgcgtcctaattctttggtgtggatgtatgttttgtggagaggaagaactctttagtcatgtttaataggtccagttaatttgggttagaaactccatattctagcaatatttttttcttttgtccatttgaacattcttgcattcggaagcaagtgttacttttgctggcttttagggctacaattgttagtctcccccaaaacgttagactgagaaatttgaatttgttctatgaacagtgctgctgagtggaaagtgactgaaaatgaacatctggcggcacagagggcttctgtgatcagacgtgtctgttcagaagctcagtgtttaattggacttcttgaagcatgtcaatgatgagacagctgtg

SEQ ID NO: 263050 - DNA, 340 bp, Homo sapiens
aggctggtctcgaactcctgmcctcaagtgatccacccacctcagcctcccaaagtgctgggattacaggcgtgagccatggctcctggccctatagctgtttttaaaccccttgtggaaatgacattccagttctgtattcattactggaatccactgtttctcaaaggtttcatataatatatactttgccaatttagcccacagtattcattaacaggattaagtaaaacattagcctcattactaatatacatttaaatatttctacaatttgttctcagaaatttctaagaaaatggcaagtcctagtactaacactgaagaaaagagattgttc

SEQ ID NO: 263051 - DNA, 584 bp, Homo sapiens
aaaaactacaacctcacaaccacccccacaaacacaaagctgcaactatacacaaaagagtgttgtatgattctacttaaagtcaaaaataggaaaaactgatgtactgtgctaaaagtcattatggtggctagtctgggaggcacagtgactggyagacagcacaggtggaactgggctattagtaatattctgttcctagggaggtttgggaggagacagcactgtagcttctgtatagaaggctcttataggctgggaatggtggctcacacctgtaatcctagcactttgggagaccaaggtgggaggatcacttgagcccaaggagttcaagataagcttaggcaacacagtaagacactgtctctaaaaaaaaagaaagaaaggaaggaaaaaaaaaggctcttatctttagaacattcatcttacttgaacaagcctgagaagttaacaactctacaacactgtattcctacaagacaaagaaactgcctgccattttaaaaccaagcaagtataagcggtcaggagagggaggcttgaaatgtgccatttaaccaagctctactctagaaatcaga

SEQ ID NO: 263052 - DNA, 584 bp, Homo sapiens
aaaaactacaacctcacaaccacccccacaaacacaaagctgcaactatacacaaaagagtgttgtatgattctacttaaagtcaaaaataggaaaaactgatgtactgtgctaaaagtcattatggtggctagtctgggaggcacagtgactggtagacagcacaggtggaactgggctattagtaatattctgttcctagggaggtttgggaggagacagcactgtagcttctgtatagaaggctcttataggctgggaatggtggctcacacctgtaatcctagcactttgggagaccaaggtgggaggatcacttgagcccaaggagttcaagataagcttaggcaacacagtaagacactgtctctaaaaaaaaagaaagaaaggaaggaaaaaaaaaggctcttatctttagaacattcatyttacttgaacaagcctgagaagttaacaactctacaacactgtattcctacaagacaaagaaactgcctgccattttaaaaccaagcaagtataagcggtcaggagagggaggcttgaaatgtgccatttaaccaagctctactctagaaatcaga

SEQ ID NO: 263053 - DNA, 613 bp, Homo sapiens
gctaaaataccagtaaaatccacaaaacgatttttctttgaattttaagtatcaaactacttttaataatttcttccaaaacacagcatataaggtaatggaagtgttccgacttgtgactagtggtagagccatgactgcatttgccaaaacccacagaaatacagtcatgtgtcgcagtgatgttaatcacttaacaacagactccatacacaaagacggtcccataagattataatggggctgaaaaattcttaccrcctaatactgaagggcagccgtggtaacactgcagcacaccgttttactcctgtgcttgtggtgatgctggtgtaaacaaagctactggctgccagacatatgaaaacacagcacatgcaattacgtatagtatataatacttgataacgataaacaactttgttactggttttatgtatttactatactttttatctttagactgtactccttctgcttatttgttttctaaagttaactgtacaacagcctcaggcaggtcctttacgaggtgtccagaagagaatgttatcctaggagatgacagttccataactgttattgcacctgaagaccccccagtgggacaaga

SEQ ID NO: 263054 - DNA, 616 bp, Homo sapiens
acaatatggctatgcattggtaacatctttcaagaagtcacatttataatacatacgaagctttaaatgtgtgtttcctttagttcatcaatgccatttctaggaatttatcctaaagaaataatcagacaaagtacacacgtaaatataaaaggatattcactgaagcactgttcataattccaagtatttggatataatatttatgcctacagagaggaatctgattacatcataacatggtatgaaacaagacagtattatagttatttaacaagatgaaacagacttacctacaagaatatccacaatttgtgtgtgcctattcactcattaacttttttacatacatgctaaatatttgaaataatatagaacaatgggaaggttaggggcacccacacagtcaaaaatcacgtgttaagtgttcactccccaaaaattgactactaaaagcttactgctgaccagaagmcttaccaataacatagtcaattaacacagattttgtacatgtattatatgcaatattcttacaataaagtgagctaaagaaaatgttatttagaaatcataggacaaaatacatttatagtactgtattgtatttactcat

SEQ ID NO: 263055 - DNA, 595 bp, Homo sapiens
aaaatatacaaagacctcttaaaactcatcaataagaacaaaacaacccaattttaaaatgggccaaagaccttaagagacatctcaccaaagaagatatacaaatagcaaactagcacataaaaagatcctccacattacatgtcatcgggaaatgcaaattaagacaattataaacctattagaatgaccaaaatccagagcactgacaacatcaactgctagagaggatgtgtagcagcaggaattctcattcattgctggtaggaatacaaaatggtacaggcactttgcaagatggtttggcagtttcttataaaattaccataattttaaccacttgatccagcaaatgcattccttgggatctactcaaaaggaattgaacacttaggtccacacaaaaacctgtaaagaggtgttgataacacctttattcataattaccaaaactcagaarcaaccaagacatcctctggtaagtgaatgggtaaataaactggtacatccagacaatagattattcagtgctataaaaaaaaatgagctatcaaaccatgaaaaaacatagagaaaacttaaatgtacattacta

SEQ ID NO: 263056 - DNA, 623 bp, Homo sapiens
ctgcccctgcaatacagaggacaaacaactgacactatctatcatgagatttaattcagcacatctgcttactaaggtgctactcctcttatttcctttcstgatttttccttccaaaaactacatcctcattttaagaaagatctctaataaaataagggtttgtggtttttttctggttttaggatatacataaatggcttatacttcttttaatgtactcttccaatacttgcttaagaaaaaaaatccattttaattaaatttaattaaacctcccacaaaatatggcatgtacagtcttgacagctgagcactaaaggtgaacacttccagtacaaattagcttgctatcctgctatcccactaagcagccaattgcacttcaaaacaatgatatttcaaaattcttctttcttacattgaatgcatatatttaccatccacgggatctagttttgctctctggagctacaaagaaaaagccttaaccatagaacacatttttataattcaaagggaacaataataagcctattatttttcattttccaagctaaacttggcaaattacttccagtaatcctcatgtagcaggattttcacttttaccatcaccgtca

SEQ ID NO: 263057 - DNA, 543 bp, Homo sapiens
gatttgggaagcaagaattgcaatttgaggtatatacagactgagtggtcttcagtatgtctgaagaacaaagagaaggttgtaggtcttctaaaaaggagaagtgttacatatcatatttaaagaaaggtcactggctctagtaaagttctggggagstggtgagtgactgtaactgattaagactaatcttcgagttgaggcaggttgttccagcagctattagataaaactggtttcaggttacaccaggcagtttcagcagcaggcttgcagagaattacattctcagagcaatgtcatgtgaccagtgctttatccccctagcctcttgactctgttttagctgggtgtgccaagattgacccaatttgtatgatcaactttcacaatgttatttataggacctttaatgtttagtctctttgagctttaatttttaactgccatttaaaatataaacataaatttttagaaacttattaagtgttgatattcaaagtggtcaaaatgtccttcattatagcatgaaggtacgtatct

SEQ ID NO: 263058 - DNA, 543 bp, Homo sapiens
gatttgggaagcaagaattgcaatttgaggtatatacagactgagtggtcttcagtatgtctgaagaacaaagagaaggttgtaggtcttctaaaaaggagaagtgttacatatcatatttaaagaaaggtcactggctctagtaaagttctggggaggtggtgagtgactgtaactgattaagactaatcttcgagttgaggcaggttgttccagcagctattagataaaactggtttcaggttacaccaggcagtttcagcagcaggcttgcagagaattacattctcagagcaatgtcatgtgaccagtgctttatccccctagcctcttgactctgttttagctgggtgtgccaagattgacccaatttgtatgatcaactttcacaatgttatttataggayctttaatgtttagtctctttgagctttaatttttaactgccatttaaaatataaacataaatttttagaaacttattaagtgttgatattcaaagtggtcaaaatgtccttcattatagcatgaaggtacgtatct

SEQ ID NO: 263059 - DNA, 563 bp, Homo sapiens
tcatatagaaaacacattgtatgcagcaaatatacctgaggtataaattattcttctacccattccttggactaacaatttttaaggtacatattaaatttatttccaatctttttcctacaatttttttgattcacacattatttaacacagagcttcaatccactcaataaaaacacttatttcactaaaagaaacacatggaaaattctcttccaaacatgcacagatgctttttaatagtgatcactgagattcaaggatcagggagggctacatgtacctcaacaatctcctactgatatttaatatgtaattgacaaatagcgttgtatagctagttattaaaacatagggtagaaggagaattctggagtaaaactgtaaacatacaagttgtacagtcatgggcaaaatgcttaattcaacaatacctcccttagtagaatgattttagatacaaaatatcagaaatccaatttgaaatgtsctaaacaataaggaaggttattaactcacaaagcaaggagttgagagagcaattacaaggctaagacatgtca

SEQ ID NO: 263060 - DNA, 537 bp, Homo sapiens
ggctcaacttaagacttcagtttggcttcccctctagaaggaagaaaaacactgttcatgctaaatcaactactctggtacatatgtcaataatatttattatattaatagtaaattaactttcaactgctacacttccaggttccattgtgccaaatcttatcataggcatcaggttttaaagtcagctagacagaaagagaccacatactgtcaaaataaccctgggctatcactaggaaaataccacattggtgaccacactttccaatakagcgtgtttcccttccaatattggaagagatcacagtttgtgaacttagtgagtaccagatacggaatggcctgtatttcagagatacgcatgcttattgagtaaagtatcagaacaccaagtatttaacaaactatagaaatgatccctgaaagtacagtcttgaaaacatcaactatttaagctcttattttgctcttcttttcttcagtaaaatatacatacactgtaatactgtcatacagtgaaatcaagtgctccta

SEQ ID NO: 263061 - DNA, 545 bp, Homo sapiens
ctttcaaccaatttccagcaagcaacattagaaaacttagtcaacattcaattagatgtgtttcagtaagagtgtgtgtgtgtgtgtgtgtgtgtgtgtgtgtgtgtgtaaaatacattataaaacaaggttgctttaacactggaaaaagatgtggagtgttttgtgaaataaattactctgcacagatgacatataacatgcaaaatcagaacttccctacaatgagaaagtagtcaagaatttataatgcgatggacaagctataaccaagagtagtaataatgtgggaatcttttataaacctgaaggttytatttgagcaaaattttccatcaatatatataggatccaaaattatttataatggatacaaataaacctatttatttttaaagaaaatgaattgcctcttaagcgatgaagtgactgaagcagtatgacaaaattttaaatgctgaatttaaaaattagagaaataagcagcactaaagccaccaaagcaacatgttaaacctttggtccgcactaaatggattacaaat

SEQ ID NO: 263062 - DNA, 545 bp, Homo sapiens
ctttcaaccaatttccagcaagcaacattagaaaacttagtcaacattcaattagatgtgtttcagtaagagtgtgtgtgtgtgtgtgtgtgtgtgtgtgtgtgtgtgtaaaatacattataaaacaaggttgctttaacactggaaaaagatgtggagtgttttgtgaaataaattactctgcacagatgacatataacatgcaaaatcagaacttccctacaatgagaaagtagtcaagaatttataatgcgatggacaagctataaccaagagtagtaataatgtgggaatcttttataaacctgaaggttttatttgagcaaaattttccatcaatatatataggatccaaaattatttataatggatacaaataaacctatttatttttaaagaaaatgaattgcctcttaagcgatgaagtgactgaagyagtatgacaaaattttaaatgctgaatttaaaaattagagaaataagcagcactaaagccaccaaagcaacatgttaaacctttggtccgcactaaatggattacaaat

SEQ ID NO: 263063 - DNA, 548 bp, Homo sapiens
acacggtatttgaatacaaacagacaaggaagaaaaattttcaactgagattcctaaaaattatgctaatcaacaaaaatgcatcaaacactatgtatccattttcaaaccgtctaccctacctctaactcacgtaacgagatgtccccgttagcccagggaaagtcycagtttactcctgtcatctcagcaaaattattaattgcactttatttctctcccacatgtcctggtttgaatcataaattatttactcacgctccttctaaatacctggctccttctggccataagctattatctttgcccagatccagatgtcaggataattacacatatattccaaggcaagttaaataaactttgtgtgtgtatatagtttcattatcatgatgctgtaattttttatctcaaattcacgaggaaactctctgattatcacctcaattcatctatatttatggagtatatattttccatgaaaataaactgcccatgtattttccagcaagtagcaagaaaaactatatagagatatagacgcagaa

SEQ ID NO: 263064 - DNA, 504 bp, Homo sapiens
aactatcaattgagtaaattgacaacctacacaacaggagaaaatacaaactatgtatctgataaaggactaatatccagaatctataaggaacttaaaaaacttaagcaaaaaataaccccattaaaaagtgggcaaaggatatgaactgatacgtgtcaaaagaaaacatgcaagtggtcaataaacatgaaaaaatgctcatcaacactaatcatcagagaaacgccaatcaaaactacaatgagacaccatttcccacaagtcagaayggctattacagaaaagtcaaaaaaaaaagatgcttccaaggctgtggagaaaagggaatgcttatacaccactgctgggaatgtaaattagttcagccactgtggaaagtactttggagatttttcaaggaactaaaattagaactgccattctacctagcaatctcgttactgggtatatacataaaagaaaataaacagttctaccaaaaagacacatgtacttgtatgt

SEQ ID NO: 263065 - DNA, 520 bp, Homo sapiens
agggaatactatacagccataaaaaagaatgaactcatgtcctttgcagcaatatggatgcagctggaggccattatcctaagcaaattaacagaaaaagaaaatcaagtactgcacgttcttataagtaggagctaaacattggataaacatggacacaaagatgggarcagacactgcagcctattagagggtagaggaggaaggggctgaaaaactacctatttggtactatactcagtacttcggtgacaagatcattcataccccaatccttagtattatgcaatgtaccaatgtaactaacctgcacaggtatcccctaacctaaaataaaagttctaacaaccaaagaaaaaaaaaagtctgaaaccctcccaaaaaaaaagaatacaatatgttaaaacatttcataagaatgttgaataacttttcgtatactttaacaaaccataaacaataatgaaaagcaatgccttaatatgttttatacctaaagaatactcttagaagaatacta

SEQ ID NO: 263066 - DNA, 520 bp, Homo sapiens
agggaatactatacagccataaaaaagaatgaactcatgtcctttgcagcaatatggatgcagctggaggccattatcctaagcaaattaacagaaaaagaaaatcaagtactgcacgttcttataagtaggagctaaacattggataaacatggacacaaagatgggagcagacactgcagcctattagagggtagaggaggaaggggctgaaaaactacctatttggtactatactcagtacttcggtgacaagatcattcataccccaatccttagtattatgcaatgtaccaatgtaactaacctgcacaggtatcccctaacctaaaataaaagttctaacaaccaaagaaaaaaaaaagtctgaaaccctcccaaaaaaaaagaatacaatatgttaaaacatttcataagaatgttgaataayttttcgtatactttaacaaaccataaacaataatgaaaagcaatgccttaatatgttttatacctaaagaatactcttagaagaatacta

SEQ ID NO: 263067 - DNA, 520 bp, Homo sapiens
agggaatactatacagccataaaaaagaatgaactcatgtcctttgcagcaatatggatgcagctggaggccattatcctaagcaaattaacagaaaaagaaaatcaagtactgcacgttcttataagtaggagctaaacattggataaacatggacacaaagatgggagcagacactgcagcctattagagggtagaggaggaaggggctgaaaaactacctatttggtactatactcagtacttcggtgacaagatcattcataccccaatccttagtattatgcaatgtaccaatgtaactaacctgcacaggtatcccctaacctaaaataaaagttctaacaaccaaagaaaaaaaaaagtctgaaaccctcccaaaaaaaaagaatacaatatgttaaaacatttcataagaatgttgaataacttttcgtatactttaacaaaccataaacaataatgaaaagcaatgccttaatawgttttatacctaaagaatactcttagaagaatacta

SEQ ID NO: 263068 - DNA, 228 bp, Homo sapiens
ttcagcatttatatagcaggcaagcattcaataaacacaactgaacataaccacatgttatctttctcacatctagaggttgccatagccctgtggtgagctgagaacaccattggctcaaggcatcctsctttaaccgtctattttccttgtttttcaaaacaaactgctcagatcctatagttttccaaagggtcaagatgttcacgcccactgtaactacagcaa

SEQ ID NO: 263069 - DNA, 606 bp, Homo sapiens
ctttaggaagtcacttcaaatcactatacttacaatgcttgctgatggaaatgtctgaaacagaaattctcagcgactgtgtagcactactgattttatgcatagctgttcttattacatattgattgtccaatggctaggatctagtacagaagtggcatttaataaaggtataatgatactgatgatgaataatatagtttcatagccagccactrtatcataaatacccttaagctaagtttaccacattagaatttctgaattctagagagtctacaactcatttagtcagatttatgtcactggataatgtctcttttaaggcagatttcctttactttagttatggtgttgaggggaagaaaaaatgaaattttacatctgtgtactatcacaaacatatgctgtttgtcaaaggaatagtgttcatgactcaaaggttacaatgactaaatcatcatgtgatatcctattagtaatgacaatttcataacaaatgttgaatccagatcttaatcatcagtgaaatttatactcaacattttcatatgtactgcaataataaagaagtatacctcacagtctccacttttaagaggttaa

SEQ ID NO: 263070 - DNA, 603 bp, Homo sapiens
ttcatcaaactgagttggaggaaccaaagtctaccagccagccaagaggctacactgaaggcactgccaacctgggtttcttaatgatgaaggtcccatttggaagacctcaataattgtaagcaaaacttcacaggggcactacatacactccccagggctggacttctcatgcaaaagtttaataccatcttgtctttgctccaataccacattaggtatgatgaactataccaggaatgggttgtaagagaccttcaagtgtttatggaagtatayagccctcggatcacagtagagatctctctgaaatgaggctagccttcagatacctgggggagctgacccagagggatatttgacttgtgtttatgcatcccttgtgggatgttttgtttatggtgagaatcatccagtaggtaaaaggtggtgtatcagtttctctgggtggccataacaaagtatcacaaactggatggcttaaacaaaacaaaaaaaacctcatagttctggaggctagaagtctaaaatcaaggtatgagtagggccatgctccctcttaaaactgaaggggagaatctttccttgcctcttcctagcttc

SEQ ID NO: 263071 - DNA, 603 bp, Homo sapiens
ttcatcaaactgagttggaggaaccaaagtctaccagccagccaagaggctacactgaaggcactgccaacctgggtttcttaatgatgaaggtcccatttggaagacctcaataattgtaagcaaaacttcacaggggcactacatacactccccagggctggacttctcatgcaaaagtttaataccatcttgtctttgctccaataccacattaggtatgatgaactataccaggaatgggttgtaagagaccttcaagtgtttatggaagtatacagccctcggatcacagtagagatctctctgaaatgaggctagccttcagatacctgggggagctgmcccagagggatatttgacttgtgtttatgcatcccttgtgggatgttttgtttatggtgagaatcatccagtaggtaaaaggtggtgtatcagtttctctgggtggccataacaaagtatcacaaactggatggcttaaacaaaacaaaaaaaacctcatagttctggaggctagaagtctaaaatcaaggtatgagtagggccatgctccctcttaaaactgaaggggagaatctttccttgcctcttcctagcttc

SEQ ID NO: 263072 - DNA, 603 bp, Homo sapiens
ttcatcaaactgagttggaggaaccaaagtctaccagccagccaagaggctacactgaaggcactgccaacctgggtttcttaatgatgaaggtcccatttggaagacctcaataattgtaagcaaaacttcacaggggcactacatacactccccagggctggacttctcatgcaaaagtttaataccatcttgtctttgctccaataccacattaggtatgatgaactataccaggaatgggttgtaagagaccttcaagtgtttatggaagtatacagccctcggatcacagtagagatctctctgaaatgaggctagccttcagatacctgggggagctgacccagagggatatttgacttgtgtttatgcatcccttgtgggatgytttgtttatggtgagaatcatccagtaggtaaaaggtggtgtatcagtttctctgggtggccataacaaagtatcacaaactggatggcttaaacaaaacaaaaaaaacctcatagttctggaggctagaagtctaaaatcaaggtatgagtagggccatgctccctcttaaaactgaaggggagaatctttccttgcctcttcctagcttc

SEQ ID NO: 263073 - DNA, 577 bp, Homo sapiens
atcgaggaaatggattatgtaatttataagtttctggaagatatctccagacccagatgattttactggaaaatgctaccaaacacttaaagaagagttaacactaattttatacaatatttcccaaaaattaaaataggtaacattccccaactcattttatgagtacaatattaccctgataccaaaactaaacaaagacactataaacaataaaaactacagaccagtgtctatcattaacttagatcaaacttcttcaaaaaaaaattagcaaactgaatccagcaacacataataaaataatatgacacaattaaatagtatccattcctgtatgcaagaccagttcaacatttgaaaatcaatcaaygtaactgattatatccataggcaagaaaaactacataaagtgacaacaaaaaaaatttttttaatgcagcacctcattcatgataaaaactgtcagcaaactaggaatatagagcaacttcctcaacttgataaataccacctataaaaaacctacagctaatatcatacttgatgacagattgagtgctttctttcaaagagc

SEQ ID NO: 263074 - DNA, 449 bp, Homo sapiens
ccaccagagggggcagttaagggaaaataaatgatacttttcagatattgaatagtgaaataaaaactttgggtcataagtaatgaaccaagagttattttctgatgtttaaaaatagaaatttgcgtttttaggttgtagggttgaaatttttggtaaagattctttaataatcctttgataatcacggtctacatttgtttatttttccttagaaagttttttttttaattaataatttaagataatttaatgttgagtaaatttatatcaagcattaatgactttgaaacttgtgtagatcagctgaggcaattttttggtgkaacacaactaatatgcagtttaacatatggtttaaatttgatgtaagttttttttttccccccagaaaactttagaaactgttcctttggagaggaaaaaggtactctgccagcaggtcacct

SEQ ID NO: 263075 - DNA, 612 bp, Homo sapiens
cactctgcctagaagcagttgctaggcagcaccacatttgctcacaaatgcacttttcacccaataatcagtattataacacacatgccaccctccgatcagtttttctgctcctgtgtagtttaaaggcaaaagactctggtaaatattatttatgatggcgaatagtctcagggacagtaaaccatgctaggctatttcctggacaaaaagatgaagacctttgtcatctaggtctaggagtgctttggagaagtctgaaagctacatatttcatttgttcttaatttatttcaggctgagtataaatgttatccagggaccaggataatgaaataatagagctgaaacttactgtctttcaagttctttttttggttcacaaaaagccaatactgcaaaccattcaatttaattcatttaaaaaatatttagstagacagaatttgagaatttgaactatataaaggacacaaagatataatcattccagaattttaaagttttcctttgttttatattttcttactgcttatcaaaaatttggagttcaaatttttatagactcaaccattttctgcacaaaattgacattattaggataaagcaaag

SEQ ID NO: 263076 - DNA, 497 bp, Homo sapiens
aaaaactgccccaaattccaatggttgaagtttatcctttaaaataacaatttttgtttgtttatacccaaaaaaagtccagatatgaaaagggcttttctaaaatttcttggcgagggaatggcactcaaatcatagtgattaacagtaagtyttgtttgtttgtcaaggatctctacttcttgacacaaatgaaccctgtctttaataagataagatatttatttttgtagatgagaagtgtaactaccaccttggacctcagggccctaactaattacagctgttactggacgactcagactttgtgcctaaagccatcttagagataacagtttatagaagccatgacattagtgtttattgcattgaattaagcccagtgatataactatacaagaaaacaagtaggggtaccttttacaaagagcaatccaataaatcttaaaaataacagaaacttagtctgcaaggtagaaagtttcagttttaattct

SEQ ID NO: 263077 - DNA, 586 bp, Homo sapiens
agctgttcccaaaaagccagaagtcccaccagcaaaaggtacatgtcactaatgagattctgcagaaaagcactcacccttgtctaataagtcacctattatcaaaccttttgtttgcgagtcctcttaaatttgcaactacaaaactgtcattctggatttttagggtctgaatactttttaataattttttcattgactttaaaaagtgatatatttacttattacaagcaytggaaaagtttactaacttggttcttttattcttaataggccatattttcctccccactatatgagggtccaaagacagatcactgaccttattgtgaaatttgttcttggatctgtccctgggttatttgagcaaaatgtgaagtcgatgtggtataaatttaatatacttctcaactactcataagaaaaatgaattaatatctttaaagtgccagaagtgccaaagaaacctgtcttggaagagaaaccagctgttcctgttccagaaagagcggagtctcctcccccagaaggtacacgtgagaccggtgattaatgaccttgccacttgcgactatttctaatttaa

SEQ ID NO: 263078 - DNA, 505 bp, Homo sapiens
atcaatgccaaaaatgagagtaggggaaatcccagaaggttgggatgccatacaaaagtcttatgtgctacaacttcttacctttacctcactgaaaatgtacaaaaactttttaagaatgcatcggtgctaatgcttcctgaggtagctcraccaaggattgtataattgtaattgtcttgtcttgtgagccttaccaaatttgtaataaaaaaaaaaattccctactgacttggtacctgctaagtacccaatatgtacccattaagctagaagtggaaagtaaatatttatttccctggtggtcacacttcttattccactagaataccttagttgacctaatcagccattatttccttgtgtttatattagttactattctttaccctgaattaaaatcatatttctgataagcaaactggtagaatcaacacctcatttgccatcttttttcatgtgtacaaactatgaagcagtttttcttatattgagtcaaatatta

SEQ ID NO: 263079 - DNA, 548 bp, Homo sapiens
ccagtacctccaattccattctaccaccacaaactattcttccttttcacataggtaactcccttttccggcagtgagaatcctgtgtccctttatcatcaacatatgtactcacaggcataccttactttattgcactttgctttactgcacttcacatatattgtgttttcttataaatagaaggttttagcaaccccgagacaagcaactctatcagtgccatttttcttttttctgaaaaatctttattgcttctgctgattacacaacaaatgtaaaaattcaaatattacacttytttaaaaaaaagtacattataacatgtcattaaataaatgcccatttcaaaaaaattcaagtatcataaaatacatgatttagaaaatgagtcctctgtaatccagtcccacccccatgtcccccaggattactgctgttcagatcagcgtttccttccagattgtctctgcgcactcaccacctgcactgctgacatgagctccatattatctgagatgatagtaactctgataaatggagcagga

SEQ ID NO: 263080 - DNA, 726 bp, Homo sapiens
accttgtgttcctaaacttaattaccatttgcttctctcagatgttgatttatttttccaaatgaaaacccaatctgacaccatttgcttcctttgctagacatttttgcattgaaatttttgacataaggttatatctttttatctctaaccccaacaatgacagttactaaaaaacggtcaatgttcttttcccctaaacttttcttaggaaaacttacatatgtctggaagagtaattaaaattaatccaaaggtttgaaaagaattcagagtattgctaagtcatcccaggaaactagcagccaagtcttggagctagaaaatatagcacaggtataagcactacttttgccatgcccatggcagacattactaatctatcatagaattcgtttttaattctgaacatcttagaatcctcgacaagctccagccattaagagccaaaaatgccatgcaaatagaagcctatcatccccgagttagtatgaacatgtgagtttttttaaaagaaggcttttttttttctttttaagtctcaactggaacactgagcatacatttatgatttgaagaggctagaagcacccttacattttagttacatagcatgtaatacatggttattaaagaatcagagcttctcttctaagactggaggtgttagccttaygtcctggataaattccaacttaggtaattacattctgcttacctcaaccc

SEQ ID NO: 263081 - DNA, 577 bp, Homo sapiens
aaaggctctatcacctaaggactatatttttgaagggtcaaaattctaatgtaatctttttggtaataactagaaggctttttgaacccgacacaagttagctctgggtatattatttgtgctaaactgtaaaatcttatactaactttttttctgacaaatacatctaagacatactctctctttttagaacacacacaaaaaatctattaacacattaacgcttacctgcatattaatcatctacctacagttagaagtaatgcaccctcaacccaacccgcacattcaggacatataaaagaaatacttacaagcatgaagagaaacaggttttcaatcagagtcaagtactcaaagattacatataatgatatgaatagctgattgttattgatcataacagccctcttccacagtgctaatgctgaataacagccactaaataaaacataacaaacacacacamaaaaaatgtaaacaaaacagagcaggtgaaacctacccataagcagcaggaaagggtcatgagtatcccaagttctataaaaggactagacttacattgcaaaaagtt

SEQ ID NO: 263082 - DNA, 595 bp, Homo sapiens
tcaaaaacttatgaattgttttgagttcactcaccccccaccccttgtcttctccttgtcttttgtttccaacagaatttatcactcaatcctgggcattctactgtcccactgtctcttttaattccattctcacagcatgagacagaagttccctcttcaattaatggaaaataattataatatgcacttaaggattccgtattataaaatragttttgatattataaaaatgaaatatagtagctttgaatagacccatcttttactcatagatgacttggtctgctcaaggtgtcagtagttagtcaataaggcagatttgcactggatttgaaataggtgggtgtccaaaacagataaatcagctctctaaatgtaaataaatttagaggtacaggccagactcatgaactcaagagctgatgacaggaacaggaagcacattcccaactagggactgaatttcaaatgaggactatatttccatggacacatgaaaatatacaggagagaagaggtgctaaaatgttatttcttctcttgatgcccactaattataggtaaattttagtgtgtgaccaaggaagaaata

SEQ ID NO: 263083 - DNA, 628 bp, Homo sapiens
atattcacctgaatatgcctattatttctacaaagatcttaacctgaagattaaaaactctgtcttatttatccttatatcccagaatatcttgtatttagcacataaataacaaacttttaatagatgttgggtgaacaagggcatatataaaacctcaaagaattaaattactgggaagtaaatttcattacamctaattttttgaggcatattttaaaagaattttctacataacaaaatcttttatcaggaatttattagggaatgagccactctggctaagagattattctggtagcttacttttcaatggtatgttccaaattgtttattttttaatggaaaacttcacagaacatttcccagcattctaaaatagaatactaaacaactagaattacttctgtactgatcaatccactcatcatcattcatcacccatgtggaatgtatgaatatcatagccgctgggcagatgtcacagaacagctgtacatgtgacctttcatgtcacatgacacagtactcacattgctaagttacaacatttggctgccgtcatatgggttggtagaatataagacagtctctatctttttatttacttgaattagtgataaacttt

SEQ ID NO: 263084 - DNA, 401 bp, Homo sapiens
attgatgttgaccttgatcacctggatgaggcagtgtttctcaggtttcctctcagcaagkttatctgctcccctcgttccacattgtaccttttgggaagaagtcaccacgcacagcccacacttaaagaggggagttctgttctacctctttgaggacagagtaactacatggattatttggaattctactgtataggggatttgcctcttctcctgtatttatgtatttattcgattatttatttatgtcagcatgaactcatggatatctattttatcatttggtttataattcaatactacttcattttgttgctcaaatcattccagctttcaccactgagagctctctcagttgactcctttggcatacctcaattaacatactgctatcactg

SEQ ID NO: 263085 - DNA, 230 bp, Homo sapiens
caaacagaaatgtacaaaatgcagttggataaaaataaagaaaactccaataaatggaaggttgcaccatgctcatgaattgggagacttaatagtgtatattctccctaaatttgttgaaaacrttcacaataaaaaatctcagagaattattgttgcaattgaaaagacattacttaaatatatatgaacattcaaaatgcaaaaagtaaccaagacagtcttgctaa

SEQ ID NO: 263086 - DNA, 230 bp, Homo sapiens
caaacagaaatgtacaaaatgcagttggataaaaataaagaaaactccaataaatggaaggttgcaccatgctcatgaattgggagacttaatagtgtatattctccctaaatttgttgaaaacattcacaataaaaaatctcagrgaattattgttgcaattgaaaagacattacttaaatatatatgaacattcaaaatgcaaaaagtaaccaagacagtcttgctaa

SEQ ID NO: 263087 - DNA, 640 bp, Homo sapiens
gtgtgctgtacccattaactcgtcatttacattgggtatatctcctaatgctttccctcccccctcccctcatcccacaacaggccccagtgtgtgatgttccccttcctgtgtccaggtgttctcrttgtttaattcccacctataagtgagaacatgtggtgtttggttttttgctcttgtgatagtttgctgtacgtcaaatatttcttctgctccactgtgtctttcttctcctcagtattccaattacagatatgtcacaccctttgaaattgacctatagttcttggatgctctgtttggttttattttttctttggagggggggctggtctttttgtttgtttttttcagtcttttttttctctttgcatttcagttcagaaagtttctattgacctgtcttccagctcactgattcttttcttgactgtgtccagcctagtgatgagccaatgaagaccattatgtatttctagcattttaaaaattatttcttagtgtttttacctctttgcttacattattcatctgttcttgccatgttgtctactttttccattagagcccttgatatactaatcatagtaatttaaaagtctccatctattaattccaaaatctctgccatatctga

SEQ ID NO: 263088 - DNA, 538 bp, Homo sapiens
aactattcatttagactctattttcctcatttggtgcttacagtttttctttgaataactctttaggtcccaagattaatacccacatacttaatctttttaactttatatatgaaaatcagtaatagataaatagtaacttatgtgcaatagttttgggactttatcttatattctaaaaatctgcaaattaatttgttaattctaatagtgttagttatttacataatttccttgacttttctaatttatttttgtgtatttttataataaaattatttctaaaatattcycatccttctttttattatctggttttgttgttacatcaaatagccattgccagcatttcaagtgttatattaaatagcaacagtgatcaggcatatgtttatcctacttctagtttaagaaaataattctcaggtttctgaagtaaatgtaatacttctccattctacatgtagactattaagaaccatcttgtacactttagtagtttaatcaatggcaaattttattgaacatcttcccagaa

SEQ ID NO: 263089 - DNA, 562 bp, Homo sapiens
cacatctcgttcatcttcgtattccctcttccttaggactatcatgatacgtggatctccacccctgtcaacaaggaccagcttctacttgtccgttcagagcctccatacaaattagaaaaaggcatttcttcctcatgtaaaatttttaagttagtattgtatttatttctcaattataaaaactacaacaaatataaagtcatttttcataaaattcataaatcaaattattgaacataaaataatacaaaattcaaaattgtaatcacaataattaagaatatcagctaactacaatatagtaatgtgttataaaataattacatatcatgcttccttggcaaataaatttattacaacaatttcaatatttatttgtaactgtgtctcattcyatagaaatgaccactgggttagactacatatcttatgatattctagtccttaagtcatgtttaataaattttcaatttgaaaaaacattttccacaggttactgatattcacaaaattaaatacaagccgagagccagataagtatttgaaactgtgtgcagta

SEQ ID NO: 263090 - DNA, 562 bp, Homo sapiens
attgcatcctgccctgcagggccagaaccaccacaatccacctagccagtgtcctcacacccacacatagctgaaggtcttttcccagtctataaagtgtggacaaggtgactgctccctcaaatgtacagacatcaatgcaaggccacaagaaacgaacaaaaaaaaaattcaaaaagtggtgccacaaaaacaaacacaataattttccagtractgattccaacaaacatgtgaaaactaaacaacatacccttaaacaaccattaggacaaagcaaaaatgaaaagggattttaaaaaggatcttgaggcaaatgaaaatgaaaacacaacataccaaaacctatgggatgtagtaaaagcggtaataagagagaagtctatagcaatagatgcctacattaataaagaagaaaggtccctaatgaacgtctaattttacacatcaaggaactagaaaaagaaaatattaagcccaaagttagcagaaggaaggaaataatgaagattggagaaaaaaataaatcaaatgcagaacaaatataaaaaataataaaata

SEQ ID NO: 263091 - DNA, 612 bp, Homo sapiens
ccaggccttttgcaaccacatgcttcaccataagagtcttttttgattagctcccagtctcagaataaggagagacatcaagtagacctaaaatccaaggcagaccctgttgctgagctcagacaactgacaaccagaggtgatccacagccaaccccctgcctatccagcaagaagtaagggtttactactgtaatccactgatattgtgggaattcttgttccatagcattagtgcagcaaaaagctattcattacaataagaaaaacttttgagcatgcatttccaatatatgctatttaaaacttgaaaagtatgatctgaaagctaattagaaatagaattcctaatattttcttttcacataccaatggatggtcttaaacatcaccaggatggtgggtctgaattgggagactactgtgctttagaycaccagattttattcttaaacaaactaaaaataagcatcattgagcagttacttttttccaggaactagagatggacacagaaaagaatgcaacaatgtcattggccttaaggaagatttatccaaaggaaagagcacaaaagttctgagaagaattactttggaagtagaaagcaga

SEQ ID NO: 263092 - DNA, 616 bp, Homo sapiens
tgacactaacagctgccttttataagtggttcctatttaccagacactatacatacataatatagtttaaactcacaaaaactgtcaggtaggtattattgtcattttaccaattgtaatggttaattttattttatgtgtaaacttcactgggctaagggatgcccaaatagctggtaaaacattatttctctgtgcatctatgagggtgtttccagaaaagactagtatttgaatcagtagactgagtaaagaagatctgcccttaccaaatgtgtatgaacatcatttttcctaacagaacaaaaaggtgtaggaaaaataaattctctcttattgagctgagayatccatctcttcctgaccttggacattggagctactagttctcaggcctttggactttggaactgacacagtgtacaccctcccagcccacctggtgttgtcagtccttcagacttggagttagatcattggcttcctggttctcaggcattcaaactcagactgaattacacaactggctttcccattctccagcctgcagatggtaagtcatgggacttctccgctcccatgatcatttgagccaattcccataataaatttccta

SEQ ID NO: 263093 - DNA, 616 bp, Homo sapiens
tgacactaacagctgccttttataagtggttcctatttaccagacactatacatacataatatagtttaaactcacaaaaactgtcaggtaggtattattgtcattttaccaattgtaatggttaattttattttatgtgtaaacttcactgggctaagggatgcccaaatagctggtaaaacattatttctctgtgcatctatgagggtgtttccagaaaagactagtatttgaatcagtagactgagtaaagaagatctgcccttaccaaatgtgtatgaacatcatttttcctaacagaacaaaaaggtgtaggaaaaataaattctctcttattgagctgagacatccatctcttcctgaccttggacattggagctactagttctcaggcctttggactttggaactgacacagtgtacaccctcccagcccacctggtgttgtcagtccttcagacttggagttagatcattggcttcctggttctcaggcattcaaactcagactgaattacacaactggctttcccattctccagcctgcagatggtaagtcatgggacttctcsgctcccatgatcatttgagccaattcccataataaatttccta

SEQ ID NO: 263094 - DNA, 628 bp, Homo sapiens
ctgttctccctcactagcaggccaacttcatgagtggtcatcacaaaaatgctcattaatttagatgaccactcatagtgttacagttttagacagcacactgcattgggaggggtatatgtaattacgttttgtgtgtgtgtattactagggatttgggaggtcaaataataactctcctgctctgtcttgaactgaaaccaaatgagcaataggacaggagcctctgtatacttggccgaatttttctacagagaggacttccactaaacctagaagaatgtgtttggttccctgtcacctctttatatgtgtgtgtatttgtgactaaatacaaaacctaccctgcctttcaggtgarcaccctgctgaatcatatagcttttattaaacatcagaacgattagaatgggaaggtacacatcaatgtgatagtctatattcccaccgaagttaaaaattcggtcattcaactctacggagcatctgatattttgagtaattcacatagttgtgaacaagctattcaaggaccttatgctcacagggcttctacataaataatgctaaaagaaaagcattaagccttttcccaaaaatgtcctcattgtaagggtgtttcttcctc

SEQ ID NO: 263095 - DNA, 628 bp, Homo sapiens
ctgttctccctcactagcaggccaacttcatgagtggtcatcacaaaaatgctcattaatttagatgaccactcatagtgttacagttttagacagcacactgcattgggaggggtatatgtaattacgttttgtgtgtgtgtattactagggatttgggaggtcaaataataactctcctgctctgtcttgaactgaaaccaaatgagcaataggacaggagcctctgtatacttggccgaatttttctacagagaggacttccactaaacctagaagaatgtgtttggttccctgtcacctctttatatgtgtgtgtatttgtgactaaatacaaaacctaccctgcctttcaggtgaacaccctgctgaatcatatagcttttattaaacatcagaacgattagaatgggaaggtacacatcaatgtgatagtctatattcccacygaagttaaaaattcggtcattcaactctacggagcatctgatattttgagtaattcacatagttgtgaacaagctattcaaggaccttatgctcacagggcttctacataaataatgctaaaagaaaagcattaagccttttcccaaaaatgtcctcattgtaagggtgtttcttcctc

SEQ ID NO: 263096 - DNA, 525 bp, Homo sapiens
cacccagaagtgtctctcaccccaggaagcatctgagtggacaccagggttcaatgtgttgctcttaaccttagcaatttctgttgtatagttataaacacacaaacccttgtagttatttctaaataggcttgtgaaaataggattcaatcccaaaagtaaattcatgccactcactaaaagtgccatttcaactggtgtcagstgaagggtggtactgaaatgaaacaccaccaactgattgctgggatagctggctccctcctgctgcactgctactgactggaggaaaattcatcttcaaaatacctcatcaacaatgggtcagttgaaaacttttgcccatttttagaacaaaattggaattgtcctttcatggccattcaaaagcagacagataatatctgcaattatttgcttctttgcatttatggaattgttgctcccctaaagcaggtggcctgaagcaaactgtgccagctatttccagaataatccatgtttgtacattcactccccacacac

SEQ ID NO: 263097 - DNA, 525 bp, Homo sapiens
cacccagaagtgtctctcaccccaggaagcatctgagtggacaccagggttcaatgtgttgctcttaaccttagcaatttctgttgtatagttataaacacacaaacccttgtagttatttctaaataggcttgtgaaaataggattcaatcccaaaagtaaattcatgccactcactaaaagtgccatttcaactggtgtcaggtgaagggtggtactgaaatgaaacaccaccaactkattgctgggatagctggctccctcctgctgcactgctactgactggaggaaaattcatcttcaaaatacctcatcaacaatgggtcagttgaaaacttttgcccatttttagaacaaaattggaattgtcctttcatggccattcaaaagcagacagataatatctgcaattatttgcttctttgcatttatggaattgttgctcccctaaagcaggtggcctgaagcaaactgtgccagctatttccagaataatccatgtttgtacattcactccccacacac

SEQ ID NO: 263098 - DNA, 596 bp, Homo sapiens
aaaattcatcttcaaaatacctcatcaacaatgggtcagttgaaaacttttgcccatttttagaacaaaattggaattgtccttkcatggccattcaaaagcagacagataatatctgcaattatttgcttctttgcatttatggaattgttgctcccctaaagcaggtggcctgaagcaaactgtgccagctatttccagaataatccatgtttgtacattcactccccacacacactccaaaaaattccgacaggaactaaacagaaacaggaacttgccaaaaacaggtctctgacgcatgcacctcagcccacagtcatccagatttctgtcctcctttgttgctcaattaaatagacatttttagatgtcttatttgactttctgaataatttctgaagcactcacacccaccattgtccacacagcttcatggaaactgcctcattcttgtcctcatgacatcctgttccccagcttctctgggcatctttctggcttctctgtctctgtctccttcatgggttcatctttcccgccctcttcctttatcttgtggttgttccctgggatgcccacatccatgccccttc

SEQ ID NO: 263099 - DNA, 614 bp, Homo sapiens
tcttgtggttgttccctgggatgcccacatccatgccccttcctctcactctatggtatagataaccacatggcacatgatgcttactatcagaggatactgaaactatagttcatttcagttagagagctttcaaaaaagttaaatcttttttttaaaaaaagtatacactcatgtaattgcaaaggcgtttacatgctgtattagtctgctctcatgctgctaataaagacatatctgagactgggtaatttataaaaggaagaggtttaatggactcacagttccacatggctggtaggcctcataatcatggtggaagatgaatgaagagcaaaggaacatcttatatggtgacgggaaaagagataatgagagcaaagcaaaaggggaaaccccttataaaaccatcagatctcgtgagacttattcactaccacaagaacagtatgggggaaactgccctcatcattcaattatctcccatccggcccctcccgcaacakggggaaattatgggctctataattcaatatgaacaaaccatatcacatgcccaaaagaaagtaatataagttaaaactcctagaatataccctgtttgcatgaaggca

SEQ ID NO: 263100 - DNA, 551 bp, Homo sapiens
agtgttttgttgctctttgtgtttggttatatttgttaaaaaacaaaacaaaacaaaaaagcaatgcaggaatgcttctgcaaatgtgtggtgaagaaatgaatacatattttaaagaccctaaatcttaaacaattgagggaggattatataagaaaaataactgaaaactacaaatataaaatgaggaacagagttgtcctgggagggcagagcttaagcttcatcgtgtcataatatatccacttatttctggtattgtggaaagggttgtattgatatytctggctttaggtgggaaccaaagttgatttttaattttgagaattgcttgaagcactttctccaccattcatcagaagctctggcatttttttctttttctttttcaacctttcttgtatctcactattcaatgccccctgactcagagagcccaggttaaacactcatttttgttttggcacttgtcttcaaattgatttggagattttctgttccacacaaatgtatacatcctttgtagcaatgtatctcagagggttagcatg

SEQ ID NO: 263101 - DNA, 566 bp, Homo sapiens
gtagtcctataagataatgatagagctgaaaaattcctattgcctagcgatattgtagccataatcatattgtagtgcaatgcattactcatgtgtttgtggtgatgctggtgtaaacaagcctaccatgctgccagtcagatgaaagcatagcacacacatttatgtacagtacataatacttcataataaacaactatgttactggtttatgtatttactaaactacactttttatcatcattttagggtgtactccttctacttgttaycacaggagatgacagctccatgcctggcctatggtatttttttttactttgtaaactttttaatgttctaaaacattttgactcttttgtaataatagtttaaaacacaaacacattttacagctgtacaaaaatattttccttctttatgtccttattctgtatgcttttttttctatttaaaaaattatttagttttttttacttttttaatttttttttttttactttttaatcttttttgttaaaaactacgacataaacacactcattagcctacgcctacacagggtc

SEQ ID NO: 263102 - DNA, 571 bp, Homo sapiens
catactaaatatttgctgattagaagaaacatttgaaacatataagacaggcaaaaggttaatactgtatctctaatagaaagagttgttccaataaataagaacactatttcttttgctgttgttttgagacagggtctcactctgttgcccagtctggtgtgaagtggcatggttactgttcactgcagcctccacctgcmagactcaagtgatcctcccacctcaacctcttaagtagctgggactacagatatgcaccaccacactaaggtaatttttaatttttttttgagatgtggggcctcactgtgttgtccaggctggtctcaaactcctgatctcaagcaatcctcctacctcagcctcccaaagtgctgggactacaggtgtgagccacctaatttggccaagaatattatttcattcccatagaaaaaattggcacacctgatgcccagatcttggctttttaatgtcactctccagtaaaaagaaccagagttgcttggagaaatggctgactccagggctggggcacacaaaaaaaatagataagatgaacctggat

SEQ ID NO: 263103 - DNA, 571 bp, Homo sapiens
catactaaatatttgctgattagaagaaacatttgaaacatataagacaggcaaaaggttaatactgtatctctaatagaaagagttgttccaataaataagaacactatttcttttgctgttgttttgagacagggtctcactctgttgcccagtctggtgtgaagtggcatggttactgttcactgcagcctccacctgcaagactcaagtgatcctcccacctcaacctcttaagtagctgggactacagatatgcaccaccacactaaggtaatttttaatttttttttgagatgtggggcctcactgtgttgtccaggctggtctcaaactcctgawctcaagcaatcctcctacctcagcctcccaaagtgctgggactacaggtgtgagccacctaatttggccaagaatattatttcattcccatagaaaaaattggcacacctgatgcccagatcttggctttttaatgtcactctccagtaaaaagaaccagagttgcttggagaaatggctgactccagggctggggcacacaaaaaaaatagataagatgaacctggat

SEQ ID NO: 263104 - DNA, 551 bp, Homo sapiens
tgaaaagtcatgttgacagcatgtgactgctgatatgatgtgatagaaggggcatttcacctctgtggcattcttcccaaatactcataatcccagtcaaatcatgagaaaacattagacaaacttatattgagcgatattctatacaatatctgaccagtactcttcaaaattgtcatcatcacaaaaagcaaagaaatactgaaaaactgtcacacaccacaggagactaaaraattgtaaaattaaatgcaatatggtaccctggatcagaccctggcacacaaaaaagtacatttgtgaaaatactagtaaaatctgaataaagtgcggagtttagttaacagtaatacaccaatgtttgctttttagtgatgacagatgtaccatggcaacataagatgttacaggggatataaaggaactttctgtattatctttgcaacttttctgtaaatctgaaacttcaaaaattaaaagatttttttaagaaatgggcaaagagcatgaataggcagttcactaaagcaatgcatgtagtcataaatcca

SEQ ID NO: 263105 - DNA, 566 bp, Homo sapiens
gagtgatcccaggtgagagaagcagaagattcaccaagctgagcctcacccaaaatggtggctcacagaatcatgagcaaataaaatggttttaaaccattaagttttgttttacaacaacagataataaccttataagaattttcttatatctaatttatacatgagaaatataagacttagttaagtaccttgtctagtaagtggcagagccagaattcatagggacatagctagtaattttaacagccagtatttgtattctgaaactctgaactaccttactcatcatccatcttaggaaaatctaaaactgagaaattacaaacaactgaaaattaccaacctcaaagggggattgtttcagtaaattctaatacaagcaaatacaaaatctatgatacaacagaatacccctaacracagaataaaatacaattatactcccagcaatatatatctgttatgaatatgagaagataataaaagttcacttttatggagtgttactatctgccaggcactgttctgggtgttttacatgctttatttcttttgctgttcac

SEQ ID NO: 263106 - DNA, 601 bp, Homo sapiens
tgtttaaagagcagaatataatatggttaaaaccaatgtaattcatatgtaagtaaatatttatatacatacatgtaaatgtgccctcattttttaaaaaaccctgaaattaaatacatgaaaatctaaactattatcgctgagcagtggcatttcagataactccaattttctgctgaatattttcaagcacctgggacaattcccattgaaatcagttgatactaagaggcatcaagggttagcaggagttcaaggtcaggatctctggaccaattcttggtctgggcagctactgtgcatttgcatcacagcacactgaaggccarcgtagatacagctgccgagggaagttctgctaagtatgattagaaccacagtagagttgaaggacttgtacccctaaaattctctagaagagggtctcatgaaggtgtagatacttcagggaagtcagatacacactgagtccccagtcagagcacacgaaagtctttttcagcttcttcggcatgtagattcttttggaattggacctattaaagaacatcaaccacagtgtctgcaaccaatatgtgtttgtataaaacatctggggcca

SEQ ID NO: 263107 - DNA, 619 bp, Homo sapiens
ctgtgcaacataacttctagccttgtgtggctatttaaatttaaatgatttaaaatcaaataaaatttaaaattcagttgctcagttacattagccgcattttaagagctcaatagccacacatggctaccatrttagacagcatggaagaacatttccattatcatagaaagttctattgaacagtgctaaactgaagatgatttggttatcaaacaaaactttaaagaatataaggcttattccactttgaaacaaatcaaaaagtaaaaacttgaaccagcatctataaaattctagccatctttcctcagaaagaaaaaaataaaaaagaaggaaaggtcaggacaacatgatacccattaataaaagcagcttacattccttcttcctagcaaagtgcagcacagctcaacctcaaatggaacgtgacattaatgggctaaaaggaaagatggagaacagagagcccctgaagctaaacagacccagcaccgtgctctgcacacttcaagccaaagccatttcatttccctttactcttatcagtcagtctgttgacctgatgtagaaatgaatactgatgagaaaaaagtacaggcaacatggtgcacccttg

SEQ ID NO: 263108 - DNA, 506 bp, Homo sapiens
gtgaacacatgtaattaaccattgcagaaggataaaggttccaggtccctagtatttggggcctcccttccagctcccctttcttgcttctgtcctcaaacctcagtagcaacaccagtggagactaatggtagtgatggctgtaatcacagcaaatttagccatagaggctgcctgccacctgtcccatttagaagtttgttgacagtcacacagtctccatgagctttcagaatgggatgcctaatatcaacactaacattgctctgggacaaggggacagtagagaatatttgtctctctattttccccaaactcccctctcccaaatcctgcccaagatactgaaaactggaaatgcttcttaytgatcatgtgaccacttagaaaatttggaaacgtaaatgagatcttgttaaatacctaggcatctcaaaaaaaaaaagtgctactggtgcagggagggtattcattaaaagagtccttctaggcttttaaaaccaatt

SEQ ID NO: 263109 - DNA, 511 bp, Homo sapiens
ttccccaaactcccctctcccaaatcctgcccaagatactgaaaactggaaatgcttcttattgatcatgtgaccacttagaaaatttggaaacgtaaatgagatcttgttaaatacctaggcatctcaaaaaaaaaaagtgctactggtgcagggagggtattcattaaaagagtccttctaggcttttaaaaccaattagaattttctctgggtttgttatatagaaggagaaggaaatgtgttcaccttctagaaaaataataattmtttcagactcttgcctttatggtttatgaaggagatattttctccagctttcttgaggcataaatggcaaataaaaatatatatatttaatgtatgcactgtgattttttgatgcacattgcaaaataattgccacaatcaagttaattaacacatctagcatttcatgtagttaccattttctgtgtgtctttgcgatgagaatgcttagggtctattttcagagaaccaactttcagtt

SEQ ID NO: 263110 - DNA, 622 bp, Homo sapiens
tgactgaattgctacaatctcatgataaaacttaaacagatgaggagttacttcctgtggatgactaaagaaagtgctttcttaagatggatctactcctggggaggatgctctgaacagtgttgaaatgacagccraggctttaaaacattacaaaagttgataaagcagtaacagagtttgagaggatctatcccaattttgaagaattttgaaagaagttatcctctgggtaaaatgctatcaaacagcatctcatgccacagagaaatctttcgtgaaagcaagagtcaatcaatgcagcaaacctcatttttgtcttatattaagaaaatgccacagcacctgaaccaccaccctgatcagtcagcagccgtcaacattgagagaagagtctccactggcaaaaagattatgactcactgaaagctcggatgatctttagcattttttttagcaataaagtattttttaatgaagatatatatacttttttacatataatgctattgcacacaatatactacagtatagcgtaaacataacttctaaatgcactgggaaaccaaatcatttgtgtgactcactttattgcaatatttgccttaatgcaacggtctgt

SEQ ID NO: 263111 - DNA, 622 bp, Homo sapiens
tgactgaattgctacaatctcatgataaaacttaaacagatgaggagttacttcctgtggatgactaaagaaagtgctttcttaagatggatctactcctggggaggatgctctgaacagtgttgaaatgacagccgaggctttaaaacattacaaaagttgataaagcagtaacagagtttgagaggatctatcccaattttgaagaattttgaaagaagttatcctctgggtaaaatgctatcaaacagcatctcatgccacagagaaatctttcgtgaaagcaagagtcaatcaatgcagcaaacctcatttttgtcttatattaagaaaatgccacagcacctgaaccaccaccctgatcagtcagcagccgtcaacattgagrgaagagtctccactggcaaaaagattatgactcactgaaagctcggatgatctttagcattttttttagcaataaagtattttttaatgaagatatatatacttttttacatataatgctattgcacacaatatactacagtatagcgtaaacataacttctaaatgcactgggaaaccaaatcatttgtgtgactcactttattgcaatatttgccttaatgcaacggtctgt

SEQ ID NO: 263112 - DNA, 622 bp, Homo sapiens
tgactgaattgctacaatctcatgataaaacttaaacagatgaggagttacttcctgtggatgactaaagaaagtgctttcttaagatggatctactcctggggaggatgctctgaacagtgttgaaatgacagccgaggctttaaaacattacaaaagttgataaagcagtaacagagtttgagaggatctatcccaattttgaagaattttgaaagaagttatcctctgggtaaaatgctatcaaacagcatctcatgccacagagaaatctttcgtgaaagcaagagtcaatcaatgcagcaaacctcatttttgtcttatattaagaaaatgccacagcacctgaaccaccaccctgatcagtcagcagccgtcaacattgagagaagagtctccactgscaaaaagattatgactcactgaaagctcggatgatctttagcattttttttagcaataaagtattttttaatgaagatatatatacttttttacatataatgctattgcacacaatatactacagtatagcgtaaacataacttctaaatgcactgggaaaccaaatcatttgtgtgactcactttattgcaatatttgccttaatgcaacggtctgt

SEQ ID NO: 263113 - DNA, 622 bp, Homo sapiens
tgactgaattgctacaatctcatgataaaacttaaacagatgaggagttacttcctgtggatgactaaagaaagtgctttcttaagatggatctactcctggggaggatgctctgaacagtgttgaaatgacagccgaggctttaaaacattacaaaagttgataaagcagtaacagagtttgagaggatctatcccaattttgaagaattttgaaagaagttatcctctgggtaaaatgctatcaaacagcatctcatgccacagagaaatctttcgtgaaagcaagagtcaatcaatgcagcaaacctcatttttgtcttatattaagaaaatgccacagcacctgaaccaccaccctgatcagtcagcagccgtcaacattgagagaagagtctccactggcaaaaagattatgactcactgaaagctcggatgatcyttagcattttttttagcaataaagtattttttaatgaagatatatatacttttttacatataatgctattgcacacaatatactacagtatagcgtaaacataacttctaaatgcactgggaaaccaaatcatttgtgtgactcactttattgcaatatttgccttaatgcaacggtctgt

SEQ ID NO: 263114 - DNA, 537 bp, Homo sapiens
ctagcaagaacaaggaagtactcactcttccagaattccctcaaataccccattcttgcataaagaatctacaactctgccactgtagctgccctagttgaatgtaaagtggtaaaccatgattatcccccaccacatatactataataaaagtataagtcatgttcaaagttcttccatatatattaccacattccattcttaggtacatggttagacaggcagggtagggtatttttttaattttataaatgaagaaagacagtctcggagattaattttcctaaggccacataggcttatagtttaaggcaaatctgaaactgtaattcgggtctctttaactcctatttcaaaactggaggtgccgactacactgcaactgtggtaggagtgagacttccaagctatgtctaccatttactattcctactccagtttgggctgggatggggagggcagcaaggagctcctgatgtggaagcagggamagttcaggtgaggcaaggagagggaggaggcagcaaagggacgagc

SEQ ID NO: 263115 - DNA, 652 bp, Homo sapiens
atctcacagtggtttgtatttgcatttctctcataattaatgatgtttagaaatttttcatatacctgctggccatttttatgttgtctttggagaaatgtctattcaatatataacaggttatatgttttatctatataaacaggttattttcttgctattgggttgtgtgagtcctttattttttaatattaaccccttatcagatatamggttttcaaatatttttctccaatccatacgttgccttttcacttcgtcagttgttttgttggctaagcagaagcttttcagtttaatgtagtcccatttatttatttttgcttttgtggactgggctttcagtttgatgtccaataaatcattgccaaggccagtgtcaaggatcttttcccctatgttttcttctagaagttttatgccttcaaatcttgaatgcaggtcttttacctatattgagtttatttttatgtaagataagggtccaatttcattcttttgcatgagaaaattcagttttcctagcattacttattgaagagactatcttttccccgttgtggacactttcttcttgtcaacacataaatatattcacacatatatattattaaaaatattataactgttgaatcttaaaaattatttatag

SEQ ID NO: 263116 - DNA, 652 bp, Homo sapiens
atctcacagtggtttgtatttgcatttctctcataattaatgatgtttagaaatttttcatatacctgctggccatttttatgttgtctttggagaaatgtctattcaatatataacaggttatatgttttatctatataaacaggttattttcttgctattgggttgtgtgagtcctttattttttaatattaaccccttatcagatatacggttttcaaatatttttctccaatccatacgttgccttttcacttcgtcagttgtttygttggctaagcagaagcttttcagtttaatgtagtcccatttatttatttttgcttttgtggactgggctttcagtttgatgtccaataaatcattgccaaggccagtgtcaaggatcttttcccctatgttttcttctagaagttttatgccttcaaatcttgaatgcaggtcttttacctatattgagtttatttttatgtaagataagggtccaatttcattcttttgcatgagaaaattcagttttcctagcattacttattgaagagactatcttttccccgttgtggacactttcttcttgtcaacacataaatatattcacacatatatattattaaaaatattataactgttgaatcttaaaaattatttatag

SEQ ID NO: 263117 - DNA, 587 bp, Homo sapiens
atatacctaatgctaaatgacgagttaatgggtacagcacaccagcatggcacatgtatacatttgtaactaacctgcacattgtgcacatgtaccctaaaacttaaagtataataataataaaaataaataaataaataaaacaacccaatagaaaaaccaccacctcctttctgataaaggggaagaaattaaagacttacctaaagggtctattatatattgagtatgtgtgcacatgtatgtgttttaatgcaaagttaaattaagttctaagccagacaagtagaacctagaagcaaatttttgaccgaaaagaagtcaaartgaattgtattttatccagagaagtaaatctatttttatttattattacttcttgactctttaaaaaagaaaaaaaatttgttatacttttctgttaaaatcaggtataaaataatactgttgaaatagaagttcaaaccagaaaagaagaaagaaacaaatattctgaccacaaaggataattcagttactgtgattgagctctacacatggccccaagcttcttggcagtcaagagcaaaaggaaaacacagcgagtt

SEQ ID NO: 263118 - DNA, 611 bp, Homo sapiens
atcacagagattcttttcaatgttctataactgggttgtcatttttaaattgtagccaaaaagagtatttctcaaaggaaaaaaaaaagatttttttaaygaggaaaataaattctgttccagccaataaagcatattgttgaatgtgtttcttagtagagagtataagcatacgtttcagttctttcttttattgttgcgaacttcaaatcactaaaaaaaagtacttggaatgtgattttagtttttgtttattttttcatcagcatatacaactagatatactcaggttgatttcatcttaggataatgtcaaaggtacttggttttactttttaaccacatttctcactaactagatgtttttagtccctttccatctttccagagaagtgtcagattcccctagcttcaccaagaagctcaacatctaaataaggagatactacttaaatagtttgaggtaattactaactcaagaaaaggtgtcatcctgtcttatttaatgagtaaattattaagtaatttagtcagtaaatgctgaaataagaagagggatgtaagatgataaaggaagacttacactatcatcatcatcatcatcatcatca

SEQ ID NO: 263119 - DNA, 611 bp, Homo sapiens
atcacagagattcttttcaatgttctataactgggttgtcatttttaaattgtagccaaaaagagtatttctcaaaggaaaaaaaaaagatttttttaacgaggaaaataaattctgttccagccaataaagcatattgttgaatgtgtttcttagtagagagtataagcatacgtttcagttctttcttttattgttgcgaacttcaaatcactaaaaaaaagtacttggaatgtgattttagtttttgtttattttttcatcagcatatacaactagatatactcaggttgatttcatcttaggataatgtcaaaggtacttggttttactttttaaccacatttctcactaactagatgtttttagtccctttccatctttscagagaagtgtcagattcccctagcttcaccaagaagctcaacatctaaataaggagatactacttaaatagtttgaggtaattactaactcaagaaaaggtgtcatcctgtcttatttaatgagtaaattattaagtaatttagtcagtaaatgctgaaataagaagagggatgtaagatgataaaggaagacttacactatcatcatcatcatcatcatcatca

SEQ ID NO: 263120 - DNA, 461 bp, Homo sapiens
aaactaatgtgagctttagagcgattcacagattggtgctgctaaacagacttgatagcaatttgtgaccagatagatagaaaaattgagagtgttcagaaactttcagaatagttgaaaaaaaacttaacagtataattttatgtctgctgaatctaatgatgaaagcaatgggagtttatattttttatgtgttttaattttctttttctggtaattcatgcctgttttctttcataaaaatatctgtatatcttgaattagaactttaaaaaatctggtcttccaccacagatagtttgagaacatgttgctgaaccacaaccaagtcaggtttgttacttaattgagtataaaaatagtcgtgtgtcacttaacsacaggaatgccttctgagaaacgtgtcatcaggtgatttcatcgttatgtgaacatcacagggtgtactttcacaaaccgat

SEQ ID NO: 263121 - DNA, 600 bp, Homo sapiens
attcctgcagctgtgccccccagacgttagcctgcataagaatcacctggaaggcttattaaaacacagaatcctggaccctggaattcttaatacactgccccaaattctgattcagtagatctagggtgagagtgaggaatyagtatttctagagaaatctcacataatgttgatgatgctggtccttggacacaacatgtaatggcattgccctagagcagtggttctcaaatattggcctacttcagaattaccttgagggcttgttaaaatataggttgcacctgggcgccacccgcagcatttctgatttagtaggtctgtgcagggtttagaaatgtccatttctaacaagttcccaggtgatgtacaggctgcttgtcctgccaccacactctgaatagctatgctctaggaactttctacatgacagtgtttttttctgaaaaaaatgccaatttctagaaatcttcacaaaagagatgctggagcagtagatggcatatgtaggctagagtcaaatggaaggcagagaatatcaatgagaaagaatatatggtagggagagaccaaataggaggaaaagaggaaacatct

SEQ ID NO: 263122 - DNA, 600 bp, Homo sapiens
attcctgcagctgtgccccccagacgttagcctgcataagaatcacctggaaggcttattaaaacacagaatcctggaccctggaattcttaatacactgccccaaattctgattcagtagatctagggtgagagtgaggaattagtatttctagagaaatctcacataatgttgatgatgctggtccttggacacaacatgtaatggcattgccctagagcagtggttctcaaatattggcctacttcagaattaccttgagggcttgttaaaatataggttgcacctgggcgccacccgcagcatttctgatttagtaggtctgtgcagggtttagaaatgtccatttctaacaagttcccaggtgatgtacaggctgcttgtcctgccaccacactctgaatagctatgctctaggaactttctacatgacagtgtttttttctgaaaaaaatgccaatttctagaaatcttsacaaaagagatgctggagcagtagatggcatatgtaggctagagtcaaatggaaggcagagaatatcaatgagaaagaatatatggtagggagagaccaaataggaggaaaagaggaaacatct

SEQ ID NO: 263123 - DNA, 622 bp, Homo sapiens
gatgatgctggtccttggacacaacatgtaatggcattgccctagagcagtggttctcaaatattggcctacttcagaattaccttgagggcttgttaaaatataggttgcacctgggcgccacccgcagcatttctgatttagtaggtctgtgcagggtttagaaatgtccatttctaacaagttcccaggtgatgtacaggctgcttgtcctgccaccacactctgaatagctatgctctaggaactttctacatgacagtgtttttttctgaaaaaaatgccaatttctagaaatcttcacaaaagagatgctggagcagtagatggcatatgtaggctagagtcaaatggaaggcagagaatatcartgagaaagaatatatggtagggagagaccaaataggaggaaaagaggaaacatctcaagcatgccccaacaaagtgatgaagtggaaagaacactagtttttcggtcacatagacataggttcagatcccatgtgtgatgcatctgatgcaaaatatatatcccaagccattttcccaattgaaaatgtgtataatgatgcttatttcatagaattcttctgtgtgtttcatgtggcaaatacattcaaac

SEQ ID NO: 263124 - DNA, 532 bp, Homo sapiens
tcgtctcagcatatgccatgttataatccaagttaaaatgatttaggtttctgcctattaactccaagcaaagttcaaatcccacataaataaggtttttctactgtcaacatagtgatcattttcctgcaccaggatttattttcatattcccaaagttcctaattctgcacgttttccaactgttgcctgcttcctgaaatagtgctaatttgacccagggtctgttcctgtcagtcactggatgagaagttttttacaatatatttgtacaactgtyacactaggacaaggaaggcaatggaaatctcaggccagtattggccatcccacttccagaccattccgagcaacattagacatgcttctcagtttttattaatctctccaagcaaagagatcgcaaaccactatgcttttcttctatttttaacctttatattttaatttacaacaaagaaatacatatatcttttttaaaaaagcaagttgaaccaaaacgtttataattaaggtgacagtatgatttatt

SEQ ID NO: 263125 - DNA, 532 bp, Homo sapiens
tcgtctcagcatatgccatgttataatccaagttaaaatgatttaggtttctgcctattaactccaagcaaagttcaaatcccacataaataaggtttttctactgtcaacatagtgatcattttcctgcaccaggatttattttcatattcccaaagttcctaattctgcacgttttccaactgttgcctgcttcctgaaatagtgctaatttgacccagggtctgttcctgtcagtcactggatgagaagttttttacaatatatttgtacaactgttacactaggacaaggaaggcaatggaaatctcaggccagtattggccatcccacttccagaccattccgagcaacattagacatgcttctcagtttttattaatctctccaagcaaagagatcgcaaaccaytatgcttttcttctatttttaacctttatattttaatttacaacaaagaaatacatatatcttttttaaaaaagcaagttgaaccaaaacgtttataattaaggtgacagtatgatttatt

SEQ ID NO: 263126 - DNA, 573 bp, Homo sapiens
attttttcatccaaggaagctcaaattcagctcctgtaaatatttttcttatgtggaataaattgctttaagtttgtattaaaagcaaacttaaagcaattaaaggatatacatatggtgtttttttgttttgttttgttttgttgtttttgtgatagagtcttgctctgtcacccaggctggaatgcagtgtcaccactccacttactgcaacctctgcactcccggttcaagcgattctcgtgcctcagcctcctgagtagctgggattacaagtatgcaccaccacgcccagctaatttttgtatttttagtagagatggggtttgccatgttagctagactggtctcaaactcctggcctcatgtgatccacccaccttgacctcccaaagtgttgggattataggcrtgagcaatcaaacgtggcgtagtgtaccatttagtaacataattgatctaccatacatacacactgctttattgctgtgattagattttggtagaatagacaagaaaaacacacagaaagaaataaaagatcaatattcttccagagcatagaacagttca

SEQ ID NO: 263127 - DNA, 604 bp, Homo sapiens
taaagatctcttttacccagtcaaggctatctccaataataaaggtgaggtatggaaaaggaaaatacctgacttaaagataacgccagtcaattaagaagatttctagagatctaayaggaaaaccaccttagggtaacaccaattttatccaaatcaaattgatatattactccaaaccacagtatcagcccttgtctaatattgaaatgaactgtatttttctttaaagaaactaatcttccagagagttaattaaccatgtaggtaaataagatagaaaggaaggagaaaggctagagaggatgagttgaagatgtgtatccatgtgtatgtttgttagcttcactctacagcaatcctgcactcctgatagcagtaagaaaaattctcacagatcaatttgataacaaggaattcccaaactctccctaaagtattaatcttgagttcctgagaggcagagcttgtcacagaggcttgcaggggatcttaatgacctggcaagagagtacctgttatgggatgataactagacagagaaatgcctccaggtcattgatagcaggaagtgcagtggagactcgactcctacaccttatat

SEQ ID NO: 263128 - DNA, 623 bp, Homo sapiens
tgcactgctccttgccatgtgcagctcaggaaataatccagaattcagagcctctcaaaacagaaccctatcttgcctttgccatccctgcccccagggtgtgtgccagttcgaatcgggtcagtcctgctccttcagatttgaccttcctagaacccaccatgtcatggaagcaacagctccaggttyctcacccgtgttcattaggaagaatgaaaccactgccaaagtacatgctgatcttttagacaaaatgcagtttcctccaacctctcctttgtcactggcctcacctttgtctcctttgtcttactgtctgcatcttttttcactaattagtttgttcagtcccatagtttagtggttgaaacgatgtagatccttttgactctgttagcctttgttggaagactaaggaccaagagagaactaactcagtctcttcatatatctggacctatgatatatacacttgtgagcaatggagaacccataaactgctggtcacattcacagcagagcagagaaaatacaatctacaaactgaaagaagcagcagagacaagacagagagtcccagactgccaaccaaaccttgatgcccacgacctcccctttcaggg

SEQ ID NO: 263129 - DNA, 587 bp, Homo sapiens
agagggaagtgtatcaaaaaatacctcccaggttgtatgtggtataaaggaaattcagattttcaaaatattcccacccaaggggaaaggctgatgcaaaaaaagaggcatggaaacataatatagatacttctgagggccaggacattaaggcagaagcaagaatggagttcactagtagcagatggcatcacaggcccaaagaccaggtaggaacaagcacctcagtaatgatgaggaagaggctaatgcccaagacaagtggaatgatatctctccccaacaggtttaaagtaatttagaagaccaccaagggacactggtaaacayacctaaagcttccctctctagccagctggaggtcttacctgctccagcatacctggcagccatatgtggggagcaaaaggggttgagcaaggactgtgaaaggttgaagatttgtccaaataagaccgtctaaaaacaaaagagcctctttttaactagaagagaataaattgtatttaagtaagacacatgtacacacacacattgaacccagctaaaggggctcaagaacaatatgagagtagcaatagaaaatg

SEQ ID NO: 263130 - DNA, 587 bp, Homo sapiens
agagggaagtgtatcaaaaaatacctcccaggttgtatgtggtataaaggaaattcagattttcaaaatattcccacccaaggggaaaggctgatgcaaaaaaagaggcatggaaacataatatagatacttctgagggccaggacattaaggcagaagcaagaatggagttcactagtagcagatggcatcacaggcccaaagaccaggtaggaacaagcacctcagtaatgatgaggaagaggctaatgcccaagacaagtggaatgatatctctccccaacaggtttaaagtaatttagaagaccaccaagggacactggtaaacacacctaaagcttccctctctagccagctggaggtcttacctgctccagcatacctggcagccatatgtggggagcaaaaggggttgagcaagractgtgaaaggttgaagatttgtccaaataagaccgtctaaaaacaaaagagcctctttttaactagaagagaataaattgtatttaagtaagacacatgtacacacacacattgaacccagctaaaggggctcaagaacaatatgagagtagcaatagaaaatg

SEQ ID NO: 263131 - DNA, 484 bp, Homo sapiens
aagaatcaatttgtccatcattccattatcctgcccaaacacttaacaattaagggacaggccagaaggcttcagttaattacataaaaggttttttttgttgtttgtttttaagttaggtttaaagagtccatgagctgctgacagtctaagaaaaattctttcaggcatttagctggaagttgtcacagtttgaatggatggtttattcaaaatgaagattaaatttctttatagyaattctaatttcatggaactttaaatcttaaaaaatttaatgaaacaccctaatcttatagaaaataaaagtaggagccagtgaatagaagtgactttcccaagttcccatagctaaatatatggcaaaactaggaatagaaggacccaggtcatcagactgtggaaacagggccctattttacttcaggatgtgccaataatttatgatgatgtgaatcttctgaaacttatacatgattcaaag

SEQ ID NO: 263132 - DNA, 612 bp, Homo sapiens
aaatttctttatagcaattctaatttcatggaactttaaatcttaaaaaatttaatgaaacaccctaatcttatagaaaataaaagtaggagccagtgaatagaagtgactttcccaagttcccatagctaaatatatggcaaaactaggaatagaaggacccaggtcatcagactgtggaaacagggccctattttacttcaggatgtgccaataatttatgatgatgtgaatcttctgaaacttayacatgattcaaagacactggggaggtgggaaaaaatggatttggaagggatgaggaagaataagaggatcaaatagcatctttattcaggctccctgcaatggttgaaacagagaatattgtaaagaatattacatgccttcctgaatcaaaagtagcacagccctgctggcagctaaggaagcagggtaatagaaatcccaacacctccacactcagcgcctggaaaatgagaacctaaagcttactgtattaggataaggacaagcccaaaatcaatcatgacccatgccagccttaaacagttaccataatctcttacacttgtgtattattctcttatattaaaataagaatcctagttg

SEQ ID NO: 263133 - DNA, 534 bp, Homo sapiens
cactgagtttttcacaaattggctggacaggctgattcccaagacaagaagagatcatccacaaaatccttaaataaaaagagcctaagtgctcatttttggtgacagcaagcaaagagggagatgggaagacagcattttactcagtagwcagtcgtaggaggaaaagaaccagggaatggaagcagtccaaatccctaaggctttcagaaagcagggggaaaaaataaaagctagacatgggactgaaatccagaggttgagacatgacccatcaggcacataactggcaggaagcccagcagcgaggctccctcttaggaactaagcatctgcctgttttcacgtctctgcaacatactaaattatctgttagcaagtagttgcagcatccacaaagatcagggacacaggacacttagaaaattcaattgtgtatgtaaatatttacctagctacttccttggagtctacagacctgtgacattttattggcagacagactttatgatttcagcgtgccagtgtatttta

SEQ ID NO: 263134 - DNA, 534 bp, Homo sapiens
cactgagtttttcacaaattggctggacaggctgattcccaagacaagaagagatcatccacaaaatccttaaataaaaagagcctaagtgctcatttttggtgacagcaagcaaagagggagatgggaagacagcattttactcagtagtcagtcgtaggaggaaaagaaccagggaatggaagcagtccaaatccctaaggctttcagaaagcagggggaaaaaataaaagctagacatgggactgaaatccagaggttgagacatgacccatcaggcacataactggcaggaagcccagcagcgaggctccctcttaggaactaagcatctgcctgttttcacgtctctgcaacatactaaattatctgttagcaagtagttrcagcatccacaaagatcagggacacaggacacttagaaaattcaattgtgtatgtaaatatttacctagctacttccttggagtctacagacctgtgacattttattggcagacagactttatgatttcagcgtgccagtgtatttta

SEQ ID NO: 263135 - DNA, 299 bp, Homo sapiens
ttcatatttggatatttcaggatgaggcagaggggctggatattyccagaagtggaaaaaaaggcatggagacagaacatttccatgtaaataagaaaaacaatacttttttaagtttagctggagcacacagcatggaaaaaggaataatgaaaccatgagaaataagggtgaaaaggttactcaaaaccaaattaaggagggtcttaacactgccacgcagagaactccaaataaagatggtaacaagaaaagaagacaagagaaataaacactgcacttagccaacaccttgacca

SEQ ID NO: 263136 - DNA, 634 bp, Homo sapiens
ccaataataacaatagctaacatactctgcctggcatgtgcagtctcttttgatccttcaacagccctgggaggtagatgcagtcatctggcccacttacaaatgggaaaaccaaggaagagagaagttaagtaaatagtcatggatcacagaggtagaaagtaaatgaatgaatgaacatttctctcttccttctcaacccagagtccagtgtctgccagcagttcttgcctaaytcttcccttctgcatcaggtgttctcctggataaggaaatgaagtcctcagactatatttgtttctttctatgaagcaatctggattagtctctcaacctggacacttgtcatatcatcttgtcctcttgcagtttttggcctctttcagtttgaaaaagcccttgacctcacctcacactccaccattattattctgttttcttctcagaattttcactagtttatcttcagggtttttttcttccactacatctcatcattttcaaatgtcagattaacttgtcaccttgcatgcccttctggagaccttaaaatcattgttcatcaagaccatgccggaatcaacaacccaatccagacaaaaactaagaattaaaatatcattactggaatggg

SEQ ID NO: 263137 - DNA, 614 bp, Homo sapiens
gggaaaaccaaggaagagagaagttaagtaaatagtcatggatcacagaggtagaaagtaaatgaatgaatgaacatttctctcttccttctcaacccagagtccagtgtctgccagcagttcttgcctaattcttcccttctgcatcaggtgttctcctggataaggaaatgaagtcctcagactatatttgtttctttctatgaagcaatctggattagtctctcaacctggacacttgtcatatcatcttgtcctcttgcagtttttrgcctctttcagtttgaaaaagcccttgacctcacctcacactccaccattattattctgttttcttctcagaattttcactagtttatcttcagggtttttttcttccactacatctcatcattttcaaatgtcagattaacttgtcaccttgcatgcccttctggagaccttaaaatcattgttcatcaagaccatgccggaatcaacaacccaatccagacaaaaactaagaattaaaatatcattactggaatgggaaaggaaaataagactcttccccagctgcatatacatctgtgtatttctttggatgttgactttgaaatgctaaaacactccca

SEQ ID NO: 263138 - DNA, 581 bp, Homo sapiens
gattagaattgttgggtcataggacagatatacctttaactctttaagaatgtgccaaacagtttacatttccaccagtaatggcaaaatttctgtttgctccacatcctcctgaacattggtgtttttaatcttttatgttttaaccgttctagtgagtttgcaatgacatcttactgcagttttaatttacctttccccagtgactaatactcttaagcacttttccatgtgctcactggttttcatgtatcttcttttgtgaagtgccctttcaaatatttgctcatttaaaagctgagctgtctttttattgctgcattataggggttctttatatattccagtcaaaagtcctttgtcagatttatatgttgtaaatactttctcctgaactttgacttgtctattaatcttaatagtgtcttttgatgaataaaagttttaaattttgatgaagtcacaatttattatttccctttatggttaatacttgcatyctctctaaagaaaccattgcctacacaaggttgtgaagatttttaaaatattatcttctagaagctttatagttttagctc

SEQ ID NO: 263139 - DNA, 602 bp, Homo sapiens
catccagaattaatttttgcatgtggcttaatatagaggtaaagttctccccccgaccgccaccagggccctaattttgatacttatttcagtaccatatattgaaaagattttcctttctccattgagtgtcttaatatctttttaaaaatcattcgactccggcatacgtgtagctctacatctaggctctattctgtcctattgratgtactgtttatccctttgccaataatatactaactgtagctttgtggtaagtcttaaagtcaggtagtgcaattcctttaacttgattttgttttggctattctaggtcctttgcatttctatataacttttagactcagtttatcaatatctacaaaaaagcatgaagtcttgatagacttcaaagcaacaattcaccctccttggaaatatttaaagatgtctatattaagctgttgggaaaacagatggggaaaagattgtggaagtacagaatgaagcagctgatgagcactgaacttcttttaggggatgagagtgttttgtgggctcaatctcccagttcctgctttttcttttcttttctttttttattatactttaagttttag

SEQ ID NO: 263140 - DNA, 573 bp, Homo sapiens
tcaaatggtacatctgctgtggaaaatagtttggcaagtcttcaaaaagtgaaacacagaattaccatatgacccagcaattccactcctaggtatatacccaaagaaatgaaaacacacattcactctaaaacctgtacacaaatattcatagtaacattatttataacagtcaaaaagtaaaaacaacccaaaagtcgatcaactgattaattaataaacaaaatgttgtacattcatacaatggaatgttatttggccattaaaaggaagacagtactgacatttgctatatcatgaatgaatctggaaaacattatgcaaagtggaagatgccagacacaaaaggcyacagatgattcaattcatatgaaatgtccagaataggcagatccatcagtggttgccaggggtaggggaaacgaaggaatgggaagtgaccgatactgtttatgatgtttctttctaaggtaatgacaatgctctgcaattagatatacttaaaaattaaaaataactttaagaaaaggagaggtactttaaaaaaaggtttaatattttatacactcaagc

SEQ ID NO: 263141 - DNA, 551 bp, Homo sapiens
aggcgggagcgtgcatgtcaaggacctcacagttaacatggcggggggcgggggtggggtcagcggggggaatgagaaggatggaggcagagggtcgggggctcatgcggggctgggttggctttgccaggagatcagactaaatcctgatagccgtgagagctattgtagaaataatttcaagctgatcagatttatttgggtttactgtaggagggaggaggctgtttttgtgtatttgtttaatcttttttggacaagccttaagattagtaaaggactatacgaggtcctkaatattgaaagagccaatatataccgtcatacattcttccaacattctcgttattcacgtagtgcattcagataaatatattctcaacaaatatttccttcatttgtaacatctaggcagaggtgggcaagagcagtataaatagagatggcaaactttgatgaccttctttatatgcctcaaggcctcaccactgatatgtcattgagtatttcacactggcttcctctgactctttttcgatcaaggtcttaac

SEQ ID NO: 263142 - DNA, 608 bp, Homo sapiens
aaccactatttggctccatctgctccactgaggacaatcatttccaaattaaagagtgtaaagaaaaacctggttaggatttgaagtccaagagtgataaggggatagcaggaaacacctgttttaaacgagttctcatgaaagacatgtcagtcgctgaaacaacctgtggatatgactgcagaattgttgtcagaactccagggaaacaatgaacgaagtccagatactgataatcactgccctattttccaaagtagattctaaaaactccagaatggtgaacttaatgtaaaactctggcaaaatcaggaataatatagacggtgaacatttgactcctaacaattgctgatttcttttcaacactgatttaacaaagaaaatgtcacacgaaataacttccttccctttttttggataggattactagagcagccaaccagggaaataacagtgaaacaatagcttacagctgaaagagaccagtggggtgagttgagattacaatcctgaagttatcacttayactttactctgagctagatggggttccaaaggctttatatatacagtatcattagtcatctatttaatccttacaagga

SEQ ID NO: 263143 - DNA, 569 bp, Homo sapiens
gcctgccctgaccaacctatttaaaattgcaaacatgctccctcccttgctctacttttgtttcctacacacttatttatctcctagtttacttattatgtttcctgtttattgggctccccaacactaccgccaccaccactagaacaaaagccacgaggacagggatctgtatctactttgctcagtgatgtatctcaagtacttaaaacagtgcctaacaggagaatcacttgaacccgggaggcggaggttgcagtgagcagagataatgccaatgcactccagcctaaacgacagagttagactctgcctcaaaaaaaacaaaaaaamaaacaaaaaaaaaaaacctgtgcctggcacatagtaaatgctcaataaatatttgctgaaccaatgcactcttgtttcccaagttcacagggctctaaactgtagagatgagtatgactctgtgtcttcaagctcacagacaagctcctaacattttttttagctgtttaaatttatgaaaattggccttacagtcttgtgggaggaagcagatgataagcacatatgtttacgcc

SEQ ID NO: 263144 - DNA, 584 bp, Homo sapiens
ggtgttggccatcagttcaatgttgatagakcaacaatatatattaaataaggtgtctttaggcagaaacacataaaaaaagtgatgcattggttggttgacagggatctaatcctgccatcgctcacaggaacctaactctgtatttcccctaggaccaatgggttcagtattcactaattcagtgtctcagcgacttacagacctaactaccacagacaacaagaatcagctgtgcttcatagggctatggtgggatttcattaacagatatagaagaaatggtttagtctgagtcacgccgcttggggcagagactgagttgaagaggaaagtgtctctgacaaggaagttcatcttccctgccctcatgctcctgatcctgtacagattgggcttagtgcttgtgacagactaggcactgttgtaaatgctttgtatctgtgggccattcaggaaaattcaatttgtaacaattgttactctctaatttctattagctgttaataactgataatcaaacatcgttacatctgtctgatttttcaacagcaaaagaagaaatggaaagaatgaacaacaat

SEQ ID NO: 263145 - DNA, 584 bp, Homo sapiens
ggtgttggccatcagttcaatgttgatagagcaacaatatatattaaataaggtgtctttaggcagaaacacataaaaaaagtgatgcattggttggttgacagggatctaatcctgccatcgctcacaggaacctaactctgtatttcccctaggaccaatgggttcagtattcactaattcagtgtctcagcgacttacagacctaactaccacagacaacaagaatcagctgtgcttcatagggctatggtgggatttcattaacagatatagmagaaatggtttagtctgagtcacgccgcttggggcagagactgagttgaagaggaaagtgtctctgacaaggaagttcatcttccctgccctcatgctcctgatcctgtacagattgggcttagtgcttgtgacagactaggcactgttgtaaatgctttgtatctgtgggccattcaggaaaattcaatttgtaacaattgttactctctaatttctattagctgttaataactgataatcaaacatcgttacatctgtctgatttttcaacagcaaaagaagaaatggaaagaatgaacaacaat

SEQ ID NO: 263146 - DNA, 379 bp, Homo sapiens
tacaaagcatttacaacagtgcctagtctgtcacaagcactaagcccaatctgtacaggatcaggagcatgagggcagggaagatgaacttccttgtcagagacactttcctcttcaactcagtctctgccccaagcggcgtgactcaaactaaaccatttctgctatatctgttaatgaaatccccaccatagccctatgaagcacagctgattcttgttgtctgtggtagttaggttctgtaaagtcgcttgaacactgaattagtgaatactgaaccattgttcctaggggaaatacagagttaggttcctgtgagccgatggcaggattagatccctgtcaaccaatcaatrcataactttgttttatgtgtttc

SEQ ID NO: 263147 - DNA, 568 bp, Homo sapiens
cacaaaaccttagaaacttttggagaaaaaatcctggattatctgttaggaggaacaacttagcagtcctgtgtaaaatcaagtagctatattaatggtattcaaatctaaattaacacagattagtttcatttctatactttaacaaataagctattcctagacagtgatggccagtttagtcacatcgggattagagttgcccaagaaaacacaagacatccagtttaatctgaacatcagacaaaaaacaaatactattttccctttccttggtaaatctggcagtccgcatctggatgaaaatgttttagaagtactttgaattttaagttcaaataaaataaaatgttaactgttaggatcgacgctccataaaggtattaatgatcttgatttaagaaatgttccctaacatgcttcccccaatcagaagacaaaactcaaagacttagaaagaaaactatataaaaacgcttacacagctaatggaaatccagctttagtagggacaatgatattgacgatagatcctccatgctytttcatccaggagctgtaaactgca

SEQ ID NO: 263148 - DNA, 553 bp, Homo sapiens
tttcttaggtgtaataatggtattgtaattatatagaaaacatgtgtttatatttaagagatatataaacaaagtacctttgtatctgtaatttcctttcaaattgtttatttaaaacgagtgtgtgtgagtatgtgtgtgtgtgtgcatgattgtagagagggagagagagagaaagagagatcatgtaaatgggaatgttagtgcrtggtgaattttttttttttttttttgagacagagtctcactctgtcacccagcctggaggcgccatcccagctcactgcaacctccatctcccaggttcaagcaattctcctgcctcagcctcccaagtagctgggactatagccatgcaccaccactcccggctaatgtttgtatttttagtggagacagggtttccccatgttggccaggctggtttcgaactcctgacctcaagtgatccgcccacctcggccttccaaagtgctgagattacaggcatgagccatcacgcctggcaatgcttcatgaatctaaatgataggtatacagaaatccattgtat

SEQ ID NO: 263149 - DNA, 309 bp, Homo sapiens
ttggttcactaccaccaccaccccatacccccacagccattgcagacccaaggccttatgcacatcagtgagaaaaactgtcagggtggaaaagggacatttctaggactccttaacataggagccacatacactgtrgtcccctgctagtgagccctcactaagaccacaattagaacaaaagtgtatagaaatcaagggtggatgggattaagggataaaaatagagtgtttagatgggatttatgtgaaggggttgtagctcctatacacggatgttttaagagaatgaatattatgtcttaatgg

SEQ ID NO: 263150 - DNA, 519 bp, Homo sapiens
tgggtctacatatcgaaaggaaacctaggaaaaattatatggaatgatcaagtctgaggtatatcttagagcatccattagatttgaaagaaaaactcctgtgggcctcaggcaaaaaggacaagaagatacaaatatacaggtaactgttagaacaaacacgtgaacattactgaacactgaaaaaactttaaaagttaagagtttggttgtktttggattttaagcacttccttgctttctagcactacgaggtgctccgtgtccatttctatatttcctgcccactactaaaatcagccatttctccaagaaaccctggatccttttattatggaaagtgagctgaacttcagcagtaagagggctggagagcgcccgcgggtctcgaacaacccagagaggtggtttgatgacacgcgaagtaaccgctgagctaaagccagcccagaggttgctttcggattgtattttcttgactggtgagaaagacctacgtcacaaagagtgagtcaaaac

SEQ ID NO: 263151 - DNA, 582 bp, Homo sapiens
ccttctgccaaaaggctctaggggagaatgatccttctttgttccagcttctggtggctgttgacattccttctaggtgtatcagcccaatatgttcctctatattaatttgcttctcttctctgtgtctttttctgtrtcttatatggacacttatcactgaatttagtgccaaccttgataacccagaatgatctcattttaagatgattaacttaattacatctgcaaagaccccttttccaaacaaggtcacatttccaataaggtccatatactaggaaacggacatatcttcttgggggccaacattcaaacaactagagcatttaataaggttcaatacataattctgatttaaaataacttttaggaaaattcctctacttggtagaactacacattagaaacctatagtagacattaactttatatagaaagtttaaatacattacctttaaaactgaaaataaaatatggatgcttgccattatctctactgtttaatatggtactgtaggtcctggtcccaatactataagacaagaaaaaaataagccaagtgtggtggcagaagcctat

SEQ ID NO: 263152 - DNA, 582 bp, Homo sapiens
ccttctgccaaaaggctctaggggagaatgatccttctttgttccagcttctggtggctgttgacattccttctaggtgtatcagcccaatatgttcctctatattaatttgcttctcttctctgtgtctttttctgtatcttatatggacacttatcactgaatttagtgccaaccttgataacccagaatgatctcattttaagatgattaacttaattacatctgcaaagaccccttttccaaacaaggtcacatttccaataaggtccatatactaggaaacggacatatcttcttgggggccaacattcaaacaactagagcatttaataaggttcaatacataattctgatttaaaataacttttaggaaaattcctctacttggtagaactacacattagaaacctatagtagacattaactttatatagaaagtttaaatacattacctttaaaactgaaaataaaatatggatgcttgccattatctctactgtttaatatgktactgtaggtcctggtcccaatactataagacaagaaaaaaataagccaagtgtggtggcagaagcctat

SEQ ID NO: 263153 - DNA, 658 bp, Homo sapiens
actaccaggtattgggcttttctttgatgggagactttttattactgattcgatgtccttactcattattggtctcttgaaatttttttataacttcataattcaatcttagtaggttgtatgtgtccaggaatttatctgtttcttctaggttattccatttgttggtgtaaaattgtataataatgtcttatgatcctttttatttctgtggtatcagttataatgtctcctttttcattattgttttgtttgtcttctctctattttccttaggtagtttagctaactgttggctggttttattttttctcaaaacaccaactcttaattttgttgctcttttgtatttttttcaagcctctatttcatttatttatatgctgatattttttagacgaggcctcactctgtcacccaggctggaatgcagtggtgtgatgttggctcactgcaacgtctactacccaggctcaagagttcctcccacctcagcctcttgagyagctgaaaccacaggcacctgccaccacgcctggctatttttttttttcatttttggaagagatggtgtttcaccatgttgcccaggctggtcttgaactcctgtgctcaagtcatccatatacctcagcctcccaaagtgctgggattacag

SEQ ID NO: 263154 - DNA, 538 bp, Homo sapiens
ttgaggtgagatcatgaaaacctttgattttcatggctaaaagattttaaatattttcaataattgtgaattcactaaagatttttgagaattggaggaggaggatcacagttgtgccataggaatattaatttaatagcagtggatataatgaattggggataaagagattgaaggtggggagaccagttaggtgtttgtgaccatttaagtgagaggcctgggtaatccaaactttgggatggaattacataacaaaattggaaaagaggggwtctacttttttttttttttttttttttgagaggaagtctcgctctgttgccaggctggagtgctctggcgtgatctcggctcactgcaacctccaactcaacctctgactccctggttcaagtgattctcctgcctcagcctcctgaatagctgggatgataggcatgtgccaccacgcccagctaatttctgtattttagtagagaaggagtttcactatgttggccaggatagtttctatctcctgaccttgtgatcctcc

SEQ ID NO: 263155 - DNA, 592 bp, Homo sapiens
attaggccaggcacagtggctcacacctgtaatcccagcactttgggaggtcaagatgggaggatcacttgaggccaggagttcaggaccagcctggccaatatggcaagaccccatctcttaaaaaaatggataattacagttgcaactgagaaacctcccatatttggtaactgtctactctttggctatttgtggtactcatttattataaggcctatgttactgactgggaatatctacttctcccttcgcagtcttttattcaatataaaccattcctacctctgtttgctgtactcttggctgccttgtctgttactkttagattaatatttaacttactaaggtcctcctcactccacaaagacctagcctctttattacttttttcccgctattttcagccattacttttgtgaccttgcataaattcacactagaaaagtgtaagtattcaatggttatatagcttccaactttgtttttgcagttttataaccttatttgatgtattcaatgatcagtagtttgttctcatctacactgaatgactatagattttttaaagcggaaacaggtacataggtaa

SEQ ID NO: 263156 - DNA, 391 bp, Homo sapiens
ttctcaaaacatgagattctgtcatttcaaggaaaacaacagacaggctataataaaattcaataacaaaattactaataaaattcaagcttttgaacaaaaaattagaattttagaaaacttatgcccaccatcgctttccaaaagtattctgatgagaytgatggtggtactgatgaatgtattttgatactgtacaaatgtatcaacatgtagaagatcttagtgaaccactgttttataagtgaccaatgcacgatgttgtaatatcatgcaagggtggaagatccaaagttcaagaaaaaccaagatttgatggagtatcaaaaaagaagcctaggcaacatggcaaaaccctgtctctacaaaaaatacaaaaagttagccaagt

SEQ ID NO: 263157 - DNA, 606 bp, Homo sapiens
gcaaaatacagtcacaagaaggctatgtgctgttttgtctcttgcagtgaygtcatgttgctcatgttttatgtttttcagagttcattagtttctgtttgctctcagttaatatccagctcaatagattgtgtaagtagaatacccccaaactgaaagtcacctacataaaatatagtgaaaaatatgtcacccacttaaactatagttgaaaatatgtactcattagttttgtgtagccaacactggataatgggtaaggggaaaggatcccagggctagactgcctgggttcaagttctgatttcctgctggctgtgaaatacttgacgcgttcagcctctgtttctttttttttttttttagcttaatcccaaatatgatagtaagtctcagtttcttgatctgaaaaacagaaattattcagtgacagtctatgtgaaaactttaaagttttcaaagccactatctagcttaggaaagtcctcagctttaggggttaaagtttttaaaaccactgcctggttcaggaaagccctcagctgtagccattattagctatgattattattgtggtggctacacatacattaatgaggcaggaaa

SEQ ID NO: 263158 - DNA, 606 bp, Homo sapiens
gcaaaatacagtcacaagaaggctatgtgctgttttgtctcttgcagtgatgtcatgttgctcatgttttatgtttttcagagttcattagtttctgtttgctctcagttaatatccagctcaatagattgtgtaagtagaatacccccaaactgaaagtcacctacataaaatatagtgaaaaatatgtcacccacttaaactatagttgaaaatatgtactcattagttttgtgtagccaacactggataatgggtaaggggaaaggatcccagggctagactgcctgggttcaagttcygatttcctgctggctgtgaaatacttgacgcgttcagcctctgtttctttttttttttttttagcttaatcccaaatatgatagtaagtctcagtttcttgatctgaaaaacagaaattattcagtgacagtctatgtgaaaactttaaagttttcaaagccactatctagcttaggaaagtcctcagctttaggggttaaagtttttaaaaccactgcctggttcaggaaagccctcagctgtagccattattagctatgattattattgtggtggctacacatacattaatgaggcaggaaa

SEQ ID NO: 263159 - DNA, 606 bp, Homo sapiens
gcaaaatacagtcacaagaaggctatgtgctgttttgtctcttgcagtgatgtcatgttgctcatgttttatgtttttcagagttcattagtttctgtttgctctcagttaatatccagctcaatagattgtgtaagtagaatacccccaaactgaaagtcacctacataaaatatagtgaaaaatatgtcacccacttaaactatagttgaaaatatgtactcattagttttgtgtagccaacactggataatgggtaaggggaaaggatcccagggctagactgcctgggttcaagttctgatttcctgctggctgtgaaatacttgacgcgttcagcctctgtttctttttttttttttttagcttaatcccaaatatgatagtaagtctcagtttcttgatctgaaaaacagaaattattcartgacagtctatgtgaaaactttaaagttttcaaagccactatctagcttaggaaagtcctcagctttaggggttaaagtttttaaaaccactgcctggttcaggaaagccctcagctgtagccattattagctatgattattattgtggtggctacacatacattaatgaggcaggaaa

SEQ ID NO: 263160 - DNA, 616 bp, Homo sapiens
gggtggatgggtggattgcctgggttccatgagacaggccagcgtgtgtggggtagggagggccgccgcagtccccaggcactacctatgaagctcyggcttctccctccatctccctcccctttcccttccagcccctcttttccaggaaccttgccatgcccacacctacgccctcccctccccggccctccacagctgctgcagcgcacccatactctgcacttgcctcaccagctctggcttttctctaacccgttttctctctgctttctctccaactgccagctgatcgggtcaggcaagtccatcccatcctgagagccccaggccccacttcgacctctaaacagatccctcttctcagagacctccctttccaagcctgcctgggcgggtgtcctgtgacttgacagtggctcccccagctccaaagccagcccccttcttctgtgacttagtctgttgtagcggtgagctgacacgtccaggtgtgaccattgctgaaacttgtgccccctctgtggtatgcccctgccctgttctataaatagctataaattctctctctcacacacacacacacacacacacatatacatatatacacgtggcc

SEQ ID NO: 263161 - DNA, 616 bp, Homo sapiens
gggtggatgggtggattgcctgggttccatgagacaggccagcgtgtgtggggtagggagggccgccgcagtccccaggcactacctatgaagctctggcttctccctccatctycctcccctttcccttccagcccctcttttccaggaaccttgccatgcccacacctacgccctcccctccccggccctccacagctgctgcagcgcacccatactctgcacttgcctcaccagctctggcttttctctaacccgttttctctctgctttctctccaactgccagctgatcgggtcaggcaagtccatcccatcctgagagccccaggccccacttcgacctctaaacagatccctcttctcagagacctccctttccaagcctgcctgggcgggtgtcctgtgacttgacagtggctcccccagctccaaagccagcccccttcttctgtgacttagtctgttgtagcggtgagctgacacgtccaggtgtgaccattgctgaaacttgtgccccctctgtggtatgcccctgccctgttctataaatagctataaattctctctctcacacacacacacacacacacacatatacatatatacacgtggcc

SEQ ID NO: 263162 - DNA, 473 bp, Homo sapiens
tcactgtgtactgcttgttacctgaaatccacactaggctgggatcaagggttgaatctttcatgattttctccataacctgtgtgcttcttatcccagactgaactaagcttttttctagagttctacaatttacacttaatagacaagagtggttctcaaaatgtagtctatggactagcagcaccagcagcacctgagacctttttataagtgcaaattctcaggccccaccctggacctggtgaatcagaaactctggagtagggttcagcaatctgtgctgcagtaatccctccaagtgttcaagaacctctggcatacagcaggtagaaaaatgtgtttccttctgtaggtccaaagccagggttaccatatgttctgccttgttatgaaacaatgacatgcaattaaaagacmagaatctccttcctactcgcaccctccatccaatgtgttttatttgtatgagt

SEQ ID NO: 263163 - DNA, 557 bp, Homo sapiens
tgctgctattgttatatattaatattcactrggtactaaaaagatgggcagccccttagatcatttgttcttatctctttctcataatcctacttcattccttcattcacttatttttaaaaaggtcatgtgtacaaacacatggttcagaaaatttttaaatataactacctataaaagtatgtggccaaatcccattcacagtcttattctccttctacagccaaacacttttaattggtttcttatatatcatttcagaatttatgtttgcaaatacacacgtatattcttattctactcttctctctcaacacaaaaagtagcataccatacatactataccattccttgttcctcttaaaacacacacaatatatgtgagttcttctacatgagtacagaggtctttgtcattcttctttacaaccgcacagtattcatcgtttggatgtaccacagtttacttaaccagttccctgttggtggacactgaagtcatccctatcatactattacaaacaataatgccaagcataaccacccacataccaagt

SEQ ID NO: 263164 - DNA, 557 bp, Homo sapiens
tgctgctattgttatatattaatattcactgggtactaaaaagatgggcagccccttagatcatttgttcttatctctttctcataatcctacttcattccttcattcacttatttttaaaarggtcatgtgtacaaacacatggttcagaaaatttttaaatataactacctataaaagtatgtggccaaatcccattcacagtcttattctccttctacagccaaacacttttaattggtttcttatatatcatttcagaatttatgtttgcaaatacacacgtatattcttattctactcttctctctcaacacaaaaagtagcataccatacatactataccattccttgttcctcttaaaacacacacaatatatgtgagttcttctacatgagtacagaggtctttgtcattcttctttacaaccgcacagtattcatcgtttggatgtaccacagtttacttaaccagttccctgttggtggacactgaagtcatccctatcatactattacaaacaataatgccaagcataaccacccacataccaagt

SEQ ID NO: 263165 - DNA, 557 bp, Homo sapiens
tgctgctattgttatatattaatattcactgggtactaaaaagatgggcagccccttagatcatttgttcttatctctttctcataatcctacttcattccttcattcacttatttttaaaaaggtcatgtgtacaaacacatggttcagaaaatttttaaatataactacctataaaagtatgtggccaaatcccattcacagtcttattctccttctacagccaaacacttttaattggtttcttatatatcatttcagaatttatstttgcaaatacacacgtatattcttattctactcttctctctcaacacaaaaagtagcataccatacatactataccattccttgttcctcttaaaacacacacaatatatgtgagttcttctacatgagtacagaggtctttgtcattcttctttacaaccgcacagtattcatcgtttggatgtaccacagtttacttaaccagttccctgttggtggacactgaagtcatccctatcatactattacaaacaataatgccaagcataaccacccacataccaagt

SEQ ID NO: 263166 - DNA, 523 bp, Homo sapiens
ccggcttcatttgagaaatatttccccagaactccatatattatgaataattcctttcttcttgtttagataccatcttagtcatatctctgttacctcacttgtcacatgataatcagttgctcacccatccatctcccttgattgctcgagaagagtctgattttcagcaccttgaacagtgtgcaatacatacatgcttcatacgcagagaaggaaatgatatcactacagtgtaattattcccagaattcaatgcccgtatttgtaaattgttccagatactctgccaacaacctgagaatgttatgtgttttccctaaaacttccatcsattactgagtgtctacggtcatagttaactcagttgcgatctgacctctggccaagcccattcatagcttgtattataggtgatttttaattttaatttttgattttgatagtttcctttttgtttttttaatctagcagtgtttggtaaacttcaacatctctatatccctgtgtctttgcacctact

SEQ ID NO: 263167 - DNA, 626 bp, Homo sapiens
acactttactaggaatcagaagatttatttggctaagtcacaagctgacttattattcaaattattcatccaaataatgaggaccataacacactgtggcaaaaaagaatcaatgaagaaactatgtaacagattttaaaactgaaaatggcatgattcataacttcatgtatttgtctcgattctaggtggtatactaagatcataaacttacattcttgggattcttacaacaaaatgttgaaaagctatactggtctatttcataatcacattttaaaatgttttcatacatttatcctgaatttgcagatttttatccaaatcttttctttgatctttttttttctcaaataagattctgaacaaaacatgacccgttttcctttccctatgcttayggggatattgagtcaacatacacaattttataaaccagcacataaaactaaagcacaatacttatgtcctttctccccaatcagtaagggcttcattaaaaagacattttaacattcaactatgaaaaacaaaagaactatggcttggtggctagtaaaaagcctgctgtagtgagcaaaggttaaacatttactatttttcagtcttgtgtttattttgtatac

SEQ ID NO: 263168 - DNA, 550 bp, Homo sapiens
ttctgacatttaaatttaatcttaggctggcctgggtggctcagcacttaagcagaggcagcaggatggcttgagccgaggagttgcccagcctgggaaacatagcaagaccccatctctatatattttaaaaggtttaaaaaataaattatcctaaatatgtattaaatgtgtttttcatctttgtctagtactgcttcagggagatattcattaaccactggctcttcagaggtcctgaatttgatgactaagttagtgttagtttctgcattccatttgtttccataggcttcagtgtgtctgtttgctcacagagttgggctggatctcattctcctctgatagtgctgtgccctgttcacctaatgattttggcaacccatctttgtactttctctggtgccattgttttcctgtgaaatgacattaccatgcttttggatgagaccattatrttctgtttttgtcgtaaaagattgctgacattgcccagtttcttgctgtagcaacacgttgggcctattccttttaggaaatatccttccac

SEQ ID NO: 263169 - DNA, 359 bp, Homo sapiens
atcctcccaccatggtctcccaaagtgtagggcttacaggcgtgagagcctgctggggtttttgattgacattgcattgaaactggaaatcagttaggaggcaactgacattttaataatgagccatgaacatggtatatctatttatttagaccttcttagatttttcgtcagtgttttgtagtttttagcagttggatcttgcttgtattttgwaatcttacacatttatttcatgtttgtggtactgttgtgaatgatacttctcaatttccagttggtgattgctagtatataggaaggtgattttatgttatatgctgaccttggattctacaaccttgctaaactcattttta

SEQ ID NO: 263170 - DNA, 632 bp, Homo sapiens
ttctatgtacaggatgaagtagttggagatcgttttcttcctttccaatctggatgccttttatttctttttcttgcctaatcgccctgagaagcatctctggtacaacattgaatagaagtggtgagcacaaacatccttgtcttgctactgatctgaaagagaaagcatccaagctttccccattaagtatgatgttgttaggtgtgggtttttcacaggtaccttttgttagatgaggacgttcccttctattcctactttgaccatttttatgatgaaaacgtgttggattttgtcaggtgattgaagatgctacactgctggcttagaacatggaggaaggagcccatgagccacagaatgcagctctagaagctggaaatagcaaaagaacactttctccacatagagactctagaaggaacacagccctgctggcactttgatttttaaacaagtgaaagtcattttggacttttgacttccagaaatgataacrtgataataaatttgtgttgtcttaagccactgagtttgtgataatttgttgttaacagcaataggaaactaatagagtagtagtttggggaaattagtgataaaggataattgggaaggagaggataaat

SEQ ID NO: 263171 - DNA, 632 bp, Homo sapiens
ttctatgtacaggatgaagtagttggagatcgttttcttcctttccaatctggatgccttttatttctttttcttgcctaatcgccctgagaagcatctctggtacaacattgaatagaagtggtgagcacaaacatccttgtcttgctactgatctgaaagagaaagcatccaagctttccccattaagtatgatgttgttaggtgtgggtttttcacaggtaccttttgttagatgaggacgttcccttctattcctactttgaccatttttatgatgaaaacgtgttggattttgtcaggtgattgaagatgctacactgctggcttagaacatggaggaaggagcccatgagccacagaatgcagctctagaagctggaaatagcaaaagaacactttctccacatagagactctagaaggaacacagccctgctggcactttgatttttaaacaagtgaaagtcattttggacttttgacttccagaaatgataacatgataataaatttgtgttgtcttaagccactgagtttgtgataatttgttgttaacagcaataggawactaatagagtagtagtttggggaaattagtgataaaggataattgggaaggagaggataaat

SEQ ID NO: 263172 - DNA, 575 bp, Homo sapiens
ttttgtcaggtgattgaagatgctacactgctggcttagaacatggaggaaggagcccatgagccacagaatgcagctctagaagctggaaatagcaaaagaacactttctccacatagagactctagaaggaacacagccctgctggcactttgatttttaaacaagtgaaagtcattttggacttttgacttccagaaatgataacatgataataaatttgtgttgtcttaagccactgagtttgtgataatttgttgttaacagcaataggaaactaatagagtagtagtttggggaaattagtgataaaggataattgggaaggagaggataaatgtagttaggtcagtttgagttctctgtgtgtttcactgtgtgtgttttgtaacattttagtttwtcctaaaaccaaaggattaattgaccttcaaaaggcagctactttttgatttcagtccgtaaccttttatcaaatcaatattttccccaaatagggttgacaggaagcattctaaattatctcctaataagttgttttgacttcagatattgaaattgcaggcccgtctccc

SEQ ID NO: 263173 - DNA, 582 bp, Homo sapiens
tgtcattatactttggtccaaacccatagaaggtaaaagaaacaccaggattgaactctgatgcaaaccatggactttcggtggggatgatgggtcagtataaaaaaatgttccactctcatgcgggatcctgatagtggggaagtcacrcaagtgtgggggcagagagtatttggagaatccctgtactttctgctcagatttactgtaaaccttaaagcttctctaaaaaaatctatagggtaagaggagaaatgcctattttattgggatggtcacattagatttaaaataaatccatgtaacaaagctggctcttgttctgtgttagagagagggcaggctcatcctctggctgcccacagtgacccacagcttccctaccttctctgcttctttattctctggagcttgtgtagtcttcccaccttagtatgttctaggacttaattaacatgctcctttttcctcccctcctgctttcacaaccagagatggccatatgcatatcacagagcccttccccttcctcctcagtgcccctgtagacaccatcctgtctcccattccctcccatcacct

SEQ ID NO: 263174 - DNA, 536 bp, Homo sapiens
ccatcttgaaaagataagttttctgtttgtctttaaaatatgacccacaatatgcctgtttttaaacagtgaatgatgctctaaaatcacaatataaattcaggcagtgctccttacatggaaagtttaagtacttctaacactgctctttttcacttgttatgaaaacacagaacaattatctaagcatctaattattcaggtcctttgtttctcctccaatctattagttttatagtaattttagggcctgtgaggatgaagctgtctgtgacagctaccacaaaggttactataggtggacaaatttcaaacaagtttatcaccactaccatccccaccataaaactgtctcaatcaagggcaacacaattcaatattagccaagacaacctctttacctgtcactgcttaagaaaaggatttttggtcttatttagaaataactttcygtacctatttttctccataaatccactgagaccaatgtgtggctctatctcaagcaccagcaagcaaaactgcctgctagaagg

SEQ ID NO: 263175 - DNA, 536 bp, Homo sapiens
ccatcttgaaaagataagttttctgtttgtctttaaaatatgacccacaatatgcctgtttttaaacagtgaatgatgctctaaaatcacaatataaattcaggcagtgctccttacatggaaagtttaagtacttctaacactgctctttttcacttgttatgaaaacacagaacaattatctaagcatctaattattcaggtcctttgtttctcctccaatctattagttttatagtaattttagggcctgtgaggatgaagctgtctgtgacagctaccacaaaggttactataggtggacaaatttcaaacaagtttatcaccactaccatccccaccataaaactgtctcaatcaagggcaacacaattcaatattagccaagacaacctctttacctgtcactgcttaagaaaaggatttttggtcttatttagaaataactttctgtacctatttttctccataaatccactgagaccaatgtgtggctctatckcaagcaccagcaagcaaaactgcctgctagaagg

SEQ ID NO: 263176 - DNA, 614 bp, Homo sapiens
tggtggacccttactggacactctgccaagtaactggagtggtacttgtgctctagtccaactggccatccctttcaccctagcattccattaacataatagaagagaaaatcagaagagaagaagtgaccttcatgggtcctttgactcccacgtttataaagatgctactggagttccacgaggggtaccagataaatttaaggcccgaaatcaaacagcttcaggatttgaatctgtgctgttttggtggtcaactgtaaataaaaatgtagatcggataaactacatttattacaaccaacaaaggtttgttaactacacaagacatgccattaagggaacagcctcccaattaggtcccattaactaaatagtctgggaaaacaggatagccctagatacgatgctagcagaaaaaggtggtgtctgtgtcatgattggagtccaatgatgtacttttattcctaataacacagcccctgacggaacagtaacaaaagctttgcaggacctaacctccttatccaatgagttagcaagcaatyctggaataaatgatccctttacaagtttaatggagaaatggtctggaaaatggaaaggcttaatgt

SEQ ID NO: 263177 - DNA, 628 bp, Homo sapiens
taagttgtttgaggtctttgggtctctcttttcacatctccataatagaggtggtattttttgacttccatttgtgaagtgtaaatgagattcgttattgttgcttttatgtgaatccttagtacatggcctgctgcaaacacccaggacacccaggaaatggttgttgtttgattttcctcatccccagtctcaaggggaagccaggccaatgagaagagccacttgccatcaggctgtccctttaggagtcactgaaagggccccagggtgggatggtggggagataagaaccaygagagaagttggcacaaaggagttatgggaaaaagggtccaagataggcagaaaagaagcttttgccagttgatggggaagaaaggaaatcagagggcttagacagtgaggggggacaggacatctccatgtgcactctcatcgtttgcagtcagcaacaggtatctacggggagggccgtgcatcatctgctaccctggaggatctggaggtaagaggccctgggccgaggtgcagtgaccctgcaggctagccctccaacctcctcccacagcaggggcttgttgcccctctgccagctgaggcagcccacacacccccaccagcccta

SEQ ID NO: 263178 - DNA, 628 bp, Homo sapiens
taagttgtttgaggtctttgggtctctcttttcacatctccataatagaggtggtattttttgacttccatttgtgaagtgtaaatgagattcgttattgttgcttttatgtgaatccttagtacatggcctgctgcaaacacccaggacacccaggaaatggttgttgtttgattttcctcatccccagtctcaaggggaagccaggccaatgagaagagccacttgccatcaggctgtccctttaggagtcactgaaagggccccagggtgggatggtggggagataagaaccatgagagaagttggcacaaaggagttatgggaaaaagggtccaagataggcagaaaagaagcttttgccagttgatggggaagaaaggaaatcagagggcttagacrgtgaggggggacaggacatctccatgtgcactctcatcgtttgcagtcagcaacaggtatctacggggagggccgtgcatcatctgctaccctggaggatctggaggtaagaggccctgggccgaggtgcagtgaccctgcaggctagccctccaacctcctcccacagcaggggcttgttgcccctctgccagctgaggcagcccacacacccccaccagcccta

SEQ ID NO: 263179 - DNA, 628 bp, Homo sapiens
taagttgtttgaggtctttgggtctctcttttcacatctccataatagaggtggtattttttgacttccatttgtgaagtgtaaatgagattcgttattgttgcttttatgtgaatccttagtacatggcctgctgcaaacacccaggacacccaggaaatggttgttgtttgattttcctcatccccagtctcaaggggaagccaggccaatgagaagagccacttgccatcaggctgtccctttaggagtcactgaaagggccccagggtgggatggtggggagataagaaccatgagagaagttggcacaaaggagttatgggaaaaagggtccaagataggcagaaaagaagcttttgccagttgatggggaagaaaggaaatcagagggcttagacagtgaggggggacaggacatctccatgtgcactctcatcgtttgcagtcagcaacaggtatctayggggagggccgtgcatcatctgctaccctggaggatctggaggtaagaggccctgggccgaggtgcagtgaccctgcaggctagccctccaacctcctcccacagcaggggcttgttgcccctctgccagctgaggcagcccacacacccccaccagcccta

SEQ ID NO: 263180 - DNA, 520 bp, Homo sapiens
tgtaactaatttttcataactttttaaaataacttttcataaaactttttttttactttttttccacaacttttttttgccacttttccacagtatttttttatcctgtaactttttcatcccacaactttaattyctgttaacttttttagtttgtgttcttttaataaacacacttacatagttacaattttgtaagaataaaaaccgattacctcatgccaagcatgccgagaatttgcagagtctcaatacccaatactatagttttcaagacacacaaaatttttaggcaaaacagcaccttgaaacaatttaataatgtattacattacagtagcatcacagcagcagtcaataatgccactttagacaaaaatcagtatttccattatgcattctgtgtataagaattcataaatcggtaaaagtcattctaagaaaacttggcaaatacagctttggactggaattggcatttctttgtctacttttccttcccctagattctttgttttaa

SEQ ID NO: 263181 - DNA, 520 bp, Homo sapiens
tgtaactaatttttcataactttttaaaataacttttcataaaactttttttttactttttttccacaacttttttttgccacttttccacagtatttttttatcctgtaactttttcatcccacaactttaattcctgttaacttttttagtttgtgttcttttaataaacacacttacatagttacaattttgtaagaataaaaaccgattacctcatgccaagcatgccgagaatttgcagagtctcaatacccaatactatagttttcaagacacacaaaatttttaggcaaaacagcaccttgaaacaatttaataatgtattacattacagtagcatcacagcagcagtcaataatgccactttagacaaaaatcagtatttccattatgcattctgtktataagaattcataaatcggtaaaagtcattctaagaaaacttggcaaatacagctttggactggaattggcatttctttgtctacttttccttcccctagattctttgttttaa

SEQ ID NO: 263182 - DNA, 471 bp, Homo sapiens
actgtgtactgcttgttacctgaaatccacactaggctgggatcaagggttgaatctttcatgattttctccataacctgtgtgcttcttatcccagactgaactaagcttttttctagagttctacaatttacacttaatagacaagagtggttctcaaaatgtagtctatggactagcagcaccagcagcacctgagacctttttataagtgcaaattctcaggccccaccctggacctggtgaatcagaaactctggagtagggttcagcaatctgtgctgcagtaatccctccaagtgttcaagaacctctggcatacagcaggtagwaaaatgtgtttccttctgtaggtccaaagccagggttaccatatgttctgccttgttatgaaacaatgacatgcaattaaaagacaagaatctccttcctactcgcaccctccatccaatgtgttttatttgtatgagt

SEQ ID NO: 263183 - DNA, 598 bp, Homo sapiens
tcaaataactattcaaaaatgtaactgctatattaacgtcttaaaataatttaaaacattttaaaatatgaatactgtagtttaaaacaaagaatctaggggaaggaaaagtagacaaagaaatgccaattccagtccaaagctgtatttgccaagttttcttagaatgacttttaccgatttatgaattcttatamacagaatgcataatggaaatactgatttttgtctaaagtggcattattgactgctgctgtgatgctactgtaatgtaatacattattaaattgtttcaaggtgctgttttgcctaaaaattttgtgtgtcttgaaaactatagtattgggtattgagactctgcaaattctcggcatgcttggcatgaggtaatcggtttttattcttacaaaattgtaactatgtaagtgtgtttattaaaagaacacaaactaaaaaagttaacaggaattaaagttgtgggatgaaaaagttacaggataaaaaaatactgtggaaaagtggcaaaaaaaagttgtggaaaaaaagtaaaaaaaaagttttatgaaaagttattttaaaaagttatgaaaaattagtt

SEQ ID NO: 263184 - DNA, 598 bp, Homo sapiens
tcaaataactattcaaaaatgtaactgctatattaacgtcttaaaataatttaaaacattttaaaatatgaatactgtagtttaaaacaaagaatctaggggaaggaaaagtagacaaagaaatgccaattccagtccaaagctgtatttgccaagttttcttagaatgacttttaccgatttatgaattcttatacacagaatgcataatggaaatactgatttttgtctaaagtggcattattgactgctkctgtgatgctactgtaatgtaatacattattaaattgtttcaaggtgctgttttgcctaaaaattttgtgtgtcttgaaaactatagtattgggtattgagactctgcaaattctcggcatgcttggcatgaggtaatcggtttttattcttacaaaattgtaactatgtaagtgtgtttattaaaagaacacaaactaaaaaagttaacaggaattaaagttgtgggatgaaaaagttacaggataaaaaaatactgtggaaaagtggcaaaaaaaagttgtggaaaaaaagtaaaaaaaaagttttatgaaaagttattttaaaaagttatgaaaaattagtt

SEQ ID NO: 263185 - DNA, 598 bp, Homo sapiens
tcaaataactattcaaaaatgtaactgctatattaacgtcttaaaataatttaaaacattttaaaatatgaatactgtagtttaaaacaaagaatctaggggaaggaaaagtagacaaagaaatgccaattccagtccaaagctgtatttgccaagttttcttagaatgacttttaccgatttatgaattcttatacacagaatgcataatggaaatactgatttttgtctaaagtggcattattgactgctgctgtgatgctactgtaatgtaatacattattaaattgtttcaaggtgctgttttgcctaaaaattttgtgtgtcttgaaaactatagtattgggtattgagactctgcaaattctcggcatgcttggcatgaggtaatcggtttttattcttacaaaattgtaactatgtaagtgtgtttattaaaagaacacaaactaaaaaagttaacagraattaaagttgtgggatgaaaaagttacaggataaaaaaatactgtggaaaagtggcaaaaaaaagttgtggaaaaaaagtaaaaaaaaagttttatgaaaagttattttaaaaagttatgaaaaattagtt

SEQ ID NO: 263186 - DNA, 569 bp, Homo sapiens
catttgattctactacactgcaactatcacctctagaagtaatcagccagctccataggtccatgrgatttcccatgattattcctagaagtactaattaggatcataggtatgtgggggaccactctgtaatcataacgttctctaaaccttcaatcacaatttacatttgaaaaatctttggtttttatgataaaaaaagtatgtatgaatatatatatatatgtgtgtgtgtatgtgtaaatatgtgcgtgtgtgtgtatatatatgtgtatatatgcatatatataacactaaaatctctacctatcaacaacataatgctttataaccagtggttccagatgtaggccccagaacaacagtatcagtttcacctgggaacttcttaaaaacgtaaatgctcaggcaacaccacagacctactgaatctgaaaccctgggactagctctccaaatgattctggtgcacactatattaaaaaaaaaaatgtagcccaggcacagcagctcatgcctgtcatcccagcaccttgggagagcaaggtgggaggatcacttgagcccag

SEQ ID NO: 263187 - DNA, 432 bp, Homo sapiens
acgcaaattataaaatgaaccatatgaaattctgcaatttagaactaccaaaactgaaattaataacrtaatggataagcttaaccacatcagtaacctagcagaagacagattcagtaaactgcaaaaaggtcagaaagacaaaaaggtggaaaattgagaaaataaaagacaacatattgaaaagtttatcacatacgtagagcactggaagaaaaacaagaatgggacagaagcaagagctgaagatatggttgtggagaatttcccaaaactgatcaaagacttcacaagatttaaccaccataaacacttcaagagaaacaatggaagctggcataagagaatgatatctgccaagtgctgaaagaaggaaactgcccatctagagacttacgctcaatgaagatactcttcaatgatgaaataaaa

SEQ ID NO: 263188 - DNA, 432 bp, Homo sapiens
acgcaaattataaaatgaaccatatgaaattctgcaatttagaactaccaaaactgaaattaataacataatggataagcttaaccacakcagtaacctagcagaagacagattcagtaaactgcaaaaaggtcagaaagacaaaaaggtggaaaattgagaaaataaaagacaacatattgaaaagtttatcacatacgtagagcactggaagaaaaacaagaatgggacagaagcaagagctgaagatatggttgtggagaatttcccaaaactgatcaaagacttcacaagatttaaccaccataaacacttcaagagaaacaatggaagctggcataagagaatgatatctgccaagtgctgaaagaaggaaactgcccatctagagacttacgctcaatgaagatactcttcaatgatgaaataaaa

SEQ ID NO: 263189 - DNA, 432 bp, Homo sapiens
acgcaaattataaaatgaaccatatgaaattctgcaatttagaactaccaaaactgaaattaataacataatggataagcttaaccacatcagtaacctagcagaagacagattcagtaaactgcaaaaaggtcagaaagacaaaaaggtggaaaattgagaaaataaaagacaacatattgaaaagtttatcacatacgtagagcactggaagaaaaacaagaatgggacagaagcaagagctgaagatatggttgtggagaatttcccaaaactgatcaaagacttcacaagatttaaccaccataaacacttcaagagaaacaatggaagctggcataagagaatgatatctgcsaagtgctgaaagaaggaaactgcccatctagagacttacgctcaatgaagatactcttcaatgatgaaataaaa

SEQ ID NO: 263190 - DNA, 516 bp, Homo sapiens
gatcaccattcaacaatttaagaagtaaaagaaaaaagtccaattaaatgaagcattatgaagtttcaagggaatataaaactagacacaagtctggttcatttccattttcctatcacctaaaaaactctagccaacatgttcataccaccatggactccacgatagcayagaattcagtatgagtctatttcaaaccccagcaatatttgaaaatactcaaggtgacacaatattaagtaaaataggcttccattcataagactacaagcaagaatattacacagatggtctagttcacacatgaagacactgagaaccatgtgtgcctacatgcaactggtttcagtttttcagtgcagggacttctctaaagatgaaaacacatcgatatcttatcctaagactaaataaaaatggaactactttttggtcatgtgaaactaaagcttttaaagactgcactagactttgaaggggaaaaaaaatcaagtttataaaaatattacctcctag

SEQ ID NO: 263191 - DNA, 673 bp, Homo sapiens
ttaaattatgctgaaataagcacagaaaaagaccagaacaacttacattgaaatgttaatttcaattaattttagttgttatctctggagacatttggtgctttcccctratttccaagtttatggttttatgtagtaagcacctattgatgctaataacttaaaaataagttagaaaaagaatttgatgtcaggtgctcaggaggctgaaatagaagcattgtttgggcccgggagttcgaggctgcagtaagctatgatcatgccactgcactccaccctgggtgacagcgaccctatctcaaaaactaataataatttcaaaagaatttgaataataccccacagaataacatctttattcacatcattctgctccctcccttcccatactatctgttcttacatatatacaaacatatgcagaattgtttaaatcctaacttttttcaattaccttatatttctacttcaattgccaaaatctctaaaggggtagtttatatttatctcgattttttttcccaagccagctaattcaccgacttctagaccagactaccgactaccttcactcaaactctgcccatgagtctgtacttcatggagctcccttctccctgtgtgcacctttcagccctgatcttctatccacatttgttttccccacaat

SEQ ID NO: 263192 - DNA, 552 bp, Homo sapiens
ataataccccacagaataacatctttattcacatcattctgctccctcccttcccatactatctgttcttacatatatacaaacatatgcagaattgtttaaatcctaacttttttcaattaccttatatttctacttcaattgccaaaatctctaaaggggtagtttatatttatctcgaytttttttcccaagccagctaattcaccgacttctagaccagactaccgactaccttcactcaaactctgcccatgagtctgtacttcatggagctcccttctccctgtgtgcacctttcagccctgatcttctatccacatttgttttccccacaatgctcacaaatgcctttggcctgtatttccacctgtaccttcaacctcagtcatgttcccatccacaaaacttctccacctaagtattaatcagcacatcccaaacagaattcaacatatctttctaaaacaatattctcagcacacgattccctgcttaaggccttcttatcaacaaacacaccaaatagaaacatgcctgtctcaaattcaa

SEQ ID NO: 263193 - DNA, 552 bp, Homo sapiens
ataataccccacagaataacatctttattcacatcattctgctccctcccttcccatactatctgttcttacatatatacaaacatatgcagaattgtttaaatcctaacttttttcaattaccttatatttctacttcaattgccaaaatctctaaaggggtagtttatatttatctcgattttttttcccaagccagctaattcaccracttctagaccagactaccgactaccttcactcaaactctgcccatgagtctgtacttcatggagctcccttctccctgtgtgcacctttcagccctgatcttctatccacatttgttttccccacaatgctcacaaatgcctttggcctgtatttccacctgtaccttcaacctcagtcatgttcccatccacaaaacttctccacctaagtattaatcagcacatcccaaacagaattcaacatatctttctaaaacaatattctcagcacacgattccctgcttaaggccttcttatcaacaaacacaccaaatagaaacatgcctgtctcaaattcaa

SEQ ID NO: 263194 - DNA, 552 bp, Homo sapiens
ataataccccacagaataacatctttattcacatcattctgctccctcccttcccatactatctgttcttacatatatacaaacatatgcagaattgtttaaatcctaacttttttcaattaccttatatttctacttcaattgccaaaatctctaaaggggtagtttatatttatctcgattttttttcccaagccagctaattcaccgayttctagaccagactaccgactaccttcactcaaactctgcccatgagtctgtacttcatggagctcccttctccctgtgtgcacctttcagccctgatcttctatccacatttgttttccccacaatgctcacaaatgcctttggcctgtatttccacctgtaccttcaacctcagtcatgttcccatccacaaaacttctccacctaagtattaatcagcacatcccaaacagaattcaacatatctttctaaaacaatattctcagcacacgattccctgcttaaggccttcttatcaacaaacacaccaaatagaaacatgcctgtctcaaattcaa

SEQ ID NO: 263195 - DNA, 671 bp, Homo sapiens
catgtcggcactcaaacagttttggattttgaagcatttcagattttggattttcggatgagggatgctgtattatcttctgaatgaggccactcattcaggaaagcccagagcttggggacrtggagctgcagaccaaagaggtgatttctgtagtggctttcagtgcggaagggcctacaaagtggtttaaagcaagccacaaaataggaaacccaatatttagctaatggaactctgataaaacctgctcaagatgtctgtctctactaattcagatggagccaagccaaagcatcattattattttaaaaaggcaccaatccctctgcaaaagcactgaattatatcatgatacaatcatcaattgtaccatgaatcaccatcagcggtggtcttttagggatatgaagaaggggttttcacaatacatcgcatgacacaccatcttccaaatctctaaacatttctctccacagcccagtcctctccatagttgtccaaatccctccctcttttctcttgttgtctccaaaactcaaaaccatgctctgactttctatatcctgccctccccttcttggaccatctgggaagccccctgcttccccagggtgtcccctcctccccttctgggatcagtcatctttcctcaaatggaccagttcggc

SEQ ID NO: 263196 - DNA, 671 bp, Homo sapiens
catgtcggcactcaaacagttttggattttgaagcatttcagattttggattttcggatgagggatgctgtattatcttctgaatgaggccactcattcaggaaagcccagagcttggggacgtggagctgcagaccaaagaggtgatttctgtagtggctttcagtgcrgaagggcctacaaagtggtttaaagcaagccacaaaataggaaacccaatatttagctaatggaactctgataaaacctgctcaagatgtctgtctctactaattcagatggagccaagccaaagcatcattattattttaaaaaggcaccaatccctctgcaaaagcactgaattatatcatgatacaatcatcaattgtaccatgaatcaccatcagcggtggtcttttagggatatgaagaaggggttttcacaatacatcgcatgacacaccatcttccaaatctctaaacatttctctccacagcccagtcctctccatagttgtccaaatccctccctcttttctcttgttgtctccaaaactcaaaaccatgctctgactttctatatcctgccctccccttcttggaccatctgggaagccccctgcttccccagggtgtcccctcctccccttctgggatcagtcatctttcctcaaatggaccagttcggc

SEQ ID NO: 263197 - DNA, 671 bp, Homo sapiens
catgtcggcactcaaacagttttggattttgaagcatttcagattttggattttcggatgagggatgctgtattatcttctgaatgaggccactcattcaggaaagcccagagcttggggacgtggagctgcagaccaaagaggtgatttctgtagtggctttcagtgcggaagggcctacaaagyggtttaaagcaagccacaaaataggaaacccaatatttagctaatggaactctgataaaacctgctcaagatgtctgtctctactaattcagatggagccaagccaaagcatcattattattttaaaaaggcaccaatccctctgcaaaagcactgaattatatcatgatacaatcatcaattgtaccatgaatcaccatcagcggtggtcttttagggatatgaagaaggggttttcacaatacatcgcatgacacaccatcttccaaatctctaaacatttctctccacagcccagtcctctccatagttgtccaaatccctccctcttttctcttgttgtctccaaaactcaaaaccatgctctgactttctatatcctgccctccccttcttggaccatctgggaagccccctgcttccccagggtgtcccctcctccccttctgggatcagtcatctttcctcaaatggaccagttcggc

SEQ ID NO: 263198 - DNA, 671 bp, Homo sapiens
catgtcggcactcaaacagttttggattttgaagcatttcagattttggattttcggatgagggatgctgtattatcttctgaatgaggccactcattcaggaaagcccagagcttggggacgtggagctgcagaccaaagaggtgatttctgtagtggctttcagtgcggaagggcctacaaagtggtttaaagcaagccacaaaataggaaacccaatatttagctaatggaactctgataaaacctgctcaagatgtctgtctctactaattcagatggagccaagccaaagcatcattattattttaaaaaggcaccaatccctctgcaaaagcactgaattatatcatgatacaatcatcaattgtaccatgaatcaccatcagcggtggtcttttagggatatgaagaaggggttttcacartacatcgcatgacacaccatcttccaaatctctaaacatttctctccacagcccagtcctctccatagttgtccaaatccctccctcttttctcttgttgtctccaaaactcaaaaccatgctctgactttctatatcctgccctccccttcttggaccatctgggaagccccctgcttccccagggtgtcccctcctccccttctgggatcagtcatctttcctcaaatggaccagttcggc

SEQ ID NO: 263199 - DNA, 602 bp, Homo sapiens
aggccactcattcaggaaagcccagagcttggggacgtggagctgcagaccaaagaggtgatttctgtagtggctttcagtgcggaagggcctacaaagtggtttaaagcaagccacaaaataggaaacccaatatttagctaatggaactctgataaaacctgctcaagatgtctgtctctactaattcagatggagccaagccaaagcatcattattattttaaaaaggcaccaatccctctgcaaaagcactgaattatatcatgatacaatcatcaattgtaccatgaatcaccatcagcggtggtcttttagggatatgaagaaggggttttcacaatacatcgcatgacacaccatcttccaaatctctaaacatttctctccacagcccagtcctctccatagttgtccaaatccctccctcttttctcttgttgtctccaaaactcaaaaccatgctctgactttctatatccygccctccccttcttggaccatctgggaagccccctgcttccccagggtgtcccctcctccccttctgggatcagtcatctttcctcaaatggaccagttcggcctctcttagtttctcca

SEQ ID NO: 263200 - DNA, 427 bp, Homo sapiens
gcaccagagctcaacactaggttaggagcatttctgagatttggagctattcaaccatggaagttcctggcacatacatcaggtattcacaataccctttctcaggtgtttggtcactgctagtgagcctgcctggatcagtgtttcccaaatggcagtcatttgcatctttgcatttttttgggggggggggttgtgggggtatatwccataccagattttttaaaaattgacattaaaaatacatgtataaaatgtgtaaagtgcactaatctaaagtgcactggatgtattttttattgatgtacatacttttgttatccatcacccaggtcaaaatacagaatcagcaccacagagggttccctcctcctccttcccagccaataatcttctcctcctacctaaccaactgttcttacttcaa

SEQ ID NO: 263201 - DNA, 427 bp, Homo sapiens
gcaccagagctcaacactaggttaggagcatttctgagatttggagctattcaaccatggaagttcctggcacatacatcaggtattcacaataccctttctcaggtgtttggtcactgctagtgagcctgcctggatcagtgtttcccaaatggcagtcatttgcatctttgcatttttttgggggggggggttgtgggggtatataccataccagatttttwaaaaattgacattaaaaatacatgtataaaatgtgtaaagtgcactaatctaaagtgcactggatgtattttttattgatgtacatacttttgttatccatcacccaggtcaaaatacagaatcagcaccacagagggttccctcctcctccttcccagccaataatcttctcctcctacctaaccaactgttcttacttcaa

SEQ ID NO: 263202 - DNA, 427 bp, Homo sapiens
gcaccagagctcaacactaggttaggagcatttctgagatttggagctattcaaccatggaagttcctggcacatacatcaggtattcacaataccctttctcaggtgtttggtcactgctagtgagcctgcctggatcagtgtttcccaaatggcagtcatttgcatctttgcatttttttgggggggggggttgtgggggtatataccataccagattttttaaaaattgacattaaaaatacatgwataaaatgtgtaaagtgcactaatctaaagtgcactggatgtattttttattgatgtacatacttttgttatccatcacccaggtcaaaatacagaatcagcaccacagagggttccctcctcctccttcccagccaataatcttctcctcctacctaaccaactgttcttacttcaa

SEQ ID NO: 263203 - DNA, 408 bp, Homo sapiens
gcttctttcttcccctgagaaaaggatgcctaggatggacattaactcagcccaagtatatataactgtggtcctagaaattggttaattcgatctgctattccactggagttgtctaatagtgtggcttgaactctgtttttaggttttggacctccgagctggttaaaggagcatttacaaagtgaatacctcctcctcgtagggacacctctcttcaggggaagagaggtggagctaattctcccgaggtagaggggaaggggaagttctgaatatcccttttacattgctctatctcacaytgaagtcctttcagggaagagtacttagggtgatagtgagcaggctgttgggacaattcccaagaggcagggttataaagagggggaacaatgtgggtaggag

SEQ ID NO: 263204 - DNA, 583 bp, Homo sapiens
ctgcttttgtgggctctggtttagcaacttggttgtttagttgtaaaatgattagtagggaaaaccgtgtgtgtgtgtgtgtgtgtgtgtgtgtgtgtgtgtgtgtgtgtgtgtattttaagtttcttttgttctcagagcacttagaattttatatggaaattctatcagtttacttgattctccaccccacatttcttaaacagcaaagtatgaaggtaatgtgtcccrtaaccagccttcagaagaattacagctgctgtgtctctgaactttcaagaagtttgtgcatcaattttcaaaaaattatgaaatccttgaagatagctgtgttctacatttggaaagatacaaaaactgaaccttctagcaggcagttttgcttgctggtgcttgagatagagccacacattggtctcagtggatttatggagaaaaataggtacagaaagttatttctaaataagaccaaaaatccttttcttaagcagtgacaggtaaagaggttgtcttggctaatattgaattgtgttgcccttgattgagacagttttatggtggggatggtagtggtgataaactt

SEQ ID NO: 263205 - DNA, 583 bp, Homo sapiens
ctgcttttgtgggctctggtttagcaacttggttgtttagttgtaaaatgattagtagggaaaaccgtgtgtgtgtgtgtgtgtgtgtgtgtgtgtgtgtgtgtgtgtgtgtgtattttaagtttcttttgttctcagagcacttagaattttatatggaaattctatcagtttacttgattctccaccccacatttcttaaacagcaaagtatgaaggtaatgtgtcccataaccagccttcagaakaattacagctgctgtgtctctgaactttcaagaagtttgtgcatcaattttcaaaaaattatgaaatccttgaagatagctgtgttctacatttggaaagatacaaaaactgaaccttctagcaggcagttttgcttgctggtgcttgagatagagccacacattggtctcagtggatttatggagaaaaataggtacagaaagttatttctaaataagaccaaaaatccttttcttaagcagtgacaggtaaagaggttgtcttggctaatattgaattgtgttgcccttgattgagacagttttatggtggggatggtagtggtgataaactt

SEQ ID NO: 263206 - DNA, 583 bp, Homo sapiens
ctgcttttgtgggctctggtttagcaacttggttgtttagttgtaaaatgattagtagggaaaaccgtgtgtgtgtgtgtgtgtgtgtgtgtgtgtgtgtgtgtgtgtgtgtgtattttaagtttcttttgttctcagagcacttagaattttatatggaaattctatcagtttacttgattctccaccccacatttcttaaacagcaaagtatgaaggtaatgtgtcccataaccagccttcagaagaattacagctgctgtgtctctgaactttcaagaagtttgtgcatcaattttcaaaaaattatgaaatccttgaagatagctgtgttctacatttggaaagatacaaaaactgaaccttctagcaggcagttttgcttgctggtgcttgmgatagagccacacattggtctcagtggatttatggagaaaaataggtacagaaagttatttctaaataagaccaaaaatccttttcttaagcagtgacaggtaaagaggttgtcttggctaatattgaattgtgttgcccttgattgagacagttttatggtggggatggtagtggtgataaactt

SEQ ID NO: 263207 - DNA, 591 bp, Homo sapiens
gtgtgtgtctatttatttaatttcagtttaggcaaaagcaattgttggatgcagtgaagttatttaacttcctacttgtgtttcatttttgtttccggtttctataattgctaagagttggtttttgtttttgagattcatgcaaggaagtcaatggcatgagttatgagttgaggttctggctgggaggtgtgttaaaaacagaccatgtttttaaacagaagatgcaaagagtaataaggaaatcggttcccataaaacatgtctcaaagtagataaatatgctcttacagtttgaagagattttcraaagataaatgagataatatgtgtgacgtagctttaagtttttctgagcaaagctgttatattcatctttggtattgttgcttttgatgttgcgaccaagtctgctattagcgttagtgttattgttaaatattcactaatgggagtaataagattagatttaaaaggaaggaaggcattctttacattcctttgcattcctttctgaatgtaaaaactcttcatgctgttttcccagctactctaaatccagaccaagaagcaacactactcagtcttgta

SEQ ID NO: 263208 - DNA, 520 bp, Homo sapiens
tatttgtctagggaaacatttttttaaatgatactagctctcctcaacttgtgaaagtttcttgtgtcttcttgctgttttcactttatctgctctctagcagaaaaataaaattgcattcaattgacacactttcytgctgggaattcaagacatattacagccctatctgtgtgttctcagttgtgatgaaactgtggaaaatccccagcaaccttaaatgagataggtgcaggtgattaatccagtttcaggaaaaaaaccaaataatttactcctttttccccattaaagaaacaaccatgcattgaggtagctgatgccatgtgagcaggagtgtgctttaatggaggcaccattaataatttaccttaatagtgtaatagttgccatttttgtgaccaaaaatttgtttcagcccctgctttatggatgaaaagtaggatcaattaatattgagtgatgacagcctccctgtggagagaaaatgggaaatcttggtgtcgtcatccgccttatg

SEQ ID NO: 263209 - DNA, 520 bp, Homo sapiens
tatttgtctagggaaacatttttttaaatgatactagctctcctcaacttgtgaaagtttcttgtgtcttcttgctgttttcactttatctgctctctagcagaaaaataaaattgcattcaattgacacactttcctgctgggaattcaagacatattacagccctatctgtgtgttctcagttgtgatgaaactgtggaaaatccccagcaacyttaaatgagataggtgcaggtgattaatccagtttcaggaaaaaaaccaaataatttactcctttttccccattaaagaaacaaccatgcattgaggtagctgatgccatgtgagcaggagtgtgctttaatggaggcaccattaataatttaccttaatagtgtaatagttgccatttttgtgaccaaaaatttgtttcagcccctgctttatggatgaaaagtaggatcaattaatattgagtgatgacagcctccctgtggagagaaaatgggaaatcttggtgtcgtcatccgccttatg

SEQ ID NO: 263210 - DNA, 520 bp, Homo sapiens
tatttgtctagggaaacatttttttaaatgatactagctctcctcaacttgtgaaagtttcttgtgtcttcttgctgttttcactttatctgctctctagcagaaaaataaaattgcattcaattgacacactttcctgctgggaattcaagacatattacagccctatctgtgtgttctcagttgtgatgaaactgtggaaaatccccagcaaccttaaatgagataggtgcaggtgattaatccagtttcaggaaaaaaaycaaataatttactcctttttccccattaaagaaacaaccatgcattgaggtagctgatgccatgtgagcaggagtgtgctttaatggaggcaccattaataatttaccttaatagtgtaatagttgccatttttgtgaccaaaaatttgtttcagcccctgctttatggatgaaaagtaggatcaattaatattgagtgatgacagcctccctgtggagagaaaatgggaaatcttggtgtcgtcatccgccttatg

SEQ ID NO: 263211 - DNA, 520 bp, Homo sapiens
tatttgtctagggaaacatttttttaaatgatactagctctcctcaacttgtgaaagtttcttgtgtcttcttgctgttttcactttatctgctctctagcagaaaaataaaattgcattcaattgacacactttcctgctgggaattcaagacatattacagccctatctgtgtgttctcagttgtgatgaaactgtggaaaatccccagcaaccttaaatgagataggtgcaggtgattaatccagtttcaggaaaaaaaccaaataatttactcctttttccccattaaagaaacaaccatgcattgaggtagctgatgccatgtgagcaggagtgtgctttaatggaggcaccattaataatttacyttaatagtgtaatagttgccatttttgtgaccaaaaatttgtttcagcccctgctttatggatgaaaagtaggatcaattaatattgagtgatgacagcctccctgtggagagaaaatgggaaatcttggtgtcgtcatccgccttatg

SEQ ID NO: 263212 - DNA, 593 bp, Homo sapiens
tgcagattcaaaaattgtggggctggtaagcaaaactctaaacatactaggtgtcttggtctgtttgtattgccataaaagaatacttgaaactgggcartttataaagaaaaaaagtttatttggattatgattccaccagctgtacaagaagcatggcgtcagcatctgcttctggtgagggcttccaggagcttccaaacattgtgcaagtggaaggggagctggtgtgtcacatggtgagagaggaagcaagagacgaggaggtgccatgctcttttaaacaaccagttctcacgtgaactcactcattacctcgaaggaggacagcaagcctttcgtgagggatccgcccctatgacccaaacacctcccactaggccccacctccaacgtgggagatcaaatatcaatatgagatttggaggggacaaatatccaaaccatatcactaggtttaagaggagaggagccatttttgcttctaccccttgatggctagtcctgtgtattctggctggggaagaaatagaactgatgcagcttgtattctttgtcccgaaagagtccaacttgtcaagatgtcatctccc

SEQ ID NO: 263213 - DNA, 572 bp, Homo sapiens
aagctgtcattgccctctggggagtgtcttagaagttagtcagagtagacactgcatctcattcaaactgggaagtcattggaaacaaaatttctacaccaactgaacgatgaatagttcatcaaaaaactaactttatttccaccaggaatatatttaaacattttcttttaaagtttttccatctcttcaggtgttttccatctgatttctactccctgtacccyccatgacaacctttttctctctgaagaatctttctttctaacagctcctttgactgcttttgcttttgcccaataacatccctaccaccccatcaataccaccactatcacctttaccaagaccatcactagtaccccaatgaataacacctccatcaccctcatccctaacatctacactacgaatctccccccagctaccttttcaaaactaggaatgctgctatcaggctaacagaatgaagatgtagattgggaagtaattaattagatgggaaacctcagtttaattctattttctcattatttcatatgctaaatttataataatgaattattaaaata

SEQ ID NO: 263214 - DNA, 581 bp, Homo sapiens
ccactaaaaatacaaaaattagctgggcgtggtggcaggtacctgtaatcccagctactcgggaggctgaggcaggagaatcgcttgaacctgggaggcagaggttgcagtgaactgagatttcaccattgcactccagcctgggcaacaagagtgaaattctgtctcaaaatgaaaaaaaaaaaaaaaaagagagagagaagaaaacctgtcaacagatgaatggatgaaaaattgtaagaggtatatgtgtgtgtgtctaatggaatattattcagccttaaaaaatatcttgccatttacaacatggataaacctagaggacattatgctaagtgaaataaggcagacacgaaatgaaaaatagtgcatgatctcacttatatgtggaatcaaaaaaaagaaaatatcaaatacatagaaacaataaaacactggttactakggcagaaaggaaatggggagatgtaggtcaaagggtacgaaattgaagatatgcaggatgaataagtctggagatctaatgcacagcatgaggactacagttaataatattttattgtatactggaaatttgctga

SEQ ID NO: 263215 - DNA, 547 bp, Homo sapiens
tagaaaatattttcttcgtaaaactaaaccaagcagaattacagtgtaggggttaagagggggaactttaaagtcaaataatcagggttggattcctggctttagtacttactggctgtgtgactttgggtaagtgacttaactgctctgsgcctatttgtcacatggcacttcttcgtgggttattatatgtaaagtgtttagcaaccactctataacttagctattatcattattttaagggggctagaacaagaagggtgagataatttaattaattatctccattttctaattgggcaaagaagaccctgtgtgggcaaagttaagcactggagcacacagggtggagggctggtttaggggcccagcagtgtttcgatgaggtccttctggcactaataacactcctccagcaagtaaggaagcactattttgttttcagggactcttcctgttaccacagcttctcagagattttcttccttattttctctttccatagcctttctagttctgttttgctccccctccctcaccactgttt

SEQ ID NO: 263216 - DNA, 533 bp, Homo sapiens
gtgagataatttaattaattatctccattttctaattgggcaaagaagacsctgtgtgggcaaagttaagcactggagcacacagggtggagggctggtttaggggcccagcagtgtttcgatgaggtccttctggcactaataacactcctccagcaagtaaggaagcactattttgttttcagggactcttcctgttaccacagcttctcagagattttcttccttattttctctttccatagcctttctagttctgttttgctccccctccctcaccactgttttgtttttatttgtttttctcctttccctttccaccccaccttttcctggtgtcacactcaccaccactatccccagtgtcccccatttcccccctacacttgagcttgccacatgaaagaaaataagaccaggtgaccacgtaagtccaggttcagacagtagtgcgcagggacatttgctcaggggcatcaccagaggttgtgaacacccatttatgaagccaaagggaggggtcttcatgctat

SEQ ID NO: 263217 - DNA, 603 bp, Homo sapiens
gcacaagaaatatggtaccagcatctgcttctggcgagagcttcaggctgcttccatttgtggcagaagatggagacagcctgtgtgtacagagatcacacggccagagaggaggaaagagggaccgggggaggtgccagccttttttgaacaacagctctcatgggaactaatagagtgagaactcactcatccccgtgcctagggaattaatctatttatgaggaatctgccccccccgacccaaacacctctcattaagccctaccacacactgagggttaaatttcaacacaacatttggggaggtcaaatttcaacatgagatttggaggggtcaaatttcaacatgagatttggaggggtcacatttcaacatgagatttggaggggtcacatttcaacatgagatttggaggggtcaaatttcaacatgagatttggaggggtcacatttcaacatgagatttggaggagtgaaatttcaacatgagatttggaggagtgaaatttcagcatgagatttggaagggtcaaacaagcccarctatagcaggtggtatctcattgtggtgttgatgtgcatttccctaatgattactg

SEQ ID NO: 263218 - DNA, 548 bp, Homo sapiens
agacattgcactgtgtttggggactgttccctcctccttaaaagcctagcgcagtgcctgccagagggtagggacacagtaaacattggctgagtgatttygtgactcgtgatacccatctgggtgatcgcctctctggaggttgacagtgggtgtcaagatgtcagggccccaggatgtattttactcgagggcactttaccatggcttggaaaacacattcaaagggtttgggcctaggaaaattttgttcagtgtaaactttcattgtattaacactgttctctttattactgattttaatattgttaataaaatacaaataattatagctgccacttgctgagtgcttaccctttgccaggcactgttgtacattttgcacgcattatctgaatttaatcctcatgagaggcgagtacttatattatcttcacttcagccctgaggaaattgaagcttgcaaggttaactttccctaagttcacgttttcatttttctaagaccttaagggaagagactgtgacattctggttttttgaaggca

SEQ ID NO: 263219 - DNA, 513 bp, Homo sapiens
ttagaagcttccttgtccatttcttttctgctttgtcccagtggatgccagccggcttgcttttcagcagttaaatatgcagccttttacatatcagctgtttcatctgcagaactacagagtattttacaagtaatcagttcatgcagattgcacataaatcatgtctgctctggccctttggatactcatgttccyttattaaggcataagtaagccttcctgttctcatccattctttcagactttttttaattactgaaaagtagagcctggttgtcgctacaccgtctccttccactccacccgccccatgccctcgttgcttttctgaggttcagtttgtttttctggagcttgccaaattgccttaggaagctgggtaccttgtaaatgaattaagcaaaaggaaattcttatctctaaaaggaagcggtcactgggtttctgtgtgtgatattcttggctggttaatatttttgtgaaatatgttctgatggcagcagtggtacc

SEQ ID NO: 263220 - DNA, 599 bp, Homo sapiens
actcataatctaaaaggaatttaaacaaatcaacactaagaaaccaataacctcatcaaatagtgagcaaggagatgaacagacacttctcaaagaagacatataatgagtcaacaaatatatgaaaaaagactcaatattacaaatcatcatatacatgcaaattaacaccacaatgaaatccatctcataagagttggaatggctattattaaatactcaaaaaataaaagatgttggtgaggatgtagagaaaaagggacacttatttaccattacttgtactgtaaattagttcaacccctaaggtaatcagtatccagatttctcaaagaactaaaaacagaactgccatttgacccagcaaccccactgctgcttctctctccaaaggaagagaaatcattcyaccaaaaagacacctgcactcatatgtttatggcagtcctattcacagtaacaaagtcatggaatcaacctaagtgtcagtccatggttgattgtgcaaagaaaatgtcgtatatatacagcatgaaatcccatgcagccataaaaaataataatgcctttgtagcaacatggttggagcgagaggccat

SEQ ID NO: 263221 - DNA, 571 bp, Homo sapiens
agttactctgccaactagaatttacaggttcacatataacctacatactcaatgatacatatttggacatgttaatttagttttaattcactccatgtttgtcttgaagatcaagtgaatttaggacagatagtatgattgctaagcagcaggaaaattcactttatttctttggtcataaattaacttgaaacctttcagcttgagtttcttgttatttctttgtttgtttgttttctttttccagacctgttatttttgttataggtacagactaagtagagagttagattaastagagttgagggtcttccaggtaactacaatagagaaataaaaagtgtgagcaacagaggaacaaacaggcaagtggaatgtacatacaaggcagagattgcaatgaaagaacatgaactctaaagtgggtaataagggaaagtaatacaggcagaaaacattgaaaagtgaaaaggtggtaatgtaaataagtttgattccaatagagtcaaataattgttggaaagtgatgctagaggctatgacctacaaagatgggatattgtgactggtg

SEQ ID NO: 263222 - DNA, 571 bp, Homo sapiens
agttactctgccaactagaatttacaggttcacatataacctacatactcaatgatacatatttggacatgttaatttagttttaattcactccatgtttgtcttgaagatcaagtgaatttaggacagatagtatgattgctaagcagcaggaaaattcactttatttctttggtcataaattaacttgaaacctttcagcttgagtttcttgttatttctttgtttgtttgttttctttttccagacctgttatttttgttataggtacagactaagtagagagttagattaagtagagttgagggtcttccaggtaactacaatagagaaataaaaagtgtgagcaasagaggaacaaacaggcaagtggaatgtacatacaaggcagagattgcaatgaaagaacatgaactctaaagtgggtaataagggaaagtaatacaggcagaaaacattgaaaagtgaaaaggtggtaatgtaaataagtttgattccaatagagtcaaataattgttggaaagtgatgctagaggctatgacctacaaagatgggatattgtgactggtg

SEQ ID NO: 263223 - DNA, 571 bp, Homo sapiens
agttactctgccaactagaatttacaggttcacatataacctacatactcaatgatacatatttggacatgttaatttagttttaattcactccatgtttgtcttgaagatcaagtgaatttaggacagatagtatgattgctaagcagcaggaaaattcactttatttctttggtcataaattaacttgaaacctttcagcttgagtttcttgttatttctttgtttgtttgttttctttttccagacctgttatttttgttataggtacagactaagtagagagttagattaagtagagttgagggtcttccaggtaactacaatagagaaataaaaagtgtgagcaacagaggaacaaacaggcaagtggmatgtacatacaaggcagagattgcaatgaaagaacatgaactctaaagtgggtaataagggaaagtaatacaggcagaaaacattgaaaagtgaaaaggtggtaatgtaaataagtttgattccaatagagtcaaataattgttggaaagtgatgctagaggctatgacctacaaagatgggatattgtgactggtg

SEQ ID NO: 263224 - DNA, 571 bp, Homo sapiens
agttactctgccaactagaatttacaggttcacatataacctacatactcaatgatacatatttggacatgttaatttagttttaattcactccatgtttgtcttgaagatcaagtgaatttaggacagatagtatgattgctaagcagcaggaaaattcactttatttctttggtcataaattaacttgaaacctttcagcttgagtttcttgttatttctttgtttgtttgttttctttttccagacctgttatttttgttataggtacagactaagtagagagttagattaagtagagttgagggtcttccaggtaactacaatagagaaataaaaagtgtgagcaacagaggaacaaacaggcaagtggaatgtacatacaaggcagagattgcaatgaaagaacatgaactctaaagtgggtaataagggaaagtaatacakgcagaaaacattgaaaagtgaaaaggtggtaatgtaaataagtttgattccaatagagtcaaataattgttggaaagtgatgctagaggctatgacctacaaagatgggatattgtgactggtg

SEQ ID NO: 263225 - DNA, 461 bp, Homo sapiens
caatggcatattgtgtgatgctgtggtttggagtacaaattaatccatcactgaggtagtgagcatggtacccaataggtagtttttctcaacatttaccccacttcctccctctaactttttgaaatctccagcrtctactgttcccatttttatgattgtgtgtgtccaatgtttagcttctacttataagtgagaacttgtggcatttggttttctgtttctacattagttcacttaagatcgtggtttccagctgtatctatgtttctgcaaaggacataacttatttcttctttatggctgcatagtattgcatggtgcatatataccatattttccttttctaattcaccatttatggacacctaggatgattccattactttgttattgtgaataccacagtgatgaaagtatggatacatgtgtctttttggtaggatggtggattttatttt

SEQ ID NO: 263226 - DNA, 461 bp, Homo sapiens
caatggcatattgtgtgatgctgtggtttggagtacaaattaatccatcactgaggtagtgagcatggtacccaataggtagtttttctcaacatttaccccacttcctccctctaactttttgaaatctccagcatctactgttcccatttttatgattgtgtgtgtccaatgtttagcttctacttataagtgagaacttgtggcatttggttttctgtttctmcattagttcacttaagatcgtggtttccagctgtatctatgtttctgcaaaggacataacttatttcttctttatggctgcatagtattgcatggtgcatatataccatattttccttttctaattcaccatttatggacacctaggatgattccattactttgttattgtgaataccacagtgatgaaagtatggatacatgtgtctttttggtaggatggtggattttatttt

SEQ ID NO: 263227 - DNA, 461 bp, Homo sapiens
caatggcatattgtgtgatgctgtggtttggagtacaaattaatccatcactgaggtagtgagcatggtacccaataggtagtttttctcaacatttaccccacttcctccctctaactttttgaaatctccagcatctactgttcccatttttatgattgtgtgtgtccaatgtttagcttctacttataagtgagaacttgtggcatttggttttctgtttctacattagttcacttaagatcgtggtttccagctgtatctatgtttctgcaaaggacataacttatttcttctttatggctgcatagtattscatggtgcatatataccatattttccttttctaattcaccatttatggacacctaggatgattccattactttgttattgtgaataccacagtgatgaaagtatggatacatgtgtctttttggtaggatggtggattttatttt

SEQ ID NO: 263228 - DNA, 461 bp, Homo sapiens
caatggcatattgtgtgatgctgtggtttggagtacaaattaatccatcactgaggtagtgagcatggtacccaataggtagtttttctcaacatttaccccacttcctccctctaactttttgaaatctccagcatctactgttcccatttttatgattgtgtgtgtccaatgtttagcttctacttataagtgagaacttgtggcatttggttttctgtttctacattagttcacttaagatcgtggtttccagctgtatctatgtttctgcaaaggacataacttatttcttctttatggctgcatagtattgcatggtgcatatataccatattttccttttctaattcaccatttatggacacctaggatgattccattactttgttattgtgaataccacwgtgatgaaagtatggatacatgtgtctttttggtaggatggtggattttatttt

SEQ ID NO: 263229 - DNA, 411 bp, Homo sapiens
atttagcatcctcaagtgtttaaatattttcttttgtctttctggtattgatttctagtttgataccattatgatcagataaaacaatcttcatatttttttcttaaatttgttgactccagttttatggcccaaaatatgttctgtgttggtgaatgcttcatggtcacttaaaaatatgtgtattctgatgttagtaggtagagyattgtatatatgtccctctttctctttaaattttccatgttattaaatttgaaataattttgtaaaaaccatgtatttggttgttttttaaaaattactttaccaatctctgtgtttgttctttttgataaatttcatttttaaaattgttttaggcttacagaaaaattgagcagatagaacatacaattcctatatatccca

SEQ ID NO: 263230 - DNA, 411 bp, Homo sapiens
atttagcatcctcaagtgtttaaatattttcttttgtctttctggtattgatttctagtttgataccattatgatcagataaaacaatcttcatatttttttcttaaatttgttgactccagttttatggcccaaaatatgttctgtgttggtgaatgcttcatggtcacttaaaaatatgtgtattctgatgttagtaggtagagcrttgtatatatgtccctctttctctttaaattttccatgttattaaatttgaaataattttgtaaaaaccatgtatttggttgttttttaaaaattactttaccaatctctgtgtttgttctttttgataaatttcatttttaaaattgttttaggcttacagaaaaattgagcagatagaacatacaattcctatatatccca

SEQ ID NO: 263231 - DNA, 411 bp, Homo sapiens
atttagcatcctcaagtgtttaaatattttcttttgtctttctggtattgatttctagtttgataccattatgatcagataaaacaatcttcatatttttttcttaaatttgttgactccagttttatggcccaaaatatgttctgtgttggtgaatgcttcatggtcacttaaaaatatgtgtattctgatgttagtaggtagagcattgtatatatgtccctctttctctttaaattttcyatgttattaaatttgaaataattttgtaaaaaccatgtatttggttgttttttaaaaattactttaccaatctctgtgtttgttctttttgataaatttcatttttaaaattgttttaggcttacagaaaaattgagcagatagaacatacaattcctatatatccca

SEQ ID NO: 263232 - DNA, 411 bp, Homo sapiens
atttagcatcctcaagtgtttaaatattttcttttgtctttctggtattgatttctagtttgataccattatgatcagataaaacaatcttcatatttttttcttaaatttgttgactccagttttatggcccaaaatatgttctgtgttggtgaatgcttcatggtcacttaaaaatatgtgtattctgatgttagtaggtagagcattgtatatatgtccctctttctctttaaattttccatgttatyaaatttgaaataattttgtaaaaaccatgtatttggttgttttttaaaaattactttaccaatctctgtgtttgttctttttgataaatttcatttttaaaattgttttaggcttacagaaaaattgagcagatagaacatacaattcctatatatccca

SEQ ID NO: 263233 - DNA, 466 bp, Homo sapiens
taggtcctgcctgggtagtatatattgtaactagtaataagtagaatttccagaattgaatagaaaattattaatactaggcagaagattttcttacttttctgcgttggaaagccttatatttcaccattctacagctttccaaaagattartgccatgtgtcttgacattggaaactataagcctaaatttagaaacatgctaattaaagctaaacaaaatttagagacatactaatgtgcactaaactttattgactaaccattaggtagccagttaaaaattgttgtgcaaaattttaatgacaatttgccttaattttaatcacaatttgccacttaagtgatcaatacattatatagatttttaaatgtaaatttgatgatgtagaagaatgtttttctgtttattgttatataggaagcaatcacagaagtctgagttgtgatcataccacctagcatc

SEQ ID NO: 263234 - DNA, 466 bp, Homo sapiens
taggtcctgcctgggtagtatatattgtaactagtaataagtagaatttccagaattgaatagaaaattattaatactaggcagaagattttcttacttttctgcgttggaaagccttatatttcaccattctacagctttccaaaagattaatgccatgtgtcttgacattggaaactataagcctaaatttagaaacatgctaattaaagctaaacaaaatttagagacatactaatgtgcactaaactttattgactaaccattaggtagccagttaaaaattgttgtgcaaaattttaatgacaatttgcyttaattttaatcacaatttgccacttaagtgatcaatacattatatagatttttaaatgtaaatttgatgatgtagaagaatgtttttctgtttattgttatataggaagcaatcacagaagtctgagttgtgatcataccacctagcatc

SEQ ID NO: 263235 - DNA, 466 bp, Homo sapiens
taggtcctgcctgggtagtatatattgtaactagtaataagtagaatttccagaattgaatagaaaattattaatactaggcagaagattttcttacttttctgcgttggaaagccttatatttcaccattctacagctttccaaaagattaatgccatgtgtcttgacattggaaactataagcctaaatttagaaacatgctaattaaagctaaacaaaatttagagacatactaatgtgcactaaactttattgactaaccattaggtagccagttaaaaattgttgtgcaaaattttaatgacaatttgccttaattttaatcacaayttgccacttaagtgatcaatacattatatagatttttaaatgtaaatttgatgatgtagaagaatgtttttctgtttattgttatataggaagcaatcacagaagtctgagttgtgatcataccacctagcatc

SEQ ID NO: 263236 - DNA, 629 bp, Homo sapiens
agcaaacacaaaactgagaagtgacactgcttcagaggaggaaaaaaatcattgcaagaactctggcagtacaaaaagacagattgtttcaacatctccagcagaatgkactcgctatctcagtatagatcctaaacaaaatgaaaattctgaaatgagaaataaggaattcaaaatatggattataatgaagctcaaagagatgaaatagaacattaaaaacaaacaaaaaaaaccagagaaatgattcaggatagggaagatgagatagctatgttaaaaatatagaatttttggaattaaaaaataaaagaaaattcaaatagaattgaaaccttcaaaagttgactagatcaaacagaagaattccagaatttgaaaactggtctttcaaattaatccaatcagaaaatattttttaaataatttttaaaaatcaacaaagcctttgagaaatatgagatgaggaaatgtgaccaaacctatgatttatatgcattcttgagagagaagaacaaaaagtaagcaatttggaaaacatatttgtggcaataattcaggaacattaccctaatattgctagagagataaacatccagatacaaaaaattcagagaatgactgcaaga

SEQ ID NO: 263237 - DNA, 629 bp, Homo sapiens
agcaaacacaaaactgagaagtgacactgcttcagaggaggaaaaaaatcattgcaagaactctggcagtacaaaaagacagattgtttcaacatctccagcagaatggactcgctatctcagtatagatcctaaacaaaatgaaaattctgaaatgagaaataaggaattcaaaatatggattataatgaagctcaaagagatgaaatagaacattaaaaacaaacaaaaaaaaccagagaaatgattcaggatagggaagatgagatakctatgttaaaaatatagaatttttggaattaaaaaataaaagaaaattcaaatagaattgaaaccttcaaaagttgactagatcaaacagaagaattccagaatttgaaaactggtctttcaaattaatccaatcagaaaatattttttaaataatttttaaaaatcaacaaagcctttgagaaatatgagatgaggaaatgtgaccaaacctatgatttatatgcattcttgagagagaagaacaaaaagtaagcaatttggaaaacatatttgtggcaataattcaggaacattaccctaatattgctagagagataaacatccagatacaaaaaattcagagaatgactgcaaga

SEQ ID NO: 263238 - DNA, 629 bp, Homo sapiens
agcaaacacaaaactgagaagtgacactgcttcagaggaggaaaaaaatcattgcaagaactctggcagtacaaaaagacagattgtttcaacatctccagcagaatggactcgctatctcagtatagatcctaaacaaaatgaaaattctgaaatgagaaataaggaattcaaaatatggattataatgaagctcaaagagatgaaatagaacattaaaaacaaacaaaaaaaaccagagaaatgattcaggatagggaagatgagatagctatgttaaaaatatagaayttttggaattaaaaaataaaagaaaattcaaatagaattgaaaccttcaaaagttgactagatcaaacagaagaattccagaatttgaaaactggtctttcaaattaatccaatcagaaaatattttttaaataatttttaaaaatcaacaaagcctttgagaaatatgagatgaggaaatgtgaccaaacctatgatttatatgcattcttgagagagaagaacaaaaagtaagcaatttggaaaacatatttgtggcaataattcaggaacattaccctaatattgctagagagataaacatccagatacaaaaaattcagagaatgactgcaaga

SEQ ID NO: 263239 - DNA, 428 bp, Homo sapiens
tgtgataatataaaataaatgaaattcagaatacctgatacaattaattttgaagttttcagtcaacartgttttaggtaagaaatatttcttaatcattaatatttggtagttattccagtatttgatatataaatgtgttcttaattagcatgttagccttatacaaaaattattcatttattttaaaacactataaattgaattatatttctttttaaaaattttgtatacattgaagatgacaaaacatttattctagaatatcttggcaagaacacatgagtaccttggctctataaggatgatacatgtgtcttaaaatggaagatcaaatattagtgtcaagcggcaatgtcaatggtaactcttacttactaaatgctgcaacacatgttaagaagaaagtggtataaattaggaaatgt

SEQ ID NO: 263240 - DNA, 428 bp, Homo sapiens
tgtgataatataaaataaatgaaattcagaatacctgatacaattaattttgaagttttcagtcaacaaygttttaggtaagaaatatttcttaatcattaatatttggtagttattccagtatttgatatataaatgtgttcttaattagcatgttagccttatacaaaaattattcatttattttaaaacactataaattgaattatatttctttttaaaaattttgtatacattgaagatgacaaaacatttattctagaatatcttggcaagaacacatgagtaccttggctctataaggatgatacatgtgtcttaaaatggaagatcaaatattagtgtcaagcggcaatgtcaatggtaactcttacttactaaatgctgcaacacatgttaagaagaaagtggtataaattaggaaatgt

SEQ ID NO: 263241 - DNA, 428 bp, Homo sapiens
tgtgataatataaaataaatgaaattcagaatacctgatacaattaattttgaagttttcagtcaacaatgttttaggtaagaaatatttcttaatcattaatatttggtagttattccagtatttgatatataaatgtgttcttaattagcatkttagccttatacaaaaattattcatttattttaaaacactataaattgaattatatttctttttaaaaattttgtatacattgaagatgacaaaacatttattctagaatatcttggcaagaacacatgagtaccttggctctataaggatgatacatgtgtcttaaaatggaagatcaaatattagtgtcaagcggcaatgtcaatggtaactcttacttactaaatgctgcaacacatgttaagaagaaagtggtataaattaggaaatgt

SEQ ID NO: 263242 - DNA, 428 bp, Homo sapiens
tgtgataatataaaataaatgaaattcagaatacctgatacaattaattttgaagttttcagtcaacaatgttttaggtaagaaatatttcttaatcattaatatttggtagttattccagtatttgatatataaatgtgttcttaattagcatgttagccttatacaaaaattattcatttattttaaaayactataaattgaattatatttctttttaaaaattttgtatacattgaagatgacaaaacatttattctagaatatcttggcaagaacacatgagtaccttggctctataaggatgatacatgtgtcttaaaatggaagatcaaatattagtgtcaagcggcaatgtcaatggtaactcttacttactaaatgctgcaacacatgttaagaagaaagtggtataaattaggaaatgt

SEQ ID NO: 263243 - DNA, 347 bp, Homo sapiens
agagtataaagccctgggatcaggaagaaamattttgctagtgtgtcacacgggataatagtgagtggtgccactcccatttttatcccttaattcctggacctattaatcctagctataggaggaacagtactatatgttggatgctgattcaaagcacatatggcaatctggaaaaccctgccccactcctataaggtattttcacctacctggtgctgtaacagagtcttcaaaaggcaattccacattctatcaaggcagctgctttaggatagtgtggaacatggtaagaccagtgaattccataagtatcagcccattgccacacttttttagctgtgaag

SEQ ID NO: 263244 - DNA, 347 bp, Homo sapiens
agagtataaagccctgggatcaggaagaaacattttgctagtgtgtcacamgggataatagtgagtggtgccactcccatttttatcccttaattcctggacctattaatcctagctataggaggaacagtactatatgttggatgctgattcaaagcacatatggcaatctggaaaaccctgccccactcctataaggtattttcacctacctggtgctgtaacagagtcttcaaaaggcaattccacattctatcaaggcagctgctttaggatagtgtggaacatggtaagaccagtgaattccataagtatcagcccattgccacacttttttagctgtgaag

SEQ ID NO: 263245 - DNA, 347 bp, Homo sapiens
agagtataaagccctgggatcaggaagaaacattttgctagtgtgtcacacgggataatagtgagtggtgccactcccatttttatcccttaattcctggacctattaatcctagctataggaggaacagtactatatgttggatgctgattcaaagcacatatggcaatctggaaaaccctgccccactcctataaggtattttcacctacctggtgctgtaacagagtcttcaaaaggcaattccrcattctatcaaggcagctgctttaggatagtgtggaacatggtaagaccagtgaattccataagtatcagcccattgccacacttttttagctgtgaag

SEQ ID NO: 263246 - DNA, 305 bp, Homo sapiens
cactgcacaccaaaacttctcagatgcagcaaaagtagtattaaaaggaaagtttctaaaactaaatktttatttcaaaaagataaaagatttcaagtgacaacctaatatcacacttcaaagcactggaacaacagaaacaattcaaacccaaggacagtcgaagaaaaaaataacaaaaatcatagtagaactaaatgaaattaaggccaaataaataatacaaaggatcaacaaaatgacaagtttgtttttttgaaagtaaaaattgatagacagctagctagattaagaaaagcaattca

SEQ ID NO: 263247 - DNA, 446 bp, Homo sapiens
cattggtagttgaatagctttcacatctactatgctgcagttataagcaatgaattagatgtatacattgcaagatgaatggcatttaaaggcatagtgtgaactaacaaaagtaatacacaggaaaaaatctataatataatccaatgttcataaattaaaaatatgttgacacaaaattgatayccatttgaaagttcatatacaaaaaatttacaaaattaacacgttagagtggttactatgcaagggagaataaacacgaatatcaatgttaaaatgaaatgaataaataaatgaatgaaaaacgagacagattttgtctagaccaatgaaaaatgtgcctaacattgaagtatatgatcaattaaagcttatagatcttgagtgaggctttttttctaaaatttttattggcactggtgcaagttgaaatgagtaaaaac

SEQ ID NO: 263248 - DNA, 446 bp, Homo sapiens
cattggtagttgaatagctttcacatctactatgctgcagttataagcaatgaattagatgtatacattgcaagatgaatggcatttaaaggcatagtgtgaactaacaaaagtaatacacaggaaaaaatctataatataatccaatgttcataaattaaaaatatgttgacacaaaattgatatccatttgaaagttcatatacaaaaaawttacaaaattaacacgttagagtggttactatgcaagggagaataaacacgaatatcaatgttaaaatgaaatgaataaataaatgaatgaaaaacgagacagattttgtctagaccaatgaaaaatgtgcctaacattgaagtatatgatcaattaaagcttatagatcttgagtgaggctttttttctaaaatttttattggcactggtgcaagttgaaatgagtaaaaac

SEQ ID NO: 263249 - DNA, 446 bp, Homo sapiens
cattggtagttgaatagctttcacatctactatgctgcagttataagcaatgaattagatgtatacattgcaagatgaatggcatttaaaggcatagtgtgaactaacaaaagtaatacacaggaaaaaatctataatataatccaatgttcataaattaaaaatatgttgacacaaaattgatatccatttgaaagttcatatacaaaaaatttacaaaattaacacrttagagtggttactatgcaagggagaataaacacgaatatcaatgttaaaatgaaatgaataaataaatgaatgaaaaacgagacagattttgtctagaccaatgaaaaatgtgcctaacattgaagtatatgatcaattaaagcttatagatcttgagtgaggctttttttctaaaatttttattggcactggtgcaagttgaaatgagtaaaaac

SEQ ID NO: 263250 - DNA, 446 bp, Homo sapiens
cattggtagttgaatagctttcacatctactatgctgcagttataagcaatgaattagatgtatacattgcaagatgaatggcatttaaaggcatagtgtgaactaacaaaagtaatacacaggaaaaaatctataatataatccaatgttcataaattaaaaatatgttgacacaaaattgatatccatttgaaagttcatatacaaaaaatttacaaaattaacacgttagagtggttactatgcaagggagaataaacaygaatatcaatgttaaaatgaaatgaataaataaatgaatgaaaaacgagacagattttgtctagaccaatgaaaaatgtgcctaacattgaagtatatgatcaattaaagcttatagatcttgagtgaggctttttttctaaaatttttattggcactggtgcaagttgaaatgagtaaaaac

SEQ ID NO: 263251 - DNA, 472 bp, Homo sapiens
aaatgggctctcactactaatttgccaacaaatcaagatgctcactctttattaactttgtaaacctggtagaattatgattttcaaggggacaagctgaatatgttgcactccctgaatagaaaactaagtttgattgctaagtggtatttgggtttgtaatcaaacatcacaatttcatttatgcagtcagtgggaactaagaaaaatttttttagagaaacatgtatttccttctaaatataatgtatcttaccctaatacattataaattataattataaataaatataataaattataatatattataataattataaagtttgatgtttayacattattgatacattcatatgcaatatgaggtcatttataaatcactgataattttatcttatttcaaacatgaccaacggtcaaatagaacatttaaataatttaatcctgagtgtgtaacatatattttagc

SEQ ID NO: 263252 - DNA, 472 bp, Homo sapiens
aaatgggctctcactactaatttgccaacaaatcaagatgctcactctttattaactttgtaaacctggtagaattatgattttcaaggggacaagctgaatatgttgcactccctgaatagaaaactaagtttgattgctaagtggtatttgggtttgtaatcaaacatcacaatttcatttatgcagtcagtgggaactaagaaaaatttttttagagaaacatgtatttccttctaaatataatgtatcttaccctaatacattataaattataattataaataaatataataaattataatatattataataattataaagtttgatgtttatacattattgatacattcayatgcaatatgaggtcatttataaatcactgataattttatcttatttcaaacatgaccaacggtcaaatagaacatttaaataatttaatcctgagtgtgtaacatatattttagc

SEQ ID NO: 263253 - DNA, 472 bp, Homo sapiens
aaatgggctctcactactaatttgccaacaaatcaagatgctcactctttattaactttgtaaacctggtagaattatgattttcaaggggacaagctgaatatgttgcactccctgaatagaaaactaagtttgattgctaagtggtatttgggtttgtaatcaaacatcacaatttcatttatgcagtcagtgggaactaagaaaaatttttttagagaaacatgtatttccttctaaatataatgtatcttaccctaatacattataaattataattataaataaatataataaattataatatattataataattataaagtttgatgtttatacattattgatacattcatatgcaatatgaggtcatttataaatcactgataattttatcttatttcaaacatgaccaacggtcaaatagaacrtttaaataatttaatcctgagtgtgtaacatatattttagc

SEQ ID NO: 263254 - DNA, 599 bp, Homo sapiens
taaacatttaccttacaaaactcacttgcaggtaagatcatatacaacatccagcttgactaataaaagctaagaagaaatcattaatatggacccaggaatgccttraaaaactaaattttttggctcatttttcgttatccttctgcctcccacctgcctggaaagcagaaataagctggagatgaagcagccatcttgcaacgatcataatgaagcatgcgtgtaaggatggcggagtagaagtgtagaaaagatcttcatccttgattatttcaataagccataaacctacctggattgaatcactctgcatttcttgtatttgtttaaaccagcatttgtcagatatattatttgttgcgactaattgaaatcctaccaatacagaaggctgagtggaaaaagaaatctggtctagggattgaaggatagacaggatgtgctatttccagagataggtagaaatttatggcctcgacagggaataacattgaaagaatgaaagacgtaaataagtcattaacagtcataaaaataagaaaacactactgaaaaatagtaacagtaaactaaaagccttgattaaataaaatcca

SEQ ID NO: 263255 - DNA, 599 bp, Homo sapiens
taaacatttaccttacaaaactcacttgcaggtaagatcatatacaacatccagcttgactaataaaagctaagaagaaatcattaatatggacccaggaatgccttgaaaaactaaattttttggctcatttttcgttatccttctgcctcccacctgcctggaaagcagaaataagctggagatgaagcagccatcttgcaacgatcataatgaagcatgcrtgtaaggatggcggagtagaagtgtagaaaagatcttcatccttgattatttcaataagccataaacctacctggattgaatcactctgcatttcttgtatttgtttaaaccagcatttgtcagatatattatttgttgcgactaattgaaatcctaccaatacagaaggctgagtggaaaaagaaatctggtctagggattgaaggatagacaggatgtgctatttccagagataggtagaaatttatggcctcgacagggaataacattgaaagaatgaaagacgtaaataagtcattaacagtcataaaaataagaaaacactactgaaaaatagtaacagtaaactaaaagccttgattaaataaaatcca

SEQ ID NO: 263256 - DNA, 599 bp, Homo sapiens
taaacatttaccttacaaaactcacttgcaggtaagatcatatacaacatccagcttgactaataaaagctaagaagaaatcattaatatggacccaggaatgccttgaaaaactaaattttttggctcatttttcgttatccttctgcctcccacctgcctggaaagcagaaataagctggagatgaagcagccatcttgcaacgatcataatgaagcatgcgtgtaaggatggcggagtagaagtgtagaaaagatcttcatccttgattatttcaataagccataaacctrcctggattgaatcactctgcatttcttgtatttgtttaaaccagcatttgtcagatatattatttgttgcgactaattgaaatcctaccaatacagaaggctgagtggaaaaagaaatctggtctagggattgaaggatagacaggatgtgctatttccagagataggtagaaatttatggcctcgacagggaataacattgaaagaatgaaagacgtaaataagtcattaacagtcataaaaataagaaaacactactgaaaaatagtaacagtaaactaaaagccttgattaaataaaatcca

SEQ ID NO: 263257 - DNA, 599 bp, Homo sapiens
taaacatttaccttacaaaactcacttgcaggtaagatcatatacaacatccagcttgactaataaaagctaagaagaaatcattaatatggacccaggaatgccttgaaaaactaaattttttggctcatttttcgttatccttctgcctcccacctgcctggaaagcagaaataagctggagatgaagcagccatcttgcaacgatcataatgaagcatgcgtgtaaggatggcggagtagaagtgtagaaaagatcttcatccttgattatttcaataagccataaacctacctggattgaatcactctgcatttcttgtatttgtttaaaccagcatttgtcagatatattatttgttgcgactaattgaaatcctaccaatacagaaggctgagtggaaaaagaaatctggtctagggaytgaaggatagacaggatgtgctatttccagagataggtagaaatttatggcctcgacagggaataacattgaaagaatgaaagacgtaaataagtcattaacagtcataaaaataagaaaacactactgaaaaatagtaacagtaaactaaaagccttgattaaataaaatcca

SEQ ID NO: 263258 - DNA, 562 bp, Homo sapiens
agttttgtgcttatgcacatatatacctgctttctacatagatatactaaaattgtgaatcaatcacaactgaaacacaattacagagaaagaggaarcaatccacttttgaaaatgcaacaaatatacccatgatatgacatttaatccaagattcaaggagcaattttgaatgaaaccacctttgcaaaaattataactgagaaaatcattacagcaaaagacatcttacctaatcaactccatcttatttgcttctaccctccaaactgtctgtgtttattagtgggtgtaggctgaactaactttgggaggaacttaatttatagtttaactttgaaacaaaaatgataacagccctttctcaaaacaaatcactttcctgtcttgagactggactgcctttgcaggcctaacgaattagctacaagattagaaattatgattctgaaccttcccaaattgctcctggggataatatcactattgtaaaccctaatatcagtatttgagatattttgaagaccttgcactccatggattagctggaaccacccagatc

SEQ ID NO: 263259 - DNA, 562 bp, Homo sapiens
agttttgtgcttatgcacatatatacctgctttctacatagatatactaaaattgtgaatcaatcacaactgaaacacaattacagagaaagaggaagcaatccrcttttgaaaatgcaacaaatatacccatgatatgacatttaatccaagattcaaggagcaattttgaatgaaaccacctttgcaaaaattataactgagaaaatcattacagcaaaagacatcttacctaatcaactccatcttatttgcttctaccctccaaactgtctgtgtttattagtgggtgtaggctgaactaactttgggaggaacttaatttatagtttaactttgaaacaaaaatgataacagccctttctcaaaacaaatcactttcctgtcttgagactggactgcctttgcaggcctaacgaattagctacaagattagaaattatgattctgaaccttcccaaattgctcctggggataatatcactattgtaaaccctaatatcagtatttgagatattttgaagaccttgcactccatggattagctggaaccacccagatc

SEQ ID NO: 263260 - DNA, 562 bp, Homo sapiens
agttttgtgcttatgcacatatatacctgctttctacatagatatactaaaattgtgaatcaatcacaactgaaacacaattacagagaaagaggaagcaatccacttttgaaaatgcaacaaatatacccatgatatgacatttaatccaagattcaaggagcaattttgaatgaaaccacctttgcaaaaattataactgagaaaatcattacagcaaaagacatcttaccyaatcaactccatcttatttgcttctaccctccaaactgtctgtgtttattagtgggtgtaggctgaactaactttgggaggaacttaatttatagtttaactttgaaacaaaaatgataacagccctttctcaaaacaaatcactttcctgtcttgagactggactgcctttgcaggcctaacgaattagctacaagattagaaattatgattctgaaccttcccaaattgctcctggggataatatcactattgtaaaccctaatatcagtatttgagatattttgaagaccttgcactccatggattagctggaaccacccagatc

SEQ ID NO: 263261 - DNA, 562 bp, Homo sapiens
agttttgtgcttatgcacatatatacctgctttctacatagatatactaaaattgtgaatcaatcacaactgaaacacaattacagagaaagaggaagcaatccacttttgaaaatgcaacaaatatacccatgatatgacatttaatccaagattcaaggagcaattttgaatgaaaccacctttgcaaaaattataactgagaaaatcattacagcaaaagacatcttacctaatcaactccatcttatttgcttctaccctccaaactgtctgtgtttattagtgggtgtaggctgaactaactttgggaggaacttaatttatagtttaactttgaaacaaaaatgataacagccctttctcaaaacaaatcactttcctgtcttgagactggactgcctttrcaggcctaacgaattagctacaagattagaaattatgattctgaaccttcccaaattgctcctggggataatatcactattgtaaaccctaatatcagtatttgagatattttgaagaccttgcactccatggattagctggaaccacccagatc

SEQ ID NO: 263262 - DNA, 547 bp, Homo sapiens
tgagaaacccaaaaacctgttaagaaagaggcttttgtaccctagatgattttgaaaccagccacacagaagctggtaaaaaaaaatctgtggcattcaccaaccatagtccctccccggtacactgtgatggtacaatagagagaaatctcccaggtcttagcttcttcctggggagaaaagagaagactgaaccatatatcaaatattctgccttttctttggggtggtaagactgcctgggagactgccttctgtcttgccagaatataagcactgacaagaaaaggcttcaatttggggacctatgaggacgaaggtgmcaatttagattagcacttgaccactccctacagtccctcacctggctcagcatgaaaccagcaggagaaaatctctaactcccagaatcaaaaagataataataaaatcatatcactaaaaaatatcaataaaacacaaaggaagctagcaaaagagaaaaagaaaagctacaagagaagcaaatcttctaacaaagaaaagccaaggactagataactggctt

SEQ ID NO: 263263 - DNA, 601 bp, Homo sapiens
cacaaaaccagaattctacagtattttaaatctcaagcaacaaatttagtcctttcctagattcccatattaatattaattttctatttttttctattcagcattttgcttccatgttctgatactatgtgtgaagttgragatacagagaatgacgctgattcacaataatattacaatttttacatgatgtgtacttgtctgatcctaagctgaatccttgttctaaggtattgtgaaatataactcttctgaattgaagtgtagaagtagtgtcaacaaaattttatattaaattaaaaaatacaaataaataagaaggcaagggtgaaggggtaatggctataacaaaagtgtacttttctagaaaaaaatcagcagcaagataaatcattgctgtctcagaatttaaaatcatgcttcaattttcaaaaatctttttaatcaaatgtcgttttggtttaacaaagagatgtgcttgtatattcttagatcatactttacaactccaaaacaatttaatctagagttcaggccattgcttcccagatcataaaaatcaagtagggtgtttgtttaaaataaatatttcttacttaca

SEQ ID NO: 263264 - DNA, 601 bp, Homo sapiens
cacaaaaccagaattctacagtattttaaatctcaagcaacaaatttagtcctttcctagattcccatattaatattaattttctatttttttctattcagcattttgcttccatgttctgatactatgtgtgaagttggagayacagagaatgacgctgattcacaataatattacaatttttacatgatgtgtacttgtctgatcctaagctgaatccttgttctaaggtattgtgaaatataactcttctgaattgaagtgtagaagtagtgtcaacaaaattttatattaaattaaaaaatacaaataaataagaaggcaagggtgaaggggtaatggctataacaaaagtgtacttttctagaaaaaaatcagcagcaagataaatcattgctgtctcagaatttaaaatcatgcttcaattttcaaaaatctttttaatcaaatgtcgttttggtttaacaaagagatgtgcttgtatattcttagatcatactttacaactccaaaacaatttaatctagagttcaggccattgcttcccagatcataaaaatcaagtagggtgtttgtttaaaataaatatttcttacttaca

SEQ ID NO: 263265 - DNA, 404 bp, Homo sapiens
ccattcttgcattgctatgaagaaatatctgagactgggtaatttataaagaaaagagggtttaattggctcatggttccacggtctgtacaggaagaataattccagcatcagctcagcttctggggaggcctcgggaaacttcaatcatggcagaaggcaaagacggagctggcatctcacatgacccgagcagcaagagaaagagagagagggaggcgctacacacttataaacaaccagatcttgtaagaactctatcaggagaayagtactagtgtgatgttgccaaaccattcatgagaaactgccaccataattcaaccacctcccaccaggccccacctccaccactggggattacaattcaacatgagatatgggcaggtacacaaacccaaatc

SEQ ID NO: 263266 - DNA, 404 bp, Homo sapiens
ccattcttgcattgctatgaagaaatatctgagactgggtaatttataaagaaaagagggtttaattggctcatggttccacggtctgtacaggaagaataattccagcatcagctcagcttctggggaggcctcgggaaacttcaatcatggcagaaggcaaagacggagctggcatctcacatgacccgagcagcaagagaaagagagagagggaggcgctacacacttataaacaaccagatcttgtaagaactctatcaggagaatagtactagtgtgatgttgccaaaccattcatgagaaactgccaccataattcaaccacctcccaccaggccccacctccaccaytggggattacaattcaacatgagatatgggcaggtacacaaacccaaatc

SEQ ID NO: 263267 - DNA, 370 bp, Homo sapiens
ttaaattggtctggtacatcatctaagctgtttgccttacttgctatacaaattggcttctttgcagctgtggtgaaggatacaagaaatctgcttctaatctgctttaaatttggcaatagcattttctaaaaatgtagtgtgtgtccaggatgttttagtttagtgacatggagcatcctgttaccttcatttaaggctgaaagcaaaatttggtaaaaaaaaaaaaaaaaaaaaaaaaaaaamccataaaaatgcatgtttatccaggttcatagatccaggttttttaaatgggaccccaggttatttggctgcagctctagtgttttggaatccactttgagaatgcattgctaatccaccttgt

SEQ ID NO: 263268 - DNA, 399 bp, Homo sapiens
gctctagtgttttggaatccactttgagaatgcattgctaatccaccttgttcacagccttttagatttgctttgtttaaaaagattackggtattttgcaagtagtaccgagatttcggagcacattaatattatttagtgttctttggctccctgaagtatcgctgacaatctttggagtttaaaggtttttcatagctagagcacatccataggaaattaattcaatattattgcattaggctgtctttaactggtgaaaaattatctggctgtgaccaatggaaatttgttgagctgaatgttgtgacccatctttcaaatctcacaactgcaatgatacagcttcctagaagttgagctaaaccataggtgtcttttcacttcagcattttatt

SEQ ID NO: 263269 - DNA, 399 bp, Homo sapiens
gctctagtgttttggaatccactttgagaatgcattgctaatccaccttgttcacagccttttagatttgctttgtttaaaaagattactggtattttgcaagtagtaccgagatttcggagcacattaatattatttagtgttctttggctccctgaagtatcgctgacaatctttggagtttaaaggtttttcatagctagagcacatccataggaaattaattcaatattattgcattaggctgtctttaactggtgaaaaattatctggctgtgaccaatggaaatttgttgagctgaatgttgtgaccmatctttcaaatctcacaactgcaatgatacagcttcctagaagttgagctaaaccataggtgtcttttcacttcagcattttatt

SEQ ID NO: 263270 - DNA, 399 bp, Homo sapiens
gctctagtgttttggaatccactttgagaatgcattgctaatccaccttgttcacagccttttagatttgctttgtttaaaaagattactggtattttgcaagtagtaccgagatttcggagcacattaatattatttagtgttctttggctccctgaagtatcgctgacaatctttggagtttaaaggtttttcatagctagagcacatccataggaaattaattcaatattattgcattaggctgtctttaactggtgaaaaattatctggctgtgaccaatggaaatttgttgagctgaatgttgtgacccatctttcaaatctcacaactgcartgatacagcttcctagaagttgagctaaaccataggtgtcttttcacttcagcattttatt

SEQ ID NO: 263271 - DNA, 553 bp, Homo sapiens
aatattcaagtctcccaatttctctttttaaggtagtctagcaaccaggcttatatctacaaacagctttacattttctgccagcatattttctgaattataaatcaccattaacaaatctggcttttagattctctgagatattataagccccactgcatattctggttgtttgtttcctccacatgcaggccacatcctaagagatactggaagaaaagttatgttatccctctctattctcattccacacacactttagcttaacaagcacaacatgtttaagaaagaaaatataaaattgccttcatctgytcccaagctatttgtgaacaatctagaagatatttaaatataaagcagtattgaaagaactgtttttcttaaaaaagagtaacacacatcagcttcagaaaatgtgtttttccatagcacaatgtgagaaataggcaaatttgaggatagtaaaaaagaaaaacactttcttccttattctgagtatgtcttttatgccaaagggaatcttcgttatctaggggactattgatggatt

SEQ ID NO: 263272 - DNA, 560 bp, Homo sapiens
tttatttttcttggtgtttgctgagcctcttggatttctaaaacttatgtgttatatcatattttaagaaaatccacccttatttctttaaatattgtttctttttcccattttctctctctattcatggaactctaagtgcatgtattctagactgatattatctaacaggtctctgagtttatgctcacttatttcctcttttttttttctttatgtgtaacaacatcttgttatctaccctcaagttctcttcatcttgtcttcctttctttcttattttcattattttgttaaggcttttttttttccttttgagaatattttctattttcttgcctgtttgttggataatgctggattgtatgaygaacattaaaaatatgtgggcatttgatattttattatctttaaataatgtcggttatattgtttggacaggaaaggggcagctcaaatctcagttcagattctttctctttagctgacctcttttgtctgcatcacacatacataggtcatagattagtcataaatatgggtagaaagaattatggacc

SEQ ID NO: 263273 - DNA, 560 bp, Homo sapiens
tttatttttcttggtgtttgctgagcctcttggatttctaaaacttatgtgttatatcatattttaagaaaatccacccttatttctttaaatattgtttctttttcccattttctctctctattcatggaactctaagtgcatgtattctagactgatattatctaacaggtctctgagtttatgctcacttatttcctcttttttttttctttatgtgtaacaacatcttgttatctaccctcaagttctcttcatcttgtcttcctttctttcttattttcattattttgttaaggcttttttttttccttttgagaatattttctattttcttgcctgtttgttggataatgctggattgtatgatgracattaaaaatatgtgggcatttgatattttattatctttaaataatgtcggttatattgtttggacaggaaaggggcagctcaaatctcagttcagattctttctctttagctgacctcttttgtctgcatcacacatacataggtcatagattagtcataaatatgggtagaaagaattatggacc

SEQ ID NO: 263274 - DNA, 608 bp, Homo sapiens
ctacatacttccctgctgataaagcaagcaagtttctaggcctcaccccttccagcctgcccacattttcagccacagctcctgcactcctttcggtagcagttcttgttcaccccttggattctgctcaaaagagtttgcaccttgttgaatttattacaaaatttagttggaaacttctttcaccctgtaaccatttccaaattccatcggctgccttccccaaagatactygtgagatatagtcagagatggcttccctgggctcaagctggaaatgggagtgcctacagggctcttcttgctgttgcttctactttcatatttcacactaaatccatttcggctttaggtaaggttaaatcctcctgtaatctggattttcaggttcccagtggggatgtgttttggaggtaggttttcccccttttatagtttgggaactcaaagttttttgcctgtctcacagaattttcagcagtgtgccacttctttcaaaggatctgtgaatgcattgtatgtttttaagcattcaatatattatgaatattttatattaattgagtagctgtatttcttctgtgaattgcatgtttatatctttttcc

SEQ ID NO: 263275 - DNA, 608 bp, Homo sapiens
ctacatacttccctgctgataaagcaagcaagtttctaggcctcaccccttccagcctgcccacattttcagccacagctcctgcactcctttcggtagcagttcttgttcaccccttggattctgctcaaaagagtttgcaccttgttgaatttattacaaaatttagttggaaacttctttcaccctgtaaccatttccaaattccatcggctgccttccccaaagatacttgtgagatatagtcagagatggcttccctgggctcaagctggaaatgggagtgcctacagggctcttcttgctgttgcttctactttcatatttcacactaaatccatttcrgctttaggtaaggttaaatcctcctgtaatctggattttcaggttcccagtggggatgtgttttggaggtaggttttcccccttttatagtttgggaactcaaagttttttgcctgtctcacagaattttcagcagtgtgccacttctttcaaaggatctgtgaatgcattgtatgtttttaagcattcaatatattatgaatattttatattaattgagtagctgtatttcttctgtgaattgcatgtttatatctttttcc

SEQ ID NO: 263276 - DNA, 608 bp, Homo sapiens
ctacatacttccctgctgataaagcaagcaagtttctaggcctcaccccttccagcctgcccacattttcagccacagctcctgcactcctttcggtagcagttcttgttcaccccttggattctgctcaaaagagtttgcaccttgttgaatttattacaaaatttagttggaaacttctttcaccctgtaaccatttccaaattccatcggctgccttccccaaagatacttgtgagatatagtcagagatggcttccctgggctcaagctggaaatgggagtgcctacagggctcttcttgctgttgcttctactttcatatttcacactaaatccatttcggctttaggtaaggttaaatcctcctgtaatctggattttcaggttcccrgtggggatgtgttttggaggtaggttttcccccttttatagtttgggaactcaaagttttttgcctgtctcacagaattttcagcagtgtgccacttctttcaaaggatctgtgaatgcattgtatgtttttaagcattcaatatattatgaatattttatattaattgagtagctgtatttcttctgtgaattgcatgtttatatctttttcc

SEQ ID NO: 263277 - DNA, 608 bp, Homo sapiens
ctacatacttccctgctgataaagcaagcaagtttctaggcctcaccccttccagcctgcccacattttcagccacagctcctgcactcctttcggtagcagttcttgttcaccccttggattctgctcaaaagagtttgcaccttgttgaatttattacaaaatttagttggaaacttctttcaccctgtaaccatttccaaattccatcggctgccttccccaaagatacttgtgagatatagtcagagatggcttccctgggctcaagctggaaatgggagtgcctacagggctcttcttgctgttgcttctactttcatatttcacactaaatccatttcggctttaggtaaggttaaatcctcctgtaatctggattttcaggttcccagtggggatgtgttttggaggtaggttttcccccttttayagtttgggaactcaaagttttttgcctgtctcacagaattttcagcagtgtgccacttctttcaaaggatctgtgaatgcattgtatgtttttaagcattcaatatattatgaatattttatattaattgagtagctgtatttcttctgtgaattgcatgtttatatctttttcc

SEQ ID NO: 263278 - DNA, 483 bp, Homo sapiens
gaagcaatcctcccacctcggcttcccaagcagctgggactacggcaagtgccacttcacctggataattttatttatttatttattgttgagacakggtctcactaagttgcccaggctggtcttgaacttctgggctcaagcaatcctcccgccttcggcctcccaaagtgttagaattacaggcatgagccacgacacctggcctattattaatttttatagatttatgtaagcaaggatgttacccatttctctattatttacatgatattatctatttttgaatttatgtttttattttttgtttactttccgtacattttaagctttagtaatcatccaatctatcaattttttaaaaataatttctgagtgctgtatcatggtgagaaaggtattctccaaactatcattattggaaaaaaattgaccatattttctgcaattgcttttatgacatcagttttatatttatatggt

SEQ ID NO: 263279 - DNA, 369 bp, Homo sapiens
aattttatttatttatttattgttgagacatggtctcactaagttgcccaggctggtcttgaacttctgggctcaagcaatcctcccgccttcggcctcccaaagtgttagaattacaggcatgagccacgacacctggcctattattaatttttatagatttatgtaagcaaggatgttacccatttctctattatttacatgatattatctatttttgaatttatgtttttattttttgtttactttccgtacattttaagctttartaatcatccaatctatcaattttttaaaaataatttctgagtgctgtatcatggtgagaaaggtattctccaaactatcattattggaaaaaaattgacc

SEQ ID NO: 263280 - DNA, 369 bp, Homo sapiens
aattttatttatttatttattgttgagacatggtctcactaagttgcccaggctggtcttgaacttctgggctcaagcaatcctcccgccttcggcctcccaaagtgttagaattacaggcatgagccacgacacctggcctattattaatttttatagatttatgtaagcaaggatgttacccatttctctattatttacatgatattatctatttttgaatttatgtttttattttttgtttactttccgtacattttaagctttagtaatcatccaatctatcaattttttaaaaataatttctgagtgctrtatcatggtgagaaaggtattctccaaactatcattattggaaaaaaattgacc

SEQ ID NO: 263281 - DNA, 483 bp, Homo sapiens
gaagcaatcctcccacctcggcttcccaagcagctgggactacggcaagtgccacttcacctggataattttatttatttatttattgttgagacatggtctcactaagttgcccaggctggtcttgaacttctgggctcaagcaatcctcccgccttcggcctcccaaagtgttagaattacaggcatgagccacgacacctggcctattattaatttttatagatttatgtaagcaaggatgttacccatttctctattatttacatgatattatctatttttgaatttatgtttttattttttgtttactttccgtacattttaagctttagtaatcatccaatctatcaattttttaaaaataatttctgagtgctgtatcatggtgagaaaggtattctccaawctatcattattggaaaaaaattgaccatattttctgcaattgcttttatgacatcagttttatatttatatggt

SEQ ID NO: 263282 - DNA, 531 bp, Homo sapiens
atgagtaattaaatacatgcatataaactaggtcaccctctcataagacctgatctttataggctgacaattgtatataagaatatgaatatactggtagaattctgattcaagttttaaytaacttctgtgtatctcatacactctttccagtttaaagcattcatgtcctattaattcaggtacattgcctcttcagagtgctcaaatagactttgctgaataaatacttattataaagaaaagcttttcaacccacccacttattgtcataaaggcagaaatagttatttaactggatttgccttttttaaccaattatgttttgtaaaagttatgaacatataccgtaattttacttttattatttgtttgccaatgccattgtagttgaacatctttcttgtctccttcaaaagtgagatgtgaaatttctctcaacttgagattaaaggcatcaaagtaacctgatgtttaaagatttctttctttggatttgaacaaagtctgttctattccttaaaaaagaat

SEQ ID NO: 263283 - DNA, 531 bp, Homo sapiens
atgagtaattaaatacatgcatataaactaggtcaccctctcataagacctgatctttataggctgacaattgtatataagaatatgaatatactggtagaattctgattcaagttttaactaayttctgtgtatctcatacactctttccagtttaaagcattcatgtcctattaattcaggtacattgcctcttcagagtgctcaaatagactttgctgaataaatacttattataaagaaaagcttttcaacccacccacttattgtcataaaggcagaaatagttatttaactggatttgccttttttaaccaattatgttttgtaaaagttatgaacatataccgtaattttacttttattatttgtttgccaatgccattgtagttgaacatctttcttgtctccttcaaaagtgagatgtgaaatttctctcaacttgagattaaaggcatcaaagtaacctgatgtttaaagatttctttctttggatttgaacaaagtctgttctattccttaaaaaagaat

SEQ ID NO: 263284 - DNA, 531 bp, Homo sapiens
atgagtaattaaatacatgcatataaactaggtcaccctctcataagacctgatctttataggctgacaattgtatataagaatatgaatatactggtagaattctgattcaagttttaactaacttctgtgtatctcatacactctttccartttaaagcattcatgtcctattaattcaggtacattgcctcttcagagtgctcaaatagactttgctgaataaatacttattataaagaaaagcttttcaacccacccacttattgtcataaaggcagaaatagttatttaactggatttgccttttttaaccaattatgttttgtaaaagttatgaacatataccgtaattttacttttattatttgtttgccaatgccattgtagttgaacatctttcttgtctccttcaaaagtgagatgtgaaatttctctcaacttgagattaaaggcatcaaagtaacctgatgtttaaagatttctttctttggatttgaacaaagtctgttctattccttaaaaaagaat

SEQ ID NO: 263285 - DNA, 531 bp, Homo sapiens
atgagtaattaaatacatgcatataaactaggtcaccctctcataagacctgatctttataggctgacaattgtatataagaatatgaatatactggtagaattctgattcaagttttaactaacttctgtgtatctcatacactctttccagtttaaagcattcatgtcctattaattcaggtacattgcctcttcagagtgctcaaatagactttgctgaataaatacttattataaagaaaagcttttcaacccacccacttattgtcataaaggcagaaatagttatttaactggatttgccttttttaaccaattatgttttgtaaaagttatgaacatataccgtaattttacttttattatttgtttgccaatgccattgtagttgaacatctttcttgtctccttcaaaagtgagatgtgaaatttctctcaacttgagattaaaggcatcaaastaacctgatgtttaaagatttctttctttggatttgaacaaagtctgttctattccttaaaaaagaat

SEQ ID NO: 263286 - DNA, 595 bp, Homo sapiens
aaaagagacatttaaaatgaaatttttaattagttttatagacagagctaagtcactttctcttatatgaagtagattttaaaacataattatccatgaaaatatgattatttaaaaatattttatgcactttcttaatcatctccaaatattttattatttttccatgaatattctatgaagtactaaagaatattgcaatgtagagatctttcaaaattctgaggctcacaaatatattgtaatgcataagatttaactgagagaaagcagaagcaaaattataatatttgtatagttaacacaatatttcaaaatatattaattatattttaagttatataaatggaaaaaggaatatttttktatttgaacatcttaagagctgcttaaaattattccctcaaaagcatagatttaaacattttattctgccactgattaatctttaatgatatctcagttatgaccaacagtaacagaagagctattttaacagattctacagtaaactcggcaatgcttgtaggctggaagtatgcagctcagccttcatggcttatagactattgcattgtggctgcagcaaaattag

SEQ ID NO: 263287 - DNA, 593 bp, Homo sapiens
ctgaatttctgtaaagcaagataagtatatatggatatgtgtgtataaatattatatctctataggatttattatatttgtaaatgtatctctttgtcartaaattgaggatattaagtacctactatatgctaagcactgttctgatacaaaggacatattaggatcaaagatgcaaattccccagcctcatggagcttaaattttagtggcaaagtcagaaaataaccaaacaaataatagtatcatatcaggtagtgataagtcatataaaacaattaaataaaaggaataagtaaagaataaaaatggccatattgtagataggaagtctgtagaaggcttctatgaagaggtaatatttgtatagagacttcagtaaagtgaggaaattatacataagataaaacaaataagaaaccaacctaccacagggttagcctgcacaattcatgttaatctgctttgtccatgatggttgatatgtatataagtgatgtcaaatattttattcccttaggaggtttaactattgtctctgcaatcttgtttgtgtattcaaattgttgtaggttctttgtaatgattaacag

SEQ ID NO: 263288 - DNA, 593 bp, Homo sapiens
ctgaatttctgtaaagcaagataagtatatatggatatgtgtgtataaatattatatctctataggatttattatatttgtaaatgtatctctttgtcagtaaattgaggatattaagtacctactatatgctaagcactgttctgatacaaaggacatattaggatcaaagatgcaaattccccagcctcatggagcttaaattttagtggcaawgtcagaaaataaccaaacaaataatagtatcatatcaggtagtgataagtcatataaaacaattaaataaaaggaataagtaaagaataaaaatggccatattgtagataggaagtctgtagaaggcttctatgaagaggtaatatttgtatagagacttcagtaaagtgaggaaattatacataagataaaacaaataagaaaccaacctaccacagggttagcctgcacaattcatgttaatctgctttgtccatgatggttgatatgtatataagtgatgtcaaatattttattcccttaggaggtttaactattgtctctgcaatcttgtttgtgtattcaaattgttgtaggttctttgtaatgattaacag

SEQ ID NO: 263289 - DNA, 593 bp, Homo sapiens
ctgaatttctgtaaagcaagataagtatatatggatatgtgtgtataaatattatatctctataggatttattatatttgtaaatgtatctctttgtcagtaaattgaggatattaagtacctactatatgctaagcactgttctgatacaaaggacatattaggatcaaagatgcaaattccccagcctcatggagcttaaattttagtggcaaagtcagaaaataaccaaacaaataatagtatcatatcaggtagtgataagtcatataaaacaattaamtaaaaggaataagtaaagaataaaaatggccatattgtagataggaagtctgtagaaggcttctatgaagaggtaatatttgtatagagacttcagtaaagtgaggaaattatacataagataaaacaaataagaaaccaacctaccacagggttagcctgcacaattcatgttaatctgctttgtccatgatggttgatatgtatataagtgatgtcaaatattttattcccttaggaggtttaactattgtctctgcaatcttgtttgtgtattcaaattgttgtaggttctttgtaatgattaacag

SEQ ID NO: 263290 - DNA, 489 bp, Homo sapiens
gagattttgagtccccattttacgcaccgcttctcgagcctccatattgtgcgccaaaaatattgcaagacttttccttagttcaggtaaagatggggtccttgtctgtcccatgtttgaaggatgagtgaagcagggttttgttgggtgaaaaggaagaaaagggggaaatmgggactgtcacaaggccagagggcctgctacagtgcttctagccaggccatttgaatctgtttccacactggaagaggaggggccaggctcctccctgctgcaaatgtggtgaaatttggagactccacctcagtgggcaggctggttggagtttctccagcgacctcttcccacctgtctcaaaatctttcacctccttgtttgagttcatacacaaatattttgacactattagaaatgggattattttaataattcattttacaaataactttttgttagtgtataaaatgcaagtaactcttgtatgtagat

SEQ ID NO: 263291 - DNA, 489 bp, Homo sapiens
gagattttgagtccccattttacgcaccgcttctcgagcctccatattgtgcgccaaaaatattgcaagacttttccttagttcaggtaaagatggggtccttgtctgtcccatgtttgaaggatgagtgaagcagggttttgttgggtgaaaaggaagaaaagggggaaatcgggactgtcacaaggccagagggcctgctacagtgcttctagccaggccatttgaatctgtttccacactggaagaggaggggccaggctcctccctgctgcaaatgtggtgaaattyggagactccacctcagtgggcaggctggttggagtttctccagcgacctcttcccacctgtctcaaaatctttcacctccttgtttgagttcatacacaaatattttgacactattagaaatgggattattttaataattcattttacaaataactttttgttagtgtataaaatgcaagtaactcttgtatgtagat

SEQ ID NO: 263292 - DNA, 489 bp, Homo sapiens
gagattttgagtccccattttacgcaccgcttctcgagcctccatattgtgcgccaaaaatattgcaagacttttccttagttcaggtaaagatggggtccttgtctgtcccatgtttgaaggatgagtgaagcagggttttgttgggtgaaaaggaagaaaagggggaaatcgggactgtcacaaggccagagggcctgctacagtgcttctagccaggccatttgaatctgtttccacactggaagaggaggggccaggctcctccctgctgcaaatgtggtgaaatttggagactccacctcagtgggcaggctggttggagtttctccagcgacctcttcccacctgtctcaaaatctttcacctccttgtttgagttcatacacaaatattttgacactattagaaatgggattattttaataattyattttacaaataactttttgttagtgtataaaatgcaagtaactcttgtatgtagat

SEQ ID NO: 263293 - DNA, 489 bp, Homo sapiens
gagattttgagtccccattttacgcaccgcttctcgagcctccatattgtgcgccaaaaatattgcaagacttttccttagttcaggtaaagatggggtccttgtctgtcccatgtttgaaggatgagtgaagcagggttttgttgggtgaaaaggaagaaaagggggaaatcgggactgtcacaaggccagagggcctgctacagtgcttctagccaggccatttgaatctgtttccacactggaagaggaggggccaggctcctccctgctgcaaatgtggtgaaatttggagactccacctcagtgggcaggctggttggagtttctccagcgacctcttcccacctgtctcaaaatctttcacctccttgtttgagttcatacacaaatattttgacactattagaaatgggattattttaataattcmttttacaaataactttttgttagtgtataaaatgcaagtaactcttgtatgtagat

SEQ ID NO: 263294 - DNA, 596 bp, Homo sapiens
aagtttacattttagactggattatcaaaaagttctggaagaaaacctaggaaaatgtcttttggacattggcctaggtaaagaatttatggctaaggcatcaaaggccagtgcaacaaaaacaaaaatatacaagttaaaattaaataaaagggcttctgcacaacaaaagacactaacaacagactaaattgrtaacctacagcgtggaagaaaatatttgcaaactgagtctgataaatgactaatactcataatctaaaaggaatttaaacaaatcaacactaagaaaccaataacctcatcaaatagtgagcaaggagatgaacagacacttctcaaagaagacatataatgagtcaacaaatatatgaaaaaagactcaatattacaaatcatcatatacatgcaaattaacaccacaatgaaatccatctcataagagttggaatggctattattaaatactcaaaaaataaaagatgttggtgaggatgtagagaaaaagggacacttatttaccattacttgtactgtaaattagttcaacccctaaggtaatcagtatccagatttctcaaagaactaaaaacaga

SEQ ID NO: 263295 - DNA, 596 bp, Homo sapiens
aagtttacattttagactggattatcaaaaagttctggaagaaaacctaggaaaatgtcttttggacattggcctaggtaaagaatttatggctaaggcatcaaaggccagtgcaacaaaaacaaaaatatacaagttaaaattaaataaaagggcttctgcacaacaaaagacactaacaacagactaaattgataacctacagcgtggaagaaaatatttgcaaactgagtctgataaatgactaataytcataatctaaaaggaatttaaacaaatcaacactaagaaaccaataacctcatcaaatagtgagcaaggagatgaacagacacttctcaaagaagacatataatgagtcaacaaatatatgaaaaaagactcaatattacaaatcatcatatacatgcaaattaacaccacaatgaaatccatctcataagagttggaatggctattattaaatactcaaaaaataaaagatgttggtgaggatgtagagaaaaagggacacttatttaccattacttgtactgtaaattagttcaacccctaaggtaatcagtatccagatttctcaaagaactaaaaacaga

SEQ ID NO: 263296 - DNA, 596 bp, Homo sapiens
aagtttacattttagactggattatcaaaaagttctggaagaaaacctaggaaaatgtcttttggacattggcctaggtaaagaatttatggctaaggcatcaaaggccagtgcaacaaaaacaaaaatatacaagttaaaattaaataaaagggcttctgcacaacaaaagacactaacaacagactaaattgataacctacagcgtggaagaaaatatttgcaaactgagtctgataaatgactaatactcataatctawaaggaatttaaacaaatcaacactaagaaaccaataacctcatcaaatagtgagcaaggagatgaacagacacttctcaaagaagacatataatgagtcaacaaatatatgaaaaaagactcaatattacaaatcatcatatacatgcaaattaacaccacaatgaaatccatctcataagagttggaatggctattattaaatactcaaaaaataaaagatgttggtgaggatgtagagaaaaagggacacttatttaccattacttgtactgtaaattagttcaacccctaaggtaatcagtatccagatttctcaaagaactaaaaacaga

SEQ ID NO: 263297 - DNA, 599 bp, Homo sapiens
actcataatctaaaaggaatttaaacaaatcaacactaagaaaccaataacctcatcaaatagtgagcaaggagatgaacagacacttctcaaagaagacatataatgagtcaacaaatatatgaaaaaagactcaatattacaaatcatcatatacatgcaaattaacaccacaatgaaatccatctcataagagttggaatggctattattaaatactcaaaaaataaaagatgttggtgaggatgtagagaaaaagggacacttatttaccattacttgtactgtaaattagttcaacccctaaggtaatcagtatccagatttctcaaagaactaaaaacagaactgcyatttgacccagcaaccccactgctgcttctctctccaaaggaagagaaatcattctaccaaaaagacacctgcactcatatgtttatggcagtcctattcacagtaacaaagtcatggaatcaacctaagtgtcagtccatggttgattgtgcaaagaaaatgtcgtatatatacagcatgaaatcccatgcagccataaaaaataataatgcctttgtagcaacatggttggagcgagaggccat

SEQ ID NO: 263298 - DNA, 458 bp, Homo sapiens
ttccatccatgttgctgcaaaagccatgattttgttcttttttatgcctgtgtagtattccatggtctacgtacaccacatttgcttcatctaatcagccctgatggacacttaggttggttccatatttttgccattgtgaatagtgctgtgttaarcatacaagtacaggtgtcttttccatatgatttatttcttttgggtagatacttggtagcggaattgctggatcgaatggtagttctatctttagttgtttgagaaacctccataccattttccatagaggttggactaattttatgttcccaccaacaatgcaaaagtgttctcttttctctgtattcttgccaacatctgctgttttttgacgttttaataagagctattctgactggtgtaagatgctatctcattgtggttttaattcacatttctccaaaaaaagaggatttatt

SEQ ID NO: 263299 - DNA, 458 bp, Homo sapiens
ttccatccatgttgctgcaaaagccatgattttgttcttttttatgcctgtgtagtattccatggtctacgtacaccacatttgcttcatctaatcagccctgatggacacttaggttggttccatatttttgccattgtgaatagtgctgtgttaaacatacaagtacaggtgtcttttccatatgatttatttcttttgggtagatacttggtagyggaattgctggatcgaatggtagttctatctttagttgtttgagaaacctccataccattttccatagaggttggactaattttatgttcccaccaacaatgcaaaagtgttctcttttctctgtattcttgccaacatctgctgttttttgacgttttaataagagctattctgactggtgtaagatgctatctcattgtggttttaattcacatttctccaaaaaaagaggatttatt

SEQ ID NO: 263300 - DNA, 600 bp, Homo sapiens
ctgcttgagtagtgggccagccaaaacttcgcggggagaggaagaagagcacagaggtcagagggcataagcacggagacagcctcagcggcttcagcagtgagatagggataccttcttcagctgggacagtgcctctgcatcccacggaggaggagggtgccctgtaaagacccagttttctgggtcagtgcatgtaggggatccacatggagactctcaggatttgttgaggacaattgtgactgtgaactggagtttcaacaattctcagagagtgtaagagaaatctgttttccagmtcttgttttggctctccaggctgaaaggggtattcaagatttttgctcatttgaaacctggcaagacaggtttccctgtcttgattttacgtgcttgaggcttgtccttcatgctgcccattcacattttatccattcagactaatcacgttagctcagttacaatttccctggtcagctcagggccggtcttggctccttcctcagcccccgttaagctgtcttttgatcaaacacccgggagctcgtggagtcatacaggagtgtgtaatccatgacttctccaaaaaggaaattg

SEQ ID NO: 263301 - DNA, 600 bp, Homo sapiens
ctgcttgagtagtgggccagccaaaacttcgcggggagaggaagaagagcacagaggtcagagggcataagcacggagacagcctcagcggcttcagcagtgagatagggataccttcttcagctgggacagtgcctctgcatcccacggaggaggagggtgccctgtaaagacccagttttctgggtcagtgcatgtaggggatccacatggagactctcaggatttgttgaggacaattgtgactgtgaactggagtttcaacaattctcagagagtgtaagagaaatctgttttccagctcttgttttggctctccaggctgaaaggggtattcaagatttttgctcatttgaaacctggcaagacaggtttccctgtcttgattttacgtgcttgaggcttgtccttcatgctgcccattcacattttatccattcagmctaatcacgttagctcagttacaatttccctggtcagctcagggccggtcttggctccttcctcagcccccgttaagctgtcttttgatcaaacacccgggagctcgtggagtcatacaggagtgtgtaatccatgacttctccaaaaaggaaattg

SEQ ID NO: 263302 - DNA, 540 bp, Homo sapiens
tggtggaaggggaagcaaacacgtccttcttcacaaggtggcaacaagaagaagtgccgaacaaaagggggagaatccccttataaaatcatcaaatattgtgagaactcactcactattacaagaayagcataagggtaattgccttcatgattaaattacctactaccaggtccctctcatgacacatggggattatgggaactacaattcaagatgagatttggatggagacacagccgaaccatattagctggcaacctagtcatagtagaaatacaggcaagaaatgactggggcttattcggggtatggcaatagagaagaaatattaacaagcagaattgggtaaaatttagattaaaatttagagcactcagctttggattacatgtgggagaagcataagtaggcatgtcacgaggattattccaaagttcctggtttatacaattgggagatagtgcctctgccataaagacagaaaacgtgtactagaaccaggtttagaagaatttaaagtgccatgttggatgtgtt

SEQ ID NO: 263303 - DNA, 382 bp, Homo sapiens
tactgcagtatgccttatattcacgcaattgtgtgcacctttgccttgtgttctctggtaggcatgaagtttacctggtgcagggatcatgcgttttactgcttgcattccttcccgtgacattacccaacrttgtgacctgtaccaaacagcatctctgtgaattcatagacgtgcctcccctgaagacggggatatgtcctgagaaatgtagtattaggcgattccatcattgtgtaagcatcgtagagttaagtacttacacacatctagatgggacagcctactgcacacctaggctagatggcattactcctaggctacaaacctgaagaggatgttactgtacagaatactataggcagttgtaacgcaatggtaa

SEQ ID NO: 263304 - DNA, 611 bp, Homo sapiens
agaatataggcttgcttggagtgaacagccagggcagtgcccccacttggactggtccgttcagtgttggctttggaatggttaaaccaaggacacaaggtcgaggttttcacctatggattgagctcttcggcttcatggggcctcagaaattcccactaatcccaagcagctgccttgcaaatgtctcttgagttctttattaattctctcatgaaacaagcagttattcagcacctgctactcttaaggcactttactgcatattgggaatttcaaaagaagcaatgatttggatgygaagaaaagggcattatttgtgatgattttctgtgagaataggggaacaagatcttgaaattgatatgtcatattcaattaacaaaatgattttacatctactatttcatctgattttcatcaaaaaggctgtttagtatatatctgctatgctcctttgatacatgagagagctaaatctcatgaaaattaagtagctttgtgaagttcgtagggctcacatagaatggatccgaagcttcaaattcatgttttctcaggccaagtccgggagttttaaaatgacatcatactgcctttgaaattgactc

SEQ ID NO: 263305 - DNA, 561 bp, Homo sapiens
gctgagtgtaaacatcttatctaattggaatacttacagttgccacatgaagtacctggtttttttttttttcatcttatagggaaaaaaaatggggaagcttagagggattaagtgatttggccaagaacacagcaagtaagtgcccgcaactcagccctccatccttgtcttattccaaagcctatacatacgttgttggctggaaacccatggccctgcaattagcacagatttactaggtggccagtgtgttaatcccttacagaccaattgacattagaatgataacggtyggaaatggtttattgggttactcacagaggtacttacatctaaaagggggctcctggattcactgggctttaaatacaaaggaatgtacctttaatagtaggggtttaggtattggggaaactcttggcaaccgaagccctgcagcagctggtcgaatacaccccatagaatcccctcccctgaccattagctgtgcacgcgtccaggacagaggattcgcctctctaggataggtttcctttcctgtccagcgaggagactgtt

SEQ ID NO: 263306 - DNA, 561 bp, Homo sapiens
gctgagtgtaaacatcttatctaattggaatacttacagttgccacatgaagtacctggtttttttttttttcatcttatagggaaaaaaaatggggaagcttagagggattaagtgatttggccaagaacacagcaagtaagtgcccgcaactcagccctccatccttgtcttattccaaagcctatacatacgttgttggctggaaacccatggccctgcaattagcacagatttactaggtggccagtgtgttaatcccttacagaccaattgacattagaatgataacggtcggaaatggtttattgggttactcacagaggtacttacatctaaaagggggctcctggattcactgggctttaaatacaaaggaatgtacctttaatagtaggggtttaggtattggggaaactcttggcaaccgaagccctgcagcagctggtcgaatacaccccatagaatcccctcycctgaccattagctgtgcacgcgtccaggacagaggattcgcctctctaggataggtttcctttcctgtccagcgaggagactgtt

SEQ ID NO: 263307 - DNA, 514 bp, Homo sapiens
tttgtacctctcccatttgtgtttaaaaagaataaatacattttatggagtgttcatttcttcatcttttaatttcttgattcatatgcatgtataaatacacctccaaaatatatattcagcatatatgtatatatacatatagatgattcaaaatattgattcactatggmtttaaaaagtcaatctccttaatcatgttagttaaatcttctgtaaccgtattaaattattatcttctttgttggcttcttagctatgttgtatctctagcactttgctttctgtattttgaaactatgttgttgaaaatataaagtttgtatctatttcatataaatatgcttctttgttcttggtgacactccctgcgctggagaaatatttgttagcattgaagcattctttccctggagtctagttttctgacattttgaaatttattttagatatttatctttgactttcagctgctgacttgaatcctttcgtatttattatggttctgacatat

SEQ ID NO: 263308 - DNA, 616 bp, Homo sapiens
caataaatagttatgggatgaatgaataccacaattaacagaatgcaaaatacacatattaacaaaaggaggttgaaatgaaacaaataatgggcacctttttttcccctagtttccaaaaatttttaagatgagattcaatrtgttgcaggggtaggagttagagaaggagacatacaatcatcactagggtcagtagatttgggtttttgtaccaggtcttccacaaactctgtggacttaaaatttttgtccttaagtaaaaggcaaatttaagaggttggattagatgctttttcgggactgttctaactatcacaataaataatagtcaatactgaatctgtttttattgataaaattagaaatctctcttttacccaagcatagcttccaagatctgataggtagaaaacagctgccagaaagacattcaattataaatgttgtgatcatctatttgcttccttcattaacattaataacactataaatcaaagtaaaaccaccataggaatatacttgtcaatagactgccaggagaaaataccatcaaaaatacgtttgaatgtgaagttagcacaagcttggtgaatcatttgacctgccaggaccg

SEQ ID NO: 263309 - DNA, 616 bp, Homo sapiens
caataaatagttatgggatgaatgaataccacaattaacagaatgcaaaatacacatattaacaaaaggaggttgaaatgaaacaaataatgggcacctttttttcccctagtttccaaaaatttttaagatgagattcaatgtgttgcaggggtaggagttagagaaggagacatacaatcatcactagggtcagtagatttgggtttttgtaccaggtcttccacaaactctgtggacttaaaatttttgtccttaagtaaaaggcaaatttaagaggttggattagatgctttttygggactgttctaactatcacaataaataatagtcaatactgaatctgtttttattgataaaattagaaatctctcttttacccaagcatagcttccaagatctgataggtagaaaacagctgccagaaagacattcaattataaatgttgtgatcatctatttgcttccttcattaacattaataacactataaatcaaagtaaaaccaccataggaatatacttgtcaatagactgccaggagaaaataccatcaaaaatacgtttgaatgtgaagttagcacaagcttggtgaatcatttgacctgccaggaccg

SEQ ID NO: 263310 - DNA, 550 bp, Homo sapiens
tcagttgaatcaaagaggtttggtgagcaagatttggtgacaagatggcagcataattttaactattcacgtaatatactttgggaattagtatctagtctttctgctgaatgagctgttctttgtaaagaagatatgtgtagagaaataagttgatatgcacgtgtatttatacatatgtgtgtaagtctgtgtataaagccttacaataacttcggtaaaagaaactggatcttttgccataccatcatggcaaattttgctataaatgttaaaactatccttttttttctttttaggtgattccctgttcttagaaagaaaaggaccacattgccgttcaatagcattagacagaaagtgagcccatcgtgaagatatttgaagatccagaaactacaagacaaatgaagccaatcacaaatgccagatkctggtgactaactggtcgtatatttccacatttataggcgaacatgatttctttccaaacatgactgctatgtgggagtggaggaatggttctaaatccattctaagataatctggc

SEQ ID NO: 263311 - DNA, 585 bp, Homo sapiens
tgcgtgcctgcagccccagctactttggaggcttaggtggggggatcacctgagcccagggaggttgaggctgcagtgaaccatgattgcaccattgccctccagcctgggtgactgagcaagaccctattttctaaaaaaataaaatgaatacataaaataataataataataaagaataaagcttttcctagcaaacttctattctacaaggctacatcttctctctcactgatttgacccacagcctgaatggcaataaagtctcatctttggataattctgcaggtttggtcatcagtggctggagcactcattgaggagaaatgtgaggcagtgtgcaaaggtcggacagagtaggagagggtgaggaccagctycacaacctgccaggatgaaggacacaggggcctctgctgaccatgctgggatccaacggagaccgtgaagaagttctaatcacaagatgcactgcccctagctcttcttgctgaagctgccacccggggtgtacatctccctgcaggcagtcacctgctgcattatctccgtgtgtgtcctcagagcctcagtcaccatatggcg

SEQ ID NO: 263312 - DNA, 589 bp, Homo sapiens
gatctgctgtctgcgagctgaagacacaagaaagctggtggtgtgaggccaagtccagaggcctgaggaccaggaaagccaatggtgtaagcccaagatcaggcccaaaggtccaagaaccaggagcacctggtttgaggactggagaagatgtatgtcccagctgaagctgagagggaattctcctttcttctgccattttgttctgttcaggctgttgatggttggaggacacccacctgtattgcgtggggaggccgttgatgggttggaggatacccacctgtgttgcgtggggaggttgttgacgggttagaggacacccgcctgtattgtacagggaggccgttgatgggttggaggttcccacctgtgttgtgcrgggaggctgttgatgggttggaggacacccacctgtattgcatggggaggccattgatggttggaggacactcacctgtattttgtggtgtggtcttcttcactcaggctaccaattcaaatgttagcatcttctgaaaacagcctcatggacacactcacaaataatattttactggttatctgtgtgggcattcctaagcctagg

SEQ ID NO: 263313 - DNA, 467 bp, Homo sapiens
tttttacttttataagaaactatcacatgataaatagttcatataacatgtattatttaagaagaacactgatgggcatggtggctcactgtaatctcagcactttgggaggccgaggtagatggatcgcttgaggtcagcagttggagatgagcctgaccaacatggtgaaaccccatstctactaaaaataccaaattagccaggtgtggtggcacacgtctgtaatcccagctaacttgggaggctgaggaaggagaattgcttgaacccgggaggcagaggttgccatgagtcgagatcgaatcattgcactccagcctgggcaacatgagcgaaactccatctcaaaaaaaaaggaaaaagaagaagaacactaagtctccagagtttgagaaatacccagcacggagcttgagaaatgaaatatgaccaataatttggaagcatcctggtgctactcccca

SEQ ID NO: 263314 - DNA, 576 bp, Homo sapiens
aaccagtggcatctcagcaggattacttacaggcattctgaccaaagactaccatccaagaattactgatgactgtgtcctggaaacctcagggccacacccgtccctgggrccatgggattaccccttacatacagcctctgtgtgagaagaagcagatcaagatggttctatattgaatgaataatatatgaatacagcttaacatttgtagggaatatttttggggagttaggctatattctccttataatgaaatgcagcatatttttaaataggatttaaataggcttattttaaataggctatattctccttataatgaaatgcagcatatttttaaaataggatttaaatgtttttaataacagtgatacagaccattcaaatttttttaagaaaaaaaaattttgacaggaaagtttaccagattttctccatggaacccagagtcagggatcctctctaaccaaggacaccacttatttcttcaacctgcctgtcctggattgccaaggagactaacttatggtcttaatggcgtatctgaacatacacccccgcatcttgtttgca

SEQ ID NO: 263315 - DNA, 587 bp, Homo sapiens
aaggaagataggagcctttagcatgaaggctggtcttgcccagtcagggcctttaaacatctaaaactttcaccagaaagtgccacgtagaaaaattatagatttcaagaaaaagtgctggagagcttcagagggtggtgatagtccttcattcattttcctatccccagtgaagagcaccatgtctagtataggggaggtgcccagtcaagttaaattcackaaagagtggaggtgaattaacataggataatcagaaagggttccttagagcaggtgtcccaaccccaggctgaggaccactactggcctgtggcctgttaggaactgggctgcacagcaggaggtgagtgatgttcgggagagcattaccatctgagctccacctcatggcagatcagcattggcattaggttctcataggagtggaaacactacagtgaactgcacttgcaagggatctaggttgtgtgctccttatgagaatctaatgcctgatgatctgaggtggaacagtttcatctgggaaccaaccctcaacccctgcattcatgaaaaaactgtcttctaggaaatcagttgctggt

SEQ ID NO: 263316 - DNA, 587 bp, Homo sapiens
aaggaagataggagcctttagcatgaaggctggtcttgcccagtcagggcctttaaacatctaaaactttcaccagaaagtgccacgtagaaaaattatagatttcaagaaaaagtgctggagagcttcagagggtggtgatagtccttcattcattttcctatccccagtgaagagcaccatgtctagtataggggaggtgcccagtcaagttaaattcactaaagagtggaggtgaattaacataggataatcagaaagggttccttagagcaggtgtcccaaccccaggctgaggaccactactggcctgtggcctgttaggaactgggctgcacagcaggaggtgagtgatgttcgggagagcattaccatctgagctccacctcrtggcagatcagcattggcattaggttctcataggagtggaaacactacagtgaactgcacttgcaagggatctaggttgtgtgctccttatgagaatctaatgcctgatgatctgaggtggaacagtttcatctgggaaccaaccctcaacccctgcattcatgaaaaaactgtcttctaggaaatcagttgctggt

SEQ ID NO: 263317 - DNA, 550 bp, Homo sapiens
acaaaatccagacactcacgacataacatttacaatgtccagaatccatacaaaaatactgagcatgaagagaagctggtgagtatgatcatttcccaggaaaaaaaaatcagtaaataggaacatttaaaaaatggcagagatgatgcaattatcagacaggactttaaagcggctattaacccttttcccatttgccccaagaatacttgccagtagcgcatgcagctgcagtgtttacccgaagaaaactttgccacaaaatatctcactttgattattattttcgtgtcactctagtatatcaactttgaaaacaaaagatatcattctatttatagaattctgtttttagtagtagtatttccatttacaaaatatagtaatgcttgatcgctgaaaatgtcaaatcctagaaaatgcagcgttcctacgcatgatgctaacatcattcttgaacagttgtgggccaaaaattcatttgaygaatctgatttttctgaaatagacaattctgatgattcagacaattctgatgttagtactgttt

SEQ ID NO: 263318 - DNA, 561 bp, Homo sapiens
agcactactgttgaagaactgttctaratcacttgataagtcaatcaatcaatcacaaaagaaaagcaaacaaacgaacaaaaacattaaatctaggaaacagcaaggggatgtttcaaggcttgcaatgaaggcaggggtactatcatccccaagggctttttttttttccattataatgacagcagtgggtcacctgggggaggaggtaggaccagctatgctaaaccccgacatgcacaaagaatgaccggctcaaaatgccagcagtgcatccactgagcacacacgagatgggtcgtggccccagtttacaaatgaaaattggagctttaaaaaccacttgagatttctaagaactctgtgagaaaggaaatggttatcctccctgttttagaggtaaggaaattgcatttctaaaaggttacatggctaagtggcagagataaaattcaaacctagatggttataataggcctggccatttctttctgctcaacatctgaatctgttttatgtatttgcacaactccccactctgaattttggtaggaggccagg

SEQ ID NO: 263319 - DNA, 561 bp, Homo sapiens
agcactactgttgaagaactgttctagatcacttgataagtcaatcaatcaatcacaaaagaaaagcaaacaaacgaacaaaaacattaaatctaggaaacagcaaggggatgtttcaaggcttgcaatgarggcaggggtactatcatccccaagggctttttttttttccattataatgacagcagtgggtcacctgggggaggaggtaggaccagctatgctaaaccccgacatgcacaaagaatgaccggctcaaaatgccagcagtgcatccactgagcacacacgagatgggtcgtggccccagtttacaaatgaaaattggagctttaaaaaccacttgagatttctaagaactctgtgagaaaggaaatggttatcctccctgttttagaggtaaggaaattgcatttctaaaaggttacatggctaagtggcagagataaaattcaaacctagatggttataataggcctggccatttctttctgctcaacatctgaatctgttttatgtatttgcacaactccccactctgaattttggtaggaggccagg

SEQ ID NO: 263320 - DNA, 561 bp, Homo sapiens
agcactactgttgaagaactgttctagatcacttgataagtcaatcaatcaatcacaaaagaaaagcaaacaaacgaacaaaaacattaaatctaggaaacagcaaggggatgtttcaaggcttgcaatgaaggcaggggtactatcatccccaagggctttttttttttccattataatgacagcagtgggtcacctgrgggaggaggtaggaccagctatgctaaaccccgacatgcacaaagaatgaccggctcaaaatgccagcagtgcatccactgagcacacacgagatgggtcgtggccccagtttacaaatgaaaattggagctttaaaaaccacttgagatttctaagaactctgtgagaaaggaaatggttatcctccctgttttagaggtaaggaaattgcatttctaaaaggttacatggctaagtggcagagataaaattcaaacctagatggttataataggcctggccatttctttctgctcaacatctgaatctgttttatgtatttgcacaactccccactctgaattttggtaggaggccagg

SEQ ID NO: 263321 - DNA, 604 bp, Homo sapiens
agctgcaggaatacgtgtgctaagaactaaatagctctaatcctgcacggggttagtttaccatacattaaatttatattaatgtcaggtctcttacttgaaygttggggcatctggtaggaaaatatggatgccaaggattgggatacggccatacaaaagaatataaaaaattcagcatggcttccagctttcccctttcctaatactttcttggccagccaaagcatattcttctactcatgtaatgggactatccctgcatacattaaagactctgaggaaagctcacccaaggaaggtcatttacaaagggaagccactttgtctcatgtcccaacatcacagtacttaaggtctacaaatctctagcaacagtcagactggaacatgctgcaggacaggatggcttcaagtacaaagtgtagcacagaaacttcagggctaacataattgcaattcctagctaatttcttttggcaataatctaagaaaacttgccagaatattatctgagcagcttagtctagaggccagtaaatattgtccacggaccaaaactgaccagctgcctatttatgtaagcaaagttttactggaacac

SEQ ID NO: 263322 - DNA, 604 bp, Homo sapiens
agctgcaggaatacgtgtgctaagaactaaatagctctaatcctgcacggggttagtttaccatacattaaatttatattaatgtcaggtctcttacttgaacgttggggcatctggtaggaaaatatggatgccaaggattgggatacggccatacaaaagaatataaaaaattcagcatggcttccagctttcccctttcctaatactttcttggccagccaaagcatattcttctactcatgtaatgggactatccctgcatacattaaagactctgaggaaagctcacccaaggaaggtcatttacaaagggaagccactttgtctcaygtcccaacatcacagtacttaaggtctacaaatctctagcaacagtcagactggaacatgctgcaggacaggatggcttcaagtacaaagtgtagcacagaaacttcagggctaacataattgcaattcctagctaatttcttttggcaataatctaagaaaacttgccagaatattatctgagcagcttagtctagaggccagtaaatattgtccacggaccaaaactgaccagctgcctatttatgtaagcaaagttttactggaacac

SEQ ID NO: 263323 - DNA, 604 bp, Homo sapiens
agctgcaggaatacgtgtgctaagaactaaatagctctaatcctgcacggggttagtttaccatacattaaatttatattaatgtcaggtctcttacttgaacgttggggcatctggtaggaaaatatggatgccaaggattgggatacggccatacaaaagaatataaaaaattcagcatggcttccagctttcccctttcctaatactttcttggccagccaaagcatattcttctactcatgtaatgggactatccctgcatacattaaagactctgaggaaagctcacccaaggaaggtcatttacaaagggaagccactttgtctcatgtcccaacatcacagtacttaaggtctacamatctctagcaacagtcagactggaacatgctgcaggacaggatggcttcaagtacaaagtgtagcacagaaacttcagggctaacataattgcaattcctagctaatttcttttggcaataatctaagaaaacttgccagaatattatctgagcagcttagtctagaggccagtaaatattgtccacggaccaaaactgaccagctgcctatttatgtaagcaaagttttactggaacac

SEQ ID NO: 263324 - DNA, 604 bp, Homo sapiens
agctgcaggaatacgtgtgctaagaactaaatagctctaatcctgcacggggttagtttaccatacattaaatttatattaatgtcaggtctcttacttgaacgttggggcatctggtaggaaaatatggatgccaaggattgggatacggccatacaaaagaatataaaaaattcagcatggcttccagctttcccctttcctaatactttcttggccagccaaagcatattcttctactcatgtaatgggactatccctgcatacattaaagactctgaggaaagctcacccaaggaaggtcatttacaaagggaagccactttgtctcatgtcccaacatcacagtacttaaggtctacaaatctctagcaacagtcagactggaacatgctgcaggacaggatggcttcaagtacaaagtgtagcacagaaacttcagggctaacataattgcaattcctagctaatttcttttggcaataatctaagaaaayttgccagaatattatctgagcagcttagtctagaggccagtaaatattgtccacggaccaaaactgaccagctgcctatttatgtaagcaaagttttactggaacac

SEQ ID NO: 263325 - DNA, 560 bp, Homo sapiens
aaaaagtttagtgtctagctctttaaagaaagtttgctcttccctagcttagaccaaggagaagaaaataatcttataccagactgtgtttatcacatggcttcaataatcagaattctagtttcaatgcactatctaggacaaatagaggtggtttgaattgtttgactagttgctttgcaaaacttcaacataattgcaccccattaaaataaagctgagaagccagaaatttcttagaaaaatgaagaagggctagtgaaagacatagggtggcaggatgtttggcaaagatgtatcacatgcaccctacccacctgccatctgactgtccactacttcctctgccaaggctttgagaaagccattggttatggtagcaccagcatctttgaaaattaycctagtggctgttctctatagatctgccatacacttccatgggggaacagagtgtatattatttagatggtcaccaaaatctcctattgtagatgaggctttcagtgtacttgggaacaatatgatctcccttgtaaatatcaagcaactagttctcc

SEQ ID NO: 263326 - DNA, 560 bp, Homo sapiens
aaaaagtttagtgtctagctctttaaagaaagtttgctcttccctagcttagaccaaggagaagaaaataatcttataccagactgtgtttatcacatggcttcaataatcagaattctagtttcaatgcactatctaggacaaatagaggtggtttgaattgtttgactagttgctttgcaaaacttcaacataattgcaccccattaaaataaagctgagaagccagaaatttcttagaaaaatgaagaagggctagtgaaagacatagggtggcaggatgtttggcaaagatgtatcacatgcaccctacccacctgccatctgactgtccactacttcctctgccaaggctttgagaaagccattggttatggtagcaccagcatctttgaaaattatcctagtggctgttctctatagatctgccatacacttccatgggggaacagagtgtatattatttaratggtcaccaaaatctcctattgtagatgaggctttcagtgtacttgggaacaatatgatctcccttgtaaatatcaagcaactagttctcc

SEQ ID NO: 263327 - DNA, 568 bp, Homo sapiens
ccaccagcgaataagaaatggcaattaaaatattcatgcttttacaatatatcctacatgtctattgagagcatgtctttttaaaaacctgagctctacttgtaattttgccttttccatatttatttatttatatttattattttatttatatttattgtaaaccaaatgtcccaattcacatttacctttcttccttaaagatatgaaatatttttcctgctttacgtctaagtccttttcttttgcttgtatctttcaaatcaatttctttaatcaattgattatataaacagagttttaaattctctttgtgtctattgatctttttttcartcttccacctattgatcaaagcatttgatcaatagaataaagttacaatatcacctgccatatcccatacttgggcacttttgcttaaagaagaagaatgcagaggtttgtttttattctcaaaatgattacaaccttaaatgctgcattggatatgtgcattaccttatccgataaaccttatgaaatcatccctccctctgttttccaggctgtctctagggttccaaag

SEQ ID NO: 263328 - DNA, 520 bp, Homo sapiens
ataacaaaattatgacctctgttctgatccagttacatttaaaagcagataagaatgctcacactattttattctaatactttcacgaatactgttgtgtccttctttcaaatagcacttatctaaaaacaattgggcaaatattacgagaatattggttgaagggtattcatattattagcaatgatgtcattctagccttaatttctctaaagaatatgggtcaagaatgtgccagagatggccactactagtgcctaatgaatttcattgtcccccagaaggcagagttggctgagacccacatgggctcctttactgtgtgctcgggtgtgattctttcagcaggactgctctgaaatctcaagccccacagaatcatctggagattctcggattgaatctcaagttcccagtttgtagtgaatgcctaaragttaatagtcgccattctggaaaaacactgactttttgcttcattcattcatccagccagtaactaagttactagtatatgcca

SEQ ID NO: 263329 - DNA, 552 bp, Homo sapiens
atgcctcctcccgctccctctcctccttatccagggtcccttccagcttctccagggtgccttccaaggtcccttttagcttctccagggtccccttcaggagtgaagtggactgggtgcacagcctgtgctccaccccaggagcctgkcagtgctgagaggagagtgtgtcacaccccacgggagggaccttttgccactggggacaatgcatttgggacacttatctatcagcaggaagttaagataccccagctgggaacagctttaaaagtaaaaagttatctattatgacatccgaggggattgcatcaattaattcgttaaatctattggtgctcctggaactttggagactttgtgtacagtggagaaaactctggacatgagttacttaacctggttttgaacctcattcctgcctttagagatctagtgtgtctgggcaaactactcaaactctctgggccacactgactttatcttgtaatgtgggcagtaataactacttcctaagatctttatgaagattctcttaaaagtagtgtctat

SEQ ID NO: 263330 - DNA, 525 bp, Homo sapiens
atcttgctgtgggccagatactgtgctaggtacccagagggtcactggagttgtgtattttttgcctcattttacagatggagaaaatagaattcactgaatgtcaagggacttgcccagggacacacagtgtgtaagtgaaagattgggatgtgaatccgtgtcctgatttcaggctaagagctctcaggtgtcattcttatrtacccagagacaaaataaaggccagacattcttctggatttctcctttttgttcctacaacttgacaaaataatatgttctccagcaaaatgataatacttgatatttcctggaaacattatgctatgttcttgtctcatttttttttcctgatccagtccctttttaggaaatgtttttatatttatcttctccgtgtgagttgctactccttcttttctctttcaagacccagatcggaagccctcctcctccaggaagactttcttgatcctcccaattgtacatgtgctctttctttgtgctcacagagaacctgac

SEQ ID NO: 263331 - DNA, 604 bp, Homo sapiens
ttttatttttaataacctgccacccatattcccttggatctggcgccggttttgagagagatttggccagagctggctgggaaagctgtcccaggtaggagrcagagtcaggcagggaagttacatcctattactgatggtttatggaagaaattaaaacataaacagaaatgcatcttagcaatgtctatggcacgagcttccccagccacaaattttgtgctacatattagtaataaatggtatttaagatggtgataaacgtacaacaggggtgctatcaaaaacaactctttatttcaaataatacttccttttatttcatgtttcctaagtgtcttgctaaagtgttttctggaaatatctttatccccaacggctttgggttgagatgttttgaatcttcttgtggggcaccctggaatgaggagcccacaccagcgtgcccggctagcccacagaggggtgccatcgattaatcagctgcatgaatgtgcaaagtcatgattcggaagagctgaattcaagctgtggctctccaaaatacttacttagcactgtggaacctgggctaagttgacgagcctttctaattctcttgaag

SEQ ID NO: 263332 - DNA, 586 bp, Homo sapiens
aacgcttgtgctttttccttgacctggttgaaagctcttctttcccctcctgattctgccattcttcaagaggcagaacagcgaagaagaaaaaatggtgaaggagaaagagaaggatgtttgaatytgtgtagaactgggttttatttccagctgagtgccattgcgctgaattctctttaagcctgtttccccagttataaaacaaagctagagagctgcctcttaggattttcatatggaatagggctattacagtacagcggctagcacatgataaatggtacaaagtactaacttctttgggtaatcgcctttgtccttgatccctttgagctattggaagtgcctgaaaccagttcttgatgctatcttctttaggtatataaaatatcaatagctttctctctctctctctcctctctgtctctctctctttctgtctgtctcactttcagtacacacacacacacatacatacatatctatttatttttatgtctacagatacacaaacatgtttgcatgttgaatatttgcacttgctcctgtgaatacacacatacacatatgaaatatatgatta

SEQ ID NO: 263333 - DNA, 586 bp, Homo sapiens
aacgcttgtgctttttccttgacctggttgaaagctcttctttcccctcctgattctgccattcttcaagaggcagaacagcgaagaagaaaaaatggtgaaggagaaagagaaggatgtttgaatctgtgtagaactgggttttatttccagctgagtgccattgcgctgaattctctttaagcctgtttccccagttataaaacaaagctagagagctgcctcttaggattttcatatggaatagggctattacagtacagcggctagcacatgataaatggtacaaagtactaacttctttgrgtaatcgcctttgtccttgatccctttgagctattggaagtgcctgaaaccagttcttgatgctatcttctttaggtatataaaatatcaatagctttctctctctctctctcctctctgtctctctctctttctgtctgtctcactttcagtacacacacacacacatacatacatatctatttatttttatgtctacagatacacaaacatgtttgcatgttgaatatttgcacttgctcctgtgaatacacacatacacatatgaaatatatgatta

SEQ ID NO: 263334 - DNA, 579 bp, Homo sapiens
ttcctgttttcctctgaagtttttatggttttactctttatgttttatacgatacactggtttcagatttctgtttttttttctagcaagaaattagctaccctgtttatctttacttctctgtatacagycctgtaatctggatacttttaaaatcttctacctgccactgatttaaagcagcttgattatgatgttgttttctacttttgtgagtgtgtgcttgaggtttgctgagcttcttggatttgtgagtttggagttctcaacaaatttggaaaaatttcatccatgatatatttattccaatgcttatctctgcttccccaccttatctttcagaacttcaattacatgtatgttagggtgttttatgttgtcccaaaactctcttagcactgttcactttttttcagtaacttatttgtggtttattttgactagcttctattactatgccttcaagtaatgataattttttcttctgcagtatctaatctgctattaattccacctaatgcattttttatggttttgggaaatagagtttccatctcaaaaagttcagtgtgaaccatg

SEQ ID NO: 263335 - DNA, 615 bp, Homo sapiens
tgctatcaattattggatacatcttttgacagtctttatatcaagctaacatatccctccctttgtctaattattgacccttgatctamtttctacaccctgggacgaccccaaacacatttaagttccattttgcatggtggtaccacttcaactactatctgttaaaattatgatacaacaataacccctttttgctattactgatatatttcacataaatccaatatagtattttctatgcatacattttttctcaaaccatttttaaggaaggatgagttcaggctccatcttttaggataattccatcactgggaatattttctcttgcacaatactttccctacaaaagacagagtgcattgcaaggagcttgttgtgtgtttcaaacaacctttattttaatttgttttgtttcacctaggagtggtgtagtgtaagtcaaggccccagactttggatgccacagctgtgctcaggtttgttgttgtcacttgtagcctggagtgtactggacgaggcaccactgccatcaattagtcagggacttggtccccatgaaactttggaactccacaagggcatgggatgctagcacttatagagtgcttg

SEQ ID NO: 263336 - DNA, 368 bp, Homo sapiens
gtgaaccatgtttatgtcttccatgtctcttaatatgctaaatatttcctctatgtttctgaggtatcacagctcagtactagtctcagacccaygctggtcttattttactgacacagccacacaagtcataggtacaatatttgtaagaaaatccacttcctggatggtccatttctatcaagccagaagggattacttggtcatttcatgaactgaatgtacagcctagtatgggaactctgatcaaggctttggggagcaatatttgttagtaagctagcttggtaaaatttggcaaaatactctcaacatacaaaatttcattcacccaagcctctagtctgaaaataagctcacacatcttt

SEQ ID NO: 263337 - DNA, 575 bp, Homo sapiens
agatgattaatgcacctttcttcttaggctaaagggagatggggaagtatggatgattttagggaaggtagtaagtgatttttaggggaatccaatgggcttgaagaacattcaatggtttatgatgaagtctattgggcccacagagcaggcaatggttcgtgacaagcctgtgtgtttacagacttcagtctttcattcagggatatgagttcagttaatgaaaactcagagaaggtacctgggttaattattttcttctgtggcaggcccagactttaattacataagggaacttcagagaacaacttcattctgtgctttaggagataaatgagggacaggagaagaaacgatcagayggactttgaggcttcttcagttcagtgagtcaaagcaccatattttggagtattggtttctgagctcaacggtgtagtcatttcagtttgggtgattgcataatctaagtacttagttacatgaatgtgaatgtgttctcacagacactgttggttgtcatctgcctcccttctataaactcctttgatttatagattctcagttttgtttga

SEQ ID NO: 263338 - DNA, 589 bp, Homo sapiens
tttaaaaagtgaagtctaaaacttaaatttctaggaataagcaaaggagaaagatttgtgatctgggctaggcaagatttcttagctgtggcactgaaagtataatttacgaaagaaaaaatgatgaattgtacttcatccaaactaaaatcttctgctctcagaaaaacactattaagagaatcaagaaacaagaaacagattagaagaaaatatttgcaaattataaaacatgaattacatccagaataaaagaagattgttccaactcacaaatatgaaaataaaagggataataaaaataagccaaaaacttacacatacttttaactaaagaagatatttggattggaaaatccaatttcatttgtttttagacaaattcattttaaaagtcrctctgtgttattctgaaaagcttattgggataattgaaataaaaaagactagccatatcaaatattagcaaggatatcgagaaaatggagctctcgtaagctgctgataggaatataagatggtacaaccactttggaaaacaggtcggcagtttcttaaaaataaataaataaatatacaactactatat

SEQ ID NO: 263339 - DNA, 588 bp, Homo sapiens
tgacatgtttctattgaagatatattgcttctcttcattacagtggcaactcccaccagaatttaacctttaaaaattgtatacatatgagtcaggtatcagttgttgtggccacscaacttcaagaacacataccaagttctctaaggggttctctcttgaacaccacccagcttaattgaggaagacaataataattgccttctctgagcagaaaggcaggaagaaagaaataaccctttgacaatcttcacaaaggaatttccccagacattttcactcctgatgactctgagcctgcttttatgcagccggagggtggaaagagggctagttgtaactattgctttagaaagtgagggttcatatgtttgttggctgtttggttgtcttcttttgagaagtgtctgtacgcatccattgctcacattttaatagggtcttgtgtttttttcttgttgacttttttaagttccttatcgattctggataggtagttcttttttgtcaactttgtcaaagatcagttggttgtagtgtgcagctttatttttggcttctgtattctgttcctttcgtctatgtgtc

SEQ ID NO: 263340 - DNA, 588 bp, Homo sapiens
tgacatgtttctattgaagatatattgcttctcttcattacagtggcaactcccaccagaatttaacctttaaaaattgtatacatatgagtcaggtatcagttgttgtggccacccaacttcaagaacacataccaagttctctaaggggttctctcttgaacaccacccarcttaattgaggaagacaataataattgccttctctgagcagaaaggcaggaagaaagaaataaccctttgacaatcttcacaaaggaatttccccagacattttcactcctgatgactctgagcctgcttttatgcagccggagggtggaaagagggctagttgtaactattgctttagaaagtgagggttcatatgtttgttggctgtttggttgtcttcttttgagaagtgtctgtacgcatccattgctcacattttaatagggtcttgtgtttttttcttgttgacttttttaagttccttatcgattctggataggtagttcttttttgtcaactttgtcaaagatcagttggttgtagtgtgcagctttatttttggcttctgtattctgttcctttcgtctatgtgtc

SEQ ID NO: 263341 - DNA, 611 bp, Homo sapiens
atataaatctttttattcagatactataaaaatgatctataatatatactacattatttcattttttaaaatgacattttcataagctcacataaagtagatttcacctcaactcttcagtttgcattaacaagtcaattattattgtgtttagctgtagggaaaccattaggacattgataagacatcttaactgtgatgagagcaattgtgaatgtaaggggtagcagtttgtagaatgcagtgagattaatctgtagtgtacttcatagggattggtaaaatcaggcaattcaccaggacacagtacctttcctaaatgactcatttctctgttagagaraaaatagtttaataaataaaagatactttgtaagaattagtttctttaagagcaaagaccaacatataaactgaaaacttgatgcctttctctgctcttttgtttgcactttcttcttgtggtgttgtattctccttgtccatccagtgtgagagtaatctgtttcccaaggacgtatggtaataaaatgtaaagaggggtttttaaagtataacagtgtatttaagctgtcttttccttcctatgcaaagttatttacctttttaaa

SEQ ID NO: 263342 - DNA, 573 bp, Homo sapiens
ttacctttttaaaacaattgaatggccttatggtatttcacagtaacatgatttaatgccatttccctattaataaacttttaagctctctctgtatttttactattggaaacaatgtgacaaggagcacacttgtattattgtgcacaactgactatttgtatagaatagattcctaaataatctttctgggacaaagaaatgtatatacagaatttcrcagatattgctaactttccctccaaaaagcttatgccaatttatacaaaaataaacaattgaacaagggcaacttaccttcccaatattttcaatcctctttaagaacttttttaatatgtagcctatttcttttaaagctgtgaagtcattattttacttgatagttttatgcttaacattacatatttctacaatgaagaattttctttctagataagtttctttctagataggaaatttctgaagggggatgagaatagcattggaattctccaaaaagccaagtttgtggttttcagaaaaaattcacttgtgatatactaactttgttaaataaaaggtgacttctta

SEQ ID NO: 263343 - DNA, 554 bp, Homo sapiens
tcattgttaaccatgatttctcagagtacttgatattctttaattgtatgaattgatttataagaaatttattaatctgaaggtatacataattttagaaggatattctttggcttcttacatgtgtttaaaaattacatcttgggctcaaacatttttaaagaaacatacattgaaattataatgtaaattaatagggtattaatggaattaagaggccacagatgacactgrctagctatttaccaaagctattttcctgttctttcttttcttcttagactgtatttcccagcctacctctattgagagagttgttacgaggttatgccaacaaaatgttcatggaaattatgtatgcgactgccaagcctgatcttccatacaatcctcaggcttgctctttctctgtgggctggttggatctcaatgcccagggtgaccaaggggtgggggatgggggggatgtgctgaagatggcagagcctccagccatctgagtttctgaattagtaacagagcatgtcacatcccttgcctctaactggactcta

SEQ ID NO: 263344 - DNA, 656 bp, Homo sapiens
aaaaggggagtgactttacaatatatgtctttctctctttatttcctaggctataaaactatgtcgaatttcaacttcatatttgatttttattgcattgaaaaacttcagtagttatttttaacaacaaatttttattctttcccatacatactggttgaaaataaaactaatcaaatmatttcattatattgttcttcagacttaatgaaataaatgtttgataacttgtgtcttttattctttcccccttctttatctacttcaggaatattagattcctttacagttttttaaaaattttaaatttatgagtaatacatttctctatgttttccaagaggtttgcatcttatactacttttttgagtagacatggtcaagtatcattgaaggggcagccaattcctgctctgtgaggccattttaacaccgctgtccctcacccgaaaatgcttgtgttaccatagacattaattatcaggtccttcagcaacacaatgtcaaaatacgcacttggtatattcaaataattcattgaaaaataaatcgacaaatttcttggcttcagtggccaggcttttaagtattcttttttttttttttttttttttttttggtcggagtttcgctcttgttgcccaggctggagtgca

SEQ ID NO: 263345 - DNA, 592 bp, Homo sapiens
cagcacatgttttaagtgatgcttctttgcactatccatgacctgtgaaactgctattaccatcagtgaaaggatgaaggaaatcatctgaccttggaaaatagtaaccatttacctttagtcaccaacactttcttgtgatgagatgttctgttagtggctgtacttatacttgttatctcagtgtaaatgactgtgtactgtttccttcatacactgatttgcagatgtgcaaattagagaagtctactagctagcattccttttcacccaaactgcagaggagagatgctttcactctgttagttatatgattactttgctgagaccatttaatgctaatatgcgcttttgtctgcattcatctttttgcttttagttctgccagcatagtcagttgttacccsctcctcatgtgcctcagccttgctattggagccatctacctagctgacttaatctctatttccatagaaaatagacatgtacaagtttagtaattccctatgacatggcaaaaaaaaaaaaaaaagccctgtagagacttgtaaactattctttaaaagcacctaagaatgaaatgtcacattgc

SEQ ID NO: 263346 - DNA, 585 bp, Homo sapiens
gggattcaattgaattgtttttgcacaactgcttctgggctttaattgccttattctgagaataaattcatctaaaactcatgactacctttcagtttgactctcaatgctcttccattactccttctttcactgattatccccaccattcatattgccttatcagtcagaaaaagagtatttcttgaaacagtcctctctttctcatctttaatatgttattgactcttgtttgagtttattcttcaatgtcttacatatggtccatatccatttctccataacagtccaatccataatcatatattgcttggaaaattgcagtagccgcctaagggggtctccttgaatctcttactctattccaatctcctcttaaatggtacttagagatatcgtttaaaattccaattgctcatgtcatttcctgcttgaaacactgcattgggaataaaaaaaacagctatgttaactggtcatgctagaccctaattaatctattcctactcctatcwgtttctccacttccatcttggtacatttactcatcttttttccttcaattttccatattggatgtctttc

SEQ ID NO: 263347 - DNA, 526 bp, Homo sapiens
tgtcgacctgaccgtgacttactgattaagttggatttctgttggacttccaaaataacctttaataacttactcatatttttttttaggaagtgcaaaatttcactgttttaaacattcaggtctttgtttgctcttgtgtatttttaaaattcatttcgagtatatacaattcaatgaycagataatgttaaattaatagaaagtaggtaaagataatttacaggtagatagtttctgaatgtttaagatgattatgcacaagtgcaaatggtatgagtaaaggctaaaatacgtttcatcattggagaccatgtgttgacctcagcaatgggcaatgaattttttcacctttttcagaatgtcaacagttctccttggacaatagtaaagaagaggcaatttgcatagtggtcaaatctgtaggctgtgaagctggactgaattctatcactagttctgtcacacactatctgtgtgccattgcacaagttgtttacatattccataattccctttctctaaa

SEQ ID NO: 263348 - DNA, 479 bp, Homo sapiens
aacatacctaactgcatggagtcaagaggaaacatggcatgcttgtgacaacagtgagacattcaaagtggtcagaatctagaaacgtgtgaaagaagagtagtagaagaaaatcagcttagagaggtggaatgggttctggttatgaacagctgtggaagacatactgagcaatatgattatcctgtaggcaaaaagagtgaataacgttttgatttagaaagattactatggcaattgtgtctgaaggatagacagaaggggaaaaaatcacggctgtgtgttcaaacracaggtgattgcaacactccatgtgattgatgacaaagatcttggcatatacagttacataatacaaggcagagaggaaataaattcagaaatatttttggaagtataaaagacaattatgcatcactgattggataacgctggaaatgaaagtggagaattaaactttcaagtttgaagctgggtga

SEQ ID NO: 263349 - DNA, 569 bp, Homo sapiens
aggtcacagactgaaaccgagagaggggtccctatatggtgtctcttctcgcaagatcacagatttgtgctgtgtgttgctcggtgatttaaaatagtcgttcatgtatattgctcacattgttgtttatgtctagctctgttattggatgtgtcaataagcagaacttatcttcatttttgaaaactacattctctgagtaccagtttctaggttgcaagttcttccctttcagtgctttgaagaaagtctataatattctagcttccattttatctgctgacaacatggctgttacttttgtggttgcstctttgaagacagtgtctctctttctacatacaattctttttaagattctccccttggcatttatgttcagttattttgctatgctattaatgtgattttctttttatttattgtgcttgtggtttgtattgcttcttaagtctgtggcttcatgtttttcaccagtttgagaaaattattaggcattatcacttcatctatttctccagcattgcgttttatctcctttctgggacttcaattgcacttatgttaga

SEQ ID NO: 263350 - DNA, 594 bp, Homo sapiens
atccaattgatttagaaagaatatttcatggagaaatatacatttctgagtggccaattattttatttatacttatcacattttatgctttttgagtttccttcgctccctgaattatccttgtaactatgaataagtggttttacttttatagatgagtgaaaggaagtagcaaagttgtcagtatctcatatgcaataaaccttgctaatgtagaaaaaaataggttttcatattatattttggtaagatccaaaatattgtaggtgaaacaatgaattatttgctggttgggtaacatttttcagggcatttgtgggaaagttcttatcttgtaacagatatgattcgtggctctctcagatgaccttccaactaagaataatcaccaatagtatgtcatgtaaaacttaaataaaaatgtgaagatgaaaatttgtacataaactaattaaaatacattataaaaatgtgtttagactcagtayataaaatgaaattaaaatattcatttcagaatatcatctatttctaaagtctaattgttatgtataaataaatcctattgatttagaagtgttaaatacgtcctca

SEQ ID NO: 263351 - DNA, 608 bp, Homo sapiens
attagtgttattttttaaatacagtgttgtaaaagagaccagatagaggaaacaaaatcctgaaatttgggatatgattattctattaatagtattattataattttattgtatatattatagaaaatgtttattcatttcagagcatttartcaacacgggtttattcattaactcctttcttcaaataattatttcttgctaggtactaaggacaattttattgctaggtattgaggcaagaaacaaatgtatttcctgccctcatggtgcttcctgtctaggaaggatttagctattatattaatcaacagtcaaccaaatatcagtctagtttcaatggtcatatgtgctttgaagcaaaagtcacataacaccataagcatatcaagcaggagaaaccccatgttttgggagtaacagaaattccctggagagtgacacttggttttgagttgtgaattaagagaaattaattaagaatttgggaggtaggggtggattctagctaaaggaaactttgtatttgcagactaggaggatgacaagtttaggaaacacaaaatgtagaagggggtgagggagacttgaacaagtgtacgagttga

SEQ ID NO: 263352 - DNA, 574 bp, Homo sapiens
caaaatcctgaaatttgggatatgattattctattaatagtattattataattttattgtatatattatagaaaatgtttattcatttcagagcatttagtcaacacgggtttattcattaactcctttcttcaaataattatttcttgctaggtactaaggacaattttattgctaggtattgaggcaagaaacaaatgtatttcctgccctcatggtgcttcctgtctaggaaggatttagctattatattaatcaacagtcaaccaaatatcagtctagtttcaatggtcatatgtgctttgaagcaaaagtcacataacaccataagcatatcaagcaggagaaaccccatgttttgggagtaacagaaattccctggagagtgacacttggttttgagttgtgaattaagagaaattaattaagaatttgggaggtaggggtggattctagctaaaggaaactttgtatttgcagactaggaggatgacaagtttaggaaacacaaaatgtagaaggrggtgagggagacttgaacaagtgtacgagttgaggatgaagagttttgtag

SEQ ID NO: 263353 - DNA, 596 bp, Homo sapiens
tcttgttgccccaggctagagtgcagtgatgcagtcatggctctctgcaaccgctgcctcaagagctcaagcaattatccctgcctctgcctcccgagtagctgggactacaggtgttgccaccacccccagctaatttttgtattttttgtagagacaggatttcaccatgtyactcagggtggtctctaattgctgagttcaggtgatccacccgccttggcctcccaaagtgcagggattacagactccttcagcactttaattatgtcacacaactctctcttggtctgtaaggtttccactgaaaagtctgctgccagatatattgaagttccacagtataatatttgtttatttttctcttgctgcttttagaattatttatccttgacctctgggagtttgaatattaaatcccttgaggtagtcttctttgggttagatctgcttggtgttccatatccttcttatacttgaatgttgatatctttctctgggtttggaaagttctgtattattttccctttgaataaactttctacccctatttctttttccaccacctctttaagggcaataactcttagatttgc

SEQ ID NO: 263354 - DNA, 493 bp, Homo sapiens
ttcttctgtgtctgagcattgaagagttaggttgtttattgcagttttcacagtctggaactgttttgtacccatccttcttgggaaggcttttcagatattcaaaaggacttgggtgttgtgacgtaagttgtatctgctttagtggggcatcctaaacccagtaatgctgtgatttttacagacttgtagaggtaccaccttgatggtcttggacaagatcccgaagaattctctggattaccaggtagagactcttgttttcttcccttgctttctcccaaacagagtctctctccctctgttctgtgccacctggagctggggttggagtggcagaagcactcctgtggccaccagcactagggctgcactgggtctcacctaaggcctactgtaaccamtccctagctactgcctatgttcactcagggctctgaagctctatagtctgcagatggcaaaaccagccaggcctttgtccttcctttca

SEQ ID NO: 263355 - DNA, 514 bp, Homo sapiens
aagtagtaatccttactctccgaagatctctagtattagctgtggtgacaagacagactcatgaatggcaagattcctgcttgtcctcactttcttccactccatgttcagctcctacagaactgcggatcctgctaaccaagagtggccccaagtccctcactagacactggctgaagacccatagaatcaacagtttcttaagaacttctctaccagctcaccctttgtagttccacctcagtgcctgcacttgctgacttcttatagtgactgatgggtatctcctctgattcttctattctctctttcaatactatccttacccattgcctcctccaaatgtgtaaggcctaatttctatgacaaatcccttatcccataactcttcagagctcagcttctctgattaatccctgacagatacacscagataactatcttctttaaaaactttacaactaatttttaaaatatctgaaatgcagcatttagaatgatataaggaagagtt

SEQ ID NO: 263356 - DNA, 572 bp, Homo sapiens
acataatcaaactgaaactttaagaaagctgctaaatccctaaacagatgggttttccctaaaaacaggagattcaaagcaaccaattagaaaaggcacagtcaacctaaattatcataataaggaaattctctctgctctaacccttacaagaaaaataatctgaagtaaactgatgytaaccagtccgatttgttctattattctgtttctgtgttcccatcttacaaaaaccaactgttctgccatgaccagtggagcactcattctattttgtggaataaaatgctgcccaattctagaattacaaataaaaaacaattagatctctaaactaagtttgttgcaattttatcttctgacattaggtaaaactctctagtctttacttttttccattttaaaattgagctagtaatagaacttgttgtgcaagattatgttgaagattaaatgagaacacatttgcgaagccttcaatatattgactaacttgatgaaagcttcaaaactaataaatggtggaaattggattcacactcagttctgtatctttccttcacagtaaatat

SEQ ID NO: 263357 - DNA, 572 bp, Homo sapiens
acataatcaaactgaaactttaagaaagctgctaaatccctaaacagatgggttttccctaaaaacaggagattcaaagcaaccaattagaaaaggcacagtcaacctaaattatcataataaggaaattctctctgctctaacccttacaagaaaaataatctgaagtaaactgatgttaaccagtccratttgttctattattctgtttctgtgttcccatcttacaaaaaccaactgttctgccatgaccagtggagcactcattctattttgtggaataaaatgctgcccaattctagaattacaaataaaaaacaattagatctctaaactaagtttgttgcaattttatcttctgacattaggtaaaactctctagtctttacttttttccattttaaaattgagctagtaatagaacttgttgtgcaagattatgttgaagattaaatgagaacacatttgcgaagccttcaatatattgactaacttgatgaaagcttcaaaactaataaatggtggaaattggattcacactcagttctgtatctttccttcacagtaaatat

SEQ ID NO: 263358 - DNA, 560 bp, Homo sapiens
gttattccgcaaatgcatattcagatatttcacaaaaaagtgcccaagtgctatggtttgaatatttgtcccctccaaaactcatgtggacatttaatccttaatgtagcagtattgagaaattaagcctttaagaggtaattgggtcatgagggctctgacttcatgaatgcattaagccatttatggattaataaactaatggtttatcatgggagtgggactgatggccttagaagaagtagaagaagaagaaaagagacctgagttagcacactcagcccctttgccatgtgatgacctgccccmcaccttgggactcacatagtccacaacagcaagaaggccctcaccagatatgaatcctcaaccttggtattaacactaaagcaactccactttgcatgctaacctgccgtctttgtttctgattaactcctgtttcaggaagacctgtaagattttcagtttgtctattgttccttctgtgagagcacatatttaccataaaccttgcccttagatcaaacaacattttatgtgatcatacttcagttgtc

SEQ ID NO: 263359 - DNA, 604 bp, Homo sapiens
gaaaaacataatgtattatgaggattgataaaacatttaggacagaaagttgatcattattgaaacttggttaagggcacatgggagtttatttgattagtctctctacttctacatatatttgcaaatgtccataataaaaagctgtgcatttgtaaaaaaaaaaaaaaagaaagaaacacacacacaccacacacacacacacacacaatggtatatttcagtttctaaaaaaatcgatataaaattattgctgaagaaataattcttttaggagctatctaattaaaggctttcggaaaacctgaaaattgcatggttccttatttctctttctttattatcatrtcataaaaatggtatgtatgtcactctatagtgaaagtttggaataaggaggatgttgcacttgaaatgagaatagaactcagcaataatatttctaatatgtgtccaatgtacagttactttaaaggagggcaaaacattcttctagttcaagatattgtttctaaaattcatattttataacaaactataaaatgaaagacttttgctttatcttacttttcaaatatcttttaaaaacttactcgtgaacact

SEQ ID NO: 263360 - DNA, 531 bp, Homo sapiens
acaggttaattaccttgtttgaagtaacataaatagcaagaaaatgaactaacaagccagatgcacattctttattattctactctgaaaacccacactaagcaccaatacccttgtagatatctgagtacagagaaaatccaaggactgtgccatgtattagcagcatctaggcacataataggcttacctaagaagttagtgaatgaggatgagaagcacattttacaaattggtttttgaaatacttttcaccggtttgtgttactgagttagtactatcagaatactcctcctccagttttgcctaaattagctgaatggttactttcatctctagtttcatatcacctgaaacgatttggttcattattttgtcattatggaatctgcatactttagctaycaaggaatgaactgtttaaggtcaaatttaaaaattatcttcttatgctctgatatggtttgctatgttcccaccgaaatctcatcttgaattatagcttccataattcccacctgttgtgggag

SEQ ID NO: 263361 - DNA, 353 bp, Homo sapiens
atttatcacattgtagagttcaaagagcagaacaacaaaagcgtgtactccagattagagatctgtgagcacaatgcaattacttctttactttatactttctaaggcctaaatgaaattataatragaaggcgctcacttcaaaataacttccaacaaaaaaaaattagaaagttatcattattaatatgatctaaaaattagtgaggaacggacaggcttcaatgaataaacacttttgcacctacattcagaatgatcagaaattacatgaagccattgggctgtaattttttggtttataaatacatatgtgatatttttcagaaatgaaatgaattgcagcatatggt

SEQ ID NO: 263362 - DNA, 473 bp, Homo sapiens
gactttcctgggagcatccaagccccgtggggcaaccaggtcagctttgttctctgcagtattggcagcgctgggaacagtacctggcagcctgcacagatgttgttgagtaggcaaatgagtgacagtccatgtagatgtctgagagctaagctcacacaggagggcccgcygtcccctcctccaaagtaacagcccagtggcccacaaggctcccggccgctaccactggccatgtgactgctctggccccaggcctcttactccagagcccaggcatcgccaccttcctctcccacttaagcaagtgcctgtgacttttctgattcagctcagtggcctcagcagtggcaggtccccagaggctggtttttgaaggcaggcatggcacgtcagcatttaatattttatttcatgagtgcattttgaaattaacctgccatagatcttgtttttagttctgtacttagttt

SEQ ID NO: 263363 - DNA, 573 bp, Homo sapiens
taccctaccccggggttaccttttggagttcagattttcttttctcaacatgaccgtgttacccrtaccccaagtgaacaaccttggaagtttctgacattgcaaatgtccattttctttaatggccagaatggaaaagacttaaagtaggcactgttcagagagggtacaaatgaattctcccacgggatccttgcgaccaccgccgacagtcagccaggacaccacagggtagtggccgctattcgggtccccccaccagttcccgtctctagaagcaagcaacctgccccacccacggaggcaggcacccagctgccaagcttctgttatgggataggtgggatcgtaaacacagttacctcctcctagccagcatcctgaaacaattctggtgacatttcaccaatggctttactggtgcagagacatagcatggcttgtcccaagtcacagctaagctacagacccaggagtcgaacccagccctctccctccttgcaggatggtgacccttggcgagctttgacctccagactctggaggaactcagtacctgtacgacctccttca

SEQ ID NO: 263364 - DNA, 573 bp, Homo sapiens
taccctaccccggggttaccttttggagttcagattttcttttctcaacatgaccgtgttacccgtaccccaagtgaacaaccttggaagtttctgacattgcaaatgtccattttctttaatggccagaatggaaaagacttaaagtaggcactgttcagagagggtacaaatgaattctcccacgggatccttgcgaccaccgccgacagtcagccaggacaccacagggtagtggccgctattcgggtccccccaccagttcccgtctctagaagcaagcaacctgccccacccacggaggcaggcacccagctgccaagcttctgytatgggataggtgggatcgtaaacacagttacctcctcctagccagcatcctgaaacaattctggtgacatttcaccaatggctttactggtgcagagacatagcatggcttgtcccaagtcacagctaagctacagacccaggagtcgaacccagccctctccctccttgcaggatggtgacccttggcgagctttgacctccagactctggaggaactcagtacctgtacgacctccttca

SEQ ID NO: 263365 - DNA, 401 bp, Homo sapiens
catggtgaaaccctgtctctactaaaaatacaaaaattagctgggcgtggtagggggcgcctgtagtcccagctactcgggaggctgagacgggagaactgcttgaacctgggaggtggagcttgcagtgagctgagatcacgccactgccctccagcctgggcaacagagtgagactccgtctcaaaaaaataaaaaataaawaaataaataaatttagtacatcttggctggacgcagtggctcacgcctataatcccagcgctttgggaggccgagatgggtggatcacctgatgtcaagagttggagaccagcctggccaacatggtgaaaccccgtctctactaaaaaatacaaaaatcagctgggcgtggtggtgggcgtctgtaatcccagcta

SEQ ID NO: 263366 - DNA, 575 bp, Homo sapiens
aatgacatcgttaatgataagtgtttaactttgggaagagagagtgtgaataaaactgctaggttcatagtgagcattcaaatatttcactgaggctgggcatggtggctcatacctgtaatcccagcactttgggaggccaaagtgggtggatcacttgaggtcaggagttccagaccagcctggaaaacatggtgaaaccccatctctactaaaaatacaaaaaattagcgggatgtggtggcaggcacctgtaatcccagctacttgggagactgaggcaagagaattgcttgaacccaggaggtggaggctgcagtgagccaagattgtaccactgcactctagcctgggtgacagagtgagactccgtctcaaaaaaaaaaacaaacaaaacacaaaaacaacaacaaaaaaacccaaaacttcattggttacatgacacttctttagattgtttacaaaaagaacagaaaagtagttgttgaaaagattaaatatttttaaatagtaaaaaytacataaatatcagttatcatataatattgagtatttaaagtccttggaatttattt

SEQ ID NO: 263367 - DNA, 555 bp, Homo sapiens
aaatttttcatgagcagccattatgaaatctcacaagaatcatagaattcaataaaaaaggtagaaagtaatttttttacttaaaaatataaattaaaataaatttttaaaatcataagcacataaatagaacttaccagggagaaagaaaaacctgaaggcacaatttcttttctgttcaaaatgtgaacccaggatgtctctagatgatgatggatgataggtggggagattttttttttttttaatacagaatctcatagttttggattaattagcaccaatcagtttaaacactgactgttagaatagctgcatgggtttttttctttaaactaattaagcgttggctacttagtataagtaagtataagccgaattaaggttctgctacatctgtgtttagaatatttttttaaaactaaataagtgttggctagttttgcggtgtaagcagaattaaggttctgctacctctgtgtktagaatattcccaatggatttttcatttttcaggtgctattttttgaccctgtatagactttaatttaaaat

SEQ ID NO: 263368 - DNA, 488 bp, Homo sapiens
ttctgtggaaaatatcattggaattttgacagggattgcactgaatctttagatcactttggttagtatggacattttagcaatattaagtcttccaatctatgaatgtgggatatttttgcatttatttgtgactttaatttcttatgtcaatgttttacagttttcagtgtagagatattttaccttcttggttaaatttattcctaagtattttatattttgtgacactactgcttgttgtatattgatatgcctgcaactttactgaatttgtttattagttctaacagtctttttggtggattctttcagcttttctatatataaaatcatcacttgcaaacagggacagtctccttcctttccaatttggatgccttttacttctttctcttgcctaatcgctctggctaggacttccagttccagtactatgttaaacagaaatgmaagtggaagtccttggattattcctgatcttagag

SEQ ID NO: 263369 - DNA, 608 bp, Homo sapiens
ttgaacaaaagtatataggcagaaaatatgagatttatttggtagttgtcctatagtattgcattggatmgtaagaaataatgctgagaaattaggttgaaagctaatagtagaagctcttaattggcattatgagacttaatctttacataaggaatggatggttttttggtagtttatgtttgtttttgtttttaagcagactgtgacatacatgtaaacgaaaaagtcagtctgaagggtttaagataaatcagtagaagtcagcacgttgtaattaggtggtaaagttcataaaggatttgggttgtattcacctttgtattcctactgtctaacctgcttgacacatagaaggtacttaatagatatttattaatttgggggcatcagtaatgatacttttgcattagactgtttgagagataatgaagacccaaaatagagtgtgtgagaagcaggattcatataatagattcagaggatgtagttactgactaaatgaggtatataaaggcaaagtagaaatcaaaatgccctagacctttaaatttgggttattagaaggataatgttttattaactcaataaatatttgttgggtgcca

SEQ ID NO: 263370 - DNA, 582 bp, Homo sapiens
tctgggcggaggagcagggcttcctccaccaaagagggcagcaagctaagtttctctccatcccagtgactcatagactaggtggtcagtttgagccagagagatgaaagcacaagatctctttaagcatgtgagacctacccatccagctgctgtataaccagccttgagakctgttagaggggacaatgaaaaaaaaatcacatttgcttcttctgtttttttcttggatttccatggtctctcattcatggctcccagacctaggcaattttctgattccttgaatgattcgactctctgaaaagcactccagcttacaaacagattttctttctggcagatacctcagtggttaccatctgagggctttctcttatactgtattggtaagtttgtcactggggctaactgctttttaaatgcatttacatattaggtcaccattggtctgaaatccacagtggaagcaagctgtggccatgtaaatggattgcaagagagtgacctcagagaggagcactgaggttaaagacaattttgcacaaacaagatgagttatattttctcaattcaaaggta

SEQ ID NO: 263371 - DNA, 609 bp, Homo sapiens
caccatgggattagataaagaaaagaagttcatatatgccatagaattctacacagccataaaaaaagaatgaaataatttcctttgcagtaacatggatgcagctggaggccattatcctaagcgaattaatacaggaacagaaaaccgaataccacatgttctcacttataagtgggagctaagcattgggcaaacgtatacataaaattgggaacaacaggcatggggaactgatagaggcagaagggaggcagtggacaagggctcagaaactacttattgggtactcttctcactacctggatgatgggatcatttgaactccaaacctcagcatcgtacaatatactcatggtgcatgctgtaagtarcctgcacaggtaccccttgaaactcaaaaaaaaagttgaaattattttttaaaataacaaaattcaaggcatgacaagaagtaggaaaatgcaattcaaaatgaggataccaattggtcaataaaaacaaactgagaatagcacacaagtgttagaattagcagaaaagtcactaaaacaattattataaccattttatattttcacaaagttaagttaatggatagaatgtaca

SEQ ID NO: 263372 - DNA, 558 bp, Homo sapiens
ataatggcaaaaaagttccaaatctgaaaaaaacactatgaacccacagatctaagaagctcagcaaaccccaagcacaaaatacatgaagaaaattacaccaaagcacattataattaaagttttttaaaaccaatgttaaaaaaaacaatcttaaaagtatccacaggggaaaaaattatatatagggaaggaaagaaagatgacaacaaatgtcttatcattaacaaggcaagcaagagagtggagcaacatctttaacatacaaaaattaaaaaacaaacaaaccaccagtccacgattctaagtccagaaaaaaaaatcttycaaaaataaaggtgaaatagagattttcacagacaacaacatggacagaattcattaccagcaaactcataagaaatgctacaggatattactcagacaaaaataaaatgatatctgaccaaaacatcaatctacacaatggaatggataagtaaatggataaatatgtaagattttctttctttaagaaacttctttaaaagataattgactatattaaaattgactatt

SEQ ID NO: 263373 - DNA, 601 bp, Homo sapiens
aatgagttctccggactgccagcctcccttccctagatatttgaaattatattagggcaattagattataactcaaacttctgaaaaccatttagagatagataasaaattcatttcactgtattgtactctaaattgtaaatgagattcaagattaattgtttaataggttgaagttttaaattgaaacttccttctatgttattttatatcatatatgcttcaccatgaaggttgatttgaaaccagagtttcagaaataccaatattattatattcttttcatctaaattgaagttattattatttttttaactggtcctggccacttctttgtatctctcaaactgccactttctttgtcatttttacaactattaataggtggccgattgtactgagcctgagcatagaataaaataagtacagtggtcccccttatctgtgattttgccttctgcatttttagttagccccagtcaaccttgatccaaaaacattaaatggaaaattccagaaataagccatttataagttttaaatttcacactgctctgcatagcatggtgaaatctcaccccgtctcacccaggacgtgaat

SEQ ID NO: 263374 - DNA, 590 bp, Homo sapiens
  misc_feature (1)...(590): n = A,T,C or G
ttcaacttcgacttcttgtttggtcatcatggaacaaccataaaaagaatcatttctgtagaaatattcaaaggttttatgaattttcccaaggccctctcttaatcttatatatatatatatatatatatatatatatatatatatatwttttttttttttttttttgagacagggtctcactctgttgcccaagctggagtgcagtggcacgantctcggctcactgcaatctctgcctccaaggttcaagcaattcttgtgccttagcctcctgagtagctaggattacaggcgtgtgccaccaacctcagctaatttttgtatctttagtagagacggggttttgccatgttgtccaggctggtcttgaactcctggcctcaagtgatccacttgcctttgcctcccaaagtgctgggatgacagcgtgagcaccacgcccagccaatcctatactatttttaccatgcattttagaagtactaaagtagtcattatctttgatttgtttcttcaacagttgactcatctgctagatctttactggtcattgactgcttgtgaaacccagcaatccaccagcatta

SEQ ID NO: 263375 - DNA, 610 bp, Homo sapiens
cctacctggctattaccggctttaccagaaagaaaccgtgagagtacaataggccacttctagctgactgcctcttaccataccttgttcctctaccttgtccaacactgtgtctccaagtgcgtccttaatgagtcatctgctctgcatacattgtgagattatgtcttagagtattacatgttctgctttctgagctatgcttgagaggacaacctcttcaactgtggaaagaatttgccatttaatagaggagggcctttatagcttgtcacagctttcagtcacagatccagtttttgattctgtcacagtggcacatgagagcaggaacattttgcataaccacttaactcagcgttacaatagcctctcaaatggatgaggagcagcttaagctggcttgatgggaaagaacactgtctgttggtgttaataatattcgtatttagtttgcataacttagatmcacaataatatcttaatcttagttttgctccaaaattgcctttctactatcactatcccatataaataatgtatagcaacattgatttgattgtaaccctttcatattttattaaaatttttttctgtaaacatatattga

SEQ ID NO: 263376 - DNA, 610 bp, Homo sapiens
cctacctggctattaccggctttaccagaaagaaaccgtgagagtacaataggccacttctagctgactgcctcttaccataccttgttcctctaccttgtccaacactgtgtctccaagtgcgtccttaatgagtcatctgctctgcatacattgtgagattatgtcttagagtattacatgttctgctttctgagctatgcttgagaggacaacctcttcaactgtggaaagaatttgccatttaatagaggagggcctttatagcttgtcacagctttcagtcacagatccagtttttgattctgtcacagtggcacatgagagcaggaacattttgcataaccacttaactcagcgttacaatagcctctcaaatggatgaggagcagcttaagctggcttgatgggaaagaacactgtctgttggtgttaataatattcgtatttagtttgcataacttagatccacaataatatcttaatcttagttttgctccaaaattgcctttctactatcactatcccatatraataatgtatagcaacattgatttgattgtaaccctttcatattttattaaaatttttttctgtaaacatatattga

SEQ ID NO: 263377 - DNA, 465 bp, Homo sapiens
gaatccctggcttaatgttttatatattttaaaaacttacataatgccatttacctgctgcgttgagattttcatgaagttatttagtcttaaactttaatttcccttcccatattagtacatctgccccacaatagctatgtagactctgaagcatgaaacagcctctgtataagtctgttttcacgctgctgataaaagacatacctgagaccgggcagtttacaaacgaaagaggtttaattggacttacagttccacgtggctagggaggcctcacaatcatggcggaaggcaaggaggagcaagtcacatcttatgtggatggcagcaggcaragagagagcttgtgtaggggaactcccatttttaaaaccatcagatctcatgagacccatgcactatcatgagaacagcacgggaaacacctgtccctgtgattcagtcatctcccactgggtccct

SEQ ID NO: 263378 - DNA, 525 bp, Homo sapiens
cagctttcccttgtagttgtctgtgaggacaaagagcttgtattcaaggaacaagttcaagcttccttgaacttgtattcaaggaagaatccctggcttaatgttttatatattttaaaaacttacataatgccatttacctgctgcgttgagattttcatgaagttatttagtcttaaactttaatttcccttcccatattagtacatctgccccacaatagctatgtagactctgaagcatgaaacagcctctgtataagtctgttttcacgctgctgataaaagacatacctgagaccgggcagtttacaaacgaaagaggtttaattggacttacagttccacgtggctagggaggcctcacaatcatggcggaaggcaaggaggagcaagtcacatcttatgtggatggcagcaggcagagagagagcttgtgtaggggaactcccatttttaaaaccatcagatctcatgagacccatkcactatcatgagaacagcacgggaaacacctgtccctgtg

SEQ ID NO: 263379 - DNA, 624 bp, Homo sapiens
catttctattcattcattcattttcaggccacttatcctagttcagtggggtgggtggytggagaaaggcaggcaccagccctggccaggatgccagacagcccctggcaaggcacgctcacacacacccacactcactgacactaggactgtgaagacatgccagtgaacctaaagggcacatctttgggatgtgagaggaaactggagtcccagagaaaacccgcacagacttggggacaatgtacaggctccacacatggtggccccggatgggaattgggtttttttctcatcaaccttataacaaaacaaagttgaatgaaatgatgttatttgagcatctgctgtatgcttcttaattagcattctaaaaatccttttaaatgccttaaaatacaataactataaaagtaatcttcagttctcatctccagtaagttttcaaagtctgatgaatacgtatggtgatattaagtatgggaacaagaaagaaaaaataaaattgcattggttctcttaaataaagttaacaaatgacataaaccaggttagctggctagtactgaacactagcatttcactgtcggagaagaacactcaaatgaaacccagattgaaaat

SEQ ID NO: 263380 - DNA, 624 bp, Homo sapiens
catttctattcattcattcattttcaggccacttatcctagttcagtggggtgggtggctggagaaaggcaggcrccagccctggccaggatgccagacagcccctggcaaggcacgctcacacacacccacactcactgacactaggactgtgaagacatgccagtgaacctaaagggcacatctttgggatgtgagaggaaactggagtcccagagaaaacccgcacagacttggggacaatgtacaggctccacacatggtggccccggatgggaattgggtttttttctcatcaaccttataacaaaacaaagttgaatgaaatgatgttatttgagcatctgctgtatgcttcttaattagcattctaaaaatccttttaaatgccttaaaatacaataactataaaagtaatcttcagttctcatctccagtaagttttcaaagtctgatgaatacgtatggtgatattaagtatgggaacaagaaagaaaaaataaaattgcattggttctcttaaataaagttaacaaatgacataaaccaggttagctggctagtactgaacactagcatttcactgtcggagaagaacactcaaatgaaacccagattgaaaat

SEQ ID NO: 263381 - DNA, 624 bp, Homo sapiens
catttctattcattcattcattttcaggccacttatcctagttcagtggggtgggtggctggagaaaggcaggcaccagccctggccaggatgccagacagcccctggcaaggcacgctcacacacacccacactcactgacactaggactgtgaagacatgccagtgaacctaaagggcacatctttgggatgtgagaggaaactggagtcccagagaaaacccgcacagacttggggacaatgtacaggctccacacatggtggcccyggatgggaattgggtttttttctcatcaaccttataacaaaacaaagttgaatgaaatgatgttatttgagcatctgctgtatgcttcttaattagcattctaaaaatccttttaaatgccttaaaatacaataactataaaagtaatcttcagttctcatctccagtaagttttcaaagtctgatgaatacgtatggtgatattaagtatgggaacaagaaagaaaaaataaaattgcattggttctcttaaataaagttaacaaatgacataaaccaggttagctggctagtactgaacactagcatttcactgtcggagaagaacactcaaatgaaacccagattgaaaat

SEQ ID NO: 263382 - DNA, 242 bp, Homo sapiens
tcttgcataaaaactgtacatcctagattccagcccagcacccccacccattaagttataaaccaattttatttgctgaacaaatgttaatgccattctacgttaatggataatgctatgaaaagcacytaagtattacagcactggaacatttaaggataaaatagagtgtaacttggaaaactgcctgttacaaacatatgtcagccatgaagccttctagccctgatcgcccatcctca

SEQ ID NO: 263383 - DNA, 612 bp, Homo sapiens
ttcctcctcgtccatcccacctcccctcctgactgctgctcataggctaggaagagtggaatttggagctcagttgcctcctaatccagccaccacctccactgccctctcgcacacacatgcagacttcagccttgcatatggacacaaatctgtgatccggtgggtccacgttctctctttgtttcaggcctcatccaaagagtgttgtggcacaggtgcagcactggcggtgggagggaggggaggactggggcgagaggggcatgaggctctcatcagctctctttagaaaacaataactataaagctgaatgagcttttgattgtgacactcagttttattcaaattgaattttgctttacctaaactctatccttttggtgtgtgaattactcaagtctttattcaaacttcaagccttgtatggagaacagaataggaaggtcaaaggatggatttcttccatatcctcagaagggccaagagagaataagaaggtagactttttctacttagggaaaccaaagaggggattggtgtgttctagtattatccttttgyggacataaacactataaccagttaaaggaagatggcttaaaaatgga

SEQ ID NO: 263384 - DNA, 607 bp, Homo sapiens
tgctattttactctactttataatagctatcctagtggataagaaatgatgtctcattgtggctttgatctgcattttcttttttttctttctttcttttttttttttgagacggagcctcgctctgtcacccaggctggagtgcagtggcgcgatattggctcactgcaagctccgcctcccaggttcaagtgattctctggcctcagtcacccgagtagctgaaactacaggcatgtatcaccatgcccggctaatttttttatttttagtagagttggggtttcactatgttagccaggctggtcttgaactcctgaccttgtgatctgtccgcctcagcctcccaaagtgmtgggattacaggcgtgagccaccagatctgcattttcttaatgactaatgatgctgagcatcttgtgtttactgaacatttgtttatcttctttggagaaatgtttattcaagcactttgcccatgttgtaattgggttgcctttttattgttttattataggagtgctttgtatattctggatatcagaagactcttagcagatatatgatttacaaatattttgttccattctttgggttgttttttcac

SEQ ID NO: 263385 - DNA, 550 bp, Homo sapiens
attataaggtgaagtattaaaaaaattttcatgatcccatattgatataaatgaatgcccaaataaataaataggataggataaatatcttgcrcataagaattaaaataatttacgtagctactctgccctcaagaaggtggagcgtaactccccagtccttaagtctgagctgccaatggtgacttctttccaaagagtatagcatggaaggagggaaaaaggataattctggagtggagaaacctgtcaaacactgtctctgccaagtgattaaggttaatgtcaactgtgctaagtcatattgatagtatgtagacctgatatgatatgattagactggcactttgcctgtgtggtcttcctccctaaaactcataatcccagtctaaacataagaaaaacatcatacaaatccaaattgaggggtagtctataaatgtcagaccaatatgccttaaaactcaaggtcatcaaaaataagggaagtctgaaaaactgtcacagtctatggaagtctaagaagatatgacaacgaaatgtgtggtat

SEQ ID NO: 263386 - DNA, 550 bp, Homo sapiens
attataaggtgaagtattaaaaaaattttcatgatcccatattgatataaatgaatgcccaaataaataaataggataggataaatatcttgcgcataagaattaaaataatttacgtagctactctgccctcaagaaggtggagcgtaactccccagtccttaagtctgagctgccaatrgtgacttctttccaaagagtatagcatggaaggagggaaaaaggataattctggagtggagaaacctgtcaaacactgtctctgccaagtgattaaggttaatgtcaactgtgctaagtcatattgatagtatgtagacctgatatgatatgattagactggcactttgcctgtgtggtcttcctccctaaaactcataatcccagtctaaacataagaaaaacatcatacaaatccaaattgaggggtagtctataaatgtcagaccaatatgccttaaaactcaaggtcatcaaaaataagggaagtctgaaaaactgtcacagtctatggaagtctaagaagatatgacaacgaaatgtgtggtat

SEQ ID NO: 263387 - DNA, 550 bp, Homo sapiens
attataaggtgaagtattaaaaaaattttcatgatcccatattgatataaatgaatgcccaaataaataaataggataggataaatatcttgcgcataagaattaaaataatttacgtagctactctgccctcaagaaggtggagcgtaactccccagtccttaagtctgagctgccaatggtgacttctttccaaagagtatagcatggaaggagggaaaaaggataattctggagtggagaaacctgtcaaacactgtctctgccaagtgattaaggttaatgtcaactgtgctaagtcatattgatagtatgtagacctgatatgatatgattagactggcactttgcctgtgtggtcttcctccctaaaactcataatcccagtctaaacataagaaaaayatcatacaaatccaaattgaggggtagtctataaatgtcagaccaatatgccttaaaactcaaggtcatcaaaaataagggaagtctgaaaaactgtcacagtctatggaagtctaagaagatatgacaacgaaatgtgtggtat

SEQ ID NO: 263388 - DNA, 550 bp, Homo sapiens
attataaggtgaagtattaaaaaaattttcatgatcccatattgatataaatgaatgcccaaataaataaataggataggataaatatcttgcgcataagaattaaaataatttacgtagctactctgccctcaagaaggtggagcgtaactccccagtccttaagtctgagctgccaatggtgacttctttccaaagagtatagcatggaaggagggaaaaaggataattctggagtggagaaacctgtcaaacactgtctctgccaagtgattaaggttaatgtcaactgtgctaagtcatattgatagtatgtagacctgatatgatatgattagactggcactttgcctgtgtggtcttcctccctaaaactcataatcccagtctaaacataagaaaaacatcatacaaayccaaattgaggggtagtctataaatgtcagaccaatatgccttaaaactcaaggtcatcaaaaataagggaagtctgaaaaactgtcacagtctatggaagtctaagaagatatgacaacgaaatgtgtggtat

SEQ ID NO: 263389 - DNA, 533 bp, Homo sapiens
acattgtacccatccagataatccaggataacctccccaactcaaggtggatgattagcaactttaattccctcttgccatgttacctaacatattcacatggtctgcggattaggacatgggagggacgtgcttttctgcctaccacatgtgtgtctggctgtaattatttatctattgagagcaatgaaaggtcattcattctatgggtacaactcaggaccttatgtaagatcatctattgccttcagaactttatgctctcaggaaggtgataagtatgtaaaatattaacaaccaaaaccaaccctgtagtttgcaaagcactttgacattcatccttttggttagaacctctcagctactttgcaagacaagtaaggaaactattattatctctgaatcacagatgagtaaactgaggcacagaggttttttgktttttttttcccttaaggacagaaaacagcatattcaaaccgaggcatgtgggtttctggtctggtgctctttatcctccccgtactgcaaac

SEQ ID NO: 263390 - DNA, 591 bp, Homo sapiens
aaaaacagctagagaaaagggtcaaattacctataaaggaaatcaaaacagagttaagagcagacttcccaggagaaactttacaagccagatgagattgggggcctatttttagacttcttaagaaaaataaatgtcaaccaagaattgcatatcctgccaaactaagcctcttaaagaagaagttaaaaatttcccagataagcaaatgctaagggaattcatcacaaccagaccaatcatgtaagaaatgctcaaaggagttttaaacgtggaaaaaaaaaagacaatacttgctaccataaaagcacacttacagacaaaatccacaggtcctctaaagcagttacacaattgagactacactgtayctagtcaaaaacactatgacaggaacaaaacctcacatatcaatattaacttttaacataaatggcctaaatactccacttaaaagatgtagactggcaaattggatttaaagatgacccaaacatctgttgccttcaaaaacccaccaaacatgtaatgacccccacaaactcagaataatggagtagaaaaagatatatcacacaaatgaaaaacaaa

SEQ ID NO: 263391 - DNA, 591 bp, Homo sapiens
aaaaacagctagagaaaagggtcaaattacctataaaggaaatcaaaacagagttaagagcagacttcccaggagaaactttacaagccagatgagattgggggcctatttttagacttcttaagaaaaataaatgtcaaccaagaattgcatatcctgccaaactaagcctcttaaagaagaagttaaaaatttcccagataagcaaatgctaagggaattcatcacaaccagaccaatcatgtaagaaatgctcaaaggagttttaaacgtggaaaaaaaaaagacaatacttgctaccataaaagcacacttacagacaaaatccacaggtcctctaaagcagttacacaattgagactacactgtacctagtcaaaaacactatgacaggaacaaaacctcacatatcaatattaacttttaacataaatggcctaaatactccacttaaaagatgtagaytggcaaattggatttaaagatgacccaaacatctgttgccttcaaaaacccaccaaacatgtaatgacccccacaaactcagaataatggagtagaaaaagatatatcacacaaatgaaaaacaaa

SEQ ID NO: 263392 - DNA, 591 bp, Homo sapiens
aaaaacagctagagaaaagggtcaaattacctataaaggaaatcaaaacagagttaagagcagacttcccaggagaaactttacaagccagatgagattgggggcctatttttagacttcttaagaaaaataaatgtcaaccaagaattgcatatcctgccaaactaagcctcttaaagaagaagttaaaaatttcccagataagcaaatgctaagggaattcatcacaaccagaccaatcatgtaagaaatgctcaaaggagttttaaacgtggaaaaaaaaaagacaatacttgctaccataaaagcacacttacagacaaaatccacaggtcctctaaagcagttacacaattgagactacactgtacctagtcaaaaacactatgacaggaacaaaacctcacatatcaatattaacttttaacataaatggcctaaatactccacttaaaagatgtagactggcaaattggatttaaagatgacccaamcatctgttgccttcaaaaacccaccaaacatgtaatgacccccacaaactcagaataatggagtagaaaaagatatatcacacaaatgaaaaacaaa

SEQ ID NO: 263393 - DNA, 544 bp, Homo sapiens
aaacgacaatgacaacaaattacaggccaatatctctgatgaacatgtagacaaaaatcctccacaaaatactagccaaatgaatccagcaataamacaaaacataattaatcatgatcaagtgtgtttcattgcagagatgaaaggatagttcaaaatacataaatcaataaatctgattaaccacataaacagaattaaaaaaaaaaaccatatggtcatctcaatagaggcagacaaagcatttgataatacccaacatccctttataactaaagccctcaacaaactaagcatttaaggaacatacttcaaaataataagagccatatatgataaacccacagccagtgttataccacatgtggaaaagttgaaaatatttcccctaggaactgaagcaagacaaggatgtccactttcaccactgctatttaacataatactggaagccctagtcagagaaatcaggcaaaagaaagaaagaaaaaaaaggcttctaaattggaaaaaaaaagaagccaaattatctctgactgctgat

SEQ ID NO: 263394 - DNA, 544 bp, Homo sapiens
aaacgacaatgacaacaaattacaggccaatatctctgatgaacatgtagacaaaaatcctccacaaaatactagccaaatgaatccagcaataacacaaaacataattaatcatgatcaagtgtgtttcattgcagagatgaaaggatagttcaaaatacayaaatcaataaatctgattaaccacataaacagaattaaaaaaaaaaaccatatggtcatctcaatagaggcagacaaagcatttgataatacccaacatccctttataactaaagccctcaacaaactaagcatttaaggaacatacttcaaaataataagagccatatatgataaacccacagccagtgttataccacatgtggaaaagttgaaaatatttcccctaggaactgaagcaagacaaggatgtccactttcaccactgctatttaacataatactggaagccctagtcagagaaatcaggcaaaagaaagaaagaaaaaaaaggcttctaaattggaaaaaaaaagaagccaaattatctctgactgctgat

SEQ ID NO: 263395 - DNA, 544 bp, Homo sapiens
aaacgacaatgacaacaaattacaggccaatatctctgatgaacatgtagacaaaaatcctccacaaaatactagccaaatgaatccagcaataacacaaaacataattaatcatgatcaagtgtgtttcattgcagagatgaaaggatagttcaaaatacataaatcaataaatctgattaaccacataaacagaattaaaaaaaaaaaccatatggtcatctcaatagaggcagacaaagcatttgataatacccaacatccctttataactaaagccctcaacaaactaagcatttaaggaacatacttcaaaataataagagccatatatgataaacccacagccagtgttataccacatgtggaaaagttgaaaatatttcccctaggaactgaagcaagacaaggatgtccactttcaccactgytatttaacataatactggaagccctagtcagagaaatcaggcaaaagaaagaaagaaaaaaaaggcttctaaattggaaaaaaaaagaagccaaattatctctgactgctgat

SEQ ID NO: 263396 - DNA, 544 bp, Homo sapiens
aaacgacaatgacaacaaattacaggccaatatctctgatgaacatgtagacaaaaatcctccacaaaatactagccaaatgaatccagcaataacacaaaacataattaatcatgatcaagtgtgtttcattgcagagatgaaaggatagttcaaaatacataaatcaataaatctgattaaccacataaacagaattaaaaaaaaaaaccatatggtcatctcaatagaggcagacaaagcatttgataatacccaacatccctttataactaaagccctcaacaaactaagcatttaaggaacatacttcaaaataataagagccatatatgataaacccacagccagtgttataccacatgtggaaaagttgaaaatatttcccctaggaactgaagcaagacaaggatgtccactttcaccactgctattyaacataatactggaagccctagtcagagaaatcaggcaaaagaaagaaagaaaaaaaaggcttctaaattggaaaaaaaaagaagccaaattatctctgactgctgat

SEQ ID NO: 263397 - DNA, 588 bp, Homo sapiens
ggactaatattcagattatataaagaacttaagcaaatcaacaacaaaaaaacacaaataaatccatcaaaaagtgggcaaagaacctaaacagagatttctcaaaagaagacatacacgtggtcaataaacatgtgtataagtgatcaacatcactaattatcaaagaaatgcaaattaaaaccacaatgagatatcatctcacaccagtcagaatgactattataaaaagtcaaaaactaacaaatgttgkcaaggatgcagagaaaatagaatgctcatacactgttggtgggaatgtaaattagtttagtcatacggaaaacagtatgtagacttttcaaaggactaaacatagaacagccactaccatttgacccagcaatcctattactgggtatttacccaaagaaaaagaaattgtttcatcaaacagatacctgcacttgtgtgtttattgcagcactattcacaatagcaaagtcatggaactaacctaaatatccatcagtggttgactagaataaaaaatgtggcttgtatgcaccacagaataccatgcagccataaaaaagaatgaaatcatga

SEQ ID NO: 263398 - DNA, 588 bp, Homo sapiens
ggactaatattcagattatataaagaacttaagcaaatcaacaacaaaaaaacacaaataaatccatcaaaaagtgggcaaagaacctaaacagagatttctcaaaagaagacatacacgtggtcaataaacatgtgtataagtgatcaacatcactaattatcaaagaaatgcaaattaaaaccacaatgagatatcatctcacaccagtcagaatgactattataaaaagtcaaaaactaacaaatgttggcaaggatgcagagaaaatagaatgctcatayactgttggtgggaatgtaaattagtttagtcatacggaaaacagtatgtagacttttcaaaggactaaacatagaacagccactaccatttgacccagcaatcctattactgggtatttacccaaagaaaaagaaattgtttcatcaaacagatacctgcacttgtgtgtttattgcagcactattcacaatagcaaagtcatggaactaacctaaatatccatcagtggttgactagaataaaaaatgtggcttgtatgcaccacagaataccatgcagccataaaaaagaatgaaatcatga

SEQ ID NO: 263399 - DNA, 588 bp, Homo sapiens
ggactaatattcagattatataaagaacttaagcaaatcaacaacaaaaaaacacaaataaatccatcaaaaagtgggcaaagaacctaaacagagatttctcaaaagaagacatacacgtggtcaataaacatgtgtataagtgatcaacatcactaattatcaaagaaatgcaaattaaaaccacaatgagatatcatctcacaccagtcagaatgactattataaaaagtcaaaaactaacaaatgttggcaaggatgcagagaaaatagaatgctcatacactgttggtgggaatgtaaattagtttagtcatacggaaaacagtatgtagacttttcaaaggactaaacatagaacagccactaccatttgacccagcaatcctattactgggtatttacccaaagaaaaagaaattgtttcatcaaacagatacctgcacttgtgtgtttaytgcagcactattcacaatagcaaagtcatggaactaacctaaatatccatcagtggttgactagaataaaaaatgtggcttgtatgcaccacagaataccatgcagccataaaaaagaatgaaatcatga

SEQ ID NO: 263400 - DNA, 588 bp, Homo sapiens
ggactaatattcagattatataaagaacttaagcaaatcaacaacaaaaaaacacaaataaatccatcaaaaagtgggcaaagaacctaaacagagatttctcaaaagaagacatacacgtggtcaataaacatgtgtataagtgatcaacatcactaattatcaaagaaatgcaaattaaaaccacaatgagatatcatctcacaccagtcagaatgactattataaaaagtcaaaaactaacaaatgttggcaaggatgcagagaaaatagaatgctcatacactgttggtgggaatgtaaattagtttagtcatacggaaaacagtatgtagacttttcaaaggactaaacatagaacagccactaccatttgacccagcaatcctattactgggtatttacccaaagaaaaagaaattgtttcatcaaacagatacctgcacttgtgtgtttattgcagcactattcacaatagcaaagtcatggaactaacctaaatatccatcagtggttgactagawtaaaaaatgtggcttgtatgcaccacagaataccatgcagccataaaaaagaatgaaatcatga

SEQ ID NO: 263401 - DNA, 514 bp, Homo sapiens
gggtaccttctttggtaacttctaccaaatatttaagaaaggaaactcaatattacataaacaaatcaagaatattaaaggtgaaaaaaagcctttctaaatagttttgtgaacataggatgactttgatatcaaatcatgacaaagacctaataagaaaaacaattcaggccaatggctattattgaacattgatatcaagattctaaatatattattagctatrtgaatatattaaggaataaagggaattataaatcaaaacaaattatgcttattctgggaacacaatatttttcatgatttcaaggatgtacacttatctgcaaactcatgaattagtttatgttaaatatgtacaggttttcatttgtccatcatacctcaaaagatattttaaaacatttaattaacaataaaaatgaattcatgcaaatttatacattacaggagaaaatatatacaaaaaagggtaattataaatgaaagattgagaattttattacattcaaat

SEQ ID NO: 263402 - DNA, 539 bp, Homo sapiens
acagtagcattcatttttcagtatgccttataatctgtaacttttaaatgctttttgatgctatattttaaggtgattgtattcattcaattaaaaatgaaaaattagatatacgtgcaatttagttaaatggccagaatttaattcccttcccattttgcagtttctygtattttggaaatgtctctgctcattaagctcacttcagacatgcatctccattctgtaagtcctctcaagtgggcaactattcttattcaaaagataaatatgcagggtactgaaatgtacaggcttgtcacatagatcaaattagtgattaaaccagcaagaagatttaaaatttggcctttcctttcctttaatcatctgacatattttcttccattaaaatccatactttgaccactctatggcactttttaaaagcaaattttatatttttcaaaaataaaattttataattgatcgtgggctcacaaggttacttggagtcaatttattgaaacaacatttctttcagaagcatatttcagaat

SEQ ID NO: 263403 - DNA, 539 bp, Homo sapiens
acagtagcattcatttttcagtatgccttataatctgtaacttttaaatgctttttgatgctatattttaaggtgattgtattcattcaattaaaaatgaaaaattagatatacgtgcaatttagttaaatggccagaatttaattcccttcccattttgcagtttcttgtattttggaaatgtctctgctcattaagctcacttcagacatgcatctccattctgtaagtcctctcaagtgggcaactattcttattcaaaagataaatatgcagggtactgaaatgtacaggcttgtcacatagatcaaattagtgattaaaccagcaagaagatttaaaatttggcctttcctttcctttaatcatctgacatattttcttccattaaaatccatactttgaccactctatggcactttttaaaagcaaattttatatttttcaaaaataaaattttataattgatcgtgggctcacaaggttacttggagtcaatttattgaaacracatttctttcagaagcatatttcagaat

SEQ ID NO: 263404 - DNA, 589 bp, Homo sapiens
acaaaaaattagccgggtgtggtggctgtaatcccagctacttgggaggctgagacaggagaattgcttgaacctgggaggtggaggttgcagtgagctgaaatcgcgccactgcactacagcctgggtgacaagagcgaaactccatctcaaaaaaaaaaaaaaaaaattctaatcatattctaagagatataatgcagattttgacacaaaakgaattataatctttgcatggctgaaaaaaaggtaatgaggagaagctaatgcacaaagtataaaatgataaatttaaaaattctcagaatcctaaacattaatatggaatacacatattagaagaaatttcttagcctaaaactttaacagaattgtgagtggtagttttaatatttcattaaaaattctataagaaattaatttaaaaatgtactttgattcttatttatctttacagaaataatagtttttataaatcctagaccttcaagcatcttagaattcatattatccaactttttaattttatcaatgagaaaagcatagcacacagtaatcctatacttctatatgtaaatttttcatttttatt

SEQ ID NO: 263405 - DNA, 589 bp, Homo sapiens
acaaaaaattagccgggtgtggtggctgtaatcccagctacttgggaggctgagacaggagaattgcttgaacctgggaggtggaggttgcagtgagctgaaatcgcgccactgcactacagcctgggtgacaagagcgaaactccatctcaaaaaaaaaaaaaaaaaattctaatcatattctaagagatataatgcagattttgacacaaaaggaattataatctttgcatggctgaaaaaaaggtaatgaggagaagctaatgcacaaagtataaaatgataaatttaaaaattctcagaatcctaaacattaatatggaatacacatattagaagaaatttcttagcctaaaactttaacagaattgtgagtggtagttttaatatttcattaaaaattctataagaaattaatttaaaaatgtactttgattcttatttatctttayagaaataatagtttttataaatcctagaccttcaagcatcttagaattcatattatccaactttttaattttatcaatgagaaaagcatagcacacagtaatcctatacttctatatgtaaatttttcatttttatt

SEQ ID NO: 263406 - DNA, 589 bp, Homo sapiens
acaaaaaattagccgggtgtggtggctgtaatcccagctacttgggaggctgagacaggagaattgcttgaacctgggaggtggaggttgcagtgagctgaaatcgcgccactgcactacagcctgggtgacaagagcgaaactccatctcaaaaaaaaaaaaaaaaaattctaatcatattctaagagatataatgcagattttgacacaaaaggaattataatctttgcatggctgaaaaaaaggtaatgaggagaagctaatgcacaaagtataaaatgataaatttaaaaattctcagaatcctaaacattaatatggaatacacatattagaagaaatttcttagcctaaaactttaacagaattgtgagtggtagttttaatatttcattaaaaattctataagaaattaatttaaaaatgtactttgattcttatttatctttacagaaataatastttttataaatcctagaccttcaagcatcttagaattcatattatccaactttttaattttatcaatgagaaaagcatagcacacagtaatcctatacttctatatgtaaatttttcatttttatt

SEQ ID NO: 263407 - DNA, 573 bp, Homo sapiens
gacagaactaccaaaggttcattgccaataatttctctttgctttcagatgaaatgttttcttcaggatcattctcatgttagttgagtattgcaaatcgttagtgatagaagcagaaggcagacaactgcctaggaagataggagcaggtccccagtgaaacctggccttcaagctggaaacagtccttggactggattgagaacctaccttcccgtttgggatgctttcctctgattgatccccatccttctcctattttacatatacttaccctttcctaattggctttctacactgttgtgcccaygtttgagtgatgtcttcgctttgacctttttgcatgctcacaaactgatcagtacataccccctattctgagcccataaaaggtcctgggctcaaccatattagggttctctcctgtctttgagtgggagaactacccccagcctcccctctttttgctgagagctttcttttcccttgataaattctactccactaactttttgatgtctgcgtgcctaatttttcctggtcgtgagacaagaacctggacctagctgagct

SEQ ID NO: 263408 - DNA, 507 bp, Homo sapiens
tgaaactcctggttggaatctttccactgcactttcaatggattaaagatggcagggcccaactgggggcaagtttgagtcttgccagtttgatattgggtsctaagccaagtagctaatgtctgttttgtcatgcatattttgctcttgctgaaatggaaaatgttattttggttacgctccgcagccacttgcgtggcatcttacaatattgagaggcttttggcctgtggtttcatgaaatgggaaaagataactttcctttgtgttgcagttatgattcagcaaacaggatcatgagggccactcagagaaagggaacccagaaacctggaatgccggcaaaagggtaaaaaattttcaccagtcagatttctggccactctctctctgtgcaaatgagctgtaggagtggtaaaaagcactgtctcctctgcaaagttttcgttagtgagaaaaaggattcatgaggccactcttaagctgaaacaaacctggtttgctttc

SEQ ID NO: 263409 - DNA, 507 bp, Homo sapiens
tgaaactcctggttggaatctttccactgcactttcaatggattaaagatggcagggcccaactgggggcaagtttgagtcttgccagtttgatattgggtcctaagccaagtagctaatgtctgttttgtcatgcatattttgctcttgctgaaatggaaaatgttattttggttacgctccgcagccacttgcgtggcatcttacaatattgagaggcttttggcctgtggtttcatgaaatgggaaaagataactttcctttgtgttgcagttatgattcagcaaacaggatcatgagggccactcagagaaagggaacccagaaacctggaatgccggcaaaagggtaaaaaattttcaccagtcagatttctggccactctctctctgtgcaaatgagytgtaggagtggtaaaaagcactgtctcctctgcaaagttttcgttagtgagaaaaaggattcatgaggccactcttaagctgaaacaaacctggtttgctttc

SEQ ID NO: 263410 - DNA, 439 bp, Homo sapiens
cttctacaggggacccctggactgcccgtcagtgagacataacagaggcaaaatcctgcccctgtctccctagaccctggctggataccacattcaaacacccatggagccaccttcctgccctgacagctagcaacaggccaagacccacagagcgatccactgcctctttgtcagcagtgaagagttayagaagactgacctttgtccattttctccaaataattggggtcttaagatcatgagtgggaaaatgctataataggtagctggtcaggcatgagcagagcaggagagggctccatctgaccaggaatatcaggagaccatcaggtgatggtcatgtgattgttaactatctctctctaaaataataattggccacagccagcaccagggaaaggcagtcttcctagagatagaaaaaaacctgaaactg

SEQ ID NO: 263411 - DNA, 439 bp, Homo sapiens
cttctacaggggacccctggactgcccgtcagtgagacataacagaggcaaaatcctgcccctgtctccctagaccctggctggataccacattcaaacacccatggagccaccttcctgccctgacagctagcaacaggccaagacccacagagcgatccactgcctctttgtcagcagtgaagagttatagaagactgacctttgtccattttctccaaataattggggtcttargatcatgagtgggaaaatgctataataggtagctggtcaggcatgagcagagcaggagagggctccatctgaccaggaatatcaggagaccatcaggtgatggtcatgtgattgttaactatctctctctaaaataataattggccacagccagcaccagggaaaggcagtcttcctagagatagaaaaaaacctgaaactg

SEQ ID NO: 263412 - DNA, 439 bp, Homo sapiens
cttctacaggggacccctggactgcccgtcagtgagacataacagaggcaaaatcctgcccctgtctccctagaccctggctggataccacattcaaacacccatggagccaccttcctgccctgacagctagcaacaggccaagacccacagagcgatccactgcctctttgtcagcagtgaagagttatagaagactgacctttgtccattttctccaaataattggggtcttaagatcatgagtgggaaaatgctayaataggtagctggtcaggcatgagcagagcaggagagggctccatctgaccaggaatatcaggagaccatcaggtgatggtcatgtgattgttaactatctctctctaaaataataattggccacagccagcaccagggaaaggcagtcttcctagagatagaaaaaaacctgaaactg

SEQ ID NO: 263413 - DNA, 510 bp, Homo sapiens
tcttcaatgcccccctatctgagcattacatgtcagtggatccatttggtgggggtcctcagtggggggtttccatagggccatagtttccatagggaaactaaacatmtctggactctagctttcttggctgttgtttaaattactgtctcagtctattttcacactgctataaagctactacctgagactgggtaacttataaacaaaagatgtttaatttacttacagttctgcatggctggggaggccttaggaaacttaaaattattgtgaaaggcaaaggggaagcaaggcacatcatacgtggtggaaaaaaaagagagaacacagaggaggcactgctacttttaaaccatcagatctcctgagaactctctcactgtcaaaagaacagcatgggagaaacctcctacatcatccaatcacctgcaaccaggtccctgcctggacaagtggggattcgagatgaaatttgggtggggacacagaaccaaaccatgttatgct

SEQ ID NO: 263414 - DNA, 510 bp, Homo sapiens
tcttcaatgcccccctatctgagcattacatgtcagtggatccatttggtgggggtcctcagtggggggtttccatagggccatagtttccatagggaaactaaacatctctggactctagctttcttggctgttgtttaaattactgtctcagtctawtttcacactgctataaagctactacctgagactgggtaacttataaacaaaagatgtttaatttacttacagttctgcatggctggggaggccttaggaaacttaaaattattgtgaaaggcaaaggggaagcaaggcacatcatacgtggtggaaaaaaaagagagaacacagaggaggcactgctacttttaaaccatcagatctcctgagaactctctcactgtcaaaagaacagcatgggagaaacctcctacatcatccaatcacctgcaaccaggtccctgcctggacaagtggggattcgagatgaaatttgggtggggacacagaaccaaaccatgttatgct

SEQ ID NO: 263415 - DNA, 510 bp, Homo sapiens
tcttcaatgcccccctatctgagcattacatgtcagtggatccatttggtgggggtcctcagtggggggtttccatagggccatagtttccatagggaaactaaacatctctggactctagctttcttggctgttgtttaaattactgtctcagtctattttcacactgctataaagctactacctgagactgggtaayttataaacaaaagatgtttaatttacttacagttctgcatggctggggaggccttaggaaacttaaaattattgtgaaaggcaaaggggaagcaaggcacatcatacgtggtggaaaaaaaagagagaacacagaggaggcactgctacttttaaaccatcagatctcctgagaactctctcactgtcaaaagaacagcatgggagaaacctcctacatcatccaatcacctgcaaccaggtccctgcctggacaagtggggattcgagatgaaatttgggtggggacacagaaccaaaccatgttatgct

SEQ ID NO: 263416 - DNA, 523 bp, Homo sapiens
aaaaatcaggagcaaaaggagtggggaggtgacacataayttcaaacagccagattttatgagaactcattcattatagtgaggaaagcaccaagccaagagtgattcactctcatgatccaatagcctccaactaggctcattgatagctccaacactgggaattacaattcaacatgagatttatgtggagatgaatattcaaactatattaatatgcacctgctcctttcgaagttcatgtccttctcacgttgaaaaatataaatacacctcctcaatattcccccaaagtcttaactcattgcagcattatcttaaaagtctcaagcccaagtctaaaaacttaatggagattaggcaagtttcttccacctataagcctgtaaaatcacaaacaagtggtttagttccaaattacaatggaagtatagtcattgggtaaacaatattgttccaaaatagagaaaacatccaaaagaaggggattacaggactcatgccagttcaaaacccagcaggg

SEQ ID NO: 263417 - DNA, 523 bp, Homo sapiens
aaaaatcaggagcaaaaggagtggggaggtgacacataatttcaaacagccagattttatgagaactcattcattatagtgaggaaagcaccaagccaagagtgattcactctcatgatccaatagcctccaactaggctcattgatagctccaacactgggaattacaattcaacatgagatttatgtggagatgaatattcaaactatattaatatgcacctgctcctttcgaagttcatgtccttctcacrttgaaaaatataaatacacctcctcaatattcccccaaagtcttaactcattgcagcattatcttaaaagtctcaagcccaagtctaaaaacttaatggagattaggcaagtttcttccacctataagcctgtaaaatcacaaacaagtggtttagttccaaattacaatggaagtatagtcattgggtaaacaatattgttccaaaatagagaaaacatccaaaagaaggggattacaggactcatgccagttcaaaacccagcaggg

SEQ ID NO: 263418 - DNA, 523 bp, Homo sapiens
aaaaatcaggagcaaaaggagtggggaggtgacacataatttcaaacagccagattttatgagaactcattcattatagtgaggaaagcaccaagccaagagtgattcactctcatgatccaatagcctccaactaggctcattgatagctccaacactgggaattacaattcaacatgagatttatgtggagatgaatattcaaactatattaatatgcacctgctcctttcgaagttcatgtccttctcacgttgaaaaatataaatacacctcctcaatattcccccaaaktcttaactcattgcagcattatcttaaaagtctcaagcccaagtctaaaaacttaatggagattaggcaagtttcttccacctataagcctgtaaaatcacaaacaagtggtttagttccaaattacaatggaagtatagtcattgggtaaacaatattgttccaaaatagagaaaacatccaaaagaaggggattacaggactcatgccagttcaaaacccagcaggg

SEQ ID NO: 263419 - DNA, 523 bp, Homo sapiens
aaaaatcaggagcaaaaggagtggggaggtgacacataatttcaaacagccagattttatgagaactcattcattatagtgaggaaagcaccaagccaagagtgattcactctcatgatccaatagcctccaactaggctcattgatagctccaacactgggaattacaattcaacatgagatttatgtggagatgaatattcaaactatattaatatgcacctgctcctttcgaagttcatgtccttctcacgttgaaaaatataaatacacctcctcaatattcccccaaagtcttaactcattgcagcattatcttaaaagtctcaagcccaagtctaaaaacttaatggagattaggcaagtttcttccacctataagcctgtaaaatcacaaacaagtggtttagttccaaattacaatggaagtatagtcattgggtaaacaatattgttccaaaatagagaaaacatccaaaagaaggggrttacaggactcatgccagttcaaaacccagcaggg

SEQ ID NO: 263420 - DNA, 621 bp, Homo sapiens
gtcatcttaattttattgctgactcaataatcattcatgggaaggttatttaatttctatgtatttgcaagatttcaaggtttcctttaggtgttgatttccaatgttatcccactgtgggctgagagagtgcttgatataatttctattttctttaatttattgagacttrttttgtggtctatcatatgctctatcttggagaatgttccatgtgctgattaatagaatatatattctgcagttgttgggtagaatgttctgtaaatatctattaagtccatttgttctagggtatagtttgagtccattgtatctttgttgactttctgacttgatgacctgcctagtgctgtcagtggagtattgaagtcccccactattattgtgttactgtctacctcatttcttaagtctagtcataattgctttataaatttgggagctccattgtcaggttcatatatatttaaaattgtgatgttttcctgttggactggttatttttaatcattatgtagtgtccctctttgtcttttttagctgttgctttaaagtctgttttttctgacataaaaatagctactcatgctcacttttggtgtcaatttgcatggaata

SEQ ID NO: 263421 - DNA, 621 bp, Homo sapiens
gtcatcttaattttattgctgactcaataatcattcatgggaaggttatttaatttctatgtatttgcaagatttcaaggtttcctttaggtgttgatttccaatgttatcccactgtgggctgagagagtgcttgatataatttctattttctttaatttattgagacttattttgtggtcyatcatatgctctatcttggagaatgttccatgtgctgattaatagaatatatattctgcagttgttgggtagaatgttctgtaaatatctattaagtccatttgttctagggtatagtttgagtccattgtatctttgttgactttctgacttgatgacctgcctagtgctgtcagtggagtattgaagtcccccactattattgtgttactgtctacctcatttcttaagtctagtcataattgctttataaatttgggagctccattgtcaggttcatatatatttaaaattgtgatgttttcctgttggactggttatttttaatcattatgtagtgtccctctttgtcttttttagctgttgctttaaagtctgttttttctgacataaaaatagctactcatgctcacttttggtgtcaatttgcatggaata

SEQ ID NO: 263422 - DNA, 621 bp, Homo sapiens
gtcatcttaattttattgctgactcaataatcattcatgggaaggttatttaatttctatgtatttgcaagatttcaaggtttcctttaggtgttgatttccaatgttatcccactgtgggctgagagagtgcttgatataatttctattttctttaatttattgagacttattttgtggtctatcatatgctctatcttggagaatgttccatgtgctgattaatagaatatatattctgcagttgttgggtagaatgttctgtaaatatctattaagtccatttgttctagggtatagtttgagtccattgtatctttgttgactttctgacttgatgacctgcctagtgctgtcagtggagtattgaagtcccccactattattgtgttactgtctacytcatttcttaagtctagtcataattgctttataaatttgggagctccattgtcaggttcatatatatttaaaattgtgatgttttcctgttggactggttatttttaatcattatgtagtgtccctctttgtcttttttagctgttgctttaaagtctgttttttctgacataaaaatagctactcatgctcacttttggtgtcaatttgcatggaata

SEQ ID NO: 263423 - DNA, 389 bp, Homo sapiens
atatgatccatcttcagatctctcagccacggataccactacctgttccagtggaggtagcaggcaagtaaagtggactctgtgagggttcttggttgtagttctgctgttgttgttagttccagttgctttatttctgcttcttatatttcatcaaacagaagtaaaattttctggaggtagttctatttttaaagaccttttttaatttatgtttttttgaaattgcagttttagtttcacaccaaaaytgaaagatacaaagtttttatctacccctaggcatgtatagcctctgtggttaccaacattcctcaataaactgatacatttgctataattgatgaacctccattggcacattatagtcaccccaagtcaatagttta

SEQ ID NO: 263424 - DNA, 554 bp, Homo sapiens
tatattaaccttacatcttggaacattactatagttgtttattagttatattgtttactataattgtttattttttgttaaacttttcaggttttctacatagatgttcatgtaatctgggaacaaggacttccttctaaatttataaatattttattttatwttcttgtcttactacattcactaatacttccaatgtaatgctgaaaaggagtagtgagagaggacatcctttccttgtttctgatcttactgaaaaagttttgagtttctcatcattaagtataatgctagctatagagatatttttgtatatattctttaaaggattgtgggaagttcccgactattctttcttcactgagagctttcagcatttatgaagcaaaagtagtctttacagttttgtcaaatatttttttctgcatctatagttatattcatgtaaatttttaagcaattttaaatattttttaccttaaaaattatcttgtggatgtaaagtattttattaattgattttaaaatgttgaaccaactttgcatacctggga

SEQ ID NO: 263425 - DNA, 446 bp, Homo sapiens
gtttcattgtaaattctatttgttcattaatggtaaatacaaaagtgattgacttttgtatattaaccttacatcttggaacattactatagttgtttattagttatattgtttactataattgtttattttttgttaaacttttcaggttttctacatagatgttcatgtaatctgggaacaaggacttccttctaaatttataaatattttattttatattcttgtcttactacattcactaatacttccaatrtaatgctgaaaaggagtagtgagagaggacatcctttccttgtttctgatcttactgaaaaagttttgagtttctcatcattaagtataatgctagctatagagatatttttgtatatattctttaaaggattgtgggaagttcccgactattctttcttcactgagagctttcagcatttatgaagcaa

SEQ ID NO: 263426 - DNA, 554 bp, Homo sapiens
tatattaaccttacatcttggaacattactatagttgtttattagttatattgtttactataattgtttattttttgttaaacttttcaggttttctacatagatgttcatgtaatctgggaacaaggacttccttctaaatttataaatattttattttatattcttgtcttactacattcactaatacttccaatgtaatgctgaaaaggagtagtgagagaggacatcctttccttgtttctgatcttactgaaaaagttttgagtttctcatcattaagtataatgctagctatagagatatttttgtatatattctttaaaggattgtgggaagttcccgactattctttcttcactgagagctttcagcatttatgaagcaaaagtagtctttacagttttgtcaaatatttttttctgcatctatagttatattcatgtaaatttttaarcaattttaaatattttttaccttaaaaattatcttgtggatgtaaagtattttattaattgattttaaaatgttgaaccaactttgcatacctggga

SEQ ID NO: 263427 - DNA, 486 bp, Homo sapiens
aatttaagcccactgtttgtacctactgctaaaaaaaaaagattcctttcagaatattactgctcattgaaatgcatctggttacccaagggctctgatggaaatatacagtagattaaacatgttttcatgcctactaatacaacatccatcctgcagcccatggatcaaggtataattttgacattcaaattttatatttmagatgtacattttgtaaggctatagctgccatagacagcgattcctctgacagatctgggcaaaggaaattgaaaatttcctagaaaggattcatcattctagatgctagaacatttgtgattcatcagagaaagctgaaatatgaacactgacaagaatttggaaaaaagttgattccatccctcatggctgactttgatgtattcaggccttcagtgagaaaagtaactgcagatgtggtggaaatactaagataactacaataatggagcctgaagctat

SEQ ID NO: 263428 - DNA, 486 bp, Homo sapiens
aatttaagcccactgtttgtacctactgctaaaaaaaaaagattcctttcagaatattactgctcattgaaatgcatctggttacccaagggctctgatggaaatatacagtagattaaacatgttttcatgcctactaatacaacatccatcctgcagcccatggatcaaggtataattttgacattcaaattttatatttcagatgtacattttgtaaggctatagctgccatagacagcgattcctctgacagatctgggcaaaggaaattgaaaatttcctagaaaggattcatcattctagatgctagaacatttgtgattcatcagagaargctgaaatatgaacactgacaagaatttggaaaaaagttgattccatccctcatggctgactttgatgtattcaggccttcagtgagaaaagtaactgcagatgtggtggaaatactaagataactacaataatggagcctgaagctat

SEQ ID NO: 263429 - DNA, 486 bp, Homo sapiens
aatttaagcccactgtttgtacctactgctaaaaaaaaaagattcctttcagaatattactgctcattgaaatgcatctggttacccaagggctctgatggaaatatacagtagattaaacatgttttcatgcctactaatacaacatccatcctgcagcccatggatcaaggtataattttgacattcaaattttatatttcagatgtacattttgtaaggctatagctgccatagacagcgattcctctgacagatctgggcaaaggaaattgaaaatttcctagaaaggattcatcattctagatgctagaacatttgtgattcatcagagaaagctgaaatatgaacactgacaagaatttggaaaaaagttgattccatccctcatggctgactttgatgtattcaggccttcagtgagaaaagtaactgcagatrtggtggaaatactaagataactacaataatggagcctgaagctat

SEQ ID NO: 263430 - DNA, 585 bp, Homo sapiens
ccagcatcttttttttgttttgttttgtttcgtttcttactttgtagtaatagccattctgactggtgtgagattgtaaattattgkggttttaataagcaatttgctaataattagtgatgctgagcattttttcatatgctttttggccacatgtatgtcttcttttgagaagtgtttgttcaaatcttcagcccaattttaaaaaatgggattgtttgatttttgcttgttgatttgtttaagttacttatagattctggatattagacctttgttggatgcatagtttgcaaatattttttctcattctgtaggttgtctatttactctgttgatagtttcttttgctgtgcaggagctctgaagagcttcaattaggtctcatttgtcaatttttgcttttgtaacaattgcttttgcagtctttggcataacatcaattttattgactacataaatactcttttaatgtttgatgcaaacaaatctgtaagaacatctattaattttttatgtatcttgtttttcttttaactattaaaacaaggttctatgctactcctctttctctaagattttgct

SEQ ID NO: 263431 - DNA, 585 bp, Homo sapiens
ccagcatcttttttttgttttgttttgtttcgtttcttactttgtagtaatagccattctgactggtgtgagattgtaaattattgtggttttaataagcaatttgctaataattagtgatgctgagcattttttcatatgctttttggccacatgtatgtcttcttttgagaagtgtttgttcaaatcttcagcccaattttaaaaaatgggattgtttgatttttgcttgttgatttgtttaagttacttatagattctggatattagacctttgttggatgcatagtttgcaaatattttttctcattctgtaggttgtctrtttactctgttgatagtttcttttgctgtgcaggagctctgaagagcttcaattaggtctcatttgtcaatttttgcttttgtaacaattgcttttgcagtctttggcataacatcaattttattgactacataaatactcttttaatgtttgatgcaaacaaatctgtaagaacatctattaattttttatgtatcttgtttttcttttaactattaaaacaaggttctatgctactcctctttctctaagattttgct

SEQ ID NO: 263432 - DNA, 585 bp, Homo sapiens
ccagcatcttttttttgttttgttttgtttcgtttcttactttgtagtaatagccattctgactggtgtgagattgtaaattattgtggttttaataagcaatttgctaataattagtgatgctgagcattttttcatatgctttttggccacatgtatgtcttcttttgagaagtgtttgttcaaatcttcagcccaattttaaaaaatgggattgtttgatttttgcttgttgatttgtttaagttacttatagattctggatattagacctttgttggatgcatagtttgcaaatattttttctcattctgtaggttgtctatttactctgttgatagtttcttttgctgtgcagragctctgaagagcttcaattaggtctcatttgtcaatttttgcttttgtaacaattgcttttgcagtctttggcataacatcaattttattgactacataaatactcttttaatgtttgatgcaaacaaatctgtaagaacatctattaattttttatgtatcttgtttttcttttaactattaaaacaaggttctatgctactcctctttctctaagattttgct

SEQ ID NO: 263433 - DNA, 543 bp, Homo sapiens
ttcttagatagtttcccacttctttttcttaaaagaaggaactgagctgtggcctagggtttttttctggtgggtagatgtgtgctgcttgtgtgcaggactccacattatgtcaccactgagtcatttttaccctcttaaaatatgtctcagtgtctctctccagagatatatgacctctgagagggctcaaaacaacaggtgaccagcacttacatgcattccctggataagccttttttttttttcaattaatttttgttggggatttttctgtagggctgctgcatgtcacagcaggtcaacttccagacactctcacaaggccctcgtcacccagggatacctttaagctagaaagagcaaactgctctttctttctggagctgagaaaactcagtctgtcatttgcctatraaaagagcagttcactttatcatgcaaatgagcagacaagtcaaatcaagatgaattttgggagaaaaagcaatagagaagaccttatagaattcatctctgaactagaattaggatcttttaact

SEQ ID NO: 263434 - DNA, 543 bp, Homo sapiens
ttcttagatagtttcccacttctttttcttaaaagaaggaactgagctgtggcctagggtttttttctggtgggtagatgtgtgctgcttgtgtgcaggactccacattatgtcaccactgagtcatttttaccctcttaaaatatgtctcagtgtctctctccagagatatatgacctctgagagggctcaaaacaacaggtgaccagcacttacatgcattccctggataagccttttttttttttcaattaatttttgttggggatttttctgtagggctgctgcatgtcacagcaggtcaacttccagacactctcacaaggccctcgtcacccagggatacctttaagctagaaagagcaaactgctctttctttctggagctgagaaaactcagtctgtcatttgcctataaaaagagcagttcactttatcatgcaaatgagcagacaagtcaaatcargatgaattttgggagaaaaagcaatagagaagaccttatagaattcatctctgaactagaattaggatcttttaact

SEQ ID NO: 263435 - DNA, 543 bp, Homo sapiens
ttcttagatagtttcccacttctttttcttaaaagaaggaactgagctgtggcctagggtttttttctggtgggtagatgtgtgctgcttgtgtgcaggactccacattatgtcaccactgagtcatttttaccctcttaaaatatgtctcagtgtctctctccagagatatatgacctctgagagggctcaaaacaacaggtgaccagcacttacatgcattccctggataagccttttttttttttcaattaatttttgttggggatttttctgtagggctgctgcatgtcacagcaggtcaacttccagacactctcacaaggccctcgtcacccagggatacctttaagctagaaagagcaaactgctctttctttctggagctgagaaaactcagtctgtcatttgcctataaaaagagcagttcactttatcatgcaaatgagcagacaagtcaaatcaagatkaattttgggagaaaaagcaatagagaagaccttatagaattcatctctgaactagaattaggatcttttaact

SEQ ID NO: 263436 - DNA, 546 bp, Homo sapiens
ttgcagctgtgagacattttagccaaattagagaggctttgttacccataatttggaattctcacttgaatctgacctagtcgggaagagttggtcaaatccaatgggagaaagactggaacaaacaacaacaacaaaaaacccaacagtataatcactgagtgctctaatggtaggaagaagttaagctgggctggttgttaaactttagccaagacaaaaccctaattgagctaattacctaaggatgggtctcaggctgaagactgctctctctcatcctagaagcaggaaaaactcaaactcatcttccctgctgggagtgagctcaaactatataaaggatttacctgcttttgatyatcacggaagcaggaaatcttgtcttccttgttgcatgcaagtaaagctcaaaaaaaaacaggagttgtagagcaaaataaatgttagatgttgaccaaatttggggagataagggattctctggagggggtgctcacagacctcagcaaattgtcctattggtttgagccataaatttaactc

SEQ ID NO: 263437 - DNA, 562 bp, Homo sapiens
attaaggcccaaggtctcttaagtccacttgtgcaagactgcctggtcttgcactcacccttcagggcaatgggctcccctcttgcctttggaaggtctagacatgccatccaagagtcaagtcctgggatcagggaccccaagagcccgcttggtgctccacacccttgtggcagttgatacctaagatgcaagacaargtcccctttatattttcctctgctttcctcaagcaggagtttggacaccactgctggtaatgtgttagtctcacctgaagccagcaagtcttagaagctcatcaaggccctcaatgtactacctgggtattgctgctggtttttcagggcccaggggctcttcagttagtgggtgatgaatgctggcaggatgagtttcttttcttcaaggcagtgggttcccttctggctcaggatatgtctggaaatgtcccaaagctatggcctgaaatggaggcctcatgatgggtgccttatcctgtcgtggttgggctggtatccaaaatgcaacacgaagtcctctgcactcttctttgtcctct

SEQ ID NO: 263438 - DNA, 562 bp, Homo sapiens
attaaggcccaaggtctcttaagtccacttgtgcaagactgcctggtcttgcactcacccttcagggcaatgggctcccctcttgcctttggaaggtctagacatgccatccaagagtcaagtcctgggatcagggaccccaagagcccgcttggtgctccacacccttgtggcagttgatacctaagatgcaagacaaggtcccctttatattttcctctgctttcctcaagcaggagtttggacaccacwgctggtaatgtgttagtctcacctgaagccagcaagtcttagaagctcatcaaggccctcaatgtactacctgggtattgctgctggtttttcagggcccaggggctcttcagttagtgggtgatgaatgctggcaggatgagtttcttttcttcaaggcagtgggttcccttctggctcaggatatgtctggaaatgtcccaaagctatggcctgaaatggaggcctcatgatgggtgccttatcctgtcgtggttgggctggtatccaaaatgcaacacgaagtcctctgcactcttctttgtcctct

SEQ ID NO: 263439 - DNA, 562 bp, Homo sapiens
attaaggcccaaggtctcttaagtccacttgtgcaagactgcctggtcttgcactcacccttcagggcaatgggctcccctcttgcctttggaaggtctagacatgccatccaagagtcaagtcctgggatcagggaccccaagagcccgcttggtgctccacacccttgtggcagttgatacctaagatgcaagacaaggtcccctttatattttcctctgctttcctcaagcaggagtttggacaccactgctggtaatgtgttagtctcacctgaagccagcaagtcttagaagctcatcaaggccctcaatgtactacctgggtattgctgctggtttttcagggcccaggggctcttcagttagtgggtgatgaatgctgrcaggatgagtttcttttcttcaaggcagtgggttcccttctggctcaggatatgtctggaaatgtcccaaagctatggcctgaaatggaggcctcatgatgggtgccttatcctgtcgtggttgggctggtatccaaaatgcaacacgaagtcctctgcactcttctttgtcctct

SEQ ID NO: 263440 - DNA, 562 bp, Homo sapiens
attaaggcccaaggtctcttaagtccacttgtgcaagactgcctggtcttgcactcacccttcagggcaatgggctcccctcttgcctttggaaggtctagacatgccatccaagagtcaagtcctgggatcagggaccccaagagcccgcttggtgctccacacccttgtggcagttgatacctaagatgcaagacaaggtcccctttatattttcctctgctttcctcaagcaggagtttggacaccactgctggtaatgtgttagtctcacctgaagccagcaagtcttagaagctcatcaaggccctcaatgtactacctgggtattgctgctggtttttcagggcccaggggctcttcagttagtgggtgatgaatgctggcaggatgagtttcttttcttcaaggcagtgggttcccttctggctcaggatatgtctggaaatrtcccaaagctatggcctgaaatggaggcctcatgatgggtgccttatcctgtcgtggttgggctggtatccaaaatgcaacacgaagtcctctgcactcttctttgtcctct

SEQ ID NO: 263441 - DNA, 510 bp, Homo sapiens
cccttggttggaattgttacaaagttcaactggaggtttccttctccttgtgttctttttccagttcctctggcagccctccccaaggacccctatgagacaagtcaaaaatggcttccctggggacccacagagcccacagggcttttcccactgcttcctctacycctgtatttcactcagctctctaaattttctcagttccaggtaaggtcaaatccttctcccgtgatctggacattcaggttccccagtgagggtgtgtgttcaggggtggatagtcccccttttccactttcacattttgggcactcacaatatttgggctgtctcccatgtcctgcaggagcaatccacttccttcaaagggtctgtggattccctcggctttcctggtttattcctgaagtacttcttagagcaaaagttcacagtgcaagtcttcccatggtgctctgtccatccaagtgagagctgcaatttagtcccgcctcctatccacaacttttt

SEQ ID NO: 263442 - DNA, 510 bp, Homo sapiens
cccttggttggaattgttacaaagttcaactggaggtttccttctccttgtgttctttttccagttcctctggcagccctccccaaggacccctatgagacaagtcaaaaatggcttccctggggacccacagagcccacagggcttttcccactgcttcctctacccctgtatttcactcagctctctaaattttctcagttccaggtaaggtcaaatccttctcccgtgatctggacattcargttccccagtgagggtgtgtgttcaggggtggatagtcccccttttccactttcacattttgggcactcacaatatttgggctgtctcccatgtcctgcaggagcaatccacttccttcaaagggtctgtggattccctcggctttcctggtttattcctgaagtacttcttagagcaaaagttcacagtgcaagtcttcccatggtgctctgtccatccaagtgagagctgcaatttagtcccgcctcctatccacaacttttt

SEQ ID NO: 263443 - DNA, 510 bp, Homo sapiens
cccttggttggaattgttacaaagttcaactggaggtttccttctccttgtgttctttttccagttcctctggcagccctccccaaggacccctatgagacaagtcaaaaatggcttccctggggacccacagagcccacagggcttttcccactgcttcctctacccctgtatttcactcagctctctaaattttctcagttccaggtaaggtcaaatccttctcccgtgatctggacattcaggttccccagtgagggtgtgtgttcaggggtggayagtcccccttttccactttcacattttgggcactcacaatatttgggctgtctcccatgtcctgcaggagcaatccacttccttcaaagggtctgtggattccctcggctttcctggtttattcctgaagtacttcttagagcaaaagttcacagtgcaagtcttcccatggtgctctgtccatccaagtgagagctgcaatttagtcccgcctcctatccacaacttttt

SEQ ID NO: 263444 - DNA, 553 bp, Homo sapiens
tcaattatttataatcactacaacttcccctaattcaatatcatattttaaagacttgcccccataagtttttccaaaaattcagcacagatttcactaaaaacaacttatgtttcagtcagtataatctacagtgagaatggagggtagtcagtaatgtggctcattggttaagtggaagtgagttaagaaaacttcctgctgtgagttattttaattgaatttctacattttctggattcgtagtaggtatatattataataattgtggtgcttctcccttcttatcttcacatattttggttatttttatttccagttttcagtgactacaaaattgagaacagtgtttttaaatggtggtgataataggtactttggacrtattgtagacagtaatgggtagtttatgacagctatttgtttatcttattttggaaatactctttcattaaacatgaaattgttagtctgcatctatgttcactttaattattattttctatttaggcattgttatttagaaagagaggactagccacatatttatatg

SEQ ID NO: 263445 - DNA, 553 bp, Homo sapiens
tcaattatttataatcactacaacttcccctaattcaatatcatattttaaagacttgcccccataagtttttccaaaaattcagcacagatttcactaaaaacaacttatgtttcagtcagtataatctacagtgagaatggagggtagtcagtaatgtggctcattggttaagtggaagtgagttaagaaaacttcctgctgtgagttattttaattgaatttctacattttctggattcgtagtaggtatatattataataattgtggtgcttctcccttcttatcttcacatattttggttatttttatttccagttttcagtgactacaaaattgagaacagtgtttttaaatggtggtgataataggtactttggacgtattgtagacagtaatgggtagtttatgacagctatttgtttatcttattttggaaatactctttcattaaacatgaaattgttagtctgcatctatgttcactttaattattattttctatttagkcattgttatttagaaagagaggactagccacatatttatatg

SEQ ID NO: 263446 - DNA, 176 bp, Homo sapiens
ggataattgctatgaagggtaataaatcagggaagataaatgtgctgagtgaaaamccattatttattaatactggatggtgaaatgagaaggtacctgtgtggtgtgaagttaaagacaccagtaatacctctccaccagcacacacaacacaacacgtatgtaagcttacaggc

SEQ ID NO: 263447 - DNA, 176 bp, Homo sapiens
ggataattgctatgaagggtaataaatcagggaagataaatgtgctgagtgaaaacccattatttattaatactggatggtgaaatgagaaggtacctgtgtggtrtgaagttaaagacaccagtaatacctctccaccagcacacacaacacaacacgtatgtaagcttacaggc

SEQ ID NO: 263448 - DNA, 457 bp, Homo sapiens
aacaatggtgagagtctcctagaagacaggatacaatcttatgtaacattatcacaaacatgatatcccatcacctttcctgttctattggaaagaagcagtccacagtttctggcaacagtcagtggggagaggattaacaarggaacaaacatagaagtgggcatcatagggtccatattacactatgtcctcacatgatataaacacatagcaattatatatattatatatatatatataaaatgtatgttcaatatgtaagtattcaaaaatatataactgcgtttaaacaaataaaaagtctgtagacaaggaaaaaaatgaaaacaaactcaaagcagaaaatggagctaaagccacaggactgttgatattctatcagaagacaggccatgatagactagatctaagctcaattgggataaaggggctaaaattgtcccacaccagaaga

SEQ ID NO: 263449 - DNA, 457 bp, Homo sapiens
aacaatggtgagagtctcctagaagacaggatacaatcttatgtaacattatcacaaacatgatatcccatcacctttcctgttctattggaaagaagcagtccacagtttctggcaacagtcagtggggagaggattaacaaaggaacaaacatagaagtgggcatcatagggtccatattacactatgtcctcacatgatataaacrcatagcaattatatatattatatatatatatataaaatgtatgttcaatatgtaagtattcaaaaatatataactgcgtttaaacaaataaaaagtctgtagacaaggaaaaaaatgaaaacaaactcaaagcagaaaatggagctaaagccacaggactgttgatattctatcagaagacaggccatgatagactagatctaagctcaattgggataaaggggctaaaattgtcccacaccagaaga

SEQ ID NO: 263450 - DNA, 457 bp, Homo sapiens
aacaatggtgagagtctcctagaagacaggatacaatcttatgtaacattatcacaaacatgatatcccatcacctttcctgttctattggaaagaagcagtccacagtttctggcaacagtcagtggggagaggattaacaaaggaacaaacatagaagtgggcatcatagggtccatattacactatgtcctcacatgatataaacacatagcaattatatatattatatatatatatataaaatgtatgttcaatatgtaagtattcaaaaatatataactgcgtttaaasaaataaaaagtctgtagacaaggaaaaaaatgaaaacaaactcaaagcagaaaatggagctaaagccacaggactgttgatattctatcagaagacaggccatgatagactagatctaagctcaattgggataaaggggctaaaattgtcccacaccagaaga

SEQ ID NO: 263451 - DNA, 574 bp, Homo sapiens
gtgttaagagaagcaagttagacttcaagagcgtataatttgtgattataggtcacgtggaggctttaagtgagacataggttatatatgcatgtaagaaccaggtacttgcctttattgcaggaagctggaggaaatgaagcctcaagagtctgtaagtcaccaatgtaaaaggtggaaaatatgtccaatacagagtaggaattagaaaattagttacaattaatataaaaagcaaggtggagattgacataataagaggtcgagtagaggagtaaaaatcgtaagtgcttgtggtgtctataggttcagcagattgattcrttcttcactggactctcttatttaagagaacttgagtggaaactcttaagtgtgctctgaactcctatggttaggacacttttattaaattatttttttctagatctctgtaaatctaaagcagagtttgctgtttttacattaataaatgtagcgtttcagttaaatgtcattatttttattgtgagatgatataacaaaaggtatgatccttttttaagttttaattttagtgagtatatagcaggtg

SEQ ID NO: 263452 - DNA, 574 bp, Homo sapiens
gtgttaagagaagcaagttagacttcaagagcgtataatttgtgattataggtcacgtggaggctttaagtgagacataggttatatatgcatgtaagaaccaggtacttgcctttattgcaggaagctggaggaaatgaagcctcaagagtctgtaagtcaccaatgtaaaaggtggaaaatatgtccaatacagagtaggaattagaaaattagttacaattaatataaaaagcaaggtggagattgacataataagaggtcgagtagaggagtaaaaatcgtaagtgcttgtggtgtctataggttcagcagattgattcattcttcactggactctcttatttaagagaayttgagtggaaactcttaagtgtgctctgaactcctatggttaggacacttttattaaattatttttttctagatctctgtaaatctaaagcagagtttgctgtttttacattaataaatgtagcgtttcagttaaatgtcattatttttattgtgagatgatataacaaaaggtatgatccttttttaagttttaattttagtgagtatatagcaggtg

SEQ ID NO: 263453 - DNA, 574 bp, Homo sapiens
gtgttaagagaagcaagttagacttcaagagcgtataatttgtgattataggtcacgtggaggctttaagtgagacataggttatatatgcatgtaagaaccaggtacttgcctttattgcaggaagctggaggaaatgaagcctcaagagtctgtaagtcaccaatgtaaaaggtggaaaatatgtccaatacagagtaggaattagaaaattagttacaattaatataaaaagcaaggtggagattgacataataagaggtcgagtagaggagtaaaaatcgtaagtgcttgtggtgtctataggttcagcagattgattcattcttcactggactctcttatttaagagaacttgagtggaaactcttaagtktgctctgaactcctatggttaggacacttttattaaattatttttttctagatctctgtaaatctaaagcagagtttgctgtttttacattaataaatgtagcgtttcagttaaatgtcattatttttattgtgagatgatataacaaaaggtatgatccttttttaagttttaattttagtgagtatatagcaggtg

SEQ ID NO: 263454 - DNA, 574 bp, Homo sapiens
gtgttaagagaagcaagttagacttcaagagcgtataatttgtgattataggtcacgtggaggctttaagtgagacataggttatatatgcatgtaagaaccaggtacttgcctttattgcaggaagctggaggaaatgaagcctcaagagtctgtaagtcaccaatgtaaaaggtggaaaatatgtccaatacagagtaggaattagaaaattagttacaattaatataaaaagcaaggtggagattgacataataagaggtcgagtagaggagtaaaaatcgtaagtgcttgtggtgtctataggttcagcagattgattcattcttcactggactctcttatttaagagaacttgagtggaaactcttaagtgtgctctgaactcctatggttaggacacttttattaaattatttttttctagatctctgtaaayctaaagcagagtttgctgtttttacattaataaatgtagcgtttcagttaaatgtcattatttttattgtgagatgatataacaaaaggtatgatccttttttaagttttaattttagtgagtatatagcaggtg

SEQ ID NO: 263455 - DNA, 616 bp, Homo sapiens
ccccatcacccccactacccttcccagcctctggtaaccattcttctactctctgtgctcataggttcaattgttttgatttttagatcccacaaataagttcaaacacrtgatgtttgtctttctgtgcctggcttgtttcacttagcataatgacttccagttccatccatgtcattgcaaatgactggatctcatattttttatggctgtatattactccattgtgtctatgttccatattttcttaattcattcatatgttgatgaacacttaggttgcttccaaatattaactgttgtgaatagtcctacaacaaacatggaagtgcagatatctctttcttagacagatttcctttctctgggatatatacccaacagtgggattgctacatcatatagtagctctatttttggtgttttgagaaacttccaaactgttctatttagtggttgtactaacttacgttcccacccacagtgtacaaaggttgccttttctccacatcctgacaagcatttgttattgcctgtctttggttataagccattttaactgggataataggacatctcattgtagtttttattttacatttctctgatattctat

SEQ ID NO: 263456 - DNA, 580 bp, Homo sapiens
ctgagtaaccaatctgtcacagcagaggccaattatgagccccaagtacagcaccattctccagggtgatcagccagctacctggtggtaggttgattacattggaccactgccatcatggaagggccagcattttgcatttactgaatgatacagtttagatatttgtcccctcaaaatatcatgttgaaatttgatccacaatgttgaaggtagggcctggygtgaggtgttttggtcatgtgagtggattcttcatgaaagacttggtgccattattgaagtaatgagtgacttctcactctattagttcctgtgagatacaatcgttaaaaaaaatccggcacctctatcccctctctcttgcttctttctcaccatgtgatctgcacacatcaatttctttttccctttcatcataagtggaagctttctgaagttctaaccagaagcacatgttcatgccatgcatcctatacagcttgcagaagagtgagccaaataaacctcttttctttatgcattgcccagcttcaggtatttctttagataaatgtaaatgaaataggacactggaata

SEQ ID NO: 263457 - DNA, 580 bp, Homo sapiens
ctgagtaaccaatctgtcacagcagaggccaattatgagccccaagtacagcaccattctccagggtgatcagccagctacctggtggtaggttgattacattggaccactgccatcatggaagggccagcattttgcatttactgaatgatacagtttagatatttgtcccctcaaaatatcatgttgaaatttgatccacaatgttgaaggtagggcctggcgtgaggtgttttggtcatgtgagtggattcttcatgaaagacttggtgccattattgaagtaatgagtgacttctcactctattagttcctgtgagatayaatcgttaaaaaaaatccggcacctctatcccctctctcttgcttctttctcaccatgtgatctgcacacatcaatttctttttccctttcatcataagtggaagctttctgaagttctaaccagaagcacatgttcatgccatgcatcctatacagcttgcagaagagtgagccaaataaacctcttttctttatgcattgcccagcttcaggtatttctttagataaatgtaaatgaaataggacactggaata

SEQ ID NO: 263458 - DNA, 580 bp, Homo sapiens
ctgagtaaccaatctgtcacagcagaggccaattatgagccccaagtacagcaccattctccagggtgatcagccagctacctggtggtaggttgattacattggaccactgccatcatggaagggccagcattttgcatttactgaatgatacagtttagatatttgtcccctcaaaatatcatgttgaaatttgatccacaatgttgaaggtagggcctggcgtgaggtgttttggtcatgtgagtggattcttcatgaaagacttggtgccattattgaagtaatgagtgacttctcactctattagttcctgtgagatacratcgttaaaaaaaatccggcacctctatcccctctctcttgcttctttctcaccatgtgatctgcacacatcaatttctttttccctttcatcataagtggaagctttctgaagttctaaccagaagcacatgttcatgccatgcatcctatacagcttgcagaagagtgagccaaataaacctcttttctttatgcattgcccagcttcaggtatttctttagataaatgtaaatgaaataggacactggaata

SEQ ID NO: 263459 - DNA, 501 bp, Homo sapiens
catcttctcatctaaactttgcaccagcagccacccaaattctcagtcctttgaacttggacttagctaacagctttgctggttcttgagcttgcaggtsgtatacagtgggtattctcagcttccataaacaggtgagtcaattcccatggtaaaccttctctcatctatctctgtctgtctatctatctgtctatctctctatctgtctatatcctatctgttttgtttctctgaagaaccctaattcaccaaaagaatagagtaattactaacagtttggcccatttctttttaaaaaattttaaaaatatttttgggtacatagtaggtgtatatatttatggggtacatgagatgttctgatataggcatgaaatgtgaaataagcacattcattttttatacaaaaaccaacaagcaattatcatttttgtagaagtaattttgttcaaatatgttaataaatgcatatcttaaatgataatgttgtgggatgca

SEQ ID NO: 263460 - DNA, 501 bp, Homo sapiens
catcttctcatctaaactttgcaccagcagccacccaaattctcagtcctttgaacttggacttagctaacagctttgctggttcttgagcttgcaggtcgtatayagtgggtattctcagcttccataaacaggtgagtcaattcccatggtaaaccttctctcatctatctctgtctgtctatctatctgtctatctctctatctgtctatatcctatctgttttgtttctctgaagaaccctaattcaccaaaagaatagagtaattactaacagtttggcccatttctttttaaaaaattttaaaaatatttttgggtacatagtaggtgtatatatttatggggtacatgagatgttctgatataggcatgaaatgtgaaataagcacattcattttttatacaaaaaccaacaagcaattatcatttttgtagaagtaattttgttcaaatatgttaataaatgcatatcttaaatgataatgttgtgggatgca

SEQ ID NO: 263461 - DNA, 536 bp, Homo sapiens
acaggtgagtcaattcccatggtaaaccttctctcatctatctctgtctgtctatctatctgtctatctctctatctgtctatatcctatctgttttgtttctctgaagaaccctaattcaccaaaagaatagagtaattactaacagtttggcccatttctttttaaaaaattttaaaaatatttttgggtacatagtaggtgtatatatttatggggtacatgagatgttytgatataggcatgaaatgtgaaataagcacattcattttttatacaaaaaccaacaagcaattatcatttttgtagaagtaattttgttcaaatatgttaataaatgcatatcttaaatgataatgttgtgggatgcagaaagtccccttaggttttgcacagaaacaagtagctctgaatttttgtaactctgcatatttcttatatctctctaataagccttatttatatctagtgtgttttgtttaatgattatgagaatataagctttttgaaagaggatgtaaatttaatgtgtctct

SEQ ID NO: 263462 - DNA, 501 bp, Homo sapiens
catcttctcatctaaactttgcaccagcagccacccaaattctcagtcctttgaacttggacttagctaacagctttgctggttcttgagcttgcaggtcgtatacagtgggtattctcagcttccataaacaggtgagtcaattcccatggtaaaccttctctcatctatctctgtctgtctatctatctgtctatctctctatctgtctatatcctatctgttttgtttctctgaagaaccctaattcaccaaaagaatagagtaattactaacagtttggcccatttctttttaaaaaattttaaaaatatttttgggtacatagtaggtgtatatatttatggggtacatgagatgttctgatataggyatgaaatgtgaaataagcacattcattttttatacaaaaaccaacaagcaattatcatttttgtagaagtaattttgttcaaatatgttaataaatgcatatcttaaatgataatgttgtgggatgca

SEQ ID NO: 263463 - DNA, 516 bp, Homo sapiens
tagtaggtgtatatatttatggggtacatgagatgttctgatataggcatgaaatgtgaaataagcacattcattttttatacaaaaaccaacaagcaattatcatttttgtagaagtaattttgttcaaatatgttaataaatgcatatcttaaatgataatgttgtgggatgcagaaagtccccttaggttttgcacagaaacaagtagctctgaatttttgtaactctgcatatttcttatatctctctaataagccttatttatatctagtgtgttttgtttaatgattatgagaatataagctttttgaaagaggatgtaaatttaatgtgtytctataatctctatagcacctacacacagtagacgcacaatagatgtttactaagaaataaatataagaaacttaaatgagtgcctgtcaaaggactttaatgatcagctacttagtcatatatacaatattaaaagaattctgactataaaagatgttgtagagagtctctcacaaa

SEQ ID NO: 263464 - DNA, 516 bp, Homo sapiens
tagtaggtgtatatatttatggggtacatgagatgttctgatataggcatgaaatgtgaaataagcacattcattttttatacaaaaaccaacaagcaattatcatttttgtagaagtaattttgttcaaatatgttaataaatgcatatcttaaatgataatgttgtgggatgcagaaagtccccttaggttttgcacagaaacaagtagctctgaatttttgtaactctgcatatttcttatatctctctaataagccttatttatatctagtgtgttttgtttaatgattatgagaatataagctttttgaaagaggatgtaaatttaatgtgtctctataatctctatagcacctacacmcagtagacgcacaatagatgtttactaagaaataaatataagaaacttaaatgagtgcctgtcaaaggactttaatgatcagctacttagtcatatatacaatattaaaagaattctgactataaaagatgttgtagagagtctctcacaaa

SEQ ID NO: 263465 - DNA, 185 bp, Homo sapiens
ggatagtactcagcggtcacacagaaccaaaaatagtttctgtttccacaagacagacaaaaaagtctttgattcatggaaaattggaakgagtactcattcgtatattttatgattcatgggaaataaccttaagctaaacattattctgagcctgcctaaaatgccttaaaaacaagactcaa

SEQ ID NO: 263466 - DNA, 185 bp, Homo sapiens
ggatagtactcagcggtcacacagaaccaaaaatagtttctgtttccacaagacagacaaaaaagtctttgattcatggaaaattggaaggagtactcattcgtatmttttatgattcatgggaaataaccttaagctaaacattattctgagcctgcctaaaatgccttaaaaacaagactcaa

SEQ ID NO: 263467 - DNA, 185 bp, Homo sapiens
ggatagtactcagcggtcacacagaaccaaaaatagtttctgtttccacaagacagacaaaaaagtctttgattcatggaaaattggaaggagtactcattcgtatattttatgattcatgggaaataaccttaagctaarcattattctgagcctgcctaaaatgccttaaaaacaagactcaa

SEQ ID NO: 263468 - DNA, 241 bp, Homo sapiens
aaaaaggcttacaaaagcagyttgagttggtgaagcaacctttattattctgcctcaggagcatagaaactctgcactcctatcatttagtcaaaacagaccttgatttacatcaccttttcataagctatcacaatgatccattacattgatgacatcatgctgattggacctagtcaacaagacctagtagccactctaaagttgtcattaaacgtttgagtggtagatagtggaaaat

SEQ ID NO: 263469 - DNA, 241 bp, Homo sapiens
aaaaaggcttacaaaagcagcttgagttggtgaagcaacctttattattctgcctcaggagcatagaaactctgcacycctatcatttagtcaaaacagaccttgatttacatcaccttttcataagctatcacaatgatccattacattgatgacatcatgctgattggacctagtcaacaagacctagtagccactctaaagttgtcattaaacgtttgagtggtagatagtggaaaat

SEQ ID NO: 263470 - DNA, 241 bp, Homo sapiens
aaaaaggcttacaaaagcagcttgagttggtgaagcaacctttattattctgcctcaggagcatagaaactctgcactcctatcatttagtcaaaacagaccttgatttacatcaccttttcataagctatcacaatgatccattacattgatgacatcatgctgattggacctagtmaacaagacctagtagccactctaaagttgtcattaaacgtttgagtggtagatagtggaaaat

SEQ ID NO: 263471 - DNA, 523 bp, Homo sapiens
taatatagctctatctaattcccttttatttgctattattgttacacacattatatccatataacttacaaacacaaaaattcattattataatcattatttacataattttatatttattaaagaagctgagaaaacaattgtataattacagacattgtaatattaattttttgtttattattaatttttatttcatttgtgcataagrtttcaagtagcacgtagtttaactttcttaatccaatacaattttgcttcctcctgccatctgtatgctattggttactggtctcattgtcaaatacattctatttctatatttaacaggccaaaatatataattatatacatattgttttatgcaattgctaattaaaccagtgaatagaagtaaacaatctatgtatatattgtcttttgtaattacaaaattacctttaacaatgctgataattttttatgtccatgcttattttcttttgagggagaagaaaaggtcaattaggtaaacagttaaggc

SEQ ID NO: 263472 - DNA, 523 bp, Homo sapiens
taatatagctctatctaattcccttttatttgctattattgttacacacattatatccatataacttacaaacacaaaaattcattattataatcattatttacataattttatatttattaaagaagctgagaaaacaattgtataattacagacattgtaatattaattttttgtttattattaatttttatttcatttgtgcataaggtttcaagtagcacgtagtttaactttcttaatccaatacaattttgcttcctcctgccatctgtatgctattggttactggtctcattgtcaaatacattctatttctatatttaacaggccaaaatatataattatatacatattgttttatgcaattgctaattaaaccagtgaatagaagtaaacaatctatgtatatattgtcttttgtaattacaaaattacctttaacaatgctgataattttttatgtccatgcttattttcttttgagggagaagaaaaggtcarttaggtaaacagttaaggc

SEQ ID NO: 263473 - DNA, 526 bp, Homo sapiens
tctgagatttttttacacaatagaaaactaatacatatacattttggtattaccatacaatggaatggtatgtgactgttaaagagaatggggtaaatatagctgtaatgatcaaaaagaaattaaagatacattattatgttaaaaagataaaaaagatgtgaaacatatttttaaacattctcatttaaatttaaaagggatatatatctgtatacacacacatacctgtcagctgtgatttgtaaaacccttcacttcaattaacttgaagaataaagtaatttactatatcacatgacaaggagtacagacggtgtgtagttttcaatttaattgagtcagtgatttgatattgtcatctagarctcaggttctttctgtttctccactactttctatagaattggctttattctaataataatgttaatagtaactagtatttagtacgagttgggcactttactaaattacatttatttacacatgttgttctttttcactgcaatgtaactaccattat

SEQ ID NO: 263474 - DNA, 499 bp, Homo sapiens
ttatctttaattttcaatccatgtcattttttgtcctctaaccaataaaatatgtctctaagtgaagttaacagaagggtacagatttttttttatcattgtgaagcattacattaacaataagtataatgtaaatgtcattacttaaaacatacctttgtagtgtgtttttattttaattttayggtcattggcagattccccatttttaggcatgtcagctttttcttttttttaacattacaacttccagtgaaactgagaactactgtgtcttaaaattagtgttgtcttaattgccttttcaaaatcatttttgttaattgccaccagaactagagtgtactttatttttaattattctttcttttatttttaattattctttctttctaaccctccacagagtccccaaagtcagcttgaaacttaaatgaaaaactcagattggttacattttatcaacaaccttactgatatagtttggatatttgttcct

SEQ ID NO: 263475 - DNA, 499 bp, Homo sapiens
ttatctttaattttcaatccatgtcattttttgtcctctaaccaataaaatatgtctctaagtgaagttaacagaagggtacagatttttttttatcattgtgaagcattacattaacaataagtataatgtaaatgtcattacttaaaacatacctttgtagtgtgtttttattttaattttatggtcattggcagattccccatttttaggcatgtcagctttttcttttttttaacattacaacttccagtgaaacwgagaactactgtgtcttaaaattagtgttgtcttaattgccttttcaaaatcatttttgttaattgccaccagaactagagtgtactttatttttaattattctttcttttatttttaattattctttctttctaaccctccacagagtccccaaagtcagcttgaaacttaaatgaaaaactcagattggttacattttatcaacaaccttactgatatagtttggatatttgttcct

SEQ ID NO: 263476 - DNA, 593 bp, Homo sapiens
gaacttgatgtttcctacattaaaacaatcaaatattttaatgtgattcatgtacatgtgtaaatcacacacactctctcttgccaacatattttcctggaaacgccccaactgtgattaaagccatctttccctctaatttatgcctacatatatgagcagataaacagaaaaaarctcaaaccacccagactcgactcactttaaatttatggctgtaagcttaaaaaaaaaatactaatttaaatattggttcagaaccataaagtagttaatttcctaacaggatttaacttgaacagataaaattttagctaaatgtttcttctcttcatgaaatttcataattccaatatacatattgtttacgttaatcacttttgcaatattcatacaagcagcaaatcccaataagattttcttttcttatacaaacataagacatgtaaaggaacctctaacataataaaaatgacaactgaggcctttctttaatttaaggagcctaggagattggatatgttttacacacaggaatattaggaattctgctgttcttattaagctatgagccaggttcaggatgggagtct

SEQ ID NO: 263477 - DNA, 593 bp, Homo sapiens
gaacttgatgtttcctacattaaaacaatcaaatattttaatgtgattcatgtacatgtgtaaatcacacacactctctcttgccaacatattttcctggaaacgccccaactgtgattaaagccatctttccctctaatttatgcctacatatatgagcagataaacagaaaaaagctcaaaccacccagactcgactcactttaaatttatggctgtaagcttaaaaaaaaaatactaatttaaatattggttcaraaccataaagtagttaatttcctaacaggatttaacttgaacagataaaattttagctaaatgtttcttctcttcatgaaatttcataattccaatatacatattgtttacgttaatcacttttgcaatattcatacaagcagcaaatcccaataagattttcttttcttatacaaacataagacatgtaaaggaacctctaacataataaaaatgacaactgaggcctttctttaatttaaggagcctaggagattggatatgttttacacacaggaatattaggaattctgctgttcttattaagctatgagccaggttcaggatgggagtct

SEQ ID NO: 263478 - DNA, 593 bp, Homo sapiens
gaacttgatgtttcctacattaaaacaatcaaatattttaatgtgattcatgtacatgtgtaaatcacacacactctctcttgccaacatattttcctggaaacgccccaactgtgattaaagccatctttccctctaatttatgcctacatatatgagcagataaacagaaaaaagctcaaaccacccagactcgactcactttaaatttatggctgtaagcttaaaaaaaaaatactaatttaaatattggttcagaaccataaagtagttaatttcctaacaggatttaacttgaacagataaaattttagctaaatgtttcttctcttcatgaaatttcataattccaatatacatattgtttacgttaatcacttttgcaatattcatacaagcagcaaatcccaataagattttcttttcttatacaaacataagacatgtaaaggaacctctaacataataaaaatgacaactgagrcctttctttaatttaaggagcctaggagattggatatgttttacacacaggaatattaggaattctgctgttcttattaagctatgagccaggttcaggatgggagtct

SEQ ID NO: 263479 - DNA, 630 bp, Homo sapiens
ggttaaccagaatccttccagaacttattttgtattcttatatttaaaattcttcctcctaaagatattatcaaaaaccattaatacagttattattgccaccatcaactacataaatkgaggcattcaattattagcagtcttttcttagagaagataaattcattcgtggtgggcaaagaaacagttcttccaaagatgtccatattgtaatccctagaacctgtgagtatgttatgttacatggcaaaagggaactatgattcccagtggaattaagggtatagtaaactctcaccttaagatatggatgctatcctagaatatctgggcgtgtgcaaggtaatcacaatggtccttaaaagtagaaggaagcagaagaagaatgtcagagaaagatgtggtgacagaaacagggaaacggattgtcatcctgtcaaatcaattgttatagttatttcctgaaagccataatatttctcttttcttagtctctaatacatgttatattcttaatggtaagttctcaaagcccaccatttttgcttcagagagctcatgtagacttctgttattcaattctgaataagtgtgaacttttacactatataaagtaaaaaaataaaaata

SEQ ID NO: 263480 - DNA, 510 bp, Homo sapiens
tgtgtacattaaagaaagattcaaccaagctgcatggtgaacacagatatatttcaaaattgctaaaatagatttttaatattgttatcacaaaaaaattataaattggtgaggtgatggatatgttaattagcttaatcaaatgtttcgataatgaaattgaatctttctatacctagaaaacaacctttccaatcccttgattttaaacttctaaccaccagaaatgggagataataaatttttgacatattaagccactcagtttgtggtagtttgttacagcagccatgaaaaatgaatacggccatacttcattgtacgcgcttagatttattgcactttgcagatattgcattttttacaaattaaaggtttgtgataaaattgtttttgggcatcacaaascgtgctcatgtaagacaccgaacctagttgatacatgttgtatgtgttctgactgctccaccaacaagccatttccccatcttccgttgattgggcctcccc

SEQ ID NO: 263481 - DNA, 517 bp, Homo sapiens
gttcaccattatgagaaaattcaacctgagctaaagttttattcctcacttccatatttctgcaaactcaaaatccatttctacaaatactcatcaggttttgagtgataaaattagcaaatccctgcaatctttctatttgttttttcttctcaggtagcattttaacctctagaacatgatgaatttggaatctgaatactggcctaatatgaggattgaggcaagaagaaatgcatgaattgttttctgcaagtgtgaaaaaacctcaccaagggtttctggggtttatgagtttgaggtaatacaaattcrtgcatcttcttataacccctgtcatattactgtaatttgcttctctgttaattaatgtatgaactttcacattaggtctgacaaattcacatgattttttaacccagcatcccagagaattattttctttggtggtggcagtggtgctggtatattaatttgtttttgttgttgtttactgatcttagcccagggtcataag

SEQ ID NO: 263482 - DNA, 615 bp, Homo sapiens
gtgccaaacatttgttgtcttgtttcctaacatctaatacatttttaaggtccatatgatgatattttgtgcttgtttctttaattaaatcttagttttaagaatctttcatatgtcctgaaccccttcgctaggaaccactgcatagctcttatttttctcctcygttaagtcttgattctgttttcacctccagtcagcagctaaagtccaatcccaaatcccttcggccacctaaaataatagacttcactgtattactgtggtggttctgacatcaccacagtataaaatgttgtttgtggtgtgtcttaagcccccactacccacaaaacctccttaggatatcagtagcttgttccccttgaagtctgatttggattgctggtcatacaacaaagaaccctcaccaactatacaaggtgcttaatgggatatctattcagtgttttactctgaaaactgcccttcttccacacagagacacaattgttctatgaaatctaaagccaaggattgacatactttttctgcaaagggccagctactgaatcttttagtctgtgtgggtgatatcttctctgtcataactcctcaactctgtcatggtagtgt

SEQ ID NO: 263483 - DNA, 615 bp, Homo sapiens
gtgccaaacatttgttgtcttgtttcctaacatctaatacatttttaaggtccatatgatgatattttgtgcttgtttctttaattaaatcttagttttaagaatctttcatatgtcctgaaccccttcgctaggaaccactgcatagctcttatttttctcctctgttaagtcttgattctgttttcacctccagtcagcagctaaagtccaatcccaaatcccttcggccacctaaaataatagayttcactgtattactgtggtggttctgacatcaccacagtataaaatgttgtttgtggtgtgtcttaagcccccactacccacaaaacctccttaggatatcagtagcttgttccccttgaagtctgatttggattgctggtcatacaacaaagaaccctcaccaactatacaaggtgcttaatgggatatctattcagtgttttactctgaaaactgcccttcttccacacagagacacaattgttctatgaaatctaaagccaaggattgacatactttttctgcaaagggccagctactgaatcttttagtctgtgtgggtgatatcttctctgtcataactcctcaactctgtcatggtagtgt

SEQ ID NO: 263484 - DNA, 615 bp, Homo sapiens
gtgccaaacatttgttgtcttgtttcctaacatctaatacatttttaaggtccatatgatgatattttgtgcttgtttctttaattaaatcttagttttaagaatctttcatatgtcctgaaccccttcgctaggaaccactgcatagctcttatttttctcctctgttaagtcttgattctgttttcacctccagtcagcagctaaagtccaatcccaaatcccttcggccacctaaaataatagacttcactgtattactgtggtggttctgacatcaccacagtataaaatgttgtttgtgktgtgtcttaagcccccactacccacaaaacctccttaggatatcagtagcttgttccccttgaagtctgatttggattgctggtcatacaacaaagaaccctcaccaactatacaaggtgcttaatgggatatctattcagtgttttactctgaaaactgcccttcttccacacagagacacaattgttctatgaaatctaaagccaaggattgacatactttttctgcaaagggccagctactgaatcttttagtctgtgtgggtgatatcttctctgtcataactcctcaactctgtcatggtagtgt

SEQ ID NO: 263485 - DNA, 615 bp, Homo sapiens
gtgccaaacatttgttgtcttgtttcctaacatctaatacatttttaaggtccatatgatgatattttgtgcttgtttctttaattaaatcttagttttaagaatctttcatatgtcctgaaccccttcgctaggaaccactgcatagctcttatttttctcctctgttaagtcttgattctgttttcacctccagtcagcagctaaagtccaatcccaaatcccttcggccacctaaaataatagacttcactgtattactgtggtggttctgacatcaccacagtataaaatgttgtttgtggtgtgtcttaagcccccactacccacaaaacctccttaggatatcagtagcttgttccccttgaagtctgatttggattgctggtcatacaacaaagaaccctcaccaactatacaaggtgcttwatgggatatctattcagtgttttactctgaaaactgcccttcttccacacagagacacaattgttctatgaaatctaaagccaaggattgacatactttttctgcaaagggccagctactgaatcttttagtctgtgtgggtgatatcttctctgtcataactcctcaactctgtcatggtagtgt

SEQ ID NO: 263486 - DNA, 588 bp, Homo sapiens
gacatatgtagaaggactatgtgttactaaaacctgtgcttgtcaatcacaaggtagaataaaaatgaattctacagtgtagaactcagatatatatatatttttttcagagatacctcattcagtatatattaatcattattttacttttttattttgacttttcattaatttccccaaaacatgtattatattatttgcctatcaagttgtaggcaactagaggcagggataaagtggtgaaccaaccrtacggttctgattcataaggagttcacagtctacgtaaaaagcagctttttagaaaagcaattttagaacaactacaataaccatttccagacttacaaagtaaatcacatatggtctaatattttccttcatacaacatttatgtatttgagaagtctttaaacattttttagaaacattctttttggacgtttaagaggttttccatgtgacacactacaaacaaggttgcttttatatgattcaatgacattctgataggacgacagttaattctgctaagaacagcatgttagagattaaaaagaaaaccacttgttatatttgccaataagc

SEQ ID NO: 263487 - DNA, 633 bp, Homo sapiens
agacttctcaaaagaagatatataagtggtcaaaaacatttgaaaaattaatcacatcattaattatcagagaaatgcaaatcacaaccacaataagatattatctcacaccagtcagaatggctgttatcaaaaagtcaggaaatagatgttggtgaggcagaakagaaagggaatatgtctacattgttggtgggaatgtaaactaattcagctactgtggaaagcagtttggagatttcacaaaaaactaatagaattaccattcaattcagcaatcccattaatgcatatacacccaaaggaaaataaatcattctaccaaaactacacatgcattgatttattcactgcagcactattcacaatagcaaagacacagaatcaacctaagtacccattaatggtgaattgaataatgaatataaggtacattatgatagggaggcaacagaggaatgacccctgctggctgatgactgcaaatttggcaaggctcatctgaatccatgcatcccttgagacacttttgtcccaaactcaattccaaactttgggttgcagccctagaaaggaaaaaaaccatatctgagagatccaaagccatgatcctctaggtgactttagcacttg

SEQ ID NO: 263488 - DNA, 250 bp, Homo sapiens
acccctgctggctgatgactgcaaatttggcaaggctcatctgaatccatgcatcccttgagacacttttgtcccaaactcaattccaaactttgggttgcagccctagaaaggaaaaaaamcatatctgagagatccaaagccatgatcctctaggtgactttagcacttgttaactgttagatttggaccgaacagggctatctcacatgtgagagcagggcagtctgttttgatggtccccctgtct

SEQ ID NO: 263489 - DNA, 537 bp, Homo sapiens
gacccctgctggctgatgactgcaaatttggcaaggctcatctgaatccatgcatcccttgagacacttttgtcccaaactcaattccaaactttgggttgcagccctagaaaggaaaaaaaccatatctgagagatccaaagccatgatcctctaggtgactttagcacttgttaactgttagatttggaccgaacagggctatctcacatgtgagagcagggcagtctgttttgatggtccccctgtctgttggcgtcttccagggtccttgccttgccacacccacctkcagtacaggcttagatgcccagctggagagcttcccagtgtacatcaccgtagttcttttaccagcaaatcccacctaactgttagagagcttttgcagatgagactccaccaatctgcagccacccaaagcctcctcgcaccactttgctaaaatgcactcaaccacagtctcctccaaccactttgtaagtgtgaacaaatcctgctgtcccaccaccaccctgttgccactggaacatatgc

SEQ ID NO: 263490 - DNA, 590 bp, Homo sapiens
acctacagaatgggagaaaatatttgtaaactctgcattcaatgagttctaatattcataatctatgggaaacaaattaagaagcaaaaaaaaaacagcctcactaaaaaatgagcaaaggacatgaacagacacttctcaaaagaagacatacaaaaggccaacaagcatatgaaaaaatgctaaacatcactaatcattaaacattaaaatccrtaatttgagcaaggagctcaaagtctttgctgctatgtcttcagcagcttaatatagagctggcacttagttaatatcatttgaatggaattaaattaaatataataaattgatttattaaaatgtttaagtgtaattagccccttaatgggtcacttcatgtataattttataccttgaagggcccactacaactcctatagctctgcaggagttgaagaaggtgactttgcccaaaacctgatactaattttcaaaggaatgtatgcagcaaagtctgcaagtggcatgggcaaactgtataactggaaactctccaaatgacctttaatgtataacaaaatgtttattaaaggacagcattaaaggataac

SEQ ID NO: 263491 - DNA, 537 bp, Homo sapiens
tcagaatgagaaagcaagcagttagaaagaagaatttctttatcaatctaacaaatcaccatatcataggactctaggtaaaataaagaataataattsaatggttaaatcatgggcagagacataattctttatttttgtctattgttactgaaaaacggcagtagtactaaatttttaaaataataaccatttctaagaaaatagcatttctttgaaacttttctttgtagtgtctagaatactgtttgggatgtcattggtgtttaaaaatttatagactgataaaaataacactgaaaatatccttgcttggatatttcacatggaaaaacaaagctagccataagtaagtgaaatggcactagcagaaaatagacaggtatcacttattttgtgaaacagaatgcttcttgaaattctctgtataaaaacaaatatgtaagcaaatgttttggcttctcagtttaattttgacatccacattcattgtagagatgatttactttatcttaatttcttattactgttgattgc

SEQ ID NO: 263492 - DNA, 635 bp, Homo sapiens
taaacataaaaaaccctacttaaatagaaagtgatgtaaaacaacagcgatttgttgaaaagatgtcagaatgagaaagcaagcagttagaaagaagaatttctttatcaatctaacaaatcaccatatcataggactctaggtaaaataaagaataataattcaatggttaaatcatgggcaragacataattctttatttttgtctattgttactgaaaaacggcagtagtactaaatttttaaaataataaccatttctaagaaaatagcatttctttgaaacttttctttgtagtgtctagaatactgtttgggatgtcattggtgtttaaaaatttatagactgataaaaataacactgaaaatatccttgcttggatatttcacatggaaaaacaaagctagccataagtaagtgaaatggcactagcagaaaatagacaggtatcacttattttgtgaaacagaatgcttcttgaaattctctgtataaaaacaaatatgtaagcaaatgttttggcttctcagtttaattttgacatccacattcattgtagagatgatttactttatcttaatttcttattactgttgattgccagacacactttagtatttacataatggaaaat

SEQ ID NO: 263493 - DNA, 598 bp, Homo sapiens
tggatatttcacatggaaaaacaaagctagccataagtaagtgaaatggcactagcagaaaatagacaggtatcacttattttgtgaaacagaatgcttcttgaaattctctgtataaaaacaaatatgtaagcaaatgttttggcttctcagtttaattttgacatccacattcattgtagagatgatttactttatcttaatttcttattactgttgattgccagacacactttagtatttacataatggaaaatttctccacygccctctcttagagtttcttattagttaataattatgtcattaaaatttctattttaaaaaattattaatctgatttctgtaagagtttctcagaggtgtgtatgaaatatttaattacatttcttatcacaatttctgtcaattggtatgtgtttagagtccatttctaggaaagcatatgttcttaattatcattcttacatatttatattccttcactcatgtataaaatcttaatttgtcacttaatgcttattttatcatttatcgcaattttaatcttttttctacaatttacaatataatttcctttccaaactgatatttttaa

SEQ ID NO: 263494 - DNA, 598 bp, Homo sapiens
tggatatttcacatggaaaaacaaagctagccataagtaagtgaaatggcactagcagaaaatagacaggtatcacttattttgtgaaacagaatgcttcttgaaattctctgtataaaaacaaatatgtaagcaaatgttttggcttctcagtttaattttgacatccacattcattgtagagatgatttactttatcttaatttcttattactgttgattgccagacacactttagtatttacataatggaaaatttctccaccgccctctcttagagtttcttattagttaataattatgtcattaaaatttctattttaaaaaattattaatctgatttctgtaagagtttctcagaggtgtgtatgaaatatttaattacatttcttatcacaatttctgtcaattggtatgtgtttagagtccatttctaggaaagcatatgttcttaattatcattcttacatatttatattccttcactcatgtataaaatcttawtttgtcacttaatgcttattttatcatttatcgcaattttaatcttttttctacaatttacaatataatttcctttccaaactgatatttttaa

SEQ ID NO: 263495 - DNA, 598 bp, Homo sapiens
tggatatttcacatggaaaaacaaagctagccataagtaagtgaaatggcactagcagaaaatagacaggtatcacttattttgtgaaacagaatgcttcttgaaattctctgtataaaaacaaatatgtaagcaaatgttttggcttctcagtttaattttgacatccacattcattgtagagatgatttactttatcttaatttcttattactgttgattgccagacacactttagtatttacataatggaaaatttctccaccgccctctcttagagtttcttattagttaataattatgtcattaaaatttctattttaaaaaattattaatctgatttctgtaagagtttctcagaggtgtgtatgaaatatttaattacatttcttatcacaatttctgtcaattggtatgtgtttagagtccatttctaggaaagcatatgttcttaattatcattcttacatatttatattccttcactcatgtataaaatcttaatttgtcacttaatgcttattttatcatttatcgcaattttaatmttttttctacaatttacaatataatttcctttccaaactgatatttttaa

SEQ ID NO: 263496 - DNA, 525 bp, Homo sapiens
tcttataagggcaactgacctttccaattaggatcccacctatatgatctcctttattacttccacagaggccctatctgcaaataaaatcacattgagggtaaaagctttaacatatgagcattagggggacacaaaaaatcagtccataacaaataatgacagatgaattactgccactactttaaggtcaatctttgttactcctaacatgtttaccaactggaaaccaaaaaaattgcctatggacatttcatatargaatccacaaatactggctgggcctagtcttaacctgggccaaggaagggtttggataatattgataccacattaaagatggtcttaattcaatgctttagtttgcacattggttctaattgtcagttgaataagggaagatacagagcattgctatattaagcaataagaaagtcagctattacaaatagaggtatattctattttttttttttctttcatagatagattcttgctctgtcacccaggctggggatggagtgc

SEQ ID NO: 263497 - DNA, 479 bp, Homo sapiens
tcttataagggcaactgacctttccaattaggatcccacctatatgatctcctttattacttccacagaggccctatctgcaaataaaatcacattgagggtaaaagctttaacatatgagcattagggggacacaaaaaatcagtccataacaaataatgacagatgaattactgccactactttaaggtcaatctttgttactcctaacatgtttaccaactggaaaccaaaaaaattgcctatggacatttcatataggaatccacaaatactggctgggcctagtcttaacctgggccaaggaagggtttggataatattgataccacattaaagatggtcttaattcaatgctttagtttgcacattggttctaattgtmagttgaataagggaagatacagagcattgctatattaagcaataagaaagtcagctattacaaatagaggtatattctattttttttttttctt

SEQ ID NO: 263498 - DNA, 608 bp, Homo sapiens
attaaggacacactagatcccagagaggagaacatcaccaaacagtctccatgatggtgaccagctgatgaaaaggagtgaagccctaatatataagagaaacagagagcctcctgctgtgaatcaccttttcaatgtggacccaagcaacccaggctgatagagagaacattgtttctctcaaaccctgaagctaactaggggaaaggcttggagaagtcatgtgggaaaaacactggaaaaactgcacacactttcccagagctgggactgagagcagaacaccatttttattcctgcacatacaaagccaccttcrttggtgactgagctgcatggatgtgcaggcattttagcctcaagccagagatgagcacctgttctggaccaagataggggcctctacagacagaactgtggaaagtgcttcaacagttggcactggaattgtgctcttctgcatcatatgcctggagcaggaggagagctactacagctgcagtttctcctgggcagtgagacttgcagccaaagccagcttgttgacctggaactaattttcatgtgccattgttgtgtgccctaccctgctcctctgagactgcaat

SEQ ID NO: 263499 - DNA, 593 bp, Homo sapiens
aacaaataaacttctgaagaatccaggaaattaaagaaggattaacatctgaaaaagaaatcaatcaggactactggcattgaaaaatcttgcttaaggaatttaaaaatacaattgaaagttttatcaatagactggatcaagtagaagaaaaaatttcagagcttaaagacaggtctttcaaactaagccagtacaacaaaaataaagaaaataagaaattttaaaaaygaataaagtatttgagaagtatggaattatgtaaagcaaccaaatctatgatttattggcattgctgagaaagaaggagaaaaaattatcaatctgggaaatatatttgaagaaacaattcaagaaaatttcccaaatcttgctagaaaggtagacatctagatataaaaaaatccagaaaacatatgcaacatactctgcaaagtgaacatcactgatatggtttggctgtgcctcacccaaatcttatcttgaattatagcttccacaattcccacgtcatgggagggacccagtagaaggtaattgaatcatgagggtgggtctttcccatgctgttcttgtgatagtgaataagtctc

SEQ ID NO: 263500 - DNA, 614 bp, Homo sapiens
agacttaagacaagattgagaataaaaacaaataaacttctgaagaatccaggaaattaaagaaggattaacatctgaaaaagaaatcaatcaggactactggcattgaaaaatcttgcttaaggaatttaaaaatacaattgaaagttttatcaatagactggatcaagtagaagaaaaaatttcagagcttaaagacaggtctttcaaactaagccagtacaacaaaaataaagaaaataagaaattttaaaaatgaataaagtatttgagaagtatggaattatgtaaagcaaccaaayctatgatttattggcattgctgagaaagaaggagaaaaaattatcaatctgggaaatatatttgaagaaacaattcaagaaaatttcccaaatcttgctagaaaggtagacatctagatataaaaaaatccagaaaacatatgcaacatactctgcaaagtgaacatcactgatatggtttggctgtgcctcacccaaatcttatcttgaattatagcttccacaattcccacgtcatgggagggacccagtagaaggtaattgaatcatgagggtgggtctttcccatgctgttcttgtgatagtgaataa

SEQ ID NO: 263501 - DNA, 595 bp, Homo sapiens
atacgccatattaccagtgatgttaacgataaacatttaattaggatgatgtctgccagattccccccttgtaaggcatgctgtttttccctttgtaaccaataaatatatattgaaggagatattttgaagctatgtaaaaaatcctatttttctgcaaatttttgcccactgaatttagcattgatcatgcctataatgattaaagttaaaaaaatwgttagacagatactattgatatgtatgtaaactgattccccccaaaattacaatcccagttaaattttatatagagagtagtagttggaaatatactgctttgaaagaatcattgctacctgaatgtactaaatcttaaagtataatttttgtaattcttttataactgactctgaaattcccagttttgtagcaactaaaagtataggcaatggttgtaagaaggaattttatttctgtaaagtatcgaacattgttttgcatataacttttattgttttttataaataatgtatgttagacctttttctggcttcgtaatttttttattactagtttatcttcttttattttattattattattatttttgaga

SEQ ID NO: 263502 - DNA, 608 bp, Homo sapiens
tgacttttccaggtgtggatagcaagctgttgatggatctacaattctggggtctgtaagatagtgacccttttctcacagctccactaggcagtgctccagtggggaccctgtgtggaggctccaaccccacattttcccttcatacttcttgagtagaggtccttcatgagggcttctacccctgtaataggcttctgcctggacattcaggtttttccttacatactctgaaatctaggtggaggctcccaagcctcaactcttgcactctgtacactcasaggcttaacaccacaaggaagcagccaaggcttatgacttgcaccctcagaagtggaggcacgagctgtttctggggccattttagccatggctggagatagagcatctaggactgagcatgcaggcattcagtgtctccacggttgtccagtgtggtggggccctggtacctggccctacaaaaccattctttctttctagtcctctgtgcttgtgatgggagtggctgcagcagaggtctctaaaatgcttttgaggcttttctgtggttttgattatcagaatttgccttccttttagttgtgcaaatttgtgcagcccac

SEQ ID NO: 263503 - DNA, 608 bp, Homo sapiens
tgacttttccaggtgtggatagcaagctgttgatggatctacaattctggggtctgtaagatagtgacccttttctcacagctccactaggcagtgctccagtggggaccctgtgtggaggctccaaccccacattttcccttcatacttcttgagtagaggtccttcatgagggcttctacccctgtaataggcttctgcctggacattcaggtttttccttacatactctgaaatctaggtggaggctcccaagcctcaactcttgcactctgtacactcacaggcttaacaccacaaggaagcagccaaggcttatgacttgcaccctcagaagyggaggcacgagctgtttctggggccattttagccatggctggagatagagcatctaggactgagcatgcaggcattcagtgtctccacggttgtccagtgtggtggggccctggtacctggccctacaaaaccattctttctttctagtcctctgtgcttgtgatgggagtggctgcagcagaggtctctaaaatgcttttgaggcttttctgtggttttgattatcagaatttgccttccttttagttgtgcaaatttgtgcagcccac

SEQ ID NO: 263504 - DNA, 549 bp, Homo sapiens
cttttctgtggttttgattatcagaatttgccttccttttagttgtgcaaatttgtgcagcccacttgaagtcctcccccaaaaaagggcttttcttttataccacaaaactaggctgcaaattttctaaacatttgtgctctgctttcctkttaaatataaattccaatttcaagttatttctttttcatgcctatgagcataggctttcaaaagcacacaggtgaactcctgaacactttgccactcagaaatttcttccaccagattctctaaatcattacttacaagttcaatgttccacatattcctacagcagggacacaatgcagtcagtctctttgctaacacataacaaaagtgacctttactctggcttccaataaggtccttatttccccatatgagacctaatcagcctgtactttattgtccatatcacaatcagcattttagtgacaactatttaagcagtctagggggttccaaagttttctcatcctcctgttttactctgagtgttccatactcttttaatctctgcccatt

SEQ ID NO: 263505 - DNA, 598 bp, Homo sapiens
tttgtggtgagaacatttaaaatcctttctttttgctattttgaaatatacagtacattgctattaagtatagtcatctggctgtgcaataaaacaccagaacttacccctcctgtctgtgactttgtaccctgttcaccacccctccaatcctctagtaactaccattctactctctacttctatgagcctgactttttaaaattccacatgtaagtgagattacatggtattattctctctgtgcctgacttatttcacttaacayaatgtcctctaaatttatccatgatattgcaaatgacagaatttcttttttttgttatgctgcatagtgttctattgtgtatatatagcacaattttaaatcaatttatctgttgatagacaattagattgtttttaacatctttgctctcataaataatgctgccaagatcatgggaatacacatgtacatacagcatactgatttcacttcctttgggcatatacccattggtgggattgctgaatcatatggtcatactagttttagatttttgaaaaatttccatactgttttccaaactgacagtaattattcacgttatcacca

SEQ ID NO: 263506 - DNA, 598 bp, Homo sapiens
tttgtggtgagaacatttaaaatcctttctttttgctattttgaaatatacagtacattgctattaagtatagtcatctggctgtgcaataaaacaccagaacttacccctcctgtctgtgactttgtaccctgttcaccacccctccaatcctctagtaactaccattctactctctacttctatgagcctgactttttaaaattccacatgtaagtgagattacatggtattattctctctgtgcctgacttatttcacttaacacaatgtcctctaaatttatccatgatattgcaaatgacagaatttcttttttttgttatgctgcatagtgttctattgtgtatatatagcacaattttaaatcaatttatctgttgatagacaattagrttgtttttaacatctttgctctcataaataatgctgccaagatcatgggaatacacatgtacatacagcatactgatttcacttcctttgggcatatacccattggtgggattgctgaatcatatggtcatactagttttagatttttgaaaaatttccatactgttttccaaactgacagtaattattcacgttatcacca

SEQ ID NO: 263507 - DNA, 598 bp, Homo sapiens
tttgtggtgagaacatttaaaatcctttctttttgctattttgaaatatacagtacattgctattaagtatagtcatctggctgtgcaataaaacaccagaacttacccctcctgtctgtgactttgtaccctgttcaccacccctccaatcctctagtaactaccattctactctctacttctatgagcctgactttttaaaattccacatgtaagtgagattacatggtattattctctctgtgcctgacttatttcacttaacacaatgtcctctaaatttatccatgatattgcaaatgacagaatttcttttttttgttatgctgcatagtgttctattgtgtatatatagcacaattttaaatcaatttatctgttgatagacaattagattgtttttaacatcttygctctcataaataatgctgccaagatcatgggaatacacatgtacatacagcatactgatttcacttcctttgggcatatacccattggtgggattgctgaatcatatggtcatactagttttagatttttgaaaaatttccatactgttttccaaactgacagtaattattcacgttatcacca

SEQ ID NO: 263508 - DNA, 621 bp, Homo sapiens
taactgtgtaggttgatttctggacttcatattcttttcgattcgattggtcaatgtggctgtttttaatgccagtatcatactgttttgtttgtcatagctttgtaatatattttgaaatctggtagtgtgatggccccagctttgttctttttggtcaaattgttttggctattcagggtcttttatggtyccttacaaattttaggattttgtattacatttctttaaagaaggacattggaattttgataggaattgctttaaatttttatatagctttggataatattgacatttttgcaatattaattcttcagtccataaacactgaatatttctccatttatttgtgtaatttcttctctcatcaatgttctatcagtttcagtatagacatctatcaattccttgttcaaatttactcttaagtattttatattttatatgctattgcaatggaattgttttgttagtttcacttagttaatttttagtgtacagaattgctagtaattctgtgagctgattttgtactctataactttaacaaattctttaattagttcaaattttactggtgaagccttcagggtttatatcgtatcatcaacaaacaga

SEQ ID NO: 263509 - DNA, 621 bp, Homo sapiens
taactgtgtaggttgatttctggacttcatattcttttcgattcgattggtcaatgtggctgtttttaatgccagtatcatactgttttgtttgtcatagctttgtaatatattttgaaatctggtagtgtgatggccccagctttgttctttttggtcaaattgttttggctattcagggtcttttatggttccttacaaattttaggattttgtattacatttctttaaagaaggacattggaattttgataggaattgctttaaatttttatatagctttggataatattgacatttttgcaatattaattcttcagtccataaacactgaatatttctccatttatttgtgtaatttcttctctcatcaatgttctatcagtttcagtatagacatctatcaattccttgttcaaatttactcttaagtattttatattttatatgctattgcaatggarttgttttgttagtttcacttagttaatttttagtgtacagaattgctagtaattctgtgagctgattttgtactctataactttaacaaattctttaattagttcaaattttactggtgaagccttcagggtttatatcgtatcatcaacaaacaga

SEQ ID NO: 263510 - DNA, 621 bp, Homo sapiens
taactgtgtaggttgatttctggacttcatattcttttcgattcgattggtcaatgtggctgtttttaatgccagtatcatactgttttgtttgtcatagctttgtaatatattttgaaatctggtagtgtgatggccccagctttgttctttttggtcaaattgttttggctattcagggtcttttatggttccttacaaattttaggattttgtattacatttctttaaagaaggacattggaattttgataggaattgctttaaatttttatatagctttggataatattgacatttttgcaatattaattcttcagtccataaacactgaatatttctccatttatttgtgtaatttcttctctcatcaatgttctatcagtttcagtatagacatctatcaattccttgttcaaatttactcttaagtattttatattttatatgctattgcaatggaattgttttgttagtttcacttagttaatttttagtgtacagaattgctagtaattctgtgagctgattttgyactctataactttaacaaattctttaattagttcaaattttactggtgaagccttcagggtttatatcgtatcatcaacaaacaga

SEQ ID NO: 263511 - DNA, 377 bp, Homo sapiens
gagaatcccttaaacctgggaggcggagactgcagtgagccgagactgcgccattgcactccagcctgggcaacaagagtgaaactatctcaaaagaaaaaaacaaaaacaagaacaacaacaaaaaagcaaacaaacagcttcttcattcttcactcacttttyatttgattgttattatcctgacaattagctcaatacatcagcctctatttggcaaagatatattttaggtagtaaatgaactgtgcttgagcttcatgattgggcatgaatcattgcctttgcaatagccaaatctgtgaagacagctgttgagacagtttcaactaatgataattaaaaaatcataaacagcaacttacaatgtgtctcaa

SEQ ID NO: 263512 - DNA, 603 bp, Homo sapiens
catgacatgagtttaccaatataacaaaccttcacatgtaccactgatctaaaataaaagttataaaactaaatatttgttggtgwatatgttatttatatataataaatattcattttattcatatatatttataagatatatttatatataccttttatgtccatgaaagtttggttcatgctttataggaactaattttgatgacacacatcaaggacccactgtgtattagaacccacacttagatccatttctcaaagcttattctccttgcctcataaagcaaaatctgacagaagtgtaaggagaaatagaagaattgaaaataacacagactttaatatcctactttaaataattgaataactggaaacaaaataaacaaaaaaataaaagactgcaataacactgggaaccaaagaaatctaacagagatatatgaaatactccacctaacaacaatataacatacattattctcaaatgcacatggaacatactccaggatgtacaacatgctaggccataaagcaaacataaataatttaaaaggaatgagatagtacatatattctatgaatacaatgggatacaattgtg

SEQ ID NO: 263513 - DNA, 603 bp, Homo sapiens
catgacatgagtttaccaatataacaaaccttcacatgtaccactgatctaaaataaaagttataaaactaaatatttgttggtgaatatgttatttatatrtaataaatattcattttattcatatatatttataagatatatttatatataccttttatgtccatgaaagtttggttcatgctttataggaactaattttgatgacacacatcaaggacccactgtgtattagaacccacacttagatccatttctcaaagcttattctccttgcctcataaagcaaaatctgacagaagtgtaaggagaaatagaagaattgaaaataacacagactttaatatcctactttaaataattgaataactggaaacaaaataaacaaaaaaataaaagactgcaataacactgggaaccaaagaaatctaacagagatatatgaaatactccacctaacaacaatataacatacattattctcaaatgcacatggaacatactccaggatgtacaacatgctaggccataaagcaaacataaataatttaaaaggaatgagatagtacatatattctatgaatacaatgggatacaattgtg

SEQ ID NO: 263514 - DNA, 603 bp, Homo sapiens
catgacatgagtttaccaatataacaaaccttcacatgtaccactgatctaaaataaaagttataaaactaaatatttgttggtgaatatgttatttatatataataaatattcattttattcatatatatttataagatatatttatatataccttttatgtccatgaaagtttggttcatgctttataggaactaattttgatgacacacatcaaggacccactgtgtattagaacccacacttagatccatttctcaaagcttattctccttgcctcataaagcaaaatctgacagaagtgtaaggagaaatagaagaattgaaaataacacagactttaatatcctactttaaataattgaataactggaaacaaaataaacaaaraaataaaagactgcaataacactgggaaccaaagaaatctaacagagatatatgaaatactccacctaacaacaatataacatacattattctcaaatgcacatggaacatactccaggatgtacaacatgctaggccataaagcaaacataaataatttaaaaggaatgagatagtacatatattctatgaatacaatgggatacaattgtg

SEQ ID NO: 263515 - DNA, 524 bp, Homo sapiens
aattattaacaatagaaatgtaatatgacataggcattcctgttttgggtatacacccaaagaaaataaaatcaggactttgtagagatatctggactcccgtattcactgtagcactattcacaagcgccaagatatggaaacaaactaagcatctattgacagatgaatgcataatgaaaatgtggtatatatacacaacggaatgctattaagcctttcaaaaaaggaaatcttgtcatttgtgacagaatgaacctcctgggcattatattcagtgaaataagccaggcacagaaagataaataccaaataatctcacttatatatggaatctaaaaaagttgaacctgtagaaacacagtaaaatggtggttgccagagactggaggtgaggctttgtaracagttgtggtcaaaggaccaccaaaattttattttagataagaggaataagttcaagagatctatagtacatcatactgactataattaacaatatattgtatattttacaattgctg

SEQ ID NO: 263516 - DNA, 577 bp, Homo sapiens
aaagaaaattttaatgcatattcaaaaatttcctttttgggaggcaaagtgtaaaacacttataaatctagacgtcagtggtcagtccactattattttatttagatttgaatttactataggtgatttttacagctccatatttaaattttcacaactcaagacattcctttataatgccactgtactgtcattttaaaaaattatgttcattgatgtacaatatttgtacatatttatcgagttcatggaatattttgttacatgcatacaatgtgtaataatcaaatcaaggtaactgggatattcatcacctcaaacgtttatcattttttgtgtgtgctgaatgcattctaaaacttttctaatagttattttgaaatatacaataaattactgttacctatagtcaccctactgtgctatggaacactgsaacatatttcttctatatgactgcatttttgtgcccattaaccaacctcactttaaaccccctggcccctacccatccaagcttctggtaacaccattctactctctagctccatgaaagaaatacatttttgtagctact

SEQ ID NO: 263517 - DNA, 573 bp, Homo sapiens
tactattatatcctcaacgtatagcacaattttggcacataagtagattttcaataaatatttgttgagtgaatactgtttcctgtcctatagcaagagtctctacaggattgactaaacctaagatttattgatatgtctcagttgaataagattaatttktgaatgtgtgatatttagaaagaatatttccactggaagtgcgtacttggtgacctggatatggattcatgttgcatttcatttgatgtatccaaggaataaaaaacatattaaagtgctcccagatttatatttataccattattttctcaaatatagggtacaaatattatgtatatgcacctgggttgctatgtaagtacatgactagctaggaagaaaaagttggaaatgttacacttctaaattttcttctccacttattcctcttgctttttctctagcttatcctgtctaaccctgtggccactgggctctcattagcacctcaatgacagatttctcataaaattaaagaacaggcaaaaataaatatagtcatctacttattgacaaatcttcttagcacag

SEQ ID NO: 263518 - DNA, 578 bp, Homo sapiens
taaacctagtacttaatagctatttttttctgctcctctccyaccctcttcccaccttccaccctcaagtagaatccagtgtctgttgttcccttctttgtggtcatgagttcacatcattcagctttcacttataagtgagaacatgtgttatttggttttctgttcctgtagtagtttgctaaggataatattttacttttttttctgtctttctgaataatttaaaactgctatgcaaataattggataaaatatttctgtgttttatatataaactatatttaaactatatatataaactatatttaatatagaatcaaagttgtttcataaggaaacacttgacataggatatttgaaatactctaagtagtccatgtcattgtaacaccactttaaaagattccttcagaactgttccactgagtgatttctaaaatggaattttacagtacagtgaatggatatatgaatgtgtgaaaaaataaatacaaacctattgttgctggcatacatgatcattacaccatgaaatacttaaatacatagggcattaatcactgcattatttactc

SEQ ID NO: 263519 - DNA, 569 bp, Homo sapiens
aacaaaacaaaaacactcaatgtttttcatgagtactatgctcatcatacagttaagtagacactgaaaataaacaactaatattttgcagggaggaaaattagaaaaaagaattgtaaccaaattgataatattttgaaattgctacaggatcttgaaaaaaaatactttttttttttttttaaagaagcaacagaaagaggaggggctttccttagtatcagcagaaaagaaaagcaggcataaaaggyataaaagaggatgatatgtgtacaaaactgaatttttctatatgcgtagcaaatctaacataaggaaatatttagcattgtgttgtcaggaactacagtttaaaaatatttaagtgacacaatccagtgctttaaaaatattttgttctattttacttatcaagctataaaatatagttttggaaaattataaaactataggtattaaagcttttaaaatgcttttaaaagaaaacacttaaaaaataatttcgttgattctggtttttcctctatttctgtgtgtgttattttcacaaggcacataagatttgctac

SEQ ID NO: 263520 - DNA, 569 bp, Homo sapiens
aacaaaacaaaaacactcaatgtttttcatgagtactatgctcatcatacagttaagtagacactgaaaataaacaactaatattttgcagggaggaaaattagaaaaaagaattgtaaccaaattgataatattttgaaattgctacaggatcttgaaaaaaaatactttttttttttttttaaagaagcaacagaaagaggaggggctttccttagtatcagcagaaaagaaaagcaggcataaaaggcataaaagaggatgatatgtgtacaaaactgaatttttctatatgcgtagcaaatctaacayaaggaaatatttagcattgtgttgtcaggaactacagtttaaaaatatttaagtgacacaatccagtgctttaaaaatattttgttctattttacttatcaagctataaaatatagttttggaaaattataaaactataggtattaaagcttttaaaatgcttttaaaagaaaacacttaaaaaataatttcgttgattctggtttttcctctatttctgtgtgtgttattttcacaaggcacataagatttgctac

SEQ ID NO: 263521 - DNA, 569 bp, Homo sapiens
aacaaaacaaaaacactcaatgtttttcatgagtactatgctcatcatacagttaagtagacactgaaaataaacaactaatattttgcagggaggaaaattagaaaaaagaattgtaaccaaattgataatattttgaaattgctacaggatcttgaaaaaaaatactttttttttttttttaaagaagcaacagaaagaggaggggctttccttagtatcagcagaaaagaaaagcaggcataaaaggcataaaagaggatgatatgtgtacaaaactgaatttttctatatgcgtagcaaatctaacataaggaaatatttagcattgtgttgtcaggaactacagtttaaaaatatttaagtgacacaatccagtgctttaaamatattttgttctattttacttatcaagctataaaatatagttttggaaaattataaaactataggtattaaagcttttaaaatgcttttaaaagaaaacacttaaaaaataatttcgttgattctggtttttcctctatttctgtgtgtgttattttcacaaggcacataagatttgctac

SEQ ID NO: 263522 - DNA, 617 bp, Homo sapiens
atagtaatttaaaggtttatatggacattattgtgtgaagattagtttttacttctctgagttaaattcccaggaatgcaatactgggtcatattgcattagtgtgctgaattttataagaaaatgtcaaattgtttcctagagtggttttaccattttacattaccactaacaatgtgtatcagttatccagttctctgtatscttgttggcatttagtgttctcactgcttttttattttagctattgtaatagacatatagtgtatcctattgtcacttaaaaacacttttatttcttctagactttaggttgtttataacaattttcattttaatttgcattttcctatgatattgaacatctttttatgtgtttatttgccatttgtatatattattctgtgaaatatttcttctctgttcttctctgttctcttttctgtgaagttttcttctctgttttagtcatcatgctccatctcttttgcccatttttcaattgcatttttttaactattgagttttgaaagttcttttgttgatacttaccttttgttggatgcatggattgcaaatatttactcccagactaaatcatgtcttttattactttt

SEQ ID NO: 263523 - DNA, 617 bp, Homo sapiens
atagtaatttaaaggtttatatggacattattgtgtgaagattagtttttacttctctgagttaaattcccaggaatgcaatactgggtcatattgcattagtgtgctgaattttataagaaaatgtcaaattgtttcctagagtggttttaccattttacattaccactaacaatgtgtatcagttatccagttctctgtatccttgttggcatttagtgttctcactgcttttttattttagctattgtaatagacatatagtgtatcctattgtcacttaaaaacacttttatttcttctagactttaggttgtttataacaattttcattttaatttgcattttcctatgatattgaacatctttttatgtgtttatttgccatttgtatatattattctgtgaaatatttcttctctgttcttctctgttctcttttctgtgaagttttcttctctgttytagtcatcatgctccatctcttttgcccatttttcaattgcatttttttaactattgagttttgaaagttcttttgttgatacttaccttttgttggatgcatggattgcaaatatttactcccagactaaatcatgtcttttattactttt

SEQ ID NO: 263524 - DNA, 559 bp, Homo sapiens
gccccaggaataggaatagtgatgccatttctgatgaagcctgaaaaaatgttcattttggggtatttagaatattataattcttctacagrtatagcatgtgatgtaacttattggtatttctctatgttttctgtgtttacaatggtcagtttctagaactttcacagtcccagaagtagaaggagttgttttctactgtctgaagttagtgccagaaaaagaatatttagaagattttgattatatttattatacctgtgtagaggcctggaagttaatcctctacattttaatattcatagtgtgtctatttcccatatctacatctctaccattcccctgtctccaaaagtttcaccattgtgatactctttccagcaaaatttaaaaggcccagttgaatttactaaaatattacatttgaaagcttataaaaatatgcaatgtttaacacaattttttttaaattgtatatcacaaaattacctgcagagatattttaaaaatactgaggcccaggaccagcccaaaccaattaaactgaaattttgtggac

SEQ ID NO: 263525 - DNA, 559 bp, Homo sapiens
gccccaggaataggaatagtgatgccatttctgatgaagcctgaaaaaatgttcattttggggtatttagaatattataattcttctacagatatagcatgtgatgtaacttattggtatttctctatgttttctgtgtttacaatggtcagtttctagaactttcacagtcccagaagtagaaggagttgttttctactgtctgaagttagtgccagaaaaagaatattyagaagattttgattatatttattatacctgtgtagaggcctggaagttaatcctctacattttaatattcatagtgtgtctatttcccatatctacatctctaccattcccctgtctccaaaagtttcaccattgtgatactctttccagcaaaatttaaaaggcccagttgaatttactaaaatattacatttgaaagcttataaaaatatgcaatgtttaacacaattttttttaaattgtatatcacaaaattacctgcagagatattttaaaaatactgaggcccaggaccagcccaaaccaattaaactgaaattttgtggac

SEQ ID NO: 263526 - DNA, 559 bp, Homo sapiens
gccccaggaataggaatagtgatgccatttctgatgaagcctgaaaaaatgttcattttggggtatttagaatattataattcttctacagatatagcatgtgatgtaacttattggtatttctctatgttttctgtgtttacaatggtcagtttctagaactttcacagtcccagaagtagaaggagttgttttctactgtctgaagttagtgccagaaaaagaatatttagaagattttgattatatttattatacctgtgtagaggcctggaagttaatcctctacattttaatattcatagtgtgtctatttcccatatctacatctctaccattcccctgtctccaaaagtttcaccattgtgatactctttccagcaaaayttaaaaggcccagttgaatttactaaaatattacatttgaaagcttataaaaatatgcaatgtttaacacaattttttttaaattgtatatcacaaaattacctgcagagatattttaaaaatactgaggcccaggaccagcccaaaccaattaaactgaaattttgtggac

SEQ ID NO: 263527 - DNA, 569 bp, Homo sapiens
ttatttatttcatttatctcacaaatatttattgaggactaaagaataaataaaaggatgaaaacatatggcatctgctcagtttaaatatcagcgtaaacaaacaagcaacaaagtaatttatttagtgtggaggggtaggggaatcatatwctccatgagcaaaagaaagcattttcaaagtgttttacacagatatgtttgtcttctgcaatatttgtcaacctataagatagacagtgtctaaattgttttctcccacatagattccttttgtcttttgtttcccctctttctctttaaactgtaacttcttaaaacagtggttattaaattatctacaatactaggtttttaaaaagcccagctgttctgcggattccctgagtgatgtattaaaatacatattgtgtgattttttaatttacctggagaacttggattataagagtcatagtaaagatccaaatatggctaaacaatggcctataggccctgaggcagtgaaacacaagttctcatggttgatggtcttgacatgattcctgtcattctctggcaatggacat

SEQ ID NO: 263528 - DNA, 525 bp, Homo sapiens
tgcaggtttattgttaagagtattttgcatgatgctgaggtttggacttctattaattctgtcacccagatagtgaacatagcacccaataggcagtgtttcagcccttgctcacattccttctctccattttggagactctattgttcccatctttatgttcacgtgtaccaaaggtttagctcccacttacaagtaagaacatctaatatatggttttctgtttctgtgttaattcacttaggattatggcctccagatgcattcatgtcgctgtaaatgacataatttgttcctttttatggttgcatagtattccatgktatacatgtatcacatttcctttatccagttcaccactgaatcaacctaagttgattccatgtctgccactgtgagtagtgcagtgataaacatacaagtatgggtgtctttttggtagaaagatttattttccttttggtatataccgagtaatgagattgctgggtcaaatgatagttctgttgttgttgtttttgttgt

SEQ ID NO: 263529 - DNA, 616 bp, Homo sapiens
aatctgatgcctctagctatattctttttgcttagggttgctttggctatttggaattattttctatatgaattttagaatggctttctaattctgtgaaaattgatgctggtgttttgataggaatggtgttgaatctgtggattgctatgtgcagtatgaacattttaataatattgattattgcaatccatgagcatgaaatgattttttatttgtttgtgtcatctctaatttctttcagcatcttcttggttagatgtattcctagatattttatttttgtagctattgtaaatrggattgtattcttgatttatctctcagcttgaatgctattagtgtataaaaatgctactaatgtttgtatgttgcctttgtatcctgaaattttactgaagtcacttatctgggctagttgccttttggcttaggggttctagataaaatcatatcatcagttaagacagataatttgactgtttcatttcctatttggatgccttttatttcattctattaactgattgctctctctggggattccagtacgatgttaaatagaagtggtgagattagaaatcctcatcctgttccaatccttaggggaaatgct

SEQ ID NO: 263530 - DNA, 579 bp, Homo sapiens
tcaatgtgtacacagttatgctcccttgcttaggtctggtttggtttctggggaccagtcctcacatcctgcaactttgaacaggccttccaatgtcctccttcttcacccatggtacctgtgttgcccgtattgactttcagtgttttctctcaagagatctctttgaagtgtgatagtttactcaatattttgtttcctctccatggaagaagagtatcttggctgggtctagtcagatgtcttgttctcctctttaccattttcttcaaaaaggagttctatagtgatgatccatttttcatcatcaatatggttaatacatgggaaagtataaatgaatagtttctcctagattaatttatacccrctttttttctcttaatgtcatgctgtttctttttctcatttccaaacttcttatagacaaggaagatgtgtcttcagaaaacactatgtttcaaataatttgaaaaaaatgttgacatcactgatcattagagaaatacaaatcaaaaccacaatgagataccatctcacgccagtcggaatggtgatcacttaaaaagtcaagaaaca

SEQ ID NO: 263531 - DNA, 602 bp, Homo sapiens
tgtgtatatatacacttaacatatcacacatatatatacatatatatgtgtgtgtgtgtatcagcagatttctcaccagaaacttggatatacatatcagcccacactgccatccaagcttccaatgaaaaatctgttgataatcatactgaggatctctcatatgtgatgagtatcttctcacttgccgctttcaagattttctctttttctttagatagtttgcttataatgtgtgttggtgtagayttctttgaatttatcccacttggggatggttgagcttcttggatgtatatattcatgtatttcatcaaactttaaagttttctttagatattctcgctcccttcctcctccttctggaaaatttatatattgctcttcttcatggtgccctgcaagtctcttatactgtgttcagttttctttgatttttttccctcttttcctcagatcaataagtcccattgtcctatcttcaaatttgcctgttttttcttcttccagctcaaatctgcctttgaatctctttagtgaatttttcattttagttattgtacttttcatctccaaaggcttttcattttctttttaggctt

SEQ ID NO: 263532 - DNA, 524 bp, Homo sapiens
tatcccacttggggatggttgagcttcttggatgtatatattcatgtatttcatcaaactttaaagttttctttagatattctcgctcccttcctcctccttctggaaaatttatatattgctcttcttcatggtgccctgcaagtctcttatactgtgttcagttttctttgatttttttccctcttttcctcagatcaataagtcccattgtcctatcttcaaatttgcctgttttttcttcttccagctcaaatctgcctttgaatctctttagtgaatttttcattttagttattgtacttttcatctccaaaggcttttcattttctttttargcttagctctttaaagatatcaaaatatcttttggtatttcatttgttcatccgttgtttcttgactttatccacattttctttgacttttttatgcatctttaagccagttgttttaaattctttgtctagtccatctaccattagatctctgtcagagatacttttcattggtttattttgttt

SEQ ID NO: 263533 - DNA, 524 bp, Homo sapiens
tatcccacttggggatggttgagcttcttggatgtatatattcatgtatttcatcaaactttaaagttttctttagatattctcgctcccttcctcctccttctggaaaatttatatattgctcttcttcatggtgccctgcaagtctcttatactgtgttcagttttctttgatttttttccctcttttcctcagatcaataagtcccattgtcctatcttcaaatttgcctgttttttcttcttccagctcaaatctgcctttgaatctctttagtgaatttttcattttagttattgtacttttcatctccaaaggcttttcattttctttttaggcttagctctttaaagatatcaaaatatcttttggtatttcatttgttcatccgttgtttcttgactttatccacatyttctttgacttttttatgcatctttaagccagttgttttaaattctttgtctagtccatctaccattagatctctgtcagagatacttttcattggtttattttgttt

SEQ ID NO: 263534 - DNA, 628 bp, Homo sapiens
agcctatttctaacaatgtgcttatcatgaaaattaaaaccagtaactgtaatttaaaaaataaaatattagaacatggttcataagaatagaaggaaagaagccaattatctttatttttactatgcagaaaattggtattgggttcacctgtatttctggataaatttagcttttttagtaagacaattattatgcactttgacatcagagtaacatcccttgttttgttaaagatataattaatagcataaagacctaattttaatgaagaacctcaccctgttgtcctgcttttttagcagagctttaaaaatgacaaaagtcaattaatttccttagtctttaaattctggttccctattctcaagttatgattaatgactattaaactgtaggatttcaggcattcagcaaaaaataaacaacatggagacaaaaaacatgaataacctaraaaataatgacttcattcctcagtaatgagacatgtccctgcttttgtgataataaagaaataagcaatgggataaagtgctgccttttctttgagaagtagttggtatttagcttcctttagaacctatttgacctgtcagcatttgttttcttatttatatgaagcttc

SEQ ID NO: 263535 - DNA, 562 bp, Homo sapiens
tgcatttaatactctggaacattctggcatcagaatatatatacatatatatgtgtatatgtatatgtgtatatgtgtatatatatacacatatatatgtgtgtgtgtgtgtgtgtgtgtgtgtgtgtatagggagagagagagagtgtctcactctttcacccaggattgagtgtactggcacaatcacagctcactgaaacctaaaactgaactcaagcaatcctcccctctcagcctcctgagtagctgggackacaggtgcatgccaccatgccctgctagttaagaaaaaaaaaaaaattatagagacagagtctcaccatattgcctaggctggtctcaaactcctgacttcaagtgatcctcctacttcagcctcccaaagcactgtaattaaaggaattagccactgtgcctgggttgttattgttgatatgtatatacttgattatcatgttctgtgaatcacaaacaatatttagaatagtttagaacaagggtgggcaaacctattctgtaaaggattagacagtaaatattttaggctttgcctgttgca

SEQ ID NO: 263536 - DNA, 520 bp, Homo sapiens
caatgttttatgtagattttgcttcgatagtactttaacttgggtgatacttagaactctacattgaaacttccgtttcgacttactctttgaatgtctgttttgaacactaaagataatttaacttctgcctagttatccacacattattttccattcccttctattaaacttttctaactgactcaaacagtaaacctatataaagtcttgaaatcttgtattttttttttcacttatcattaagtcytaaagtctatgtactcatgacgaattttgatggtttcatccaatatcttatcaggataatctcagagtggtgactacatataaggaggtaaaaggagtttgttgaaattaaagggaaaacacaaaagccacgttctggacgtgtgtgtgaggttaaaggtagggaagtgacatgtgaataataaaccaagaaatatggcaaatccagatgacctataggcagtcatgaaggtccaatgggataaggactagttgatttaagaagaaagac

SEQ ID NO: 263537 - DNA, 628 bp, Homo sapiens
ttaatacatagtgattcacagaaaagctaagaacagagcaaggactgacacatggtgattataatggggagctctgtgcacatccaatatacagtgctttttaattttcaaagcactttacaatgaatgacaagttaaaggtgtaaactccattaaaataatcgaaaaagaaaaagacttctccctcagactggcctcacaatttaaatattccattgtatttgcagcaacattcttgrctgttttctaagggggctttaacaatttttatataccaaaaagtatattctgaataaaaatatttatatcatatgtatgatttttgcaatactaattttcatttttttaacattaggaaaacagttttttttctgtcactgtacagttgctagtcttctaactataaatatttagtcacagtgaattcatttaaatattggaataaattctactagcagttgccatatttccttcagggctctgtatttacttatttatcagagtccccaaattgtatgcttggtttaaatagcttcggggcaaaaatacaataaaattgtattagttaaaaatataactggcatcagcaacatgaaaacataacagcaaaacagcatgcacatataca

SEQ ID NO: 263538 - DNA, 628 bp, Homo sapiens
ttaatacatagtgattcacagaaaagctaagaacagagcaaggactgacacatggtgattataatggggagctctgtgcacatccaatatacagtgctttttaattttcaaagcactttacaatgaatgacaagttaaaggtgtaaactccattaaaataatcgaaaaagaaaaagacttctccctcagactggcctcacaatttaaatattccattgtatttgcagcaacattcttgactgttttctaagggggctttaacaatttttatataccaaaaagtatattctgaataaaaatatttatatcatatgtatgatttttgcaatactaattttcatttttttaacattaggaaaacagttttttttctgtcactgtacagttgctagtcttctaactataaatatttagtcacagtgaattcatttaaatattggaataaattctactagcagttgccayatttccttcagggctctgtatttacttatttatcagagtccccaaattgtatgcttggtttaaatagcttcggggcaaaaatacaataaaattgtattagttaaaaatataactggcatcagcaacatgaaaacataacagcaaaacagcatgcacatataca

SEQ ID NO: 263539 - DNA, 583 bp, Homo sapiens
aaactgcaagtctgattacatcagaatctagctgtagtctttctgtggttcccaaatgcctataaggttatatccaagacattcagcacaacacacaagatctttcaagatctaggccttgcccaccaacctagctttctctttctcccctcttctgctcacacattacacaaaattttattaatactgctggctttgtgcagaaaatcttttgttccatttaattttttcctctgcctgactcttaattctgacccagaacactctgattaattttctgtcatagaaatgcstagtatgaaatccccaagtccaggacagtcttccactctgtgtgttctcctggcattctctcttatcagagcatttaagacattgtttgtaactgcctacatagcctacttatttgaataatcactattctgaaatcttttcaaatgcaaaaaatatgcctcccattttgcatctggactccactgaaacccatttatctgttttttctacttctactcaagtcttgtaaaatccgttttcacacaacagctcgcaaaaactttaagcaatgtaaattaaattatatcac

SEQ ID NO: 263540 - DNA, 569 bp, Homo sapiens
ctcaaagattctgctttgatctttataaaaggaaggtgctaatgtaattgagtttggccccatataaagcaggtagtagctgtcaactttgcaaggatgccagcccaagacgctccctaattttcaaagtactagagaatctaggtttttattggaaattctcagatttttaaaagaccaatagtgtgttcgtcaaacatactgaggaacagtttcaatatatgagctgccagtctttgattcttattttggagaatgtggaaaaatcaatagattacaccttccattctttattaaatatttgaaatctctgacaattacctgaaatacgayttttaaatgttattggttgagctcatactacaggctataaaagtcagatgagccaaggtatgttttgttttgttttcaacgaaagttaagtagaaggaaagaagaaaaaaagccctttcattgctgcatggaagctgggctcttcaccatagagtgatgcacagagctgattgggccttggaggtctatctgagttgtctcttttcttcttcctgaatattgaactaatgtaggag

SEQ ID NO: 263541 - DNA, 595 bp, Homo sapiens
atagcatgtaatattgtttaagtggtgaaaagaaaataaaagtatattctttctataataaaaacatttctgttttcattcacaagaaactattgtcattgtttgtctctaagtatggggaaaagtggctaggaagaatgactgagaaggtatcacaacttttactgtgtccttttttaattgactacctttctttgactacctttctaagagttgtgatagtttggtgctgactcatctaccttcccctctagattccaytggaataagcaacatacattttgaaatcaagttccagagtagtgttattagttaatgacaagtgatcttttagcagaagaatgtaacagaactgactggcatagagaactgactggcacacatgtggatttaactttaacagtggcatcatactctgttctgatctgctatgtaatgaaaattctctatgggcttctgtgaatggcaaaacattattcttgtctatttttggattgttttgttttctttcccctattgttgtatcagtgaatacagaataaaatgatgaatttaatcattgtggaaaaccaatctggattattagaaccaaaaa

SEQ ID NO: 263542 - DNA, 559 bp, Homo sapiens
actatatttagtccaataacctgaaaaacacttctttgattttattaccttttccctgtcttccttcttcatttcattaaatcaccttatataagtacctcgatgtcttatgtctcactaattcctccaccccttgcaatctaacatccaatggcttcccttgatggraatggctgtttcgatggtcaccaggaaagatttcttagtttatgctcttctgtgttttgagtcctactctgccattcagtaactgcatgagtgcagataagttactaaacctctctacattatcgctttctgatctgtagaatagatatgatagtaataactggtagaatgtacaaagagtgcctagaacacagtagaagcttaatgaatgacacttttcactactagtactgcacctcggcttctttctctgcaacacttaaccctgctgcatttcctctccttttaatattttcttatgaattctcacattggattgttctctttagccacatggcatttagagtcctctttttatttcactttcccttgcccattttcctctacctgt

SEQ ID NO: 263543 - DNA, 571 bp, Homo sapiens
atctgttaggcttcactgcatatgtgtgtacataatcatttttttaaaataagctaatatattttggaaaagttacsgaagtatacggtagaagaaaaataaagcagcacaagagtattcaatgaaaagtatctcttcctcctacaatgggtttccagtaactaattctttccagaggcaaccaatttgaactatttcttgtgtatccctccagaaagaattcaaatagagacaagtctatccatgtactgatattgataaatgtatggaaatataatcatagatatttataaatagctaactccctttcaacacatcaaaagcctacatacactgagttctatgccttttttaaattaattaagcttgaaaattagttttcattcacttatgtagattgacacattcttcttcactcaagcatatacctttaatgtatggatgcattgtaattgatgtcaccaggcttgcagtaattatttaaattgttactttcctttccctaatatatacaaaacagcagtagatatcctagtatctttgtgcacttgtgcaaagatatttatgaaaa

SEQ ID NO: 263544 - DNA, 552 bp, Homo sapiens
agagattcagctttattgtttatcctccagattggcaaatgaggtgatactgcatcattaattttgttctctgctatttagattgccaactgtttcatatataaaatccatatacataaatagacctattcctaatgtctctgtgctctttaattattaatatctttattgatatttataaaaagtattttaactactattacattaaattacttctaaatagttggaatatatacagtttctactcattaagattcctctgttttgttttttkttttggtaagattctgaatgatttttctggttttattttttaacttaaaataagcttttagggttgcattgatgttactattttgaaaggattgtttaagagaaaattattatctgtactaatccaagaccaaataatatctatattcaaggctttttttcagattttttgtagaattttggatttgtataagtgttgtatagttcttgtacattttaacccaaaatacattttttatgataaaattttaattggccttttcttctagtatatgctct

SEQ ID NO: 263545 - DNA, 630 bp, Homo sapiens
ccaaataatatctatattcaaggctttttttcagattttttgtagaattttggatttgtataagtgttgtatagttcttgtacattttaacccaaaatacattttttatgataaaattttaattggccttttcttctagtatatgctctctatagatatgaaatctgtttttctgttaattttgaaactagctacctattttttgaattcttagtttatgtaattttaattgattttataattatatgattatattaacaacgtgtaatgacactcttttctaatgttrttcctcatttctaatattatacctcatttctttctattacctaattgtcctaggtagtatttacagaacaacattattggttttatttatgatgttaatgcaaaagtttataatgtttctctatttatatcaaatctaatgaagtatgtcaattcttattttaagagtatttttatcaatgttgaatatcaaatgtattttagttaactatggaactgattatattttatttgacataatagtgtgaagaattattgatatatttttataaataaaacatttttgcacctatattttaattattttaaaatttacttataagacttaagaagacatttaaa

SEQ ID NO: 263546 - DNA, 480 bp, Homo sapiens
tttaatgctaattcccactgatgtgctgctagctgcccgctcaccacttgttttagccgtttttcttggctctgcaagattcccctacaaagtacctctgaagaaagccaggcagtccagaccgccaagcccccgatcaaattagtgctatacagtgagcattkggtacttgccagagtcgcagtgccatttgctgctaatgcatcttccacttttgcatacgaattgggttagtggctcacaagttgggaattctgtgaaagatataaaaatgtccaaaaggtaacatgttattgactgtgcatgacataattcgtatcatctgataatgtgatcagaactccttccctgttctctacaaaggcacagaggaaatggcagataaacaaatacagtgactataacttcttgaggacataggacacacatacttttaatatactttaaatgagtgctttccagtgactgaaagcctaggag

SEQ ID NO: 263547 - DNA, 552 bp, Homo sapiens
caatattaactattacagtctgggaaggttagaataatatttttaggctttatggctggctttggggaaaggggctgctagtgtctatgactcgctctgggaaagacaggttatggttactgtggcttgcctaaggagagaatgaggcatgaaaaacaggaaggtaggagagggtcagggagagactttgcttctgaggtagcttcttaggscttcactttgtggtgctgttttctgagccccaacaaaactctagcagtaccatatgatttctcactgttaagattgctatattttccatctggttttgttcataattttatagaaaagtaaaagtatatttcatcttttaaagttacaatgaaacatttttaagtggataatttaatcttctggtaattaatctcttcctgaaatgtatagtgcactttgtgcatctgaagaaaaaaggctttattctgtattttgttcaccccttttagaaaagcagcaaattcacagtccaataaaaatgaattgactagttactactggactttaaaaatagaaatt

SEQ ID NO: 263548 - DNA, 633 bp, Homo sapiens
ttttgaactttattcttcctgacctcaaagcaggagcatttacataatactgcaaagacccaggcagtttatctgtgctgtgagcccacacattcctatgatgcctttgaatagtcaacattttcatgaccttacttttgttacttgcatccactttcataaaagttgagattgaatcaaaatattttatatcccttatgaaacatatgaacattttgcagcaaatgattattgaatgtaagagctttctctgttttaagtagttggaccctttctcttttcttcaattactctcatatttatgatctctcttcctctctttatcttttgaagrtcaggcaggaagtgttgagttgattacactcctcacttcctggcacagcattataattggatctaggtaaggctttttattttcctcatgccctcccttgggtctctctttctttctttacttttatttcgaaagcctacccctcttcctttcctctgtctctagaggaagtcatttcaatgtagttcatatattctcttataaaaatctatgtttctttgcatacatttttaattatgtaattggtattatacatattacagtctgtcatttaccttttttagtcagcactgtcttta

SEQ ID NO: 263549 - DNA, 591 bp, Homo sapiens
aatgacattttgtgactaatatttgtttttccatttaagaccactgacacagaatcatagaatatatttgagggaagacaacgcagagaatatttgtaaaatatttgtaaatattttcaaattgtattctctgcattgtctcagggctgtcaagaacaactgatggctgaacaggcttgactttggctattcaaacttctccagccaaatctattcacatgttactcatcaatcaatcagtcatttcaattttgtagttttgascactattttattttggagaaaaatatatgaataacaaaaatatatttctctgcttaaaaaatggactaattatgtccaatcattttagctataaggcaactgaaactgagagaaattagacttgcctaatgatacatgtatctccttaaggaaaaacaggtcttagaattcatttcatgaagctccccatccagcactctttgtactacactctattaccaatttcctatctcactttcccttaccatccatgaatgtacctaaaccgttattttaatctcctcatattgttagcatatattcagcataaggtttaaacatttctca

SEQ ID NO: 263550 - DNA, 462 bp, Homo sapiens
tagggtaacaaaataatgcttatacaatcatttctagaataaatgactagagtttggataactactaattcattaaactctaagtgttaactggaaggttgacagatttttgtgtcatgatttgataggcttttattgttaaaagttattttatagaggttaatatgattaagatataaagtttatataaacatcataaagcacattttaaaatrtacatttttagatttaataatgtaatgtgaatattaaaatattttcaagtttattggctattttgataaacagttctgaggttagtttaatatattggacctttcacaaggtaggcttaaaacatagcaacaataagcagacacacacgcacacacacacacacacacacacttacagcaaagccaagccaagcacaagaaaagcaacattgaaatataattttatttaaactcagcttactatctt

SEQ ID NO: 263551 - DNA, 543 bp, Homo sapiens
gtgttagccttcacagctttcatagctagccwatatagtaggttagtttgcatggtatttttttaaaaaaaaattttaaaaaagattacttgctaataattaaaaattgtgagattttaaataaatatctgtatttcttccttctcctcaaaaataaaagatatgtcacaaatggttaatattccttatggcaaaaataagtggagctgagaggtgttctaccataagtgggactttcatttttcccactccatcataattcctgccactcccaagctagttcagatattgcagcctagactcagatcctacttaacatttatgttagagctatttggttttatcacccctgacatactttactcattcataacctgcttaactctattaagatttgaacttctaagtctattcataaataaatgactgccctgtgggtaaacatatgaattaatatctatagcagtgcaaaaagtgactacaaaacttagcaccataaaacatttattgtctcacatggtttctgtgggtctagaatctggg

SEQ ID NO: 263552 - DNA, 564 bp, Homo sapiens
ttatactcttaattaaaaatgagacagtacccacactcaaaggaaagaaagctaagctctacttattaaaaggagaaatagcaaagtgtttatgaaacatatcttggtttacargtcttgactgagtcatcaaataattgctttattttgatctgggtactattctaattaaaactaagagtctcgagcggttccaatttataatccttgaggtttaaaaacttgtgcaaagtgttcaaagagattttttttaacatagctttagtataaactactcttaaattttttagtgaaagacaaactttcagttacttatcattcagcacctatgtagcctctttggggaactatcatacatttgtatatactaatcacttcatagtacaatgacttgttttctgggtgtgtaatttcaggatccctgtagacaaatttctttttaaacatttgtaactgcagtcttcagtaatcccctggatattggtgaggttcctgtgttttactttttcattgtttttttttatatgactatagtattcagcctcagcagcaagtaggccatca

SEQ ID NO: 263553 - DNA, 621 bp, Homo sapiens
agcttactcaactactttcagaatttaaactctgcttatttttatttaaaatacgtacaaagacataagacaaaatattattgttcattttctaatactaagyaatatattctgttttttaaaaaaagtcatcttatagacactatgaaacaattgtcaataaattcctactgtaaaataacctatttgtcaagtacaacccttttgttttatatatatgtaacttctggatatatacaatgaaaagaatgtcaatataatgctctataaatagcacagaaattgcccaaagactcaaaagaaaattggagacttaaatacaagatgatttctcttttacacatttaaatttctcatctgaagaaaaactatttaaaaaaacctgattctaagaaataatttagaaaaaatatataagtaaaaggtatagcagaaggacagtagtttaggaataagcttaagcaaatgaaaaccactaaacatctgatgaagtattctatcacatatctggaaattcccaactagggaaacgtagagagtgctttaaggaccaaattaataggcatcagatgccaactttgacatttccatagaactctacttttcaaaaagtacattcat

SEQ ID NO: 263554 - DNA, 621 bp, Homo sapiens
agcttactcaactactttcagaatttaaactctgcttatttttatttaaaatacgtacaaagacataagacaaaatattattgttcattttctaatactaagtaatatattctgttttttaaaaaaagtcatcttatagacactatgaaacaattgtcaataaattcctactgtaaaataacctatttgtcaagtacaacccttttgttttatatatatgtaacttctggatatatacaatgaaaagaatgtcaatataatgctctataaatagcacagaaattgcccaaagactcaaaagaaaaytggagacttaaatacaagatgatttctcttttacacatttaaatttctcatctgaagaaaaactatttaaaaaaacctgattctaagaaataatttagaaaaaatatataagtaaaaggtatagcagaaggacagtagtttaggaataagcttaagcaaatgaaaaccactaaacatctgatgaagtattctatcacatatctggaaattcccaactagggaaacgtagagagtgctttaaggaccaaattaataggcatcagatgccaactttgacatttccatagaactctacttttcaaaaagtacattcat

SEQ ID NO: 263555 - DNA, 586 bp, Homo sapiens
tttttttctttttttcagacagagtatcactgtgtcacgaggctggagtgaactggcatgatctcggctcactacaacctccacctcctgtgttcaagcaattctcctgcctcagcctcccaagtggctgggactataggcacgtgccaccacacccagctaatttttgtatttttagtagagatggggtttcaccatgttggccasgatggtctcgatctcttgacctcatgatccacctgcctcggcctcccaaactgctgggattacaggcatgaaccacagcacctggccccaactgaattttttaatgtactacttatacccagatactgtaacaagtatagaggaagagcaatgattcaacatctctacttagtatgacttaaatatttaaattaattttaatattgaatagcttcaaattaatatttttaagattcacaaaaacaatatttaaagtttctatattaatctctctatatatatgtatgcatatgatgcatatcacataactccctccatatatcttctttcctgttaagtatgttagcttaacccttaaatgttcttgggtgcatttatt

SEQ ID NO: 263556 - DNA, 586 bp, Homo sapiens
tttttttctttttttcagacagagtatcactgtgtcacgaggctggagtgaactggcatgatctcggctcactacaacctccacctcctgtgttcaagcaattctcctgcctcagcctcccaagtggctgggactataggcacgtgccaccacacccagctaatttttgtatttttagtagagatggggtttcaccatgttggccaggrtggtctcgatctcttgacctcatgatccacctgcctcggcctcccaaactgctgggattacaggcatgaaccacagcacctggccccaactgaattttttaatgtactacttatacccagatactgtaacaagtatagaggaagagcaatgattcaacatctctacttagtatgacttaaatatttaaattaattttaatattgaatagcttcaaattaatatttttaagattcacaaaaacaatatttaaagtttctatattaatctctctatatatatgtatgcatatgatgcatatcacataactccctccatatatcttctttcctgttaagtatgttagcttaacccttaaatgttcttgggtgcatttatt

SEQ ID NO: 263557 - DNA, 586 bp, Homo sapiens
tttttttctttttttcagacagagtatcactgtgtcacgaggctggagtgaactggcatgatctcggctcactacaacctccacctcctgtgttcaagcaattctcctgcctcagcctcccaagtggctgggactataggcacgtgccaccacacccagctaatttttgtatttttagtagagatggggtttcaccatgttggccaggatggtctcgatctcttgacctcatgatccacctgcctcggcctcccaaastgctgggattacaggcatgaaccacagcacctggccccaactgaattttttaatgtactacttatacccagatactgtaacaagtatagaggaagagcaatgattcaacatctctacttagtatgacttaaatatttaaattaattttaatattgaatagcttcaaattaatatttttaagattcacaaaaacaatatttaaagtttctatattaatctctctatatatatgtatgcatatgatgcatatcacataactccctccatatatcttctttcctgttaagtatgttagcttaacccttaaatgttcttgggtgcatttatt

SEQ ID NO: 263558 - DNA, 445 bp, Homo sapiens
tatgcaaagaaatataattatgtctgtatgaaaggatcctcagaatgggtgacttaaatttgaaaatcttcaaaggctatagaatctgtctgaagaatgtatcaattgtaatacagtctcatttttataagacatatttaactaatttttgaaatcatctgaatctggctatcaaaagaggaaatctagatccaataacataataagtatacgaaaaaaataagtcactatttaaattaagaaaaaaatwtatgaaaagaaaaatttatctttttacttatcttttctatttttataaaaatacagctaatccatatgctttaattctaacattccttattatcagtcccgaattttcctttatatattactttatttgaacattttgatttaaataggccagtttaattgttactgagacaatgaaaattgcaaaaattatgta

SEQ ID NO: 263559 - DNA, 565 bp, Homo sapiens
ccctgtctctactaaaaatacaaaattagccaaatgtggtggtgcacacatgtaatcccagctacttgggagactgaggcaggaaaatcacttgaacctggcaggcggaggttgcagtgaaccaagatcatgtcattgtgctccagcatgggcaagaagagcaaaactccatctctccaaaaaaataaaaattaaaaaaaaatttacatgtctaaataaatagacttaaagtgtctttttttctgatggaggaatagttacatttgcatagagaaaatataggatattaggaaggactggcttccctgttttttkttttttggattttgttttttgttttttgttttttgttttttttttgagacagagtctcattctgtcacccaggctgcagcgcagtggcacgatctcggctcactgcaacctccatctaccaggttcaagcaattctctgcctcagcctcttgagtagctgggattacaggcacccaccaccacacctggctattttttttttttttttttttttttggatttttagtagatacagggtttcagcatcttg

SEQ ID NO: 263560 - DNA, 561 bp, Homo sapiens
agcttgttcaaatatttatttcgaacttgctgaaaaacaagaatttttataaaaaagcaaatgcaaagatttcctctttgttcagaatttttttacaagggcaggggcaaatgtggttggataagcattgttagactggattaaaaagaacaayaatgactgatgaaatgtcattaaattccttgaaagaccaagtaaaggacattaggtgtctctgaagattgacaatcagttaggtggtcttccctcaagaaattcaccaaagtctgacagaaaaatgttcaagtactttattataaatatttaatattatccaaaaggctctgtgaattataaagagcaagagatgttatatcttaaaaaaaaataggagacaattttctgtctttaattatgaactggtatctggtagtaatttggtgagtttatctttgagaaaatcatcaagacttacttctatttagcagactctattcacaattatcaaccaaaatttgagcaaaaatgttttctcactaataattaatacatatactcattaggagcaataattacagattc

SEQ ID NO: 263561 - DNA, 437 bp, Homo sapiens
aggtctttgaaaattagtcattcatttgaccaaagtgataactcaaggatttcaaaaaagaggtgaaggccttcattatttgagagaggagacttaattttaaaaacaataagcccaaataaaagcaggaagcyaattaaatttgtttttcaaaatcttataagcaatctataaaattttaatcttgaccataagatataacttccataagccttttataacctttattaagtagttaactaatgcttcaagaaaaccctgttaatctgacacaagggcccatatactggtcttgcattagtatgcctttgactttagtgattaatttatagagaaactggacttactttatctctcaaaatctgcctttacaatatcacaggcccacctcttctgtgatagttcctgggctttgaggagttgaatagttttaattt

SEQ ID NO: 263562 - DNA, 530 bp, Homo sapiens
ctaccattgcaaaattataactgagacagtgaaaaatatctgaactaactggctccatcctgtttctaacctccaagctgtccttgttcatttctgggtgtagaccaaactaactttgtatttgtattacttagtttatagtttatagtttataatttagctttgaaacaaagacaattacattcccttcccaaaacaaaccttactgcctgtggactagactgcctaaagccgcaagattagaagttatggtaatcttactaaatttaagatgyagctgtttttattaaaataatattaatgtcttatttattaaagatcatgcaagcaaagatcattccgtcttgggctgggtttatacttttgtaacccctatggcaaattttgacaccttataatattcggcagggataagtaagaaattgcttgattaataaatgcaaacaaaaatgtattctggcaattcttaacacatttctaaagtcttaactactttaccaaaaattttaaagctagcttatttattaaag

SEQ ID NO: 263563 - DNA, 477 bp, Homo sapiens
ttgatcatgactccgaaactgagagaaaatttggaaactagagagaggtgaagtttatgtaaatttctgacaataattctaagattaacttgttagaacaatagtttgtcagtatttataatgayactatttggtcataaatgaaataaaaatatagtatgcaagaataaattttttgctgatgcagctttttgatatatatatatatatacatataatacatatatgtaaatacatatatatttacatatgtaacatgtttagggcattttcatatatgctttcattaaatatatttcattttatatatatatatatatatatatatatatttctaaacacagtactcctgtattttttgcaacatttttgagaaattctttcacaataaatgaaaatatcatacactcaatataatagcaaattaggtagaagagtagttgattcataactatagctacagaattctaattatta

SEQ ID NO: 263564 - DNA, 573 bp, Homo sapiens
taaaacatgtttccttggttgtaaagaagaaatggtactgatactaacccatgccgctagtttaccgatactctgtaaaatctggctatatttcagaaccaaactgtctagctgctaaatcattacaatgtgttcatatccagttgtgtgctgcaggcctcttgtaccagcttttgagagcttatttttattttatttttttgagatagagtctcactctgccacccaggctggagtggagtggcacaatctcagctcactgcaatctctgcctcccagattcaagcaaatcctcccacctcagcctctcgagtagctgggattacaggcatgtgccatcacaccggcttatttttgtatatttagtagagatggggttctaccatgttagccaggctagtctccaactcttggcctcaagcgatctgctcatcttggtctcccaaagcgctggaattacaggcatgaaccaccacacctggtcgtgagagcctatttgtaaattttcactgattctatttgccagctgtaaagcawgtggcattattttttaaaaaaataatttttatgaat

SEQ ID NO: 263565 - DNA, 615 bp, Homo sapiens
taaaatgttcttcatagatttgttattaaaaaaatttaatagaaagatacgtgtctggcagccctcccaacccttcttcgcctcacctcataaaagatatacaagtttgctggtatagttattagattattatataaaattttcggtattttcctcctttgattcaagtaaattgttattaaaataaagaaacaggtcttgccctaggmctattaaaaaaaaagaaaaaaagagaaaatcagatcaaagacctaatagaagttctttaatgagctcatactttattttcctaattgttttcatgacatttcttatctgaattgagactctgattccagggcctctctgtatttaatgttattagattgcttattacctttttggtattctctgaatgagtatgctcactgtggaaaggaatcaagttctctaaaatacagagcaactaagcagcagacacagccagatataggaccacacaattagtctggatagtggaaaagagagagaatacactgctcaacccactttattggtcaggctccagatattctattatatacgtaaaatattctattgtctattgtgtggttctctagtgctttcttccatacc

SEQ ID NO: 263566 - DNA, 550 bp, Homo sapiens
ggaatcaagttctctaaaatacagagcaactaagcagcagacacagccagatataggaccacacaattagtctggatagtggaaaagagagagaatacactgctcaacccactttattggtcaggctccagatattctattatatacgtaaaatattctattgtctattgtgtggttctctagtgctttcttccataccactgctgttgccttctttactatgtcarttaccaccacttactttatctatactttattcagaggttatatactcagatgtttacagggacataatagtctagcacaagaaaattttaggtaagcatcctccaaatacaggcatttaaattgagaggttaccaccatggaaaacaatacagagattcctcaaagaactaaaagtagaactaccatttgatccagcaatcccagtactgggtatctacccaaaggaacagaagccattatatgaaaaagacacatgcacacacatgtttagagcagcacaatttgcaattgcaaagatactgaaccaaccttagtgcccatc

SEQ ID NO: 263567 - DNA, 604 bp, Homo sapiens
tattttactttttctaattgaatggctggaactgtcacttaggaatttttcttaagctttttataaggcttagcttagacagtgcttcctttaagaagtcctcccagatagctgaagaccaaattccttactcttcccatgtgcttccatgtggatcaacttagcaatttgaatattgcattagaatrgcctgcttatacttctttctcccagtcttcactcttagcttcttgaggaaaggcattgtgtattttctttcattctatcaccagtgctttggtagatatttaatgaagtaaacaaattcacgaagtagaaattttagaaaaaataggaaattggcttattgtggacaagggttttcttttagatataaaataatcacaatgcaaacagctacaggatggcggattcaataacaaagtaacttcccattggaaagtctttttatctagcatatatgtccatgtattcacttatatctagcaatggattgaaatccagaaagaaatatggtctacataaatatgccatttttttccagtatggtaagctatgtgacctatttatatattttgatgaagtgaaatggaggtactttgta

SEQ ID NO: 263568 - DNA, 582 bp, Homo sapiens
gtagtgtgtcgacagtcaacccatatggatagatgaagtgccaaattagtctggaaagcagagtagtgtccaaagattaagtaaaagataatttgtattctagcctttgtggcatcaaactctgaattcatttactactgcaataatcagatcatcagcactaggaaagttcagcttagttcaaagcatttacttgcatttttattaagactaactttggaggagatttacgtgtatatccaagcaaacctttacctgtgcaagtttgattggattcatcttcattgctcccacagtcattagctccatcacaaagccatctcttggggatgcagcgattattctggcatttaaactgatcatcaggacagctatgattgactgggagggagggggaagcaagwttaattatttaaaattggataaagttgtgaatattttgaatgatagttacagaaaagttacagtaataatattatagtacaataaatgtcatagagtctgtcattcattgccttatatttaatagcaaatactaatattcactttgttaaaatgtaatgcttttataaaaaacatcaa

SEQ ID NO: 263569 - DNA, 582 bp, Homo sapiens
gtagtgtgtcgacagtcaacccatatggatagatgaagtgccaaattagtctggaaagcagagtagtgtccaaagattaagtaaaagataatttgtattctagcctttgtggcatcaaactctgaattcatttactactgcaataatcagatcatcagcactaggaaagttcagcttagttcaaagcatttacttgcatttttattaagactaactttggaggagatttacgtgtatatccaagcaaacctttacctgtgcaagtttgattggattcatcttcattgctcccacagtcattagctccatcacaaagccatctcttggggatgcagcgattattctggcatttaaactgatcatcaggacagctatgattgactgggagggagggggaagcaagattaattatttaaaattggataaagttgtgaatattttgaatgayagttacagaaaagttacagtaataatattatagtacaataaatgtcatagagtctgtcattcattgccttatatttaatagcaaatactaatattcactttgttaaaatgtaatgcttttataaaaaacatcaa

SEQ ID NO: 263570 - DNA, 584 bp, Homo sapiens
attaaaaatattttttaaaccacataaacattcaaatatttcttaacatattaamtaagcctacttttattactctctgtccagtgtttcttgggaatggaaggaggaacacagaaaagaaaatgaaaacacagaaaagaaaaatgcatcacttgtgacctagagttgatgttaactatgagattctgtattacttaaaaaaaaaaaatcatcatgagttttcttccctagtacaaacaaacatgcaaccacagaaaatacttaggaggtgaccaatcctcatctgggaagctgtgcacagctaaggattaaacttccaatatccaagcacaacaggagggccatcttaatgttaaccttctatgattatttttcctccattccagaggctaaattcctaactgaattggcatgctcttcaatatgtgtttcacaatttcaacgctgtttttaagggtaattttctttatgcccagtagttacacttcgtatgataaaaacaaatgtttatatttgttttactgagaatttgaaaaattgttgttttatcatgcttgttgagtagcaaatgcgtgcatttccag

SEQ ID NO: 263571 - DNA, 584 bp, Homo sapiens
attaaaaatattttttaaaccacataaacattcaaatatttcttaacatattaactaagcctacttttattactctctgtccagtgtttcttgggaatggaaggaggaacacagaaaagaaaatgaaaacacagaaaagaaaaatgcatcacttgygacctagagttgatgttaactatgagattctgtattacttaaaaaaaaaaaatcatcatgagttttcttccctagtacaaacaaacatgcaaccacagaaaatacttaggaggtgaccaatcctcatctgggaagctgtgcacagctaaggattaaacttccaatatccaagcacaacaggagggccatcttaatgttaaccttctatgattatttttcctccattccagaggctaaattcctaactgaattggcatgctcttcaatatgtgtttcacaatttcaacgctgtttttaagggtaattttctttatgcccagtagttacacttcgtatgataaaaacaaatgtttatatttgttttactgagaatttgaaaaattgttgttttatcatgcttgttgagtagcaaatgcgtgcatttccag

SEQ ID NO: 263572 - DNA, 585 bp, Homo sapiens
catttatcctttataacacctcattttttttcttgaaaaggtgcagtttttaagtggaagttgcaatgtgcaattatatttaagcctaaattccataattgttttaaaagatgtctaattcaataataaatgaataacaaccaaaatatttatattggctgtaacaaatccaaacttaattcgatttcagaattttctgcagaatccaygttgaagggatgttaaaataattttagtggattttctcttctcagtcaattcctcttaattatctattttgaaatatattcaactctggtgattcttttaggaaagttgaattgttttatttcattttagtaacaaattggcacttaaaacataaaatagcccatttgttgatggcccacaagtactttctcgtaactagaaagatgtgctatcaactggagaagctattactctaatttgaattttggttaccttggctcataagactgctgcctgtgtttgctcctaagtgtttattagtgaatcattgacggttagtgtaatttcaatgctaattgttgcttcaggttttcaaatagctcagcagtaagacat

SEQ ID NO: 263573 - DNA, 585 bp, Homo sapiens
catttatcctttataacacctcattttttttcttgaaaaggtgcagtttttaagtggaagttgcaatgtgcaattatatttaagcctaaattccataattgttttaaaagatgtctaattcaataataaatgaataacaaccaaaatatttatattggctgtaacaaatccaaacttaattcgatttcagaattttctgcagaatccacgttgaagggatgttaaaataattttagtggattttctcttctcagtcaattcctcttaattatctattttgaaatatattcaactctggtgattcttttaggaaagttgaattgttttatttcattttagtaacaaattggcacttaaaacataaaatagcccatttgttgatggcccacaagtactttctcstaactagaaagatgtgctatcaactggagaagctattactctaatttgaattttggttaccttggctcataagactgctgcctgtgtttgctcctaagtgtttattagtgaatcattgacggttagtgtaatttcaatgctaattgttgcttcaggttttcaaatagctcagcagtaagacat

SEQ ID NO: 263574 - DNA, 485 bp, Homo sapiens
atgtagtaagtttaggaatatttgggacttcctcctgggtaggaatgaatctggggatgcaaccccacatctaagtcttgtccctctgctgtcgtttgccccagactgagttgtatcagctgagacttagatctttgctccacaggaactgtgacatccactccaggttttgtatcaggtcatctgctgttctgagcacccttacagccccctagctagtccagctctgcctgtccctttcattccatccatacctggctttcagtcataacatgtattatgcaggtttttttctgggctttttttctgatatgcagtggcctcattactcagagtttgcattttgtaagaaatccacctcttgttcaaatgacttgcttgtttgagaagtwtagtggctgaagactcgttttgtctcactcatccctctggggccttgcggtctttctctttccagtcccctggccaatcagccaagccgttca

SEQ ID NO: 263575 - DNA, 586 bp, Homo sapiens
agacggacgatgcctctgaatagcacagtgatttctagttcacaaagcactttcttgttggattttcatgaccactctactctcaccttggtacctaagcacacaagggaattctgtgtcactgcttcaccccaagagcttcactaaaaacaagtgacaggtctcaggccctgtcccagaacatcccagaaaatcatctgaaatggacctggatctcagtgtaaacactcgtttagtttttaaagctcttctaccttgaccatgctgtacaacagccagcatatctaggatactctggagagggatttttgtaagaaagtgtgtgtgtgtgtgtgtgtgtgtkttttcaagaaatgaaggctggccaagatactgaagatactagcatttggtgtgatgataattaataagcatttttcacacgccaaccagctgacagtttcatttattagtgacatcaagcaccagtccaactatatcatttccactatcctccctccatggccagaaccacagattctctctggcagaaggttggatttatacagtgaaggcatgtgacagtgacacgttgtccacccagcac

SEQ ID NO: 263576 - DNA, 586 bp, Homo sapiens
agacggacgatgcctctgaatagcacagtgatttctagttcacaaagcactttcttgttggattttcatgaccactctactctcaccttggtacctaagcacacaagggaattctgtgtcactgcttcaccccaagagcttcactaaaaacaagtgacaggtctcaggccctgtcccagaacatcccagaaaatcatctgaaatggacctggatctcagtgtaaacactcgtttagtttttaaagctcttctaccttgaccatgctgtacaacagccagcatatctaggatactctggagagggatttttgtaagaaagtgtgtgtgtgtgtgtgtgtgtgttttttcaagaaatgaaggctggccaagatactgaagatactagcatttggtgtgatgataattaataagcatttttcacacgccaaccagctgacagtttcatttattagtgacatcaagcaccagtccaactatatcatttccactatcctccctccatggccagaaccacagattctctctggcagaaggttggatttatacagtraaggcatgtgacagtgacacgttgtccacccagcac

SEQ ID NO: 263577 - DNA, 414 bp, Homo sapiens
caggcctgaaagccttggagcctgctgtgtcacactacacgctgtttcatcttctactctcctcactctgattcttctaaggccaaactttctcactgctgctgccaaccctgcgttagtgagactcaatgagatggtttttcctctgccccccacgcctatacagtgtaaaggggccatcctggatggtgtccagctaggaaagcccagcctctgctctctattgctgtcagaagattctakaatcacaggggcttgggttcgagtcttgattataccttaccagccatgtgactttttgtgacaacttctctgagtccagccagcttctttatttattaaaaaatgtatctctctcatagggattttttgaaaagtaaatgagataaatatggaatgcctggcacatattac

SEQ ID NO: 263578 - DNA, 560 bp, Homo sapiens
tgaaggtctccagtctcctagttgggtgatctttccactacactgcctttgcaacatgaacgggatggcttgaaaataagaaacagaaataaaagaaacactttataaaaaaagaaaagaaaagaaaataagttctcctgaggagcctatgaaccccagtgataccatttgcacacacagctttgcatgagggccaagccagacatttgagctatgctcctttgcgtttaactaaaacctggttctgatatcgttttcattcattcatttgttattcaacaaatacttcttgaatataatagtatgccaaccatgtccaggcagagtttagcattgaatraaacagataatatctctgcctttgtggaatttattgtattagtgaatgtaatactagaggcaataatagataaacccagaaatctcagtgagcaagcacaatagaaatttattttttgttcctgtaaagtcaataagcaacaagggtagggggaaatgttcagctcattatatttatttaagcacttgagtttattgaaagctctgctgtcttcaatttg

SEQ ID NO: 263579 - DNA, 533 bp, Homo sapiens
tcttttcaacagtgatacatgttttggttctttgcaaatttacaaggcactcccaaaatgtcatttgtccctcattcttctattcttgatatcattctatgatcctgtacaggatgaaagcaactgagttctgaaggtagtaagtaacatgctgaggtcaaatgccaggatttgagtcaggttcatggggctccatgtcctgtgacctctctgctccaccaggctgtgaaagaatgactcttgcattcatgcagtcagtctgtgttgctgtaaacctgaatggtaaaatgacaaatgtagacacagagggtgtgaatcagctctattagcagtgactctgagaatagtcctttccctcctctgtcttccccttctctgtcttgcagcaagtgggaggacgaarcaggtttcataagagcagcgcccaagacccacagtcgcctagtgccaagtcaacaaccttactgatatctggatgtagtttcctgtgctctttgacacaggtgtggagattgtaatttgctgtgtgtgat

SEQ ID NO: 263580 - DNA, 574 bp, Homo sapiens
ctgctaaccaaatcattctggaggtcaaacaggtatctaggtgaaagtgcttttcaaaaataagatgttatatcattgtttttaaattttgtcttgaaaatgagagaagtgaccaggcgattatatcctcagttccctccatcttcagtaggtagtgggtggcttagaggcctgcaggtctgagggagaagcagccatgtgactcagggaaagtgacctccacaatagctgttctctagaatagcttaccagttaggcacttttaaaactcaaagtagcagatgrtctttctgcaagtatatgtaagagtgaggcccaatattggacccagacctaaaaaaaccactctattttaatttccattcacatatcttttggaccaaatattcaaaagcctctggtctagccctaattttgattcttggggacttatcagcccaaaaagttcagagtgaaaagcaaggactcagaggtcccagaacagatcaatgtctcattctggcccaagtggcttcatggtgtgcccagctgggagtgatgtgagaactgccccgtatgctcaggtgtatgattt

SEQ ID NO: 263581 - DNA, 574 bp, Homo sapiens
ctgctaaccaaatcattctggaggtcaaacaggtatctaggtgaaagtgcttttcaaaaataagatgttatatcattgtttttaaattttgtcttgaaaatgagagaagtgaccaggcgattatatcctcagttccctccatcttcagtaggtagtgggtggcttagaggcctgcaggtctgagggagaagcagccatgtgactcagggaaagtgacctccacaatagctgttctctagaatagcttaccagttaggcacttttaaaactcaaagtagcagatgatctttctgcaagtatatgtaagagtgaggcccaatattggacccagacctaaaaaaaccactctattttaatttccattcacatatcttttggaccaaatattcaaaagcctctggtctagccctaattttgattcttggggacttatcagcccaaaaagttcagagtgaaaagcaaggactcagaggtcccagaacagatcaatgtctcattctggcccaagtggcttcatggtgtgcccagctgggagygatgtgagaactgccccgtatgctcaggtgtatgattt

SEQ ID NO: 263582 - DNA, 578 bp, Homo sapiens
taagtttgttgactacttctgattgattgatcgtaaggcttttttttaatataaagatattcgtaagaagtagctcaagttaagactgctgcaaatcaagcacagtttaggtcacttgtgaggcctaactggtttcctctgctgagtcttcaggcctggtctcctttttaatttactttaacaagatttaaattgcaccttcatatggactttggttttctcagttgactgcagtctrttgaagggcagagctttcatcttattcatctttattttcccagccctcagcagagtgcctgacttatgtctggcactcaataactgatgctgaatgtaagtgaatgagtgatgaataacagaagaatgcaaggaagttctagctaagggcttgctgtctcatgttgcctgggggtttcctccccctttccccacagagaaatgaaagcaatagaggcgaggaaatgcagggaagcaaagtgattggaagctaaggaacagccctgcaggcaggagcatgctttaaggctgcagcctgccagagaaatttcctcttgactcagcctcctgggtcaggctga

SEQ ID NO: 263583 - DNA, 586 bp, Homo sapiens
aatttgccaacaaaacaacaacaacaaacaaagccaaaaaaatcccccaaaataacccaacaattttcccatgccagtcgttaattataaaagataaaaatctccgctgggcacggtggccagcactttgggaggcctagacgggcggatcatgaggtcaggagatcgagatccacctggccaatatggtgaaaccccgtctctactaaaaatacaaaaaattagccgggcgtggtggcaggcgcctgtagtcccagctactccggaggctgaggcaggagagtggcgtgaacccaagaggcagagcttgcagtgagccacgatggcgccactgcactccrgtctgggcaacagagcgagaccccatctaaaaaaaaaaaagaaaaaagaaaaatctcaaccaactgagcgccttaatgttttattcctctggacacacactttcactcttatagagaccttcatcattggatgccctggaaaaaacaactgactctttcatagagcttcaatatgttactctcttggacaaatactgtgaatttttatagatatttaatatttgttgggcaaatatgtaacctct

SEQ ID NO: 263584 - DNA, 594 bp, Homo sapiens
gccagtcattcacaggaggagtatgtgaataacacacatccagaagcttaagctgaaatcagtatgtaagtttcacagaggctggaaggaatatacagggaatggaatgrctgaaaacactctcagggattgagactcagaaggatgggaaagagtagatatcagatagagaagtcagagatacacctgtggagttcagcataaatgagtgaatccatggaggaggcatagcattgttataacgactggtattagtatattcattcctctttcctcctctgcattcctggatcctgcacatgtgtagtgataccaggaagatgtaagactccacagaggattgtaactggacttcagcagttactccaggttcacaatataaggacttttgaaaaaatgaattgcccaggtatgtgaatattagagtggtagagtaaaataaatatgagttagacatctattttcaaatcccaattcttccacttagtaagtatggacttgtttaagttacctgcactctttgactctcatcttgcagaattcttctgcaaaatggggataataatacctgtgctgaatgctctggattgggcc

SEQ ID NO: 263585 - DNA, 499 bp, Homo sapiens
ctgccttgctcgctcatgtgctcccttctgcaagaaggtgagcatggtaggccaagtagataaggcamccctgctgtgagtctggcaaaggggccaagaaaaatcctgtgtcattttggaggcttgcccaggatccctgaagggtgagtgaatgcgaaccaagatgcttcactttttctgaggcttcttgtcctcagacttttttctgaaggcagatgaagcactgaacctctgattagctagttaagaatgaatggtacaactacacaggacaagatgctggaggggacccttctgtcactcttgggagctggaaatatcagtcttactcctttctgtgatattttccttcttgttttgggggctgtcatggtacctatcttgtcttttacaatgttaagagtgttgttgcaaactacagagatattactgactagaatgggtgcttggcccagtcatcaaaaatgtaattcagaacaatgtgttttctgtctgttct

SEQ ID NO: 263586 - DNA, 609 bp, Homo sapiens
tttctttacttttggcgcttttaggatcctttctttatccttgacctttgggaatttaattattagatggcttaaggtagtcttctttggattaaatctgcttaatattttataaccttcttctgcttgaatgttgatgtatttctctgggtttgggaaattctacattattatccctttaaataaactttatacctctgtttctttctatatctcctctttaaggccaataattcttagatttacccttttgaggctattttctacatgctgcagatgtgtgtcactgtttttcattcttttttcttttgtctcctttgaccatatattttcaaatagcctgtcttcaagctcactaattctttcttttgcttgatcarttctgctatttaaaaactttgatgcatttttccatgtgtcaatttatttttcaactccagaatttctgctttattttgttaaatttatcagatagaattctcaattatttccctgtattgttttgaatttctttgagtttcctgaaaacaattatctagaactctctatctgaaagataacttatctctgtttctccaagattgtccctggtgccttatttagttcatt

SEQ ID NO: 263587 - DNA, 549 bp, Homo sapiens
tgtaatcagcagttgttcagtagaatattctataaatgtctgttaggtccatttgttcgagggtatagtttaaatccatcgtgtttttgttgactttctgtcttgatgacctgtctagtgctgtcagtsgagtattgcagtccctcactattattatgttgctgtctatctcatctcttagatctagtagtaatttcataaatctgggtgctccagtgttaggtgcatatatatttagggttgggatatttccctgttggacaaggccttttatcattatataatgtcctactttgtcttttttaactactgttactttaaagtttgttttgtctgatgtaagaatagctattcctgctcacttttggtgtccatttgcatgggatgtctttttccatccttttatcttaagtttatatgagtccatatgtgttaggtgagtctcttgaaggcagcagagagttggttgggaattcttatccactctgcaattcgtatcttttaagtggagcatttaggccatttacattcagtgctagaattgagatg

SEQ ID NO: 263588 - DNA, 529 bp, Homo sapiens
tttcccctataaccaggaggtctggctacccatggccccacatccgaaggctcagtgggtagaagagctgagccttctctggtgagaagtgaggtgctgggcttggatctcggtttttcagcacactaacccmgttaccaccctctttccttctctctccactagtcacacacccctgttttctaggtgtgaaccactgacaaagcatttttcatgcaccttgctttggtggtgatgtggcccacatctacataggctccaactactgccagcagctggtggaatgacttaaggtctagcagaagtcatatggataggtcatattgatagagtcatatcgctatccctggcgattactgcaggtgcagtaatcagctcagacagcactgtgtgtctgcttaatcagatgagtgtctggatgatgtgtgttatttgagaagagcacagagatttgagtagttcagcccagattcaagctctgactcagctacttacccacccagtacatgacgtgagtgaattagttaac

SEQ ID NO: 263589 - DNA, 569 bp, Homo sapiens
ttgcaaatatagaaaaaagtagccagtgatggatactgacagcataagaaaaactagaatgtgcaaaagtaggatatctaaatctttttgatgcttggaatctgactgctgtggcagttggtcctaagatgtacattaacacaaaaaataaataggattacaagtaggattctaaaatataacctcttaaaacttctagcaacatggaagtttaaggaaatgaatgttcctctgctgcttcaaatagatagaaatgttgtagaaactgtaatataattttttaatatccagctgagctcaaaataaagaaaaggaaactctcagattccagagaagagaaaactccaagtcagactgtcaagagcaayggctgagcagtccagtgggcttgggaacaggacatcggtcctcatggcttggcttagggatttaacatccacaggtgaagatgagatgttctcaggctgatggaggtagaaagctgaacttctataccaaatagtacctatggcataataagaaacttctatttggtcttcatccctggttcctgatagagaattcctaaa

SEQ ID NO: 263590 - DNA, 452 bp, Homo sapiens
gtcgaacaaatagctgacctataaattgattctcattccctagtctcgtgttcattattacaatacaaacaccatgaagacaaaaaagccgtgccccaagccccttagagttgtccrgctctcttcccaagcactttttttccttgtctatgccagaaggcactggattcggcagtctcttgcccattcaaaaagtcctaaactgacacttctgaagaggatcaactagcaaaccagcattagactgtactctttatttcaggctacatcagaatgaggcatccattgataaatggttatgatcaaaagaaagacttggagaatcagttgtccaactgattataattttctttgcacaaaatatggattcaatttctggtattgaagaccaactcagtagaaagaagccttagagggttatgtcagatttccctttattagatcctttgctc

SEQ ID NO: 263591 - DNA, 386 bp, Homo sapiens
gcccacttttcacatgatgaaactgaggcccagggactcccaaattcatatttatagatcagtgtcagaggcaggtgcataactgtgacgtgttagtcctaggccagtgttctttatcatacggtgtgcccaaaggtttacaaacgcgtaaagatgaaccacaactgacaggctatgacaccgattgcaggctgtgagcccacctgccccgggctgaagatcattrtaagatcttaaagagatggctgtgaatgagttggcaaactcagcagtctcataagttatccattgaattattagcttcctatatggggtcagcagaaaggctgtaggatatgaaacccagaagagcaactggacttctactcctagtgcttacttgttga

SEQ ID NO: 263592 - DNA, 563 bp, Homo sapiens
aatatatttgctggattgaattgaaaatcttgtaggatgtctagggacaaagactgtatgtttttcaacgtgattttttcccataccagaaagcatgtcttatacttgaagagaacaagaaataagaataattctttttttgaacaattttaaccctagatctgaagtgtgaagtttcctaactgagccaattaggcagcccctagcagagaggagtgtgatccaaaagggtaaaggggaatgtcggcttttcctgaaaactttaacctttttttttttttttcaaagagacaggcttttgccatgttggccaggctggtcttgaactcctgacctcaagtgatctgtctatctcggcctcccaaagtactgggattataagcatgagccaccgcacccagccacctytttttttttttttttcaaacaagaatctatacatacgtaactactatggttacaaaattaagatttaaaaaactgtaaaaagtggtaccaccaaaataaatttgttaattctcacaattgactttatttcatccaagccctctagttatttttct

SEQ ID NO: 263593 - DNA, 609 bp, Homo sapiens
taagttttctatacttcaccaaaactagtaaaatgagaacttcagtaggctgtgataagttgtgtatatataacataataccttgaacaatgactaagaaagctatgtaagagatacttttaataaaaatggaataytaaaaaaaatgtccaagtaacccacccacagcaaggcacacaaaagaatacagagaaatgaaaagctgatagaacaaacagaaaacaaaaaataaagtggcagtcttatgcctcaacacatcaatcattatatgatgtataaattgtataaatacagttaaaagagattagcagaatggatttacaaacatgacccaattacatactgtcttcaagaaaatcacttcaaatataataatgtaggcaagttgaaagtaaaaggatggaaaaagatataacatgcaaacattaatcaaaagaaagcaagagtggctttattaatatgagataaagtagacttcagagcaaatacaattaccagagacagagagaaggagattacataatgataaaagtgtcaatcctcccaaaagacagcaatactaattgtgtctgccccaaataaaagagctgaaaaagatatgaagtaaag

SEQ ID NO: 263594 - DNA, 570 bp, Homo sapiens
gaacaaacagaaaacaaaaaataaagtggcagtcttatgcctcaacacatcaatcattatatgatgtataaattstataaatacagttaaaagagattagcagaatggatttacaaacatgacccaattacatactgtcttcaagaaaatcacttcaaatataataatgtaggcaagttgaaagtaaaaggatggaaaaagatataacatgcaaacattaatcaaaagaaagcaagagtggctttattaatatgagataaagtagacttcagagcaaatacaattaccagagacagagagaaggagattacataatgataaaagtgtcaatcctcccaaaagacagcaatactaattgtgtctgccccaaataaaagagctgaaaaagatatgaagtaaagactggtagaactaaaaggagaaatagaaaactccacaattacagttggagatttcaatgctcctctctcaaaattggtagcaaaaaatagacagaaaatcaggaagggtatagaagaactcaacaccaccatcaggatctagtggatatttatagcacattatacatgt

SEQ ID NO: 263595 - DNA, 570 bp, Homo sapiens
gaacaaacagaaaacaaaaaataaagtggcagtcttatgcctcaacacatcaatcattatatgatgtataaattgtataaatacagttaaaagagattagcagaatggatttacaaacatgacccaattacatactgtcttcaagaaaatcacttcaaatataataatgtaggcaagttgaaagtaaaaggatggaaaaagatataacatgcaaacattaatcaaaagaaagcaagagtggctttattaatatgagataaagtagacttcagagcaaatacaattaccagagacagagagaaggagattacataatgataaaagtgtcaatcctcccaaaagacagcaatactaattgtgtctgccccaaataamagagctgaaaaagatatgaagtaaagactggtagaactaaaaggagaaatagaaaactccacaattacagttggagatttcaatgctcctctctcaaaattggtagcaaaaaatagacagaaaatcaggaagggtatagaagaactcaacaccaccatcaggatctagtggatatttatagcacattatacatgt

SEQ ID NO: 263596 - DNA, 610 bp, Homo sapiens
cccgccttggttgtcagattgaaaaaacatagtctataaagggttcagtactatctgaggtttcaggcacccactagggttcttggaatgtatctcctcctgcagataagggaagatgactgtataacaaggggttcagtactatctgaggtttcaggtgtccactagggttcttggaatgtatctcctgcagataaggggagatgactgtataacaaggagttcagtactatctgakgtttcaggcatccactgggagtcttggaatgtatctcttgcagataaggggagactactgtgttacatttcagcttccataaaactttactaatttggattaagaacacaagcctgatttagtaaaaagtatccataaatattcagaggtatagttttgtttcatcaagtaaaaagagcaactaattccaactgttgaagtagtaacaagtaaagacttcaccaggcttgccttgatgaagaattaagacatatttttaggtcaacagcacaagattgctgaataacttgtatgctacaaacacgctccttccactcatcgtaacagcccagcaatctttactattccaacttgctgagaaccatgtcagat

SEQ ID NO: 263597 - DNA, 610 bp, Homo sapiens
cccgccttggttgtcagattgaaaaaacatagtctataaagggttcagtactatctgaggtttcaggcacccactagggttcttggaatgtatctcctcctgcagataagggaagatgactgtataacaaggggttcagtactatctgaggtttcaggtgtccactagggttcttggaatgtatctcctgcagataaggggagatgactgtataacaaggagttcagtactatctgatgtttcaggcatccactgggagtcttggaatgtatctcttgcagataaggggagactactgtgttacatttcagcttccataaaactttactaatttggattaagaacacaagcctgatttagtaaaaagtatccataaatattcagaggtatagttttgtttcatcaagtaaaaagagcaactaattccaactgttgaagtagtaacaagtaaagrcttcaccaggcttgccttgatgaagaattaagacatatttttaggtcaacagcacaagattgctgaataacttgtatgctacaaacacgctccttccactcatcgtaacagcccagcaatctttactattccaacttgctgagaaccatgtcagat

SEQ ID NO: 263598 - DNA, 542 bp, Homo sapiens
cttgtatctggccaggaagggatgtctgccaccagttatcagcatgtcctcatcacggtccagcatgcatcgcacagggcggccggtcctgggggttaccgacagtgttagaagcctgtgagccttcaacagcagctcagccctgcaagtctcagaataaaaacagccgggaagccatcttttccacctgcacgctgagcagacctgtacagggctgctttgccatctaggcactgtgmtagacaaggtggagaatataaggaagcgaggtatgtgctttcatttagagagctcacagccagtaggagagatcagaggtggatacctgtgccagaccacaacggaacaggcgatgttaccctcccactatgcccaagggttctaaaaacagagggctgtgagaattcaaagcagggggaaactaattctaacagggggaagtcctgaaaaccttcctggcacagacagccttattcttcttcccagagccagatgggagaaacaggctttggaactcacttatatgcagccagggccactgc

SEQ ID NO: 263599 - DNA, 592 bp, Homo sapiens
taagtggagaacacaagaacactgactaatacactataccacattattaatgaaaataagagattggttaatctatcatctatctatctatagatcctatctatctatctatctatctatctatctatctatcatctatcaagagacagatacagagacaaagacagaaagaggagggagatttactatgaagaagcagctcacacaattatggaagtcargaagtcccacaatctgccatctgcaagctgaagacgcaaaagatccagggttctaatttcagtccaagtgcaaagacctgacaagcaggtgagccaatggtgtaaatcccagtccgagggcaggagaagactaatatcccagctcaaagccaggtagaaagaaaaagggataaatccctctttgctatgccttttagttctattcagggcctcaaaagatgttataatgtccactcacattggggagagaaatcggctttactgagttcatgattctaatactaatttcttccaaaaacatcttcataaacacagagagaaatatgtttaatctcggcaccctgtgcaggagtaaagttaacatataaaat

SEQ ID NO: 263600 - DNA, 580 bp, Homo sapiens
tacaattcgctcacaggggcaacattgatcagatgctcaggaccattcggtgggatgtagcagagatgactagctgaatgtctgtcttacataatagttgaggcccttttcaggaaagggaaatggaaagaaaataaagaacaatagcaacaacatgaacaacccaaactcaagtttaaagtgtttgctttgtaaaaggcaatgtgctaggaactttccatacaagattatatttatacctcatcataactgtttaaagcagctattctaattcctcctttaattgtgaaacaaattaagtctcacagtaggtaaatartgtttccctggcaacagcagatacatgaatctagagttgctagatttcaaaaactgttcttcctatgggatataattccttttcaaatgtaagtttctacccttctaagattttttttagcattcagaatggatcctaagacatttttgagggttgtgaaaaccctcaatatatttttatgttattatcaaaaaaatcaatgttataaattgcaagtttactatttccacttaaaaagctaatcaaagcatatacattaac

SEQ ID NO: 263601 - DNA, 621 bp, Homo sapiens
tctctcagtaatttattcagaagaagaataagtagaaaatggtaaagagtaatggttgatgacagtactcccttgtcacaagatgtcwcttacgctgtgaacgagggtctcccggagaagaccacatacgagttatgacttgaaaggagtcaggaagggaaccacatgagtattttttcaggcaaaaagaatgtcaagaacatatttcccagtgcagagttacatttggtgtttcaaagagtgaaaagcaggccagtgtggccagagagaaggacccctgggagggagggatagagaacaaggtaaaggagctagtctgaagccagaacacaaaagataacaaagactattaaggcttcgtttttacctctgagggaggttgggagccattagagtgacagggttttaagttttagacagttacttttattcccatatagaaaatagatggtggggtaaagagcacaaccgaggagactatttaggagaacaaacataacaggctggaataaagaagagtgatagagaggaagggctcagattctggatttatactagagcagcattggcaggatgctctcaaagggtttgatatgtgccacaaataaccaggtgagtgcc

SEQ ID NO: 263602 - DNA, 582 bp, Homo sapiens
tcctggcatggagcaaagctcatctgccttggtgttctctggcaaataggcagctctctataaagtgtttggagttctggtccaagagttttggcttttcagggcatctttctagcccagagtctgtggccttttcttgttgccctagctgagaatgctgccagagataatcctgggtaatgtgtggaagaggatgagtcaaaagtgtggaaactcagcacataaataaagacaaagcaacacaaccatcaaaattaaatcaggaaaagcaaaataactactcttcttggctggttagtcatgtggggcctgggtctgggtctgagatgaaccaaacacatttctgtgtggaaatttcatataaagtccagggcctagatrccctaaagttatgctgagcacagagtctgaccagtctgccagttgtcacaactgagaaagggagcactaatgatatctaattggtagaggttgtggatgctgccacacatccaatcaggaatggtcagcctctgcgatggtgaagtttttgtgccaacctgagtgggcctcaggcacccaggtgtttggttaaacattatt

SEQ ID NO: 263603 - DNA, 632 bp, Homo sapiens
aggatgttctgagtgataataacatttgaattggtagactgaataagcagattgccttccatcatgtgagggtgcttcagccaattccttgaaggtgtaagtaaaataaaagaatgagtaagaaagaattctttttctctgcctatctttgagatggtacattagttttctgcctcagacctagacttggacctctcagcctccacaattgcaagagccaaatatttggtaaatctcctgctctgtttctctccctttctctttctctctctttatatatctctatgtatctatgatctatctatctcatctcctattggttctatttttctggagaactcagacaaatatagccctttacaacaacaaaaaatctggtccaaaggtcaatagtgctaaaattcagaggcctgttctaccgtctttgttcaattatctgcttatttttagtattgttcacgatmgaggaaatgttttagaatatttttagcccaagaacaggaaaatatattggcttcagttctcagatccaggctaagctcaaggagcaggccatcatgtgtcaaagtttcttgtttctctgcttagaagatcatttttaaattgtatgacacaacacagctgggtgtggt

SEQ ID NO: 263604 - DNA, 578 bp, Homo sapiens
gtagtttcacttccctgtgagatctgtaaagttgatgcagcccccaaatactcatcgtttctaagcaaggtctattctaaattcttttatataaacatatagtctctaaagctagcaagcctcccaaacaatatttccgtgctaaaagaaggactcaatatgtccttttgtgatatgccataatagcctattgtagatttctgtcatctactttgttttatttacctttgtcatttaccttttctgagaagtgtgggtgatatawaggttgaaatgcctgattaagcatcaaaccttagcacaatgtttaatgacagtttcagacaactaaataaccttacatgggagagattggctggtcctttttgtgtttatattacttgggtaccattgagtttcttgaaactttggattaatattatttttatcaaattcagaaaattttagccattatatctttagatatgtttttctagcccattttctatcctgtctccttctgaaacatttattatacattcatgagtaattttgtaacagccatacaagtctctgcttattttttgtcaatttatttc

SEQ ID NO: 263605 - DNA, 548 bp, Homo sapiens
aattacctcctaaataccctatctctagatacagtcacattgtgagttaaggcttcaatatatgactttggggagggaaacaattcagttgatagcaaggtgattttaatggtcttatatcaacaatttacataatgataagacaaaaattcattagaggcatagaaagtcagaaaatctattttaattgccttgaaataattgatgatctagagragaatacatctaatatttggaacataaacctgctctacaagtgtgtattgtatgtttacaaaatagggtatatactagataaaacgagtcataaaaaatttttgaaaaatgggattatagattatttgtactatagtaaaattaataatcaaatatttttggaaagcctagatattttgaaattaaacaaaacactttcaagtaatcaacacattaaattaaaaaagtataagagaaattagaaaatactttgaactgaatgataatagaaaataatctataaagtttgcagaattcatagctttatatattttaaaaaaggagaaagactt

SEQ ID NO: 263606 - DNA, 548 bp, Homo sapiens
aattacctcctaaataccctatctctagatacagtcacattgtgagttaaggcttcaatatatgactttggggagggaaacaattcagttgatagcaaggtgattttaatggtcttatatcaacaatttacataatgataagacaaaaattcattagaggcatagaaagtcagaaaatctattttaattgccttgaaataattgatgatctagagaagaatacatctaatayttggaacataaacctgctctacaagtgtgtattgtatgtttacaaaatagggtatatactagataaaacgagtcataaaaaatttttgaaaaatgggattatagattatttgtactatagtaaaattaataatcaaatatttttggaaagcctagatattttgaaattaaacaaaacactttcaagtaatcaacacattaaattaaaaaagtataagagaaattagaaaatactttgaactgaatgataatagaaaataatctataaagtttgcagaattcatagctttatatattttaaaaaaggagaaagactt

SEQ ID NO: 263607 - DNA, 548 bp, Homo sapiens
aattacctcctaaataccctatctctagatacagtcacattgtgagttaaggcttcaatatatgactttggggagggaaacaattcagttgatagcaaggtgattttaatggtcttatatcaacaatttacataatgataagacaaaaattcattagaggcatagaaagtcagaaaatctattttaattgccttgaaataattgatgatctagagaagaatacatctaatatttggaacataaacctgctctacaagtgtgtattgtatgtttacaaaatagggtatatactagataaaacgagtcataaaaaatttttgaaaaatgggattatagattatttgtactatagtaaaattaataatcaaatatttttggaaagcctagatrttttgaaattaaacaaaacactttcaagtaatcaacacattaaattaaaaaagtataagagaaattagaaaatactttgaactgaatgataatagaaaataatctataaagtttgcagaattcatagctttatatattttaaaaaaggagaaagactt

SEQ ID NO: 263608 - DNA, 500 bp, Homo sapiens
attgtatgtcctcactcataagtgggagctaagctatgaggatgcaaaggcataagaatgatagagtggattttgggcactcgaggggaaaggttgggaagggggtgagaaataaaaggctacaaattgagtttggtgtgtatactgcttgggtgatgggtgcacaaaatctcacaaaacaccactaaagaatttactcatgtaaccaaataccactygttcctcaaaaacctatagaaataaaaaattaaaaaaataaactgttctgtgataaattgaggtacactttcccaaattttacatgatttcaaatcattctaacattttttcttctactcagcacatctatttctcatataagtgcccacctatattgtcagagtactccagagaaatagaagaaatataatgtgcatatttacaggaagagttttaaggaactgtttctcactattatggaagctggcaagtacaaaatttgtaaggtgacccaggaagag

SEQ ID NO: 263609 - DNA, 545 bp, Homo sapiens
ttgcattgtgtgatggttaatactgaacgtcaacttgattggatcgaaggatacaaagtattctgggtgtgcctgtgagggtgatggcaaaggagattaacatttgagtcagtgggctggggaargcagatgcactcaatctggtgggcaccatctaatcagcctccagcgaatataaagcaggcagaaaaaaacgtataaaggcaagaccgaccaagtctcccaacctacacatttctcccatgctggatgctttctgtccttgaacattggactccaagttcttcagttttgagactcagacttgctctccttgctcctcaagcttgcagacagtctattgtgggaccttgtgaccatgtaagttattacttaataaactcctgtgtgtgtgtgtgtgtgtgtgtgtgtgtgtgtgtgtgtgtgtgtatcctatcagttctgtccctctagagaaccctaattcacattgtgtttgattttattgagtttatggatttattgttttatatttttcaacaaataaagacatttttcagcccttg

SEQ ID NO: 263610 - DNA, 607 bp, Homo sapiens
tttttgttcctgagttgattataatttgattttcgttcaacctattctcctaattaatggtctgaaagagatatttgactttccaaattcgcctagtccttgttcatggatttcacgttgtgtagacaattggagaattttttaatgcagttggtggaaactgatttctgttggcctttagggaaagcataaacttttgctttttgtttttttctctttccaacccttgcaggaagarattctaacattatactcctggtgaaggtctgtcctttacaaagaggcaaaagttgtttcagtcccttggtacattgacatgtacctgtgagattctccaacattgaaggtttattttctcccgtggttggtggttaaagacctgcctggggcctccttctttctggggtgggcctgaaacctcagagctaggcagaaatgtaggtaggtcccagaaaaagtatctacaggatgaatggcttatcttctactttatatgatgagaataaaatatcatttcttatctccgctcttccttagcgtcatctttctttgtcactttacattaggatagtagcaaattcttagaggccatgtaaacaaagtgtgg

SEQ ID NO: 263611 - DNA, 611 bp, Homo sapiens
tcacattaagcttattaggatatagggtccactttaggagtcaaaaattataggcctggcatagggaaatgagtgtgaaattagttttcagtgcccatgattagtttataaaacaggaggacacatgaatagcatttataagagtctagccatgaaggaggctaggggacatatcacagtggtattcagagccaaaatctaattagagaaagtaaagttcataagggagaaacaatcaaaacaacgagctctktaacgagcattggggcagatgggcaagttatacattatagggcagggaaatttgttctttggataagtcatcataaatttgaaacatttattatctccatgtgcctggactggatgggcattggataacatgatcaagtgccaaggttataactagctaaattttgtaactgaataggataagaagaaagaataaaaactggcttggcaatgagaagaagttaacagacttttcaaataaagctacctggagggttgtggagctgatttgctgatatgcttggagattaattatgaagatctacactataaatcagaagagaggtttggaagtttggcaggatttacaagtcagttac

SEQ ID NO: 263612 - DNA, 477 bp, Homo sapiens
gccaacaagatactaaagaggaaaaggttgacatcattcaacctaagaatggaaacaagacaaggatgtccactcttacaactcttatttaacatagtactagaagtcttagccagatcaattggccaagagaaacaaaagcatctaaattgaaaaagaggaagtcaaaatttttctgtttggggatgacatgaccttatacctagaaaaccctgaagactccttcaraagacacctggactttgtaaacaacttcatgaaagtctcaggatacaaaactaacatatgaaaatcagtagtattactgtatttctaaaatgttcaagttgagaatcaaataaagaactcaatgccatttacagtagctacaaaaaataaaacctaggaatacctttaaccaaggaagtgaaagatccttataagagcaacaaaacactgatggatgacatcataagtgacacaaacaaatggaaaaca

SEQ ID NO: 263613 - DNA, 626 bp, Homo sapiens
aaattatactatatgattattgtaaccaaagagtgtggtactggtacaaatatagacacgttaatcaatggaacagaatagagaacccggaaataaagctacagacctacaaccaattgatcttcaacaaagtcagtgcgaaaatgaacaatggggaaaggacaacttattcaataaattgtgkgaggaatattggatagccgtatgcagaagaataaaactagatctctatctcttactatatgcaaaaattcactcaaaatggattaaaaaattaaatatgagacctgaaactataaaaattctagaagaaaacctaagaaaaactcttcttgacattggggtaggcaaagaatgtactattaaacccacaaaagcaaataaaacaaaaacaacaaaaccaaataggacttaataaattaatgatcttctgcacagcaaacaaacaaacaaacaaacaaacaaaaaaactatccacaaattacacagacaacctagagaatgggaggaaatatttgcaagttatgcttctgacaaatgagcaatttctagaatctacaaggaactcaaactgctcaaccagaaaaaattccaacaccaccattaaaaagtgggcaaagaacaca

SEQ ID NO: 263614 - DNA, 586 bp, Homo sapiens
atcatcactgtaccatcatgccccatctagtctatcatgtgccctgacatcccaatccctccccagtggatagtacttcaaaatcctgttcatccttttactgctttaaggctattttcctgttagtttgayttgactgactctgagatcctgaagacagtttacacattcagcacaaaattgaaggctgccaaaacaagagaaaaaaaaaactggagatcaatctaattaataaataccacatacctcctttgctcaaagatgcttactactgtctgtatttatgtatgaaatgtgtaactcttggccttcatcagatcttgaaatatctattgatgctgtcattgttttagagcttaaaccagttcttaactggtttaaaccagatgtaagatatagaagtctataagctgaaatagatgggtacctatcagtacataagaacaactcatgaccagggacaatttaatgcacattagttaccctaataatgagtttcattgacctgttatctgtcctaaagacataaaattatctaaaatcaggacattttaatagtgtcaattaccataattaagaataataa

SEQ ID NO: 263615 - DNA, 586 bp, Homo sapiens
atcatcactgtaccatcatgccccatctagtctatcatgtgccctgacatcccaatccctccccagtggatagtacttcaaaatcctgttcatccttttactgctttaaggctattttcctgttagtttgatttgactgactctgagatcctgaagacagtttacacattcagcacaaaattgaaggctgccaaaacaagagaaaaaaaaaactggagatcaatctaattaataaataccacatacctcctttgctcaaagatgcttactactstctgtatttatgtatgaaatgtgtaactcttggccttcatcagatcttgaaatatctattgatgctgtcattgttttagagcttaaaccagttcttaactggtttaaaccagatgtaagatatagaagtctataagctgaaatagatgggtacctatcagtacataagaacaactcatgaccagggacaatttaatgcacattagttaccctaataatgagtttcattgacctgttatctgtcctaaagacataaaattatctaaaatcaggacattttaatagtgtcaattaccataattaagaataataa

SEQ ID NO: 263616 - DNA, 603 bp, Homo sapiens
agaaagctaattatatagttaagtaggayagacaatgctagcatataaactgtttatttgtcttatttatttagggtttacaaacatattatgtctttttctcaaaccttagcatattaaaataaattaaaatacattgtaaaggggattggtacgagcaagacagtaatagcaatacaaggcctcagttaacagtgacaaaagtgaaataaaatgttgcatatgtgcatacccagatatgtatgtaaatactacaaacaggagacactgccttttaggttgcaaacaagctgttttatatactgttataatatataccaattgtcattccaaacatggaaataacttgttcaaatgatgacaaaaaggcactgacaaaggttgacattgagtttggaatgtctcatctaaaatagaccaggtaatcgtattacctaattaagatttccatctaagtgttagaagagcgacagcagcaaaaacaaaatgattgttttttcatgggatgagctccatttctttggtaaaaccactaacacaacagataagtgatatgtaatttatttcaaattaaagcttgatgttttaagaaccaggcaaaca

SEQ ID NO: 263617 - DNA, 603 bp, Homo sapiens
agaaagctaattatatagttaagtaggacagacaatgctagcatataaactgtttatttgtcttatttatttagggtttacaaacatattatgtctttttctcaaaccttagcatattaaaataaattaaaatacattgtaaaggggattggtacgagcaagacagtaatagcaatacaaggcctcagttaacagtgacaaaagtgaaataaaatgttgcatatgtgcatacccagatatgtatgtaaatactacaaacaggagacactgccttttaggttgcaaacaagctgttttatatactgttataatatataccaattgtcattccaaacatggaaataacttgttcaaatgatgacaamaaggcactgacaaaggttgacattgagtttggaatgtctcatctaaaatagaccaggtaatcgtattacctaattaagatttccatctaagtgttagaagagcgacagcagcaaaaacaaaatgattgttttttcatgggatgagctccatttctttggtaaaaccactaacacaacagataagtgatatgtaatttatttcaaattaaagcttgatgttttaagaaccaggcaaaca

SEQ ID NO: 263618 - DNA, 489 bp, Homo sapiens
tggtacgagcaagacagtaatagcaatacaaggcctcagttaacagtgacaaaagtgaaataaaatgttgcatatgtgcatacccagatatgtatgtaaatactacaaacaggagacactgccttttaggttgcaaacaagctgttttatatactgttataatatataccaattgtcattccaaacatggaaataacttgttcaaatgatgacaaaaaggcactgacaaaggttgacattgagtttggaatgtctcatctaaaatagaccaggtaatcgtattacctaattaagatttycatctaagtgttagaagagcgacagcagcaaaaacaaaatgattgttttttcatgggatgagctccatttctttggtaaaaccactaacacaacagataagtgatatgtaatttatttcaaattaaagcttgatgttttaagaaccaggcaaacaaattacaaacaaaaatatgttgaaataatatattt

SEQ ID NO: 263619 - DNA, 615 bp, Homo sapiens
attacgtgaataaattatcaaaatcaaaccttcccaatatataaattgaaattgtgcttyattgtttattttattttattctaattttttattttttaggtcttgtgcatttatcattacatagtctattcctgttttaaaaataattttaacttttattttaaattcaggggatacatgtgcaagtttgttatatggctatattgtgtgatgctgaagtttggggtaggaatgatcccatcatccaggtggtgagcatattattacccaatattacctaagagttttaaagcttgataaacaatgtggcctgcagagtaacggcacccaaagatgtccatgtcttaatcccaggtacctataaacacattatgcaacatagtaaaagaaaattaaggttgcagacaaaattaaggttgttagctgagtttaagctacaggtgttaacatggataatctggatgggctcaatgtagtcacaagcatccttaaatgtagacaacgaagccagaataattaactttaaaaaagaaaatgtgaccatggaattggtgtcagagtgttgcgatttaagaaagattcaatcagccattgcttgttttgaagatgaagata

SEQ ID NO: 263620 - DNA, 518 bp, Homo sapiens
agttacatcctgataaactcatcataagttgaaaatacatttaatacatctattgtagtaggcatcatacttagagcctagcctaccttaaacatgacctatggtttcgacctatagttgaatatctcatgaaatttttatatactgtaatgaacgtaaaaaaacagaatgattgtatgggcacttgaagtatggtttctactaaatgtgtatcactttcgcaccattgtcaataaaaaaaattgttaggttgaaccctctaagtcaaggtctctctctatatatagactatatatatatatatgaatacacacacatacatacatatatatggaaagagagagagaaaaagagactatatayagacttattggtaatgtttcttatcccttacacatttgagagaatgtcaaagtcttttcacttgctgagatatgccaactatttatattcagtctcctcagattgtggtctacggatatgcttttctctttagtaggctgggaattagccggggg

SEQ ID NO: 263621 - DNA, 447 bp, Homo sapiens
ctcctagaaacttaactaataaaaactgctctacagaaaacaaaataatgtaatgttgatattcataatagtacttatttctaaatatgaaatattgaaaaacaatgtaaatgctcatcatcaggataataaagtattccacatcaacctgataaaatattatgtattgttaaaattattattattaaatatatgtggatatgtggaaggtatagatggcaccactgaggcagagggtagaatttgaattgccatgcaactgaaatacctgtcagtgttgtgtggacattccagagataaaagggacaaggtastgaatatgagttatggaatgccctcagaatcatttgaaatgaagaagtccataaaacactattctcgcatgacaagaactagtggaatgcctgcccccaattctatttgtttttatccttggcaccactgact

SEQ ID NO: 263622 - DNA, 447 bp, Homo sapiens
ctcctagaaacttaactaataaaaactgctctacagaaaacaaaataatgtaatgttgatattcataatagtacttatttctaaatatgaaatattgaaaaacaatgtaaatgctcatcatcaggataataaagtattccacatcaacctgataaaatattatgtattgttaaaattattattattaaatatatgtggatatgtggaaggtatagatggcaccactgaggcagagggtagaatttgaattgccatgcaactgaaatacctgtcagtgttgtgtggacattccagagataaaagggacaaggtactraatatgagttatggaatgccctcagaatcatttgaaatgaagaagtccataaaacactattctcgcatgacaagaactagtggaatgcctgcccccaattctatttgtttttatccttggcaccactgact

SEQ ID NO: 263623 - DNA, 580 bp, Homo sapiens
tatcctttttttgtatggttacccagtattccatagtgtatatgtaccacattttcttcatataatctataattgatgggaagctagttgattccatgtctttgctcttgtggatagtgctgtgatgaacagatgagtacatgtgtcttctttatagaagaattcgttttcctttggatatataccagcaatgggattgctgggtcgaatggtagccctgttttaagttttatgagaaatctccagactgcttcccacactggctgaactaatttacattctcaccaacagtgtttaagtcttcccttttctctgcagtctctccaacacctgttgttttctgacttaataacagtcattctgactgctgtgagatggtctctcattgtagttttgatttgcatttttctgataattagtggtgckgagcatatcttcatatgcatgttggccactactgtgtcttcttttgagaagtgtatgttcctgtcctttgcccattttttagtggggttatttgttttttgcttgttggtttaaattccctatggattctggatattaggcctttgtggaatgc

SEQ ID NO: 263624 - DNA, 528 bp, Homo sapiens
gaaaaatgaaacagtgtagaaaaacacacggataattagggaaaaaaatgaaacctcaaagaataaaaaaaatgccaaaagtcaaaatactattaacagaaatttaaaaattcctttratggtctcaatagcagataggccaaataaagaatcagtgagtttgaatatgtcaacagaaacttcccataatacaatgtaaagagaaagaagtatataaaaacagaacaaatcatccaagcaatgtggaagaatttcaaaggtggcaatatgcgtatacttgaaataccccaaaaaagaattaagagagaatagagcaaatgaaatatttaaaataacaatagctgaggattttctaaaaaatattgataattaccatatcatagatctagaaagtacagagaacaccaaacaaaataaatactaaaatatcttaatctgaacccaaagtataccttgccatgtgtacataaaataagccagggaaaaaggttgcatgcagtataatttcaattctatgacattatgaaa

SEQ ID NO: 263625 - DNA, 575 bp, Homo sapiens
acaccaaacaaaataaatactaaaatatcttaatctgaacccaaagtataccttgccatgtgtacataaaataagccagggaaaaaggttgcatgcagtataatttcaattctatgacattatgaaaaatgcaaaactaaaggtacgtctatcagttatttccaaggagttaagggaaggaaggagggttaaaataatgaaacattggagactctttagggcagtgcaaattactgtgatactataatgttgtatacatgacattttgttcatatcaaaacccatagaatgttcagttcagaaggaaccttagtgtatacaaatttcaaaaaatcatttggtaggctgaggatcccaggaggaaatgcagactgacaaaagaatctaactgtattacaaatgtatgaaacaacttcacttaagtgggtagtaagaaaagttgttgacctaattaaygacgtcagtggaggttgtaagactaaaggtaaaaggaactgcacataagctccttaatctaggttataaggttgttctgcagagtacataggttaacaatcatagcactgctatgcaag

SEQ ID NO: 263626 - DNA, 616 bp, Homo sapiens
ctccatgctgttttccataatggctatgccaatttaaattcccatcaacattgtacatgtgttcactttcctccacatccttgccaacacttgttatctttttaataacagccattctaacagccttgaagtgatatctcattgtggtttaaattttcatttccctgatgattagtcatattgaatacttttttatatgcttgttggccatttgtatgtcatctttggaaaaatatgtattcaggccttttgcccatttttaatcagattacttgactttttgctattgagttatgttaatttcttatctattttgtaccttaaccccttcccagggtgttaatatacaactcagaggtgccaaatttgtcatctgccatatttttaccctggggtyccagggatctcccctcataagagcccccttcccaggaagagaaggcagtgtatcattgctagggtaataggtgatgtccttatgaaaaaataggcctagaaatctgagctaaggtcttcgaaggcgtttccagctgatctatctttttttttcattttcatgaagctcatattgaccaaactctatttttaaagagacaaaaatagctgaggaaagaag

SEQ ID NO: 263627 - DNA, 544 bp, Homo sapiens
tcatttactgctagggcatcttaaaataggactagtaaaaaaaaaaaagagtaaagtaagacttttatttctgtagaaggcagaaggcaactcatgtcaacaaagaatgtataatagcatttcatggtctctgtcttgccctgccttacttgtgtaacttttactgtggacatagaatcccattctttctcagtgccttgcttgaagtaaattgatttctgcattttctgatccagttgtgaaaaccctcaattttctcatttttcattcaagaacagtgatatttatcaaaataatattttcacacaaaaaagtaaaggaaggaagaaaratatcacattcagagtggatgcttttaaggataatgggtattgcagatttggcaggctcaagaaatcaagtgcacaatatcaaggttgttccttttcctaatttaacattctctatagtagaaaatttatacacactttttgagatgttctgattgtaattatttcttaaccaactggggactcatttactccaatatgcttccaggtttgtt

SEQ ID NO: 263628 - DNA, 484 bp, Homo sapiens
aatcagttcaggagtaataaagtatttcaagattktaatcatcttcagagtattttattttcccacagtcacaaaaatcaatgaagcctctctcagggtttggaacctactagttattgctattcttggcagtagataataagcttataatctgtaggcattgcaagtgatccaagacatttgagaagaggaacaaccccttatcttccatttttcatgagtggacaatagcaagagaaacagaagttattagaaaaatagaaagcaagacagagaagacataatttgactttataacttattagaaaactccttaaattcacagtggctcacacctgtaatcccagcactttcggaagctgaggcaggcagatcacctgaggtcaggagtttcagaccagcctagccaacatggtgaaactccgtctctactaaaaaaacaaaaaagaaaaagaaaaaagaaaaccccttaaattcaagacca

SEQ ID NO: 263629 - DNA, 564 bp, Homo sapiens
ccttcttttcttctcttttttcctttctcctttcctttggatcttccttcctagagcacttcccctgcaatcagaggaaattagaaagtccccaaagatcaaaaagtcaaaataattaacagattcgttaattcattcaacaaatacttaggaagtctccagcattgtcccattgtggaaaaaaacagaattgaagttcctaccctcaggaagagtatgggcttgcggggaacacatgctccatggagatgagttgactactcctgtgatgagtgcctcttgagcagtgtggtccctggatcaaaggcaccagcatcccttggagacttggtgcaaattcttggcccacttcaaagctgctgagttaggrattctgagggtgggtccagcaaactgggttttaaccagcttccaggtgattctgagaaccactgctaagaaaagaggttaacaaactttcaggaaagggtcagattgtaaatatatttcaggcttttcagatggtatggcttccgtcacaagtactcaactctgcaattatagtgcaaagctgccataaataac

SEQ ID NO: 263630 - DNA, 379 bp, Homo sapiens
atctctactaaaaatacaaaatcagctaggtgtggtggcacacgcctgtaatcccagctactcaggaggctgaggcaggagaatcacttgaacctgggaggcrgaggttgcagtgagccaagattgtgccatcgcactccagcctggcaacaagagcaaaacttcatctttaaaaaaagaaagaaagaaagaaaagtgtgttttgcccaatggagactaaagccaccaaaaagaaatatttaagtaagtaatagagatacatttgccagaattagaaaaagctgaaagacttcagaatgaaagaagagagatgagtggtgaaaactagaacaggatgtattataatgaaattaacaatatcaagagaaaattataaaag

SEQ ID NO: 263631 - DNA, 562 bp, Homo sapiens
acagtcagctctgcatgaattaaactctttctctatgacaattcccttgtcttgataaattggytctctctaggcagttgataaggagaacttattgggcagttacactttcctccttctagacacaccttacacaaactgtttctgtgccttagttcatgacatttcccataggtagaatattcccctcctctccctcttctatctaccctattcttagatcctgctggagctcagatccgctctcctatggaaggtctttcgtggccacactacccagttgcctctgtactccacagtacactagtgcctaccattcatccatgcattgctgaatcagagaaggtccctgatgtaggagtttacagcacagtgagaagagaggagacagaaagaccacaacaatccatctgcagcatcagaaattccttccaacgaagaaagctatttttgtttgtgtgtgtgtgtgtgtgggttttcttgccttgtattttgtggaaaaggtaaataaatgactctaagaaatactatttattaatgattttctttttaaaatcataca

SEQ ID NO: 263632 - DNA, 540 bp, Homo sapiens
ggtgaccctccgtggcggcaggcagtgacggagaggagtcttcccatagctcagcacacaaagctggtgttgttgaaatgagagccgtgtaatcagctaaagaattcctgagcagaaccaagggcagcagatacccaaaccttgaacttctttacctccctgcatttttcaagtgcttcctggagaaaggagcacccaggggcctggattctcttctaacttaattaggggcatgcagaaatggggctgaccctgagaattgtctctggaggcccagggctctgaatattcctgcttggagacagcaagagccttggyaggtgtttgtgttaaagggatgtcatggacttttccagtgccctgactccggaatgatggggaaatggcaatctcctccccaacaggctatctggaggccctctccacaggttctccacaagaggctgacatttctccactagtgactataccctcatggcccatggaaataaatgaagagtcaggaatcagcattcatttttcagctcctgccatgtgcca

SEQ ID NO: 263633 - DNA, 540 bp, Homo sapiens
ggtgaccctccgtggcggcaggcagtgacggagaggagtcttcccatagctcagcacacaaagctggtgttgttgaaatgagagccgtgtaatcagctaaagaattcctgagcagaaccaagggcagcagatacccaaaccttgaacttctttacctccctgcatttttcaagtgcttcctggagaaaggagcacccaggggcctggattctcttctaacttaattaggggcatgcagaaatggggctgaccctgagaattgtctctggaggcccagggctctgaatattcctgcttggagacagcaagagccttggcaggtgtttgtgttaaagggatgtcatggacttttccagtgccctgactccggaatgatggggaaatggcaatctcctccccaacaggctatctggaggccctctccacaggttctccacaagaggctgacatttctccactagtgactayaccctcatggcccatggaaataaatgaagagtcaggaatcagcattcatttttcagctcctgccatgtgcca

SEQ ID NO: 263634 - DNA, 494 bp, Homo sapiens
attggctaattcagtgttttyggtgcctttatagaacataactgcctcaaataacacgaatccactgtactcatcaaacatctcaatcctgacaagaaagaccgaaatccttcaggcaggcagacaatgttctgccgaccttgctcttgtgctcttactgatgtaggtgctgctgcatgtctggtgtgcctggccccaggtgccaggacctcagaaccacccctgacaccagccctcccccttccctggagaggctttcccatgtctcaggcttcaagccccagctcctggccactctctctaaactcctcccagtccctgcagccaaaccaatgtccccctctctgtgctctggtgtccccatattgtgccaccacacaatgctggatggcatgtctcccagaaggcagagagcagagtgagtaggtgcgccgtggtgagggtagtgactgcacttgcccatgagggctgcagtgacatgaaccagtgtggga

SEQ ID NO: 263635 - DNA, 528 bp, Homo sapiens
gctccaaggcccaccagactgaaatgggaattgcaatgtggggttttattctctcatggaaaactccttccacacctaaaaaagaatcagactctaaaatcaagtctacccaacgtgaccttaaaaacaatgtagtaagccagagttatttaaaacaaactagaataatcctaactgggtaagaacctgctgcctctgggctgaggaggcctgatcccagagagsgacccctcctcctccctaggccttttggccccatgctccaatggtctcctacaagccttgatttcaatatgagcaaagccaggtggaaactatgagtttgaatgaatctccccactagactgtaagcaacttgcagaaagcacttttttcatctccttactcctttaacaccttgcaaagtgcttgactcaacactgtttaaaattatctttcttatttattggtttacttgtctgttatctgtcttccctaccactagacttaaagaaccatgaaataagaaacatgttctattttgcttgt

SEQ ID NO: 263636 - DNA, 591 bp, Homo sapiens
tgatgcatgtctcttaaaggagctggctgttcatctccacctcaccaaccagcacacagcccaatgcccaggcgcaggaagtgtgggcccaattgaaatcatcccccaaaggaggtgaatttgagaagaaccaacgtcccctgcagggatcagcattagcattaggggaccttgctcctttaattaacaaaccaggcgtaacttttactacgcagcctgtcctctcctgcctctccttctttcttttaactccagttctttaacaaatccctcttttcaggaatgggaagctgatctgtttggggacrtgccagtgaagcggtgtgcgttggcaccaccagcggctgtcattctcaggagacaatgggattggagcgccaagggggagagttctccatgcagaatttccctgcttaatccgctcttgtgcgctggcaccaagtcaacaaaggaaaggaaccaaattacccgggcggctttggcaggctgcaccactgtcagcgggccagaagttaattccctcatcttcccccgtgccaccaactcagggggcaggtctggccaggctggctttctgtgtaaggctgtcag

SEQ ID NO: 263637 - DNA, 605 bp, Homo sapiens
aatcaccttttgcctgacacagagttgacttgcagagtagtggaatgaatcactaaattattctaaacaaatattatggtgtattgtacaatataccacaagcactcacagggaatttgagtaagttatttttgcctctcttgacccagttatcttagatctaaaattgagagctaaagagagaagggtcttgcaggtcccttcaaattctaatagtctatgtttgaatttattaatttgctcccagaagtgatcgtcattttaatgaagctacctgtgaaaaatattttaaagaggaacagaagacacaacatgtaatttgtgaggagtccacgtggctctaaagtagccattttccatttggaaaggacttagttacactcttgtgcctaaagtagtgacttaacaatgaaaaagagacagcattttcccacctctgtggttcccttgctttctcgtgcatccaacagtcacttcctgctcacctgcttcctgaggggatgccagtgtgaatccaccaagtcctgcagccccaaaacgacaggttctagaagtggagaaccaacakggatacacacggctttcatccaagagagaaagagtag

SEQ ID NO: 263638 - DNA, 526 bp, Homo sapiens
tgactgccatttctttggagctgcagtcaaaccaggccagtgctctgggctatctagtcttctcagagtccctcctgcctgaggacaggctgtgcctgcaccctggtgttcagatgtgcagagttttgctctgtctctgtgtctcaacctactgctttacaaaaaccaagatgagatggaggaaaacctcctagagacagatgaggctcctagccaaacatccaaaccycacaggcttatactgcccagcacttggatatttggaaacctccggatgctggaactttcttgctttcacttggatactttaaaggaaaagcacgggaatgggttaaatggtaccaacgtgtaaaaatcatgtgttttctaataaattagttactaattgatcaatcaattaattcagttaatcaatcacagactgttgagcaataaataatactgttaacattaatagttattactttatggaacttatcatttacaaggcactttatacttgtgattgcacttatatcccacaatg

SEQ ID NO: 263639 - DNA, 548 bp, Homo sapiens
tgatggccaatggtttaatcaatctagactacacaattcaggcctycataagaacccaaaacgattgggttttgagaacttcctgatagctgataggaggtctcttagaggtgatgtgtctagggagggcatggaagctcccagttccttcccgtacctcaccctatctgtgtcttcacctgtatctttatattacaccagcatatataagtaagtgtttctctgagttctgtgctctagcaaattaattgaagaagaggaaggggtgggagtctcaattatagccagtcagtcagaagtacaggtcacaacgtgagtcttacctgagtcttacaattttcattggaagtgggggatagtcttgtgagactgagccctcaagctgtgagatctgatgctatctccaggtaaacagagtcaggattgaactgagttagaggacacctgactggcgtctgctgcacaattgattgattggttgctggtggggagaaatctccacacacttggtgtccagaggagaaatattctgtgttgattgttgggtg

SEQ ID NO: 263640 - DNA, 566 bp, Homo sapiens
taattcatatatttttaaagagaaacattgaaagggaatgattttattgagtatctagatttatataaactcaccgctgagctggctgtttaatatcctatatcatataatcctcaattaagcccatggttgctattattatcccccaggtgaggccaaggaggctcagagatgttttgtagcttgccccaaattcacagagctagaaatggaaaaatggggtcagaattccatttttgtaccccaaagtagtgtcctttctactttgccatcttctaatttgagcagacataggacctttgagatgaaaactagtgagcactcatagcctggatatgcattttccagatcttcctatgtgacactgaacccatggccagccataggccaagagacacmaagaatgggcctaaaggatagagcagttctcaaagatttgcagctgggagctatttgaggtcagagcaggcagggtgatagaaattctggtaagtaggggacagaaaagcattcaaggacaaaggaaagaaaatgttcaaaaacattaatgggatcaagacaccaat

SEQ ID NO: 263641 - DNA, 552 bp, Homo sapiens
gctagccagttgtgagtctcttcttccatcacgatctctgattgttaggaagggcttcctaaaatcgagtggaagccaacctctcatccgggtgctcatccaaggcccagatgctcctcaatgtttcccagcctcccttgcagctgggatgggttgtgtggctggttctggataatgggatgggtggaagtgacacgtgccacttccaggtctggcttaacatcatcccatgtgtttctccagctatctcttcccttcactgggaagggaggaagccatttctgatggcaatgcttaaagcaacatgactgaggctaactgcatgrccatcgcccaactttaacatgagcaacaaatgaacctgctttgtgcttagccagcaggatttcagggtttattcattcctgcagcagagctagtcctgtctgattagccccagctattgttctgaggttcctggacacatagatgactaagactggcttctgccctcaatgggctcacagtctgacagaagagacagtcacatgacttagtagtccagaggctgcc

SEQ ID NO: 263642 - DNA, 552 bp, Homo sapiens
gctagccagttgtgagtctcttcttccatcacgatctctgattgttaggaagggcttcctaaaatcgagtggaagccaacctctcatccgggtgctcatccaaggcccagatgctcctcaatgtttcccagcctcccttgcagctgggatgggttgtgtggctggttctggataatgggatgggtggaagtgacacgtgccacttccaggtctggcttaacatcatcccatgtgtttctccagctatctcttcccttcactgggaagggaggaagccatttctgatggcaatgcttaaagcaacatgactgaggctaactgcatgaccatcgcccaactttaacatgagcaacaaatgaacctgctttgtgcttagccagcaggatttcagggtttattcrttcctgcagcagagctagtcctgtctgattagccccagctattgttctgaggttcctggacacatagatgactaagactggcttctgccctcaatgggctcacagtctgacagaagagacagtcacatgacttagtagtccagaggctgcc

SEQ ID NO: 263643 - DNA, 579 bp, Homo sapiens
aacccttctcacaagtcagcaaatcacggattgagttagcaaagagctcattttatgatacacgagataatatacgaaaatacatattatgatagcagaaaagatagacatttatatcaaataaatattataaaatcagctttattccaaagcattattgaatgattccatctgccagatggtttttgttgttgttctggggggcaggaaggaagttattcctaagaaggataaagataaattaatatttacccaacttttaaaaaatttgcctcaaaaraatgaatgatttgagtattgccatcacgttgattatacaagaataatttatttcatgattaactctgaattttcaagttgttttcattatgagcgctgaaagaaacaggcaagtgcgcacaagttggccaaatggtcaagataaattctggtcaattctttaaggacggtcagtgttagcaactccatctcaggggtcctgctctgggaacccatgtgtggtcatcaggatcacagtcaccgtcctccacaaaattcccctggaggtggcagctgaagacaactctgtaagggtggaga

SEQ ID NO: 263644 - DNA, 579 bp, Homo sapiens
aacccttctcacaagtcagcaaatcacggattgagttagcaaagagctcattttatgatacacgagataatatacgaaaatacatattatgatagcagaaaagatagacatttatatcaaataaatattataaaatcagctttattccaaagcattattgaatgattccatctgccagatggtttttgttgttgttctggggggcaggaaggaagttattcctaagaaggataaagataaattaatatttacccaacttttaaaaaatttgcctcaaaagaatgaatgatttgagtattgccatcacrttgattatacaagaataatttatttcatgattaactctgaattttcaagttgttttcattatgagcgctgaaagaaacaggcaagtgcgcacaagttggccaaatggtcaagataaattctggtcaattctttaaggacggtcagtgttagcaactccatctcaggggtcctgctctgggaacccatgtgtggtcatcaggatcacagtcaccgtcctccacaaaattcccctggaggtggcagctgaagacaactctgtaagggtggaga

SEQ ID NO: 263645 - DNA, 579 bp, Homo sapiens
aacccttctcacaagtcagcaaatcacggattgagttagcaaagagctcattttatgatacacgagataatatacgaaaatacatattatgatagcagaaaagatagacatttatatcaaataaatattataaaatcagctttattccaaagcattattgaatgattccatctgccagatggtttttgttgttgttctggggggcaggaaggaagttattcctaagaaggataaagataaattaatatttacccaacttttaaaaaatttgcctcaaaagaatgaatgatttgagtattgccatcacgttgattatacaagaataatttatttcatgattaactctgaattttcaagttgttttcattatgagcgctgaaagaaacaggcaagtgcrcacaagttggccaaatggtcaagataaattctggtcaattctttaaggacggtcagtgttagcaactccatctcaggggtcctgctctgggaacccatgtgtggtcatcaggatcacagtcaccgtcctccacaaaattcccctggaggtggcagctgaagacaactctgtaagggtggaga

SEQ ID NO: 263646 - DNA, 533 bp, Homo sapiens
caacagtgggagattggatgggagagaatggacagtgccagtttgtggagttccagtttgtgaaaacccgctaaggagtttggggtttatcttgtgaccgtggggagccatgacgacttttgatcagaggttgtgatgtgtgccaagtggtgttttaggatgaataatctaaccatgatgtatatagagactcaatggcttgtttactgcctggactgcgtgatgctgtttctcaggccatcttccaaggacaaatgacgttttaytgtatacaggtaggctccctggtattgtattaggaactgaccctcacagttttattagttaggagagggaaatgttctatcaccagcatctcttaaatcttcaggggcaatattttatcagtctttgaaatgtggactgaatgatggatatgcgatccactcttaaatacagcactgctaagcttagccctgcaatcatgtggttatgaaatattatccagcctgaaaccataagaaaaacccgcttagtctgaccttctcacaaca

SEQ ID NO: 263647 - DNA, 603 bp, Homo sapiens
gccccacctcttaataccactacaatgggaattaagtttcaacatgaagtttgaaggagacacattcaaacaatggcagtgtatgttatagattgagtctatgatttttttttttttttttttggctgggggtcaggagagagacttggaaatattccaagacctgaaaacagcaaaaaactgacataatgctatgttctacatttccttaatggacagaactgtataagatgatttagaatgagcagctgacttttggagaatgaagaatgcactagcttcttcacaatgtcctaaacattggaagaggtaacttttgtttagctaataaaaattttaactgaagatgtattatgtgatcaggtatggtgtaygtttgggataaaaaggtgaatttaaaatgagcctggccctcgaagagtctacactagagtgggaaacagacaactcattgttgtttaaagtggaaagtccaatagaagtgcttatatcaggtatagacattgtacaaaggattaactgtgtctggggtggtgagggagagatggtgaggaatttacagcacctagcactgtggatggcacatagtagagactcaataaa

SEQ ID NO: 263648 - DNA, 605 bp, Homo sapiens
cctggtgggaaccctcccttgggaagcaacacccccaaaccagcagagctcaaagcaaaacaggcactggaagcaaaaactgtatgagtggattattgggtgtaatgatgaaaagaaccacttctactacaaccaccactcccttctccctcccagccccacccttgattcttggaccttgtattttgggggaagcagtactatgtactgactcctgactcaaagcattttctgtgtcctccaagaggtaacttcactatgttagtgtggtrtttcccagctggtgctggaactcagtcttcagtagaactccatcatccttccaggtgagctgcttctggctgatgaggtattgataagactggtaaattccatttacatgagtcctttgctgcatttcttttgccatgagatgagttcctcagaaagaagtaatattgtgtagactatataacagtgagtaagatacaacataagtcatggatggtagttctgtcagaaacactctctgggccgggcatggtggcttatgcctgtaattcccgcactttgggaggcggagcaggcagattacctaaggtgaggagttctgagaccagcctggt

SEQ ID NO: 263649 - DNA, 670 bp, Homo sapiens
cttttaattataccgtgtagttcttaaaggcagcaaacagttacaaggtctcaattctaatgggcctggctgccatgcctctcttcttacctgaacaggaagtaggtgtttgttgttgccttgagtggtttcaccattgcttcagacatgctgaaatatcttcctttatttctacaagtgtaaaaatctttctatatccttcttaacggagtccagatttaagaatagaccataagcataagaagtggccagctgtgacttgagtaaatgatactgtcatgagtaatttagaagccatgtgactaagggttttgtactttggagccttagtataattaggtcttggggctcatgagatgagtgcaatgtttagttgctaatgctccttttcgtagcagccaagaagaaacaatctttttaagtagctctgctttgtagcaaggagtcttctatcaaggtttcagggtactgtattttatgtataatattttaaaatattgtggcatctaaccgaayaatttccaaaaatgctccgtgtgagttgtatatttagaatactaaagttgatgtctggagacctgggctatgtgcacagcgctactcctaacaagctgtgtccatcttcctgtgacacaactttccttgactgtaagatgggtaaaataatact

SEQ ID NO: 263650 - DNA, 381 bp, Homo sapiens
taaagaaacttgtttaaaagatttgtaaagaaattaatgtagtgtacaactttagaaaacatggacagtgaccgagtacytaagctgtctgggacctccagcattttctgaacaatattataaattgtctggtgaagacaggagatgagcattagaatccccatttttcatagggagaaaccgaggccagtggctgttactttgcttgttgattgttagtggaggtagagctcttattttttctggctcagtctgaggtgcatttcatttgcctatcctgttcttaaacagcacttataaaatcacgtgtcatttctgcagttatatttaggatacagcctaaaatgctgtataaacaccctgtgatagaatgctgaaggc

SEQ ID NO: 263651 - DNA, 381 bp, Homo sapiens
taaagaaacttgtttaaaagatttgtaaagaaattaatgtagtgtacaactttagaaaacatggacagtgaccgagtacctaagctgtctgggacctccagcattttctgaacaatattataaattgtctggtgaagacaggagatgagcattagaatccccatttttcatagggagaaaccgaggccagtggctgttactttgcttgttgattgttagtggaggtagagctcttattttttctggctcagtctgaggtgcatttcatttgcctatcctgttcttaaacagcacttataaaatcacgtgtcatttctgcagttatatttaggatacagcytaaaatgctgtataaacaccctgtgatagaatgctgaaggc

SEQ ID NO: 263652 - DNA, 579 bp, Homo sapiens
atttaggatacagcctaaaatgctgtataaacaccctgtgatagaatgctgaaggctgccgcctgggtaattatcatgtggttctagtatcgtatcatctgcattatccagattagaatgtatcacccacttctaagctggtctagaagaaggagcccattgtgtgcaaggccataaggatattgcctcatcgttcccctgtgggtaaagatctttgtgatacacagaagaccgtggaacttcattcttatttgaaaacacttgtgactggtaataatcctgaaatactaaggctttcccatgccctcatccccaaaattcctctctaatatgctttgttttctttttttagaattttgtgagatgtatttaagattggccatctgaagggaacatttgtcacagcactgcctaatctttagatgtgtgtaaatgcagatatgtttaatgaactctttcattttcctgcttacatggagtggggmaagtttcttcattgaggctctcacttctggtttcagtccatttttagccccttgattagtgtgtgtcttgggaaggttggagctaagccactga

SEQ ID NO: 263653 - DNA, 579 bp, Homo sapiens
atttaggatacagcctaaaatgctgtataaacaccctgtgatagaatgctgaaggctgccgcctgggtaattatcatgtggttctagtatcgtatcatctgcattatccagattagaatgtatcacccacttctaagctggtctagaagaaggagcccattgtgtgcaaggccataaggatattgcctcatcgttcccctgtgggtaaagatctttgtgatacacagaagaccgtggaacttcattcttatttgaaaacacttgtgactggtaataatcctgaaatactaaggctttcccatgccctcatccccaaaattcctctctaatatgctttgttttctttttttagaattttgtgagatgtatttaagattggccatctgaagggaacatttgtcacagcactgcctaatctttagatgtgtgtaaatgcagatatgtttaatgaactctttcattttcctgcttacatggagtggggaaagtttcttcattgaggctstcacttctggtttcagtccatttttagccccttgattagtgtgtgtcttgggaaggttggagctaagccactga

SEQ ID NO: 263654 - DNA, 605 bp, Homo sapiens
acattgttcttggataacttgtcatctctttgcctcctatttcccgtgccccagtgcatctcagatgcttctttctccagatttatcttcctgaaccactctttctacctttgctattaacaagactgatagattttcatggcacatgtgctgaagctgggcatagaagggcttcatagatcagctccacagcttctggggtatccctcaccttatccttcccattgtgatgcccttgggccatggtgaaggaggtagttggccatgctgtgcccttctttttctattgtaaaacctgtgctgagttcctcagccttgccacaatctaagacatttggctccttcctggagatcccattctggatccaaggatttaaggagctccagcctgaccctgaaactctgtgtcaagtcaggtctggccttgcctttgtgtcccttgttgggagactgggctttggctttgttcccaagttgtgatttctaccttgmccctgattctggtgactttctcagttcctgccttggtgtcttaccccgaccccagctcctctggaatggcttcttcccttggacagtcagcacggagagacagtcttccctcc

SEQ ID NO: 263655 - DNA, 572 bp, Homo sapiens
tcaaaaaaaaaaaaaagagaaaaattgaccatattgtggatagtttacatgaaatggcatgcatccaytttaatgacatgtagatgtgttttgacaaaagttacctgtgtaatcacccccataatcaagatatggaatgattctatcacccccaaagagttctattctgcttctttgtcttccctactttacatcctaggcaaatactgatctgctgtctgttactacagatgaatttcacacaaatggaatcatacagtttgtcctctttagtttctggcttcttttgctcagcataaggattttgagattcgttcatgttttgtgtataaggagataaaatctttcttattgctaaatagtgttccaatgtctggctataccataatttttcatccattcatctgttgatggaaatttgggttgtacccacatttatctattatgaataattatgtgcaagtcttttctttaaacataaagaaatttctcttgtataatacctgataagtgcatgtttataagaaactgacaaactgtttttcaaagtggtcgtaccatttcacactccc

SEQ ID NO: 263656 - DNA, 518 bp, Homo sapiens
atgtgtcaaattcttctcatgcttcaaatctctggcttcctctttttagagcagccacagaaaactccacatttttaaagagctcagggaattagattagccccaatgggacaatgttaaacttagctgatttgagatcttaattgtatcgcaaaattacttcacagtagaaaataaattaatgtctgattgatgaggtgtatacattaggggtactggtaatcttgatggccatcttagaatcccacctaccacagagaataaagtaaagatgacattaaaaaggaaatgttccaggcatggtggctcatgcccataatcccagcactctgagaggctgaggcagatggatctcttcagcccagtagtttgagaccagtgtgggcaatatggcgaaaccccatctctacaaaaacataaaaaaattagataggcctgtttgtgtgcacctgtagtcccagccactcggggaamctgaggtggaataattgcttgagcctggaaggttgcgggtactg

SEQ ID NO: 263657 - DNA, 589 bp, Homo sapiens
attgaaggtcaatgaaattggatagacaagaaatacagctaaggaacatagcagtccagaacactgaatctgcaagctatatcaccaagtacacaaatgatgaatgagccttggtgtaattatcagatgattcaattttaaattggaacagctagaacagtggttctcttccagaaaaacaaaggccttctaatttagcaatagtagaggtgaccattttctctagattcaccataaaatcaccccctagatggaaacatgcctgtagacacattgtactcataaacacagagtctctatgccattttcttgaagattcagttcaaggaaaagtaacattggaaacaaacatatattatagctgactgtattaatcatactggttctactacagaaaaaataacacatcacctaaaagaaatgagaatgaaactgagataatcggtaacactaaatgatagaaaagcsacacatgcaaatctctcagggaaaatgatttgaatccagaattctaaactcagacaaatgttaaaagcaaatataatatttttaaacatgccagatctaaaaaaaaatgctgttatatgat

SEQ ID NO: 263658 - DNA, 590 bp, Homo sapiens
tctataaaatgttataaatgactaaagggcaccagggaggaccccttccatcttaacttttgttatgtattatagattaacttccctctttcctttctcatgcgaggactgcatgactatcacagtgtccaaggcaacatgtttaaatacactcttctattttattttatttttataatttcaacatgtgttttagattaaggtggtgtatgtacaggtttgttataagggtatattgckttctgctaaggtttggggtacgaaggaccccatcacccagttagtgagcatagtacccagtaggtagttattcagtcctttctcttccactctcctcttctagtattcccagtgtatattgttcccatctttctgtccatgaaatatactcttttaaattcaaaaggaaaagaaaataagcgataggaaagagaacaaactgtaactaattaaattacttacactcataaaccaaaccagccttatataaaaactgttacagtcccactacatttatttgttttctgcctatgtaaggaagaccttgacttttaacttcaaggcacgacaccattcctttggagtttgtg

SEQ ID NO: 263659 - DNA, 563 bp, Homo sapiens
tttcagtttctataactgtgagaaaataaatgcctggtgtttaatgaagccaacctgtctgttgcatcttgttatggtagcccgagattattaatacattcttttgaagtgaaagagatctgaatttttctaactgtatcagatatgttgaacaagttacagaagaaagaatggatccaaagatgaaaaccagcaaaaagaaaaacaaagtttttcaaaccatagtgatatatcttgatctcttgaataaatatattgctttctaaatttgatggtacaatagagttcccacatccttgaaccacacaagatgttaaattctagcaggcgtgagtggagaaaccagagttttccatagagtttagaatgtgaagagcacatggcacaagggcatggaccaccgtctatcatgattgtgagttaacctctttgttcctttcttatattgtgatcctctgaaaggaaaaacatwaaaaaactcttataaaactaagcaaatgaaacaaggcaggttgacaacagaatacatacagaatgagtgaacattaaatttttggctcctt

SEQ ID NO: 263660 - DNA, 635 bp, Homo sapiens
atgataaaaacactcaacaaggtataaagggaatgtacttcaacaccataaagaccacatataataatcycacaactaatattatactgaacagtgaaaatctggaacccttttctctaagatcaggaacaaaacaaggatgcccattattgccacttctattcaatatagtattggaagtccttgacagagcaataaagcaagagaaagaaataaaatgcatccaaataggaaaagaaaaagtgaaactgttactatttgttgacaataaatattatataaagaaaactgaaaataatccatcaaaagaatgttagaactgacaaaaatttaataaagctgtaggatataaaatcaacataaaaatcagcagtgtttttatacactaaaaacgagctttcttaaaaatcaatcaagagaataatcccgtttacaatagctaaaaaaaaaataaaatacttagaaataaatttaaccaaaaagtttaaagacacaaacactaaaatctataaaacattaatgaaataaattgaagaagaaatacataggtgaaacaatattgtatgtttatggattaaaacaattaatattgttaaaatgactatactacccaaagcttactacaaattcaatgc

SEQ ID NO: 263661 - DNA, 562 bp, Homo sapiens
aaaacacaaatattaattgtgactgctctaaactgtgatgtcagtatgcatttttaaatgttttagtaacacataataccttaacccttgttttagacttcaagttattctaatgagaattaacagcaaatattctcagaggatagattagtaaaatatctaagatattttactaagatatttaaagtatcctaagatagactttgatgacttctgtatttcctggacaccacaaatcaaatattttccctagatgtgaaatctctcaaacgtggccaccaactctgcaaaacggcttagatttaacccacccttccatytcctgtaagggcaataacttcatgtctgtttcctgtaatttttttcatagcttctcagaccttacattaactaatatcccttatttctccagaatatttaagatctcttgtcaacttgatcttttccagctacatttttttttttgagatgaagtctcactctgttgcccaggctggagtgcaatggcacaatctttgctcactgcaacctccacctccagggttcaagtgattctcctgta

SEQ ID NO: 263662 - DNA, 570 bp, Homo sapiens
tattccactctccaggtccatgtgtacacactatctcccacttaaaagtgagaacatgcagtatttgactttctgtttctgtagtttttcacttaagataatggcctccagttccattcatgttacttcaaaagacatgatttcatcctttttatggctgaatagtatttcattgtatagatacacaatacatatatatacacacacatacacacacatacacatatatatacacatatatatgtgtgcacatgttcttttgtatggctgaattgtatttcatgctatagctacatacatatgcrtatatatacacacacgtatataatacattttttatatatataacatatatatgttttatgtatatatatatattttatgtatataacatattttgtatacataaaatatatatatatagcatattttccttatccaaccatctattgatgggcacttagtttgattccatatctttgttattacaagtagtgctgttatatacatatgaatgtaggtatctctttgatagaataaatttttatttcctttgtaaatgcccagtag

SEQ ID NO: 263663 - DNA, 592 bp, Homo sapiens
tataaacattggccctaattctgccctttggaattaagaaaacaatataatctctcttccatatggttctaataaaagtatttattaaaaagtgggaattttttattctcttgcgctgtaagggaatagagggaagagcccaagggaattctttctgtttgcatgaatgccaacacaacctgctttaaaaaaaactgtgctataacatggtcagggatcaacgtaatgaatactggtgctataaaaatgactagtacacaggaaacacaaaatcaagtgcgggggaaatyatctggggaattcaagctaaaaggaattctgacttctgaaaaaaatacagttcttcaaaagattcatgcaaaattcattttacctttttcagaggaagaaaatcagggaaagtgtacaagaaaagtttatcagagcaagtttagaagaaatcactgaaaccaaataatatccaacatatttattgaaatatccaagtgtagttatgtatcacttgggttataagcaatatttttaatattttgttagtagtatcacaaacctataacaaagctacagaatataagacaaaaaatatacatgt

SEQ ID NO: 263664 - DNA, 569 bp, Homo sapiens
accagtagttctcaaattgttgtctccagtccagcaacctcagcatttcatgtgaastaattagaaatgcatattcatggccctccactcagatctgaaaaattagaaagtctggctatgaaattagcaatttatattttaacatgttctatatatgtttattatgcacattaaagcttgagaatctttgccttctgccattccccaaccctagaattgacaactttttaaagggaacttctcaagtaattttggtaaactgatctgcaaaatagaatgattatttatatatcttatttttattcttattttcctacagagaaaaattttctttattttatatttattagcactttaaaggatatatgcattaaaattagaattttgtgttcgtttcgctgtttgttttcaaattatagttctttctgaatacaggtcctattaggtagtaacataaccataacataactagcaaagatccatggaaagtggaaaataactgtcatcattcaggtgctttctgaaaactctcattataggacaattttaattagaagtctgtacatatt

SEQ ID NO: 263665 - DNA, 537 bp, Homo sapiens
gtcattgttgctggctatttggctaaatttcaactcaatttcagccctgatcagtgattcgaaactgacccacacagatgggcaaccatgtggtgcccagtgcatattaatcagaagattcccctactccataaaggaatagatcagatgtttaaaaagaaactgtgtgaggacaaaatgcagaaggcttgagagatgtgccaaacaattctgagacactttgcatattgactcttcactctgtgatgccttcttgcctgtggggratgtagatcctacataaataatttttccatgcatgagaggaagcaatcagggaataaacatccagttcaaatgatttacagttattttagctttatagaatacaatacatccaaagtttctatttcattgattctccacagtgaaatataattttggttattcatttgttttgtgcctgatttttggttattagtgccctaagggtatggagaactagaaatatgaagcaatcgaagcatgaatgtacatgactttgaggattctatctca

SEQ ID NO: 263666 - DNA, 609 bp, Homo sapiens
caaagcacaaacaaaaacaacagccttgttacataaatgcatgcacaatagtacagccttgtactataaggtttacctatgttatctctcatattaatcctcacaacartcctgtaatcctattgtatgctagcatggtatcttctattgctcttttctcatattcactacccttgaaagcatatattcaatactcttgaaagcatatattcaatttctgttttttccgtttaattgtaagctccgtgttaaagaacctcttgacatgaatctaacattcatgggaaaatccacaataatatgactgtctaatagcatttagacaataaacttgtgttgagcaaataaattaatgtttggaagaggaagatattgtttctattacaaatgcagaatctgaggttaattaggtttaagttctttgctcaccttcaaatatctaataagtagcagagctggaaatctaagacccacttacatttccatgaaacctagatgagtctcattcaaaagcacttgcttttaaacattacattagtatgtgcacatacaatctttcttaagtaatgacttattttgtcatgactatctagtcagccatcaacccct

SEQ ID NO: 263667 - DNA, 496 bp, Homo sapiens
tgaaaacttcactatgttctcctttcctacagtgtgaccataataaagaagtctattttacataatttaagtgagttaaagactgtcagaactctcatttgtcaaagatgctcatggagatatcaattatttatagtattttcaacytcaaattaccaagattgcaaatatttgtattcattaataaagaatgtagattattttcctctttctctctctctctcacacacacaacacacacaaatatatcttgttttctttgtttctagtactccgtgaggcatcattttgtttgtagtagtatagacataatttgttatcataagttatccaggttattgtgagtgagttatgtttaagacactagttgatgacttctaagtgtagttcatcttattcttaaatataggtaaatattatgataggtaagcataataaatgaaccattccatagactttattcatgatcaaatttgatataatttgaaaatttctg

SEQ ID NO: 263668 - DNA, 603 bp, Homo sapiens
attggttttgtgtcctgaatctttactgaagttgtttattagctccaggaaccttttagtggagtctttagggttttctaggtatagaataatctcatcaatgaagagagacaatttgacttcttttcctatttggatgccttttatttgtttctctggcctgattgctctggctaggacttccagtactatgttgaatatgaatagtgaaagttggcacccttgtcctcttccagttcttaatgggaatgcttctaacatttcccatttagtacgatttgggctgagagtttatgtatttgagatatgttcatttgatgcccagtatttcagaaattattatattttttattaattgttccagaaccaggatgcatagtggtggatagagatctaatttagaaaaaataatgtaattctttgtaaaatatggtcatttattcaattagaaatcatttaattcagcttccttgggaraagtctctgaattacaggtagattggtttgttaacgattgtattcctagttggtataatattgagagtataaaaattatgctcctggttcaatcccaggttagtttatttctctgtatctacaaaa

SEQ ID NO: 263669 - DNA, 454 bp, Homo sapiens
tttctcgcattttggcttgtgaaaaagccaaagcatattattacatcatagtgaaatttatatctatgccttargcaaattttaattgaaaactttaatctcttcttattgatcatttcctgctgtttctctgcgtaattcagatgaaggattcgtgccttataaatcccaaatttacaaaaaaattcaacttgcttattgcttatgtatttctgttatatataatatgttttcttatattttgatgtacagtatattagaaagttatctggtcctttgtgtctgtgtgtgtgtgtgtgtgtgtgcgtgtgtgtgtgtaagtgaaaagtttattaggaaagtaaatgaataaagagtggctactccataggcagagcagccctttttgtgtgttctgagagtacattatttatgttaatccataagacaaatgatctctcctgatgtggtttaa

SEQ ID NO: 263670 - DNA, 344 bp, Homo sapiens
ggaacccagaaataaatccatacatctacagtgaactcamtttcaacaaagtttcaaagaacatacattggggaaatgacagtctcttcaataaattgcactgagaaaactaggtatccatatgcagaagaaagaaattagactcctattttttgccatatgcaaaaatcccaccaaataaaactaaaagaaaacactggggaaactcttcaggacattggagtaggcaaagacttcttgagcaataactcacagacccagacaatcaaaggaaacatggacaaatagggccacatcaaattaaaaagcttctgcacagcaaagaaaacaattaacaaactgaa

SEQ ID NO: 263671 - DNA, 580 bp, Homo sapiens
gtaactcaggatatttaaagccatattagtacttggggttttagttttctaaaaagcagggattctttttagaaaaagaaaatttgagatagaatggaaactgggattttacaattctattttatataatacccctctcatggacaaacagaaaaagaggacagagagatagagggaggaacacaaatagcatttaaaggaataaatgatacaaagtcaagtctaaagagaagacaaatcagaatactaatttttatcaatttaatctaaagccttatacmtacaactgaagacaactgatagactagaagaataaagataagaaatactgtattttacaacagggttagttcacttggagggtacctcgtgcttgtggaaaatgtagagggggtagagaaagtaagcttagagaaaacaattatctttcaggcttttaaattatttctgcagatcctagtagagttggggctttggatgggcagggagagactgcagaacaaatcataagaattcctgtatccatctgtctaccagtgactaaaaaaaattgggagaggaaataaaagatgcatttgtg

SEQ ID NO: 263672 - DNA, 615 bp, Homo sapiens
tactaatttttatcaatttaatctaaagccttatacatacaactgaagacaactgatagactagaagaataaagataagaaatactgtattttacaacagggttagttcacttggagggtacctcgtgcttgtggaaaatgtagagggggtagagaaagtaagcttagagaaaacaattatctttcaggcttttaaattatttctgcagatcctagtagagttggggctttggatgggcagggagagactgcagaacaaatcataagaattcctgtatccatctgtctaycagtgactaaaaaaaattgggagaggaaataaaagatgcatttgtgtcccattcatcacaatttcatcttcagatgcagatattgcatctgcactgctgcagagttaaaatttgttgcaaatttacatatactccctgattacatattttttcttccactaattcagaataactcagcctttttcccttttattttccgaaggaaaatgtcatctaattcattttattttagatgatttttcaaaatgtatggctgattttttttcttgcaccagaattaatattgaatttataagtgtaatttttgaaaaataacagctactcc

SEQ ID NO: 263673 - DNA, 613 bp, Homo sapiens
tattgagtcttttattaaaatatatgtcatttttaatctcttgtaatttttttaaaaattagagacagggtttcactatgttgcccaggctggtctcgaactcctgaggtcaagtgttccatctgccttggccttccaaagtgctgggattatagtcatgagccaccatacctaccctcttgtaatatctttttatgtattttgtctaatattagtataactgtccctgttctctttttgttattatttgtatgaaatatctttttccatcctttcactttcaacctatttatgtctttggatctaaaatgagtctcttatagacagcacatatttgaatcatgttttaaaatccattctgctratctctgttttgattgaaaaactgaattcaattacattaaaagtaattactgctaaggagagacttctttcatttgctgtttgttttctgtatgccttatagcattttttacccctcattttctacattgctgtcatcttcaatgtttaattaattttttatagtatggtgttttaattcccttctcatttccttttgtgtttattccatagctgtgttctttgtggttactataggaattacatttaa

SEQ ID NO: 263674 - DNA, 613 bp, Homo sapiens
tattgagtcttttattaaaatatatgtcatttttaatctcttgtaatttttttaaaaattagagacagggtttcactatgttgcccaggctggtctcgaactcctgaggtcaagtgttccatctgccttggccttccaaagtgctgggattatagtcatgagccaccatacctaccctcttgtaatatctttttatgtattttgtctaatattagtataactgtccctgttctctttttgttattatttgtatgaaatatctttttccatcctttcactttcaacctatttatgtctttggatctaaaatgagtctcttatagacagcacatatttgaatcatgttttaaaatccattctgctgatctctgttttgattgaaaaactgaattcaattacattaaaagtaattactgctaaggagagrcttctttcatttgctgtttgttttctgtatgccttatagcattttttacccctcattttctacattgctgtcatcttcaatgtttaattaattttttatagtatggtgttttaattcccttctcatttccttttgtgtttattccatagctgtgttctttgtggttactataggaattacatttaa

SEQ ID NO: 263675 - DNA, 631 bp, Homo sapiens
aattcctactgggtccaaactacccagtctccctggcacaggcaggggaaaacagcagattggagctgcagtcatggctgctgcccctcccccccaggaactcagtagtcttaggcagtctccagctgagcgaccactgagaatctccacagacccaaggccctggtgggatgggttcctgaggggatctcctgatccacaggttgcacagatctgtgggaaaagcatggtttcccgggcgaaatagcacaatcattcaccatctcatttggctgggggtggaagttctccttgccatgtgtggctcccaggtgggccgtcactccaccctgcttttttccttgctctccgtgggtsatgccaactgcctagtcagtcccaatgagagaacttggatacctcagttgcccgtgcaggattcacttgttttcattttcagtgggagcctctgaccgtacttgtttctagtcagccatcttggcccctccctgccatatttttcaagtgtttgaaccaaaggtatctctgtttttgaaacaatcaaaagtcatttggaaataagtatagtgaccaaggtggggtttttttgtgtttgtttttgttttaaatagaggccagacatgatgattca

SEQ ID NO: 263676 - DNA, 597 bp, Homo sapiens
ggggccggggaaaaggatcttcttctcatgaaaaaaggcaaaaaggctaggggaaaacaaagtttctggtcactacactgggctgtgactttagaaaacttcagggtacatttgaaggaaggtacatcctcgtaatcagaacagaagtggttgtctgtgagctttgtgacagcatcaggtttatctccattgtcaccctgggacaagaatcttaatatacctttatcagacctcatctggattggagtgatcatgacttgcgtagatataaacacaagactacctggccaaggtctgggttgaataccgaggaagagagaggaggaaaaacaatacacaacaggccaaaattccatgcctgtcgatcaggtattccttaaatccctggttagtggtgctggctgaggccctgaggaaaggaaaggcaaacctacatctggaatggataccaattgctgtgaggaaaaaaaccaaaacaaaacaaaacaccgtggacccttcgaggataaaaggagcccaacataatcaactttccatctaatggctggttgtcacattggaggctcagcactgataygtgttgctggcaagtgggac

SEQ ID NO: 263677 - DNA, 568 bp, Homo sapiens
tcttctactgatggacatttagtttccatgtttctactattacaaacattgctttttgaacagccccttagatcacaactagagttatttttctctttttcacaacagctttattgagatataacttatatatcataaaattcaccctttaaagtgtacgatycatagttttgagagtattcataaagctgtgcaaccaccacaactatctaattccagactatttgcatcatctcaaaaagaaactctatactcattagcagtaattttccattctcccctgccctggcccctatcaaccattaatctactttctatctctatggatttgcctattttggaaattttttataaataaaatcatacaatatatgaccttttgtgactggcttctttcacttaacatgtttccaaggttcagccatgttgtagatgtacattaatttgattgtggtgatggtttcatgggtacatgtcaaaacttatcaaagtatacactttaaaaatatgaaatttgttgtacgtaaattgtacctcaataaaactaccaaataaaataggcaaaaca

SEQ ID NO: 263678 - DNA, 420 bp, Homo sapiens
aacgggggcaggcgtggcgtctctgggactgccggaaaacgacgtgagggaaaaactcagaggctacgaawaggcgaacagacggagggcctgcctcaggggagctaagcagctcgcctgaagccccccatctggaaatgacgtgtttaactcggcgcccctgcagctccggccgcccttttttgtttaactccgcgcccctccagctccggccgcccttttcgtcgctctcccctcgcggtcgctcacccctgagatccctggttccactgagacgctcagcttcattcggcaactcgcggacaccaagcgccacaaattcaaatacgagatctagagacgctgggtctcaaacgtctcccagagtgaaagacagaggaaccaatcgaggctcggctgacctcagacgtctaaggcgat

SEQ ID NO: 263679 - DNA, 420 bp, Homo sapiens
aacgggggcaggcgtggcgtctctgggactgccggaaaacgacgtgagggaaaaactcagaggctacgaaaaggcgaacagacggagggcctgcctcaggggagctaagcagctcgcctgaagccccccatctggaaatgacgtgtttaactcggcgcccstgcagctccggccgcccttttttgtttaactccgcgcccctccagctccggccgcccttttcgtcgctctcccctcgcggtcgctcacccctgagatccctggttccactgagacgctcagcttcattcggcaactcgcggacaccaagcgccacaaattcaaatacgagatctagagacgctgggtctcaaacgtctcccagagtgaaagacagaggaaccaatcgaggctcggctgacctcagacgtctaaggcgat

SEQ ID NO: 263680 - DNA, 626 bp, Homo sapiens
ttttcaatatattaatactttttccaaaaaatggaaaataatcaccattctagatattaygtgcagtagtgtctaagggtctaagagtaatgaggcaatttagcctaaaaaaagggcaagggacccggattatggtcctgaagcaatcaccgatgagctatacaaccgtggacaagtcacccgacttctttgggcttccattttctcagttgcaatatgaggctgttcagctacaagagctctgagttccctgtggttctgttggacgagattctttgaatagattcttaatgattccttcattcaagtagccatatgcactgcttttagtgttgtcaggttaactgcaggtttttaaaaaactgtatttattatagaatctggaaattaatcaggtaagtagtatcaccctcatttctataaggttaggtcattaattcaagtgaagtagctcttatctcttcacatttgtcacatttgctactttattttagagccatatcacaatgtacatcagaaaatagattccttatgtaacctatttccaagaaccacatttgtgtgtgtgtggaactgaaaatggtcttgccaaatgattcttcatttataaccctgttgaccaggtt

SEQ ID NO: 263681 - DNA, 551 bp, Homo sapiens
gttgcattgttactcatatctgttttttttaagacagagtctcactytgtcacccaggctggagtgcactggcacgatgttggctcactgcaacctctgcctccagggttcaaacaattctccctacttcagcctccagagtaactgggattacaggtgtgcaccaccatgctcggctaatttttgtatttttagtagagatggggtttagccattttggccaggctggtcttgaactcctgccttcaggtgatcctcctgcctcagcttcccaaagtgctgggattacaggcgtgagccaccatgcctggcctatatctttcttaactaactaggacaaattcctagaagtagaatgcacattttttttttcctttggctttttccttcaacttttaatttaaattccagggcccatgtgcaggatagaatgcacattttaaaatttcaatatctattcccaaattgccactttcctgccccaaagtgataccaatatacaatcctattgcttacttatagattaaacaacctttgtcaattttatagac

SEQ ID NO: 263682 - DNA, 636 bp, Homo sapiens
ttttaattgccaaatgctttcttgagttaggactacccagtctaattaatacgacagactatttagtaagaggatatttaagagagaaagtagcaacataaaaattaagtttgtcttcagataacaatagggaaaataggaaatgtttccattccrtgtttccatttatttcctttccagttattactttaatcctatacatttcccaaaacaaaataaaaatgttggggcttgggtgtgagggttcccgcctgggccactgacctcctgcctctctcctcaatggttcctgctcggcctctagcctaggtccaaagggtgctggttccagaccactcttcctggtccctcgggtcgggctggatccctcctctgggctctcaagatcctcagccttcacccttcagaacacaactcacacccgcacagtgcctacccagcacagggttcagcacccagaatgccctcaatgggtacttgatgaataagcaaatgaatgagtgaatgagtgagtgagggaacagcctgagaagcaaatgaacagaaaactatctatgctgagctatttcaggtggctatgagataggtgaaattgttcccatttctttccatgttacagagctggctgactgagtg

SEQ ID NO: 263683 - DNA, 551 bp, Homo sapiens
gttgcattgttactcatatctgttttttttaagacagagtctcactttgtcacccaggctggagtgcactggcacgatgttggctcactgcaacctctgcctccagggttcaaacaattctccctacttcagcctccagagtaactgggattacaggtgtgcaccaccatgctcggctaatttttgtatttttagtagagatggggtttagccattttggccaggctggtcttgaactcctgccttcaggtgatcctcctgcctcagcttcccaaagtgctgggattacaggcgtgagccaccatgcctggccyatatctttcttaactaactaggacaaattcctagaagtagaatgcacattttttttttcctttggctttttccttcaacttttaatttaaattccagggcccatgtgcaggatagaatgcacattttaaaatttcaatatctattcccaaattgccactttcctgccccaaagtgataccaatatacaatcctattgcttacttatagattaaacaacctttgtcaattttatagac

SEQ ID NO: 263684 - DNA, 572 bp, Homo sapiens
aattagacctaactaaacaaacaaacagatataacatgttcatgattcagaagaatygatattattaagatgttcattcttcccaaatagacctatagagtcaacccactgccaatcaatatagcagaaggcttggtttttgtagaaattaacaacctaattctaaaatccaagggacttagaatagtgaaagcaactttgaaaacaaaaacaatgactagcctaggcaacatagcaagaccccatctctacaaaaataaaacatttagccaggcataatggtgtgcacctgtagccctagctactcaggaggctgaagtgggaggactgcttgagccagggagttggaggctgcagtgagctatgatcatgccactgcactctagcctgggcaaaagagcaagaccatgtctctaaaaaaaataataaaagaaaagaagaacaaagttggaggaccaatgctacctgatttcaagactttctataaagctaaactaatcaagataggtattattgtcataaagatagatgtagagccatggaacaaaacatccagaaatagactcacatat

SEQ ID NO: 263685 - DNA, 572 bp, Homo sapiens
aattagacctaactaaacaaacaaacagatataacatgttcatgattcagaagaatcgatattattaagatgttcattcttcccaaatagacctatagagtcaacccactgccaatcaatatagcagaaggcttggtttttgtagaaattaacaacctaattctaaaatccaagggacttagaatagtgaaagcaactttgaaaacaaaaacaatgactagcctaggcaacatagcaagaccccatctctacaaaaataaaacatttagccaggcataatggtgtgcacctgtagccctagctactcaggaggctgaagtgggaggactgcttgagccmgggagttggaggctgcagtgagctatgatcatgccactgcactctagcctgggcaaaagagcaagaccatgtctctaaaaaaaataataaaagaaaagaagaacaaagttggaggaccaatgctacctgatttcaagactttctataaagctaaactaatcaagataggtattattgtcataaagatagatgtagagccatggaacaaaacatccagaaatagactcacatat

SEQ ID NO: 263686 - DNA, 565 bp, Homo sapiens
tatgattaattcagaatatataaagaacttccaaaactatattataagaaaacaactcagtaaaaacctgggcaaaagatttgaacagacacatcatcaatgaagacagactaacagtaaattaagtgcatgaaaatatgcttgacatcattatccattagggaaatgcaaattaaatccacartgagataccactacatacctattagagtgaccaaaaagaaaaagattgaccgtgtcagtgtaggtgaggatgtggaagaaatggaagtctcatatactgctgcagggaatggaaaatgatacagacattttggaagacaattgacagagtctttgaaagttaaacatacacctaccatatgatccagccatcctgcttctaggtgtttagccaaaaggaaaggagctatatattcattcaaacacatgtggatgaatgctcatagcagctttatttgtaaaagaaaaactgaaagaacccaaatttccatccacagataagtgaatatactgtatagggtatctgtataatggagagtgactactcagcaatgaaaggaaa

SEQ ID NO: 263687 - DNA, 585 bp, Homo sapiens
aacccctccagcacctacacacacagcctctttagaagcaactatcctgccactggctcagaaaggctgagtcctaagaattctaaaatcttgctcctaagaaatctcaagcttcttttgtggtaagtggcttaatgagacagggtaagtgataaacaagaagaatcattgtatcattttatgtttttatcatgttgtcattgcactggctaagttcatctttgatggtaaaatactaacgcaaattgaagctgtgataaaagggctttcaatatgaaatagacaagacatataatggaaagaaatgcttccagaatggatttccataaaaacgtggcaagactttctcagtgccattctttaaaatctctgctatttttcaacaaatgccagatgttaaagcatttgcatagtatcccttggagggttgggtgtaaagacatgcattaatatcaggttaatagaaaatatctacaataacaaaatgtccacacacagatgctcamtaaatgccatagcacttgttatgactaattattatgaagtacacggaccccttttcatatcaaataatttactagaccc

SEQ ID NO: 263688 - DNA, 594 bp, Homo sapiens
gtcattgtcaacattcactatatctgctactctagttttattcaagtacttactcctrtaattcattacttaaaagaaaatgtcactaagcatgttgaatatgttataatacaaatttcaaataagatgtattccattatttctaggcatctcagttttataagaatgtttacactaaatagtataattaaatatatgtaatattagttatatatacatatatattttactctttctacatatttactgacatatttatatctcatatgtgtatgtgtagcacacacatacacacacacacacacacagaaacagagagagaggcttttaatgttaatcagcttacccatgttgctgtttcttttactatttccctctatatttttctttctcattaaactgatgctgaattacataaaattgctttgcttaactctgtacaatgactaccaaagcttttaataaaattgtttttctgtgtctttcttagtgttagatatttgtttttacttatgtagttactgtgagagaataaaagaatgtaaatgtactttatcaaagggaaaactttgaaaataattttttaacatcaat

SEQ ID NO: 263689 - DNA, 610 bp, Homo sapiens
taacttaacctaattatccctgcgctatcactcgccaaagaactcacagccaacaaaatgatatggaattctcctaaaagatattcataatataatttcttactattgggaaagtagaactctcaattgttagagatagaagttagtataaggagaaaatattcatttgattgagaaagaaattgagaatcctatagattaagtaggtaaaagagaaactaaaagtattggtgagattatagaataaatatctgcctaaattaagattagtctaaaatgttttmttggagagaaaagagacttaagtggaatcctgaaggctaccaataatagatttgtttgtaatattcaaggagaacatttcaagcagcagcaaagtcatatactataattgatgattaaggagaaaataaattcacatttactgactaattcctataggagaagtgtgatatggtttggatattttatctcctccaaatcctatgttgaaatgttacctccaatgttagagatggacctagtaagaggtgtttgggtcatgggagcagatctctcatgaagggcttcgtgctgtcctcatggtaataagtgagttcttaatctattg

SEQ ID NO: 263690 - DNA, 635 bp, Homo sapiens
ttgggtcatgggagcagatctctcatgaagggcttcgtgctgtcctcatggtaataagtgagttcttaatctattggtttatgtgagagctggttgtttaaagaagtctgacaccatcttctctctctcttgcttcctttattgycatgtgatatgccagctcttcctttgacttcaccatggttataagctaaagccaagcagatactggtgccatgcttgtacaacctccagaaccatggaaaaattaaacctcttttcttcctaaattacccagatttctttatagaaatacaaataaaaagtctaataaagacattaagtaaagggaaaagagtattgtatacaaaaattggcaaaactctttactcattggaataaaatatataagcctctaatatcaagaggtttatattgaatacatagtattaccttccttgatggaataatttatttactaatgaattgacagtatttatatcactcacagcacaagtgaattacttttcttttgaaagaataactcttaccatgttattaccttatttttattttttaaaaaatacatttaacctgaaaatttgaatccaaaatagtaaagcatctaagtcaaataagtaatgctcaaagatgca

SEQ ID NO: 263691 - DNA, 508 bp, Homo sapiens
ttcctttggaaagttgtatcagaaactcaaaagaatgcaaccctttgtctctcacctacctgtgtcctggaagccccctgcctgctttgagttgtccctgcctttctggacagaaccaatgtacttcttacatataatgttgtcttatgtctccttaaaacgttttaaaggagacaagctgtgccctgaccacyttggacacatgtcatcaggacctcctgaggctgtgtcactggtgtgcatccccaaccttggcaaaataaactttctaaataaactgagaccatctcagatatttggggttcacatgacccaacttgggttcatgttagtggaaatgtggaagttggaataaattaaacataaggctcgtgaaagtgtcattaggaattagcagattatttgaaagaagagaaacatcaaagaaaattaaggaatcaaggacacatacaagcttatattttaagcctgaatggctaacctgctggcagcaatggcaataaagatt

SEQ ID NO: 263692 - DNA, 553 bp, Homo sapiens
taaccactaagtcaaagtgctaaattgtctggtctatggccagatgttctttgtatgtgcagagcaagacatagatatgtttctaaattttgttatctttctattttaatggattgtctgtgatgagaagtcattcgaagaaaaattagattcatggcattatcaaaatagttgctatcctttgcttgtctatttaaataataggcattttctcacatgcttttatacttggaagatatttatacattaaacaaggtagaagactgtttacttaagtcatgttattaagtcagtaagtttgtcaaatactgtatttcaggggtccctaacccccggccacagacaagtactkgtccatagcctgttgggaaacgggcctcacagtagaaggcaagtagccagcatgcgaacaaagcttcatctgtatttaaaaccactccccatcacaaccattaccacctgagttcggcctcctatcagatcagctgtgtcattagattctcataggcctgcaaatcctattgtggactgcacatgtgagggatctgggttg

SEQ ID NO: 263693 - DNA, 595 bp, Homo sapiens
accagggccttccttgaggctaagtaaatgaagtttccagtgattggagacagttcccctaaggcccaggaacagacatggcaagggggttacttattgccctctttccaccatcccagggcaatgctgtgaatgtgctgaaatgaaagaattatgcagatgagtgacarcgtatctgcgggccctcagtcttaagtgccacctacagggtcatagcctgaattacaccgcaaaaaacaaacaaacaaaaattagcacacatcgccaatgaaacccaatcaggaacataatgaacataatgacgaatatacattctgcatagagccttatacctctgaaatcacccagaaacgaagccaattcgctatactcaacataaaccccagccaaaccttaatggaaattaaaaaaaaaacacacatgaaataaaaaagccccattcatatgaaagcaactacaaatagataagggaacaccaagccctcacagatgagaaagaatcagcacaatactgcagcaattcaaaacgacagtgtctttttacctctaaatgactgtgctagctctccgggaaagatttttaaccagtttaaaa

SEQ ID NO: 263694 - DNA, 591 bp, Homo sapiens
aggtgggcattcctgtcctaaattgccccagaatggcttatgattctcccctaaagataaagctggctgaatttacttttcttcttggcattttattttgtttttctaaaacctatcttttttaaaactggattcttgtagactgaaagggagagaggtgtggaggagatccaggggggacaactatgtgattagaagcagcagcacccttgggaagcagcaacgccaatgagaaagtgactgaggcacacatagggagaatgaatctcaggcctagcacctcctagggtgagtgaatttcaccctaggccatgggcccttacaaacatgcccaattggccctgctcctagcatggcctayagcagcagatcctgtggacaagggagcaccatgggagctaacataacgggtatctcatccaaagccaaaatattcccacaaccagtgagacctcccctatctatcatctcctttgactaaccttgtacgtagaaagtcatggaaaaatgtgattgagattgaaactctagttgcctctgtttgctaagattctaattttagttgatttacatatttatacaatatttaaa

SEQ ID NO: 263695 - DNA, 598 bp, Homo sapiens
ttttgcattacacaccttgctcaaaccatgcaattattccatgaagtaaatgttatttttcctctattatacataaagatatttttataaagttgccattataattatggaagtttgatggctcaaagacgtcatagtacttttaggcaaggtagagaaaactttccttttctacaagktactgagttgagatttgcttaagattcttcatttcataatctgaatatatttaaattgtccgttgaaataatgctaaaattgcataatctctgaaaaaacatcttttaatttctttatttaaagaataaatatctttattctttataaattgggtttttaaaattttgttaacattgtgttatatgaaccattcattatttggccaggagactttttttttttgtctgctctgcttagtcaggagtttgggtacctctttctattcagtgaatcagtgacttaagtcatttgggcttgtgcatatgtgtttgcgtttgtgctttataataaatattaagggttataagcactggtgcataaaacaatatcatgctttatattttaaatgatttttctaccaaaaataatcaatcataat

SEQ ID NO: 263696 - DNA, 626 bp, Homo sapiens
gtgctaccgcactccagcttggatgacagggcaagactctgtcacaataaaaaaataaaaaatttaaaaaatactctttttaaagtgaagaaactttaaaaatctaccatcacacaaattttctctgcataaaatttttattctatgatgtgtagaagcaaaaatcatattagtaaaagaggaggtgtagtagaattaatgacttaaatgtacaaattatcttctatttttatggtagaagtggagtttatttatttggcttggtttttttaatgactttaaaaagaaaaaatggaatacatgtacagaacatgcaggtttgttgcatatgtatatatgtgcsatggttgtttgctgcacctattgacctgtcctctaagttccctcccctcgcccccaaccctttaacaggccctggtgagtgttgttccactctctgtgtccatctgttctcattgttcaacttccacttatgaatgagaacatacagtgtttggttttctattcctgtgttagtttgctgaggatgatggcttccagcttcatccatccctgcaaaggacatgatctcattcctttttatggctgcacagtattccatggtgtatatgtaccacattttcttt

SEQ ID NO: 263697 - DNA, 626 bp, Homo sapiens
gtgctaccgcactccagcttggatgacagggcaagactctgtcacaataaaaaaataaaaaatttaaaaaatactctttttaaagtgaagaaactttaaaaatctaccatcacacaaattttctctgcataaaatttttattctatgatgtgtagaagcaaaaatcatattagtaaaagaggaggtgtagtagaattaatgacttaaatgtacaaattatcttctatttttatggtagaagtggagtttatttatttggcttggtttttttaatgactttaaaaagaaaaaatggaatacatgtacagaacatgcaggtttgttgcatatgtatatatgtgccatggttgtttgctgcacctattgacctgtcctctaagttccctcccctygcccccaaccctttaacaggccctggtgagtgttgttccactctctgtgtccatctgttctcattgttcaacttccacttatgaatgagaacatacagtgtttggttttctattcctgtgttagtttgctgaggatgatggcttccagcttcatccatccctgcaaaggacatgatctcattcctttttatggctgcacagtattccatggtgtatatgtaccacattttcttt

SEQ ID NO: 263698 - DNA, 591 bp, Homo sapiens
gatgaaatgtcttttagcaattggaaaaagaaattgagatgatcagcaaattatttaaggaaaataattggagatgatttctttaaatatttaagaaaacattttttatccctgcattgtgaactaattgtgctgtagattactstcattaactgtaaatatctaatttctattaaattaatagaataataatgatatttaacttccattatttttataccacatttatagtaacaaagagtaactcatgatgttatgtgtatgtgtatgtatttgtgtttataggtaactgtttattattttacatccagtttttaaagggaaaaaacaaagtgaaaagaaaatatgtagattttattgctttaaacattgtaaacacttggaatattaaaattaacctttaatatcctgggaagaaaataggttcatcttaaagatcacagatgtagagatacaatactgaaattttcagtgtgtggatagaagtaaagggaatagtatctaatttatattaaaatatccagtagatataaaaaagaaaatctcaaatatcaccaaatacagagttgtataacttttatatttaaatat

SEQ ID NO: 263699 - DNA, 585 bp, Homo sapiens
gtgcattcttgacaactcatctcattataaagttaaaatagaaacgatttactgttgggattatgggcatgtcccccagggtactgagaagatttaagatacactactgaacacaagacagtggagcactgccagtgccctagaattgaaacttctgatgagtaaaaccaaaaatccatttttgagaacgttaagaacatggaaatggggctagcatcaggaasttttgtgtacttcagtcgacataaagttaaaaagaaactggaaggcacagttcagtgtgaaattggacagaaaatccataattgtaaatgaagaaagtaagtagaggaggagagaggaaagagttcttgtgagtaacatccctgtgaggctggtcttgaatggctgaaaagaaaagccaacaatatctaatgtgcatgtgcgtgcacacacacacacatgcacacacacacacacacagtgacatgaaaagaagtctagttaatcttggactaggatccttatccttttacagacaggaacctcttgaagatagttggtccagcaagaatatacattattcaataataaataatattcaca

SEQ ID NO: 263700 - DNA, 595 bp, Homo sapiens
gcttctttgagcctcattttccttttgtataaaataggaattaaaataccagcctgtgttataaaagagagagatttgaattctggctctctacttgctagctagataactttggacaagagctttaatttcatgagctgggatttcctcgtccttaaattggagattagtagcagagtacattcctcataggatttttgtgaggattagatgagataatacatgagaagtattcagcttagtatctggcacatagtaagtcttcattaatgttggcaatcatttgcacaggagtgttctgagggtcaaatgaaattctatgtatttgaaagctttttgaaaactttaaatttccattcattattcttttgaatcggagcttctgtgaactgggaatggttgggacaaggctgcaagtttccaagctgggttcttgagtcaggtctgctggctgtgaaacagaggccacagggtgtgaaggggctgagggaaggccacaggctcaagtgccgccatgggctgtcctggccagggccrgaagtgtgtgcacacctgcctgtggacatgcacaaatgcacagctgggagtgaaggac

SEQ ID NO: 263701 - DNA, 635 bp, Homo sapiens
acagtttctacccacatgggacctaagtctagcaggagagataggcaaggaaatagtcaatgacagtattgtgattagtgctgtgaaggggaagtgcaggtgacgttagagctgaggggaagcgggagatcagagggactgaacccatctttcctgaaatcctgcccaccctccaagttgagttcaggtgccactcactacaaaagctttcctgagtccctagccagaggtgattgctcccttctctgcagccctaagcacttagtgcattgcttcatttattcatctataaatatttgatgagtgttgattccataccagggactattctaggaactggggacacagcagtgaataacacagataagtccctgctgtcatggagctgatatttgtcatggaaaggatggacgtaaaccaacacactcctaagtgtataatatgtcaggtagcaatgtgttctatgaagaaaaataaaygtagtaagaggaatagcaagtgcctgggagacagcattgctgctttacacggggtggaagggaaggcctctctagggaagtaacagagccctgcaagagtcaaagcctggtgctcctgtggtgtgtgaggcaagccagcaggaccacatgggtggg

SEQ ID NO: 263702 - DNA, 553 bp, Homo sapiens
ggggcaaagagatggaacagttaccagtccttatgtaggagaaggacagccaacaggagcttggaggaaagaagagccatacttctcttctttctctcaggtctccttcagtacctcccactggctgagccagcaggaagcctacaagcaaggarcccagatggtgctgctttcaaagtccacctctgcaggtaaagagcagagtgcaaaagggtgaagggtggatcggtaggagcaaaggcaagaatacctagcaggtgtgtgatcatctgacagtgtggaaactgccaaagcatgtagccaagggccttaagggaacctggaaaaccaaggcttctagagataaaaagctaaggtagcaagagggcaagtaagacaggtggaaggggcagaaaagagtaactgatgaggacgagggccagaaatgggccagaaatgagaccattttattgtttggttaaatactgagctggagtctgagctagggaagaaattaagaggacatatgtctgagttgagttgaactggagcattaaaaattcttccacaattg

SEQ ID NO: 263703 - DNA, 606 bp, Homo sapiens
attcatatgtgtgcctttcccttccttgagtcttctgcagccatttaccaatgaagcaggaagagaaaagtaagagaatctatctcacttgcttcagagcagggcaactttgaagtgcaacttacatggcatccttttccagcgtggccagatgaagctcttgggtttgagactttgcttggctcttcactctggtttgtccttctctctccttccctgtcatgcctccctccctcagttataaacttcccctggaagctctttctgagtagatcacttgcacatgaaatcttatcaaacgtctcctcctggggaactcactgtaagagagttgatagccagaagtggctctggacagccgactctaactgttgggttcttgttttggatcagcagtcagccacatggcaacaaggagcccatgttggtggtaagcagagtggggatataactgakcacactgtagcattataattgcaaaggttttcatctgtaatgattttccaggatttggggttgggtataggtgggaaagcatgtatgcccatatgataatactagggattggttaatatgagaaataacccttataaggattatatgggt

SEQ ID NO: 263704 - DNA, 623 bp, Homo sapiens
agacaatagtctaaaggttaagaatgtgttaaacccctgtatggtagaaagcagggaragagggagacagggtaccctctactgatgaaggttccagtagctgggagagagaaactatctgtatgtttcaggaagtaaagtcagatataaaaatgcaaccagtaattagggatttgtatcatgtatgccaactataattctcagtttcaccatatttctctcaacattatctcatcagatttgtacaatgactttgcatatgatgtggaggaagtactataagctacattttattgatgatgacaatagagctcacatataaataacagcacctctattttgttttgtagatattagtcctggacagagctggtgtaagttaataggccaactgtctcatggacattcacagctccttggtttgatccaagatgatcccttagtagaggcatcatagttttgcagaaagagctgtatctttgaaatattccaggcctggattggcatgtcatgtgtaccacttcctgagcatacagacttcagctggggttgctctacctctctgaatctcagtttccccaagatcttgtgcttttaactacactgcatgtccataaatgtta

SEQ ID NO: 263705 - DNA, 587 bp, Homo sapiens
cttttctttcagaaaaagtcccaaataaattggaaacactttggaaatttgcwcttgcttcatatgaataaaacagaatgtgcagtatttttctataagaaacccttacctgaggtcaaaggaatcttaaattatttttaaaaaatgaattctttcttgcaacaggactacatttaaatcatgataaataaactgaaaacataaataactccatttcaagggaagccctgttctacccattctaccaccaggctgattctacttatgcatggaccagatcctttcttctgcacataattacatctccaccctggcttatcaaagatggagactggctggttgatgattatgcctaccttgaagatgttcctgggctttatctttttttgtggttgttccattctgttcttagaattctttgatcttattgtatattatattatctccagtattaggtcatattgggccataacattgtcattattattttgaattctactgagatcttgcaaaattcatgagtgccttaaatgttctatgcctctgtaagcttttgatatagttctattggtattgtgatggcagta

SEQ ID NO: 263706 - DNA, 587 bp, Homo sapiens
cttttctttcagaaaaagtcccaaataaattggaaacactttggaaatttgcacttgcttcatatgaataaaacagaatgtgcagtatttttctataagaaacccttacctgaggtcaaaggaatcttaaattatttttaaaaaatgaattctttcttgcaacaggactacatttaaatcatgataaataaactgaaaacataaataactccatttcaagggaagccctgttctacccattctaccaccaggctgattctacttatgcatggmccagatcctttcttctgcacataattacatctccaccctggcttatcaaagatggagactggctggttgatgattatgcctaccttgaagatgttcctgggctttatctttttttgtggttgttccattctgttcttagaattctttgatcttattgtatattatattatctccagtattaggtcatattgggccataacattgtcattattattttgaattctactgagatcttgcaaaattcatgagtgccttaaatgttctatgcctctgtaagcttttgatatagttctattggtattgtgatggcagta

SEQ ID NO: 263707 - DNA, 587 bp, Homo sapiens
cttttctttcagaaaaagtcccaaataaattggaaacactttggaaatttgcacttgcttcatatgaataaaacagaatgtgcagtatttttctataagaaacccttacctgaggtcaaaggaatcttaaattatttttaaaaaatgaattctttcttgcaacaggactacatttaaatcatgataaataaactgaaaacataaataactccatttcaagggaagccctgttctacccattctaccaccaggctgattctacttatgcatggaccagatcctttcttctgcacataattacatctccaccctggcttatcaaagatggagactggctggttgatgattatgcctaccttgaagatgttcctggrctttatctttttttgtggttgttccattctgttcttagaattctttgatcttattgtatattatattatctccagtattaggtcatattgggccataacattgtcattattattttgaattctactgagatcttgcaaaattcatgagtgccttaaatgttctatgcctctgtaagcttttgatatagttctattggtattgtgatggcagta

SEQ ID NO: 263708 - DNA, 478 bp, Homo sapiens
gctagttcttttaactaagttgttctttgttcttcaaaatctacaatctatttttaactgaagttaaaatatattttaggtattcaagattagaaggtatctaaactttgagcttttgatttccatttaactgyttgctttccacaaacatgtgatgacatgattatgctgtagaatccagctatttcttagttcttctctaaaatgctataaatttgtgtttcttcactgaattgtccccattttgtattagacgtgtattctatgagagaaaaattcataaaggcaaatatttgccattttcttttttataatactttttctatatcatttaattttttattcttttagctaaaggaagtaaacaccgtttcattttatatctacaattatcttatttttcaaatagaatataaggatttttaaaaatactactgaatctgattagtaactgtataacgtattttctgtatatttt

SEQ ID NO: 263709 - DNA, 478 bp, Homo sapiens
gctagttcttttaactaagttgttctttgttcttcaaaatctacaatctatttttaactgaagttaaaatatattttaggtattcaagattagaaggtatctaaactttgagcttttgatttccatttaactgcttgctttccacaaacatgtgatgacatgattatgctgtagaatccagctatttcttagttcttctctaaaatgctataaatttgtgtttcttcactgaattgtccccattttgtattagacgtgtattctatgagagaaaaattcataaaggcaaatatttgccattttcttttttataatactttttctatatcatttawttttttattcttttagctaaaggaagtaaacaccgtttcattttatatctacaattatcttatttttcaaatagaatataaggatttttaaaaatactactgaatctgattagtaactgtataacgtattttctgtatatttt

SEQ ID NO: 263710 - DNA, 583 bp, Homo sapiens
aaccgcaaatacttttgcatcaacctaataaatacaccataattaagtaggctttattccttagattcaaggctgattcaatctatgcaaatcaataagtgtgattcgccatataaaccatacaaacagaatttaaaacaaaattcatatgatcaccttaatagacacagaaaaaggttttgataaaatccaacatcacttcatgataaaaaccctcagcagactaggcattgaacacacgtacctcaaaataatgagagccatctawgacagacccatagccaacatcacactgaatggacaaaagctggaagcatcccccttgagaactgcaacaaggcaagacgcccagtctcaccgcttctattcaacatattactggaagtcctagccagaacgatcagacaaaataaaaatataaaaggcatccaaataggaaaagaggaaatcaaattatctctctttgccaataatataattctatacttagaaaaccctaaactttccaccaaaaggctaccagaactaatcaatgattttagcaaggtttcaggatacaaactcagtatacaaaaatcggtaa

SEQ ID NO: 263711 - DNA, 514 bp, Homo sapiens
tagcatagacaataattatgctaaaatgttaaatgaaaaaagacacacatttgctctgatatattttactcgaatagaatgaaaaaattatgtacacaagagcttggagtgacttcagataaaagtatgagtgactatctttttcattgttctacctttatgtggtatcctattcttctgcaaggagcatgaatcactcttataaaggaggataaaatctttgaaaattaaagttgttcaagagtaaacaacagaaagccagagaaggaatgactttataaacaaaatgctttgtgcagtcaaccttcrgatgatttttcaggtctgtcgtttctctcaaagagatgaatactccgggcctgcctaagacagggtggaagctctgcagcttcagccaatctttgctacagttaggatgagtgaggatgttcacctggatagaataacacctggatttcttcagctttctgtgtacagtgctttgtcttttcctttgtccctcagtagtagtttg

SEQ ID NO: 263712 - DNA, 556 bp, Homo sapiens
ggaagctctgcagcttcagccaatctttgctacagttaggatgagtgaggatgttcacctggatagaataacacctggatttcttcmgctttctgtgtacagtgctttgtcttttcctttgtccctcagtagtagtttgtagcatctgtacaatagctggcaagggatgcaactgttcctaaatgtaaaaacaggaagacacaaaggtttctgaatgatgtgctgtggtctctttttgacaaggaagaatgtaaagggaacaaaactggtgctggtggaaagaggcactacacagcagctgctggaaaactgagtggaggccatcttccttgctccttgtcacttgtgggaaaatctccaaaagctgccatagaacgagaggtggaaccatttaggatggcagccaaacacctgcagatcctcgtgattatactgcattctgtggctgtggatgaaagtttggccactttgtttcctttttattgtaagtaatgaatgatgtttttagagagtgctttgaatttctactgacttgcaaatgagtatcttacctgag

SEQ ID NO: 263713 - DNA, 366 bp, Homo sapiens
ggaagttgatgccacctcttgatgagaggagcaggtcttcagcacattgcttccttccggtcctccctccctttcttctttccatgggtcaccgatggtagaacaggaaaaagtctaggaggtaattgttttttcattctgtctccaaaatccctcaccayttctgtatttctacagaggaaaaacagaggccaagtaatttgaatcattcaacccatctctaatagtggagccagcagtagaactccagggctcttcaattttctatggaaagcaagagaattaaggggcccaacttattcctcccagtgttgtccagagggactggatcagaagctgatggattctttcctctggcttgccagg

SEQ ID NO: 263714 - DNA, 595 bp, Homo sapiens
ttttctttcattaaaaagcaacacgtgtttttgcccatcagatagaaaacacagatgcagaaaaaggtaaacaattcaaagaaaaccctctcttctagaaatacttaacagttactaattataaagacacataggagttgcaagaagtgattctaattcttgatgtaagagaatattttcatggcatgttccacattgagaaacctgatccagtgactcagaattatttctgaaacaatatccccttcccccaccctctgctcaatttcttctaattataactctctgagatatttgcctctgataatcatagggaaagaaggggagagggaaaggagaagagaaaaggaatatagttcaattgccaatatgccraaagtggaaagatggacccgagtctcctctggcgcagtgtcaggactgtacagcacacactggccaggcccgtgccagaggcccattgtcagacaccatggtgggagcatgggcaaccttctaaatgaacagccctgctcaactccttgggccctcatgtgggctgggaaaatagatctgattccacccttgttcctgcaatactcaacacaatgccaag

SEQ ID NO: 263715 - DNA, 544 bp, Homo sapiens
ccagagctcctggatgacgtgtgtccagcacatatttgtgctgaacaaatatgtgaattctgtgtttcactgttacaacctcattacatcctcagaataaacttgagaagtaggcactctgatctccactttggtgttgaagaaattgagaggtagggtgattaagttcctcccccaagatcattccgccaaaaaagatgagagctgggatgtaagacatgtctgatcagaaatttattttattagacttcattatgttcttcccatgagcttcctaacctgggcactgttaaacatacagattcctgggcccttgaaacatacagattcctgggccccatttcagacctcagacaatggagtttagaaatgccaagtrctttttctggccaccaacatttaagaattaggggaatagccaagcatgatggtgcacacctgtaatcccagttacttgggaggctgaggcaggagaatcacttgagcccagttcaagaccagcctacgcaacatggaaagaccctgtctcaaaaaaacaagacac

SEQ ID NO: 263716 - DNA, 421 bp, Homo sapiens
gtctgctgtctggcagcagctggtctctaaaattgttcaggtcatcatgtcagatcttgagatcgggctgagaatgcgcttcctggctggatgacttgggtctcatttgactctgtccagcgagagacacagctctactctttctccccaccccaacccacccctcaggtgctctctttcccatttccactttctggatgtgaggtctacccagaccctcctttcccaggtaggcggtgtccttggtttcgggggtatgtggcccaaatcccctcccttgtcctgccccagtgggttacaggaactttcttgcccaccccccacccagatacgaggggcgaatgagtgagtgtccaagtctaactcccakgtgaaacactttctatggaaaaactaaactccagttggtaatgagagggag

SEQ ID NO: 263717 - DNA, 597 bp, Homo sapiens
aatgcttcgaattgatttacttgcttgtggaaaggtggtatagagaacaacttaatatttctgaactagacaagattccatttgttccagtctgtccttacatgttgtataaatgtaatactaaatggcctgacttttaaagttttatgaaggagggggaaagtatcactatgatagttaacaccacctgtttactcaggcattatattaacaggcaactcttagcctccgatgaacatgaaggtatctgattaacttgggcattgaccaaacctcctaggacagatttgggaaattcagttgtagacaactggctttgagaataactgattacctgtagacctatttggaataatctttcttggtgtgatatcctaaggatccagacaagacttggtaaatttgggtgccatcaaagttacaaaatcaatgaatccaaattttgtgaggcttattataatctgcctaatgcttccatccagttcccccctgtgggtagagtccatgaagcagagtctactttatcaatgttcrcctgggcacaagtgccagtgtggatgtgggtgactttgagatttatgtgtctgtgagctgaat

SEQ ID NO: 263718 - DNA, 646 bp, Homo sapiens
atctaataaacttagttttgttccaktaacatgtttttctggggtcttttgggaagttgacagtcaatagtaataggggttgaaacatgagaacttcatcttctcttttaagagtatcttggtatcttccaactagcgcaatctcatgtcagcttaagagccagttgaagaaaagttcaactcctatcagggcggtgtggtttctaatccttctactgctgcccatcatggtgctgtgagtgatttggtgcaggagaggaaggggcttccatactctggtttcctactcctctctgctgtgtggtggctccaggcttgcatctgctgacaaagtcccacacccgtgtctttcattaagccagctgagtggttctccctctctagcccaacggaatgtcctgagtaccagctttaactgccaatttggtctgtggctcagatattaaccttggctacagggtgtttaccctgaccacagttgatgtggcccaccaggcccagcagctggcacccatagctgcccgtcgtgtttgctgtgagcaggcaggccctcctgcaggccttccactccatccaacagccaaagtagttctggaggctgatggaggccttatttcagcctaatcaggccatcacgccattgtca

SEQ ID NO: 263719 - DNA, 566 bp, Homo sapiens
tgtgcctgccagcgccctgagagactgaaacagaagccaaacacaatttttttcacttatccaaattcatgtagtacaaggtcattaattttgtcactcaaattctagatcattaggtttaaagattctaacatgtttcaaatactaaaaaataaaaatataaatactgtacaagaagaattctatctctagaaatgtgttgagataactactgaaataaaaatctgcttgagctttattatggaaattatttccaccagtttgccatgagaagcaatgtagaatctgtccaaaagcaataatcagtcatagctgagttgggtccatttcaccatactccatgaaagaaaaggtcccatctggatcaaaagttttttgggattaacgaatgagattcttgtggttaatawaattgttttttgtccttgaacaagtatctccaccccccaatgggattccaatttctcccatacattgaatggtgaaatgaacaaaatgattccagacagtgtttctgaaacttttttttaatggttcctttaggaaagctgtgatcttcctcttca

SEQ ID NO: 263720 - DNA, 561 bp, Homo sapiens
atcaaaagttttttgggattaacgaatgagattcttgtggttaatataattgttttttgtccttgaacaagtatctccaccccscaatgggattccaatttctcccatacattgaatggtgaaatgaacaaaatgattccagacagtgtttctgaaacttttttttaatggttcctttaggaaagctgtgatcttcctcttcagacacaatatgaatctgttcctattcataaaatagggatgtaatttcagagttttggaaaaacttgtatcccgtagtccttgagccttaaattataaaccctacatacaagcacacacacacagagacacacatacacagatacgcacacacataggtgcacatacaaatatacacaattcaacataggaagggagaactgctaaatctgaaggttagtcagggaaagcaagggacagaatatatacaaatatatctgtgtacgtgtgcacacatacacaaatgtcatttttaagtgaatttgggtttcagaaaatctgttcttactccacaggtttacggttggttaaattcagtcc

SEQ ID NO: 263721 - DNA, 562 bp, Homo sapiens
tcttgactttcctccacttagacagagccttcttatccctgattctcagcctaaataccacgtcttcagaagccctcactgactatagcaggacaaactaatcactctctcttttctgctactgctgcatattttgctgctataataggtcgtattacaggatagggtagatgtttatctacacctctctgtttccccaggaaaggtgtgctccctgaggtgggaccagatatttaacctattctactgattcaacttttttcctggtgcctagcatatcgtggacatcccaaatatcctgattgaataaataaataaacgaatttccacatccctttctttaaaaagtaccaaytccttaattacctcttaaatgcactgtaaaaaaaaaaagacaagtaatcttattgcattatcctttgagcatttttaacatctctatgaattaagttatgaatctcctgatgacagggccaaccagggaaaaattaagaagcgatgaaagttctgttctgttcagtctctaagcctctcctcaagctcacattcctttcagctgcag

SEQ ID NO: 263722 - DNA, 574 bp, Homo sapiens
ttctttttaaagattaaataatattcctggccaggcacagtggctcacgcctgtaaacccagcaatttgggaggccaaggcgggtggatcatgagatccagagatcaagaccatcctggccacaccacagtttcctcattcatttgtctgtcaagggacacttaggttgtttccatatcttgattattgtgaatagtgctgcagtaaacagagaagtgcatatatctttaaaggtgatgatttcatttccttcgggcatgtacccagaagatagatatttaggccatagggtagatctatttttaatgtctttagggaactccatactgtttttaagaatggctgcaccaatttacagtctgaccaacagtgtacaarggttccctttccccacactgttgccaacatttaatatctctttcattgtttgataatagccatccaaacaggtgtaaggtgatattggacttggatcttgaaaggtgaataggagtgtgtctggcagaggaggaggtcaggtgcatctctggcttagagacccacatgacctttttttaaattttttgagacagga

SEQ ID NO: 263723 - DNA, 595 bp, Homo sapiens
acagctatcaagtcttatctttgtatcctaagtgggcacatttagcaagtacagacactcccagacttataatggggttactttccaataaaccccttataagttgaaaatgcatttaatatacctaatctagtgagtatcatagcttagcctagcctatcttaaatttgttcataacgcttacatcagccccacagttgggcaaaatcatctggcagcacagtatactgtagagtcccaattttttacccttgtgatcatggctgactgggagctatggctcactrctactgcacagcttcatgagggagtattgtatggtatattactagcctgggaaaagatcagaattcactgatcttctgatcagttcagaattcactgaactagggtttctactgaatgtgcattgctttctcactgttaggtaaaaaattttaagtcaagccatagtaagtcaagaatcatctgtactcagtaatgaatatgattagtgaaagggaaaatgaatgaatgagtgagctaacaagagccagagagagtaaatgacttacctgaggctactgataaaagaggtcaacataatgtcttgacc

SEQ ID NO: 263724 - DNA, 613 bp, Homo sapiens
ggcacatttagcaagtacagacactcccagacttataatggggttactttccaataaaccccttataagttgaaaatgcatttaatatacctaatctagtgagtatcatagcttagcctagcctatcttaaatttgttcataacgcttacatcagccccacagttgggcaaaatcatctggcagcacagtatactgtagagtcccaattttttacccttgtgatcatggctgactgggagctatggctcactgctactgcacagcttcatgagggagtattgtatggtatattactagcctgggaaaagatcagaattcactgatcttctgatcagttcagaattcactgaactagggtttctactgaatgtgcattgctttctcactgttaggtaaaaaattttaagtcaagccatagtaagtcaagaatcatctgtactcartaatgaatatgattagtgaaagggaaaatgaatgaatgagtgagctaacaagagccagagagagtaaatgacttacctgaggctactgataaaagaggtcaacataatgtcttgaccctgtgttaaacagtactgaaactactcattctttcctgtccgtatgttaaat

SEQ ID NO: 263725 - DNA, 558 bp, Homo sapiens
attttcatatagatcatgacagttttcctgaagattttagtcaagagtgcgaagggagagctgcactctatttcttatatgctccaagtttccatttggacccttaaaggcgctaaccatatctgacatagaaatataattttaaaggaaagggatggataggcrtaaggccagagataggaatatgagttagagggtaatggtgatgacttcagcaataggtaaggaatgagggtgtggataagaatagagaattgatgaggatcaggaagctatttcatatttgtattagtccaggagagagatgagctggaaacacaaatttaggagtcgtgaatatgagaagatagttgaaggttaagggaactggtaagtctacatgagaaagaccaaggaacaagaaaagacaagcattgaaagcttgatcactgtgcaaatctaagtcactggtcaggaaacagaacgttttctgcaggtagaaggtgattgacagagagagtgtttcagacagtgggatgatggagaagttgatggacctcacaacttggattgctgtca

SEQ ID NO: 263726 - DNA, 493 bp, Homo sapiens
tcacacaagtcagtgtataattgaaagtataatcacaatactgagctaaagataatatactcaaccgagatattgctgattttaaacatagtagctcagcagcagttttgaaagaaagaggagtaggagagactgaaagaaaaaaaaagagattaaaagacatttaaaagtaactgaaagaaaatrtaggagttatatagggaaaaggagtcctgaagcatattttgtatttgactgctgaggatcctgagctatttggaaacaatattcaatgagacaagattgcatatgaggttaacacctatttcttctacactaacctgccttatccctgcccattatttaagtcagagtttctcaacctgatggagttctttattcttggcactattgacattttgggccagataatccatgtgggagtcaggggctgggggctgtcctgtgcattgtaagatgtctaaacagtacaagatgccaatatatgtcctca

SEQ ID NO: 263727 - DNA, 493 bp, Homo sapiens
tcacacaagtcagtgtataattgaaagtataatcacaatactgagctaaagataatatactcaaccgagatattgctgattttaaacatagtagctcagcagcagttttgaaagaaagaggagtaggagagactgaaagaaaaaaaaagagattaaaagacatttaaaagtaactgaaagaaaatataggagttatatagggaaaaggagtcctgaagcatattttgtatttgactgctgaggatcctgagctatttggaaacaatattcaatgagacaagattgcatatgaggttaacacctatttcttctacactaacctgccttatccctgcccattatttaagtcagagtttctcarcctgatggagttctttattcttggcactattgacattttgggccagataatccatgtgggagtcaggggctgggggctgtcctgtgcattgtaagatgtctaaacagtacaagatgccaatatatgtcctca

SEQ ID NO: 263728 - DNA, 498 bp, Homo sapiens
tgaaagaaaatataggagttatatagggaaaaggagtcctgaagcatattttgtatttgactgctgaggatcctgagctatttggaaacaatattcaatgagacaagattgcatatgaggttaacacctatttcttctacactaacctgccttatccctgcccattatttaagtcagagtttctcaacctgatggagttctttattcttggcactattgacattttgggccagataatccatgtgggagtcaggggctgggggctgtcctgtgcattgtaagatgtctaaacagtacaagatgccaatatatgtcctcagttgtgaccaccaaaaatgtctctgggcacttccaaatgtcctccaaggggtgaaattgytctcagtccttattccaattatggcctccatgaatcaggctcagttattacttactagagtttgccaaaagttccccttttcttcattgatattagtttctaatttcagataatattct

SEQ ID NO: 263729 - DNA, 498 bp, Homo sapiens
tgaaagaaaatataggagttatatagggaaaaggagtcctgaagcatattttgtatttgactgctgaggatcctgagctatttggaaacaatattcaatgagacaagattgcatatgaggttaacacctatttcttctacactaacctgccttatccctgcccattatttaagtcagagtttctcaacctgatggagttctttattcttggcactattgacattttgggccagataatccatgtgggagtcaggggctgggggctgtcctgtgcattgtaagatgtctaaacagtacaagatgccaatatatgtcctcagttgtgaccaccaaaaatgtctctgggcacttccaaatgtcctccaaggggtgaaattgctctcagtccttattccaattatggcctccatgwatcaggctcagttattacttactagagtttgccaaaagttccccttttcttcattgatattagtttctaatttcagataatattct

SEQ ID NO: 263730 - DNA, 533 bp, Homo sapiens
ttattacttactagagtttgccaaaagttccccttttcttcattgatattagtttctaatttcagataatattcttaagyaagcaattagttatcacactatttttatgcctttttcctttgtattactagcttcagtattttcagtgaatatctttctatatagtacagtgtgctggtgtttgaagagcatatcaaatcagtggtccctttcccaagagcatcagccctagtttgatgaaagataagtgacaaaatgaatagaagtctggctagaccaaatatagagaaatgacagtaagatgataaaagatttagaaacgtaactcatcattttatcatattatatatatatatcttttgtactctatattttttcatgctgtgttacaaaatgttagagaagtctactgctttattcacttccaggtgatgagaagtcaagtcaaaaatcaggacttataacgtcaatctgtgcctttgggttcctagaagagaagcaacatagcattgaagatcgaagaaggtcaccat

SEQ ID NO: 263731 - DNA, 561 bp, Homo sapiens
ctgtctccaaactgttgaatagacaccacctgaaatataaactgaaatacctttataaggtatttcagtttataagttgatggaaaatcctcattttccatcaactctggaaataagaggagataaaggacaaataatctgtttttccagacccagcaagatgttgaccagataccattccactgagccaacactgaaacatgacaamaatatttatttgctaacttgaagctagctgcatccatatgcttgccatttacttcatatttgtaatagacacgtctcatgtcttatttatttttctcaacatgttcccgtcaaagccagagcctctgcagagtactcaataaacaattagttaaaatgtactttagcagattattatatctcaaattctaataatgatctgttgggaatttcagggtaggtgtgagtaaatttattttcatcttaatgcctctattttttcaatataaagaggaatgaatagagaaaaattatagtaaaattttaataacacaaatgaaaggaggaagtcaatgcagcattattactgcaaat

SEQ ID NO: 263732 - DNA, 561 bp, Homo sapiens
ctgtctccaaactgttgaatagacaccacctgaaatataaactgaaatacctttataaggtatttcagtttataagttgatggaaaatcctcattttccatcaactctggaaataagaggagataaaggacaaataatctgtttttccagacccagcaagatgttgaccagataccattccactgagccaacactgaaacatgacaacaatatttatttgctaacttgaagctagctgcatccatatgcttgccatttacttcatatttgtaatrgacacgtctcatgtcttatttatttttctcaacatgttcccgtcaaagccagagcctctgcagagtactcaataaacaattagttaaaatgtactttagcagattattatatctcaaattctaataatgatctgttgggaatttcagggtaggtgtgagtaaatttattttcatcttaatgcctctattttttcaatataaagaggaatgaatagagaaaaattatagtaaaattttaataacacaaatgaaaggaggaagtcaatgcagcattattactgcaaat

SEQ ID NO: 263733 - DNA, 571 bp, Homo sapiens
agcaccacaatggtaatgtgggaatagcaggtggacatggccctgttggtattctcacctgagcctgaaagtttcttgarcaaggccagaaggaaggcataggacattaacagagcaatcaaacacaccacagagatcagaccactactacagatcatcactaactcctctgggaaggtgttggcacaggcaatccggacaacctgtgtgatgtcacagaagtaactgtctaactcattgggcccacagaaaggaagtcgaacaatgagagccacctgtatgatagaatgaatgaagccccccctccaggagagagccaccaggatacagcagagacgttgattcatgatggtagcatagtggaggggtcggcagatagcagtgtagaggtcaaaggccatcactgtgagcaagaacatctccgaagccccagcaaagtgtaagaagaagagctgtgcaatgcatccatcaaaagaaattatcttcctctccacaaagaagtctatgagcatttcaggggctgtaatggaagagtaccaaatatcaaggaaggccagattagccaacagga

SEQ ID NO: 263734 - DNA, 639 bp, Homo sapiens
aatcaaacacaccacagagatcagaccactactacagatcatcactaactcctctgggaaggtgttggcacaggcaatccggacaacctgtgtgatgtcacagaagtaactgtctaactcattgggcccacagaaaggaagtcgaacaatgagagccacctgtatgatagaatgaatgaagccccccctccaggagagagccaccaggatacagcagagacgttgattcatgatggtagcatagtggaggggtcggcagatagcagtgtagaggtcaaaggccatcactgtgagcaagaacatctcygaagccccagcaaagtgtaagaagaagagctgtgcaatgcatccatcaaaagaaattatcttcctctccacaaagaagtctatgagcatttcaggggctgtaatggaagagtaccaaatatcaaggaaggccagattagccaacaggaaatacataggagaggtcagatgagggtctagactgatggtgcaaatgataaggatatttcctggtaggatgaacaaatagaaggatagaaatataacaaataggactagttggacctctggagtctgggataggccagtgagaacaaattctgtcaccttggtgtaatttgcagtttccatttc

SEQ ID NO: 263735 - DNA, 639 bp, Homo sapiens
aatcaaacacaccacagagatcagaccactactacagatcatcactaactcctctgggaaggtgttggcacaggcaatccggacaacctgtgtgatgtcacagaagtaactgtctaactcattgggcccacagaaaggaagtcgaacaatgagagccacctgtatgatagaatgaatgaagccccccctccaggagagagccaccaggatacagcagagacgttgattcatgatggtagcatagtggaggggtcggcagatagcagtgtagaggtcaaaggccatcactgtgagcaagaacatctccgaagccccagcaaagtgtaagaagaagagctgtgcaatgcatycatcaaaagaaattatcttcctctccacaaagaagtctatgagcatttcaggggctgtaatggaagagtaccaaatatcaaggaaggccagattagccaacaggaaatacataggagaggtcagatgagggtctagactgatggtgcaaatgataaggatatttcctggtaggatgaacaaatagaaggatagaaatataacaaataggactagttggacctctggagtctgggataggccagtgagaacaaattctgtcaccttggtgtaatttgcagtttccatttc

SEQ ID NO: 263736 - DNA, 564 bp, Homo sapiens
aaagaagtctatgagcatttcaggggctgtaatggaagagtaccaaatatcaaggaaggccagattagccaacaggaaatacataggagaggtcagatgagggtctagactgatggtgcaaatgataaggatatttcctggtaggatgaacaaatagaaggatagaaatataacaaataggactagttggacctctggagtctgggataggccagtgagaacaaattctgtcaccttggtgtaatttgcagtttccatttcttcaatttactcttttcataatatagctatgaaaattaagaaactataattagtagacatagcatttacctagagttatatcactgctttcaaaattgtcatacgttccctgtcactaacagattacacgaggatacatttggttgcccattttatatctgataaaccaagagggagagagtatgtgatgaagttayaaattggaaacattaaaactatatgaagtgtggcatatatttgaaactcaaatctcagcttgttaatgttaaaaacttactttttctgaaatttggcaatgcacta

SEQ ID NO: 263737 - DNA, 529 bp, Homo sapiens
ttttcataatatagctatgaaaattaagaaactataattagtagacatagcatttacctagagttatatcactgctttcaaaattgtcatacgttccctgtcactaacagattacacgaggatacatttggttgcccattttatatctgataaaccaagagggagagagtatgtgatgaagttacaaattggaaacattaaaactatatgaagtgtggcatatatttgaaactcaaatctcagcttgttaatgttaaaaacttactttttctgaaatttggcaatgcactacttcttcccccaaacatctacattagtaagcaatatgtgaagctacttctgagtgtagccaaattttagactggcaatcagagatgtggcctcttttttctatatctttttttttgkggggaaatcttgccaacttggaaacttaggcttgcattctaatagcacacacacagatctagcagtactttagttgtgatacagaaaagagatcccaaggcttcataagtagtgaagggac

SEQ ID NO: 263738 - DNA, 529 bp, Homo sapiens
ttttcataatatagctatgaaaattaagaaactataattagtagacatagcatttacctagagttatatcactgctttcaaaattgtcatacgttccctgtcactaacagattacacgaggatacatttggttgcccattttatatctgataaaccaagagggagagagtatgtgatgaagttacaaattggaaacattaaaactatatgaagtgtggcatatatttgaaactcaaatctcagcttgttaatgttaaaaacttactttttctgaaatttggcaatgcactacttcttcccccaaacatctacattagtaagcaatatgtgaagctacttctgagtgtagccaaattttagactggcaatcagagatgtggcctcttttttctatatctttttttttggkgggaaatcttgccaacttggaaacttaggcttgcattctaatagcacacacacagatctagcagtactttagttgtgatacagaaaagagatcccaaggcttcataagtagtgaagggac

SEQ ID NO: 263739 - DNA, 529 bp, Homo sapiens
ttttcataatatagctatgaaaattaagaaactataattagtagacatagcatttacctagagttatatcactgctttcaaaattgtcatacgttccctgtcactaacagattacacgaggatacatttggttgcccattttatatctgataaaccaagagggagagagtatgtgatgaagttacaaattggaaacattaaaactatatgaagtgtggcatatatttgaaactcaaatctcagcttgttaatgttaaaaacttactttttctgaaatttggcaatgcactacttcttcccccaaacatctacattagtaagcaatatgtgaagctacttctgagtgtagccaaattttagactggcaatcagagatgtggcctcttttttctatatctttttttttggggggaaatcttgccaacytggaaacttaggcttgcattctaatagcacacacacagatctagcagtactttagttgtgatacagaaaagagatcccaaggcttcataagtagtgaagggac

SEQ ID NO: 263740 - DNA, 615 bp, Homo sapiens
atattgggagaggagtagtggagtggtaaaaatcaaacctaacttcaaaatattgtaaattatggctctaagatcattcttaatgacccaatatgtgcagtgaggctcttctcttcctcctccatgttacagttgagaacacgaaagactaagccattcacattaccccagggaaggcagagggaaagggcagtccaggtgtcctgaactgtactgctcgcaggggaggcctggcccaccactaagtctggatacttccaaacctatccttacatgaaaacaatatctgcggaccatttcattccaattggttttgggtcctagtttctgcccagtggtcaaatccagaaacccaatcaggacctagtttcaatgagtggctctgagcttagctaattaatggcttcctgtcccaagaaaggtttcttgtttttgtttgtttaattaattgtttgctattgcactaaaatactttgycttacctgacaatagtgagctcaggattatcttggcacatttggttatgtggtttgagccctcccagagtgttactgtctactagttacccattaaagtttaataaggcagaagacaatgagcttgctagagatgtca

SEQ ID NO: 263741 - DNA, 555 bp, Homo sapiens
ccccaaatattccaggggctcctgcaaagtgtaaacttggagtttccttgacttagaagtgaaagaacagcaggattggaggagggtgaaagaaagaacctagtgatctaggtaatgtcactttggataacatttgctctaaattgctcccagcatcagagtagagcttgggaggagtgagtctgtatttcaaagcccagggtttcagtcagtgtgaatgagacagtgaggattatcctgccctcttgtgcttctgagccaacatgccagggcttgaagaggagcggaaggaaatgaagaagtcacagaatgyctgactgaagaagcaaagtgcagaaacacatcgcctccctccctccctatagaagtcaaactccccggagactgctcatcactatcagcatgggatggcagtatatttacttaattagctaaaagtgaatagagcttaaagttcagcccttaggtgggattttgccgacatagacttcctaggacttttgtcctatcagagtggcctgttgtactgtgagcttcttgtgtcaaaggttaatt

SEQ ID NO: 263742 - DNA, 555 bp, Homo sapiens
ccccaaatattccaggggctcctgcaaagtgtaaacttggagtttccttgacttagaagtgaaagaacagcaggattggaggagggtgaaagaaagaacctagtgatctaggtaatgtcactttggataacatttgctctaaattgctcccagcatcagagtagagcttgggaggagtgagtctgtatttcaaagcccagggtttcagtcagtgtgaatgagacagtgaggattatcctgccctcttgtgcttctgagccaacatgccagggcttgaagaggagcggaaggaaatgaagaagtcacagaatgtctgactgaagaagcaaagtgcagaaacacatcrcctccctccctccctatagaagtcaaactccccggagactgctcatcactatcagcatgggatggcagtatatttacttaattagctaaaagtgaatagagcttaaagttcagcccttaggtgggattttgccgacatagacttcctaggacttttgtcctatcagagtggcctgttgtactgtgagcttcttgtgtcaaaggttaatt

SEQ ID NO: 263743 - DNA, 555 bp, Homo sapiens
ccccaaatattccaggggctcctgcaaagtgtaaacttggagtttccttgacttagaagtgaaagaacagcaggattggaggagggtgaaagaaagaacctagtgatctaggtaatgtcactttggataacatttgctctaaattgctcccagcatcagagtagagcttgggaggagtgagtctgtatttcaaagcccagggtttcagtcagtgtgaatgagacagtgaggattatcctgccctcttgtgcttctgagccaacatgccagggcttgaagaggagcggaaggaaatgaagaagtcacagaatgtctgactgaagaagcaaagtgcagaaacacatcgcctccctccctccctatagaagtcaaactccccsgagactgctcatcactatcagcatgggatggcagtatatttacttaattagctaaaagtgaatagagcttaaagttcagcccttaggtgggattttgccgacatagacttcctaggacttttgtcctatcagagtggcctgttgtactgtgagcttcttgtgtcaaaggttaatt

SEQ ID NO: 263744 - DNA, 581 bp, Homo sapiens
tcactttggataacatttgctctaaattgctcccagcatcagagtagagcttgggaggagtgagtctgtatttcaaagcccagggtttcagtcagtgtgaatgagacagtgaggattatcctgccctcttgtgcttctgagccaacatgccagggcttgaagaggagcggaaggaaatgaagaagtcacagaatgtctgactgaagaagcaaagtgcagaaacacatcgcctccctccctccctatagaagtcaaactccccggagactgctcatcactatcagcatgggatggcagtatatttacttaattagctaaaagtgaatagagcttaaagttyagcccttaggtgggattttgccgacatagacttcctaggacttttgtcctatcagagtggcctgttgtactgtgagcttcttgtgtcaaaggttaattaatcttgtctatccagagtctaatgttcaaatgcatgttcatttaatcaggctgtttataaagtatagtggtttagtgacaagattatttaagaaaaagtccccaaaaatatactgttgaccagagtaaattaaaggtgtaaa

SEQ ID NO: 263745 - DNA, 581 bp, Homo sapiens
tcactttggataacatttgctctaaattgctcccagcatcagagtagagcttgggaggagtgagtctgtatttcaaagcccagggtttcagtcagtgtgaatgagacagtgaggattatcctgccctcttgtgcttctgagccaacatgccagggcttgaagaggagcggaaggaaatgaagaagtcacagaatgtctgactgaagaagcaaagtgcagaaacacatcgcctccctccctccctatagaagtcaaactccccggagactgctcatcactatcagcatgggatggcagtatatttacttaattagctaaaagtgaatagagcttaaagttcagcccttaggtgggattttgccgacatagacttcctaggacttttgtcctatcagagtggcctgttgtactgtgagcttcttgtgtcaaaggttaattaatcttgtctatccagagtctaatgttmaaatgcatgttcatttaatcaggctgtttataaagtatagtggtttagtgacaagattatttaagaaaaagtccccaaaaatatactgttgaccagagtaaattaaaggtgtaaa

SEQ ID NO: 263746 - DNA, 522 bp, Homo sapiens
attccaaaaaactgagaactgtccaactcattctatgaggccagcatcatcctgataccaaaacctggtagagacacaacaacaagaaaaaacttcaagccaatatcatggatgaacattgatatagggcagcttatgattagtatcatgacaaagacacaaagatggtaaaataaaaattcaaggatggggccaggcatggtagctcacacctgtaatcccagcactttgggaggccgaggcaagtggatcacaaggtcaagagatagagaccatcctkgccaacattgtgaaaccctgtctccactaaaaatacaaaaattagctgggcatggtggcgcgcacctgtagtcccagctactcaggaggctgaagcaggagaattgtttgaacccaggaggcggaggttgcagtgagctgagatcacaccactgcattccagcctggggacagaacgagactatgtctcaaaaaagaaaaaatgcaaggatggaaaaggtgctttgcttaggggaagagggg

SEQ ID NO: 263747 - DNA, 522 bp, Homo sapiens
attccaaaaaactgagaactgtccaactcattctatgaggccagcatcatcctgataccaaaacctggtagagacacaacaacaagaaaaaacttcaagccaatatcatggatgaacattgatatagggcagcttatgattagtatcatgacaaagacacaaagatggtaaaataaaaattcaaggatggggccaggcatggtagctcacacctgtaatcccagcactttgggaggccgaggcaagtggatcacaaggtcaagagatagagaccatcctggccaacattgtgaaaccctgtctccactaaaaatacaaaaattagctgggcatggtggygcgcacctgtagtcccagctactcaggaggctgaagcaggagaattgtttgaacccaggaggcggaggttgcagtgagctgagatcacaccactgcattccagcctggggacagaacgagactatgtctcaaaaaagaaaaaatgcaaggatggaaaaggtgctttgcttaggggaagagggg

SEQ ID NO: 263748 - DNA, 522 bp, Homo sapiens
attccaaaaaactgagaactgtccaactcattctatgaggccagcatcatcctgataccaaaacctggtagagacacaacaacaagaaaaaacttcaagccaatatcatggatgaacattgatatagggcagcttatgattagtatcatgacaaagacacaaagatggtaaaataaaaattcaaggatggggccaggcatggtagctcacacctgtaatcccagcactttgggaggccgaggcaagtggatcacaaggtcaagagatagagaccatcctggccaacattgtgaaaccctgtctccactaaaaatacaaaaattagctgggcatggtggcgcgcacctgtagtcccagctactcaggaggctgaagcaggagaattgtttgaacccaggaggcggaggttgcagtgagctgagatcacaccactgcattccagcctggggacagaacgagactatgtctcaaaaaaraaaaaatgcaaggatggaaaaggtgctttgcttaggggaagagggg

SEQ ID NO: 263749 - DNA, 481 bp, Homo sapiens
ataaaataaaataaatgcttggaacaagagatgagaaaactattttaatgtctccaaaggcaaacttatgtcattgttattgcatgaacagaacagaagcagaaaaaatattcaaaagggcttcagtcaagtcaaacaaaatatgaattagagtatggggacttttctctctttgggagattaaattaccaaaacccwgttctggctttgattttttgacttccttcccaaaagtttcccattggcctgtgtcctctggaaaacaagatccgaccattcagataaacatccatctttcctcttctccctctattccgtaatcccaacttcagtaggaaggtcatgttccttcagcaagactgtgggtccctcttcaattatactgccataaagagagcactgggatggggaggtagaaatggagagatgatggggtgctcttactgcaaggaaaaaaactctcctggaaaatggagatgga

SEQ ID NO: 263750 - DNA, 645 bp, Homo sapiens
aatccgtttccataatttcctaatgttggtttattaatgtttctggttggaagccaattaaagaggcatctattactaaaagaggcacaaacataacttctaactagtcataccaaaagaattcctagagcactggtgtagagatcaaattggaagaaaaacttctgaaaatttgtgtttcttctcaaaatgcaagccctcttgacgtctagaactcacatccctccatatttctgaggaaaaaaaagttttttcaggtaactcaaatccctaaatatatttttagaagaatgtaggaggaagtttacctataacaaaaaaaagtgtttaatttctgtcatttagtaaaatttttcaattttataaaaagcatataaggaaaatcaatctccaaattttatgaaataccttcaaaaataaagtttaatgtctagatctttgcaaacttttgtacataatgactaaatcaatactgtattgattttatcaatataataatcactgtatcagtttatgaaattaaggtaaaagattaatcagaaacttaaagccttccctttctacagaaaacaatgcagytttacaatattaatattaaaagtcaatattggtaagcaacattagataatcacttaagctaacaac

SEQ ID NO: 263751 - DNA, 481 bp, Homo sapiens
ataaaataaaataaatgcttggaacaagagatgagaaaactattttaatgtctccaaaggcaaacttatgtcattgttattgcatgaacagaacagaagcagaaaaaatattcaaaagggcttcagtcaagtcaaacaaaatatgaattagagtatggggacttttctctctttgggagattaaattaccaaaacccagttctggctttgattttttgacttccttcccaaaagtttcccattggcctgtgtcctctggaaaacaagatccgaccattcagataaacatccatctttcctcttctccctctattccgtaatcccaacttcagtaggaaggtcatgttccttcagcaagactgtgggtccctcttcaattrtactgccataaagagagcactgggatggggaggtagaaatggagagatgatggggtgctcttactgcaaggaaaaaaactctcctggaaaatggagatgga

SEQ ID NO: 263752 - DNA, 481 bp, Homo sapiens
ataaaataaaataaatgcttggaacaagagatgagaaaactattttaatgtctccaaaggcaaacttatgtcattgttattgcatgaacagaacagaagcagaaaaaatattcaaaagggcttcagtcaagtcaaacaaaatatgaattagagtatggggacttttctctctttgggagattaaattaccaaaacccagttctggctttgattttttgacttccttcccaaaagtttcccattggcctgtgtcctctggaaaacaagatccgaccattcagataaacatccatctttcctcttctccctctattccgtaatcccaacttcagtaggaaggtcatgttccttcagcaagactgtgggtccctcttcaattatactgccataaagrgagcactgggatggggaggtagaaatggagagatgatggggtgctcttactgcaaggaaaaaaactctcctggaaaatggagatgga

SEQ ID NO: 263753 - DNA, 616 bp, Homo sapiens
tcaaaactttgttctatgctatggtgaccccactcttcaatccccttatctatagcctccagaataaggagataaaggcagccctgaggaaagttctggggarttccaacataatctaagccatattagattattcctccatgatcagatcagtacagtctaacaaagagaaatcagaattatatagttatttaaatctaaaaaatatggatctagtaatattgactatatcagcctatgaaattaaacacctgttgggccccttacaaattaaagttgccaaattatatagataaatggaagcgtgtggcttccctttggcacctagactgagtattaactgaggaatgtacatatttgggtgttttctggatagtttccatctgattcatctgtgataaaaattctttaagttctatttgacttaaatttattgttctgacattgacaaaattacagctatgttattttgtttggttggttgtaaataaaagaagaaaaaacatattttctgattgtgattcctatcatatttggctttattatttggtgacatggtcatttctaataaataagcccttataagcaatttatcaacatttttgtgggacaataa

SEQ ID NO: 263754 - DNA, 532 bp, Homo sapiens
gtgacccagggccactatttgcattggcttgtgtctctgccccaagaatccaactgttttgctacactctaagctcattagttatttttggtaacttcctctttattattggatcctatactcttgtcctgaaagctgtgttgggtatgccttcgagcactgggaaacataaagccttctctacctgtgggtctcatttggctgtggtatcactgttctatggctctcttatggtcatgtgtgtgagtccaggacttggacactctatggggatgcagaaaatcaaaactttgttctatgctatggtgaccccactcttcaatccccttatctatagcctccagaataaggagataaaggcagccctgaggaaagttctggggagttccaacataatctaagccatattagattattcctccatgatcagatsagtacagtctaacaaagagaaatcagaattatatagttatttaaatctaaaaaatatggatctagtaatattgactatatcagcctatgaaattaaaca

SEQ ID NO: 263755 - DNA, 220 bp, Homo sapiens
ataatctaagccatattagattattcctccatgatcagatcagtacagtctaacaaagagaaatcagaattatatagttatttaaatctaaaaaatatggayctagtaatattgactatatcagcctatgaaattaaacacctgttgggccccttacaaattaaagttgccaaattatatagataaatggaagcgtgtggcttccctttggcacctagac

SEQ ID NO: 263756 - DNA, 220 bp, Homo sapiens
ataatctaagccatattagattattcctccatgatcagatcagtacagtctaacaaagagaaatcagaattatatagttatttaaatctaaaaaatatggatctagtratattgactatatcagcctatgaaattaaacacctgttgggccccttacaaattaaagttgccaaattatatagataaatggaagcgtgtggcttccctttggcacctagac

SEQ ID NO: 263757 - DNA, 220 bp, Homo sapiens
ataatctaagccatattagattattcctccatgatcagatcagtacagtctaacaaagagaaatcagaattatatagttatttaaatctaaaaaatatggatctagtaatattgactatatcagcctatgaaattaaacacctgttggrccccttacaaattaaagttgccaaattatatagataaatggaagcgtgtggcttccctttggcacctagac

SEQ ID NO: 263758 - DNA, 220 bp, Homo sapiens
ataatctaagccatattagattattcctccatgatcagatcagtacagtctaacaaagagaaatcagaattatatagttatttaaatctaaaaaatatggatctagtaatattgactatatcagcctatgaaattaaacacctgttgggccccttacaaattaaagttgccaaatyatatagataaatggaagcgtgtggcttccctttggcacctagac

SEQ ID NO: 263759 - DNA, 487 bp, Homo sapiens
atttttaaaggaaaaaagcatttatagttcaattgctctaatgtatctatttttgttaatatgtctgtttcatgtgatttaatgttgaacttgctcccatttatagcaagttttcataattatcattcttagaaagcataatattttattgaactaacatgccatgaattgtgaatttttatgtggggagatgaacattgtcctagacgaagggccttctttccaagaagctaagagctgactagtaaaagggaattttcagaagggatattaggagaaaaatgaacgcctctactacacaagaatgacttctcacagaatttgtactgtggcattctggggtaaggttactgaacactccarcaccttccttccttctaccaccaatttttttgatgaacattacagttatcccattttttgttataaaataatatctcaataaaatctccataaagatttgccttgataatattttgcaaacctg

SEQ ID NO: 263760 - DNA, 590 bp, Homo sapiens
atattaggagaaaagaaagagtgtgtatcagtttaacaggttttcacatgcaaattcaccaccacagggttcactgtcttggcaacattgaaaataataataattaacgttttaagacacctattttgtgtcaggcaatgttccaagtctttyctatgtattattttatttcctacttatgaaacccaaagaaattgggttggtattattgtatctctaatttttgaagagtgaaacaggcagaaaaggtaacttgcctagttggagatggcatctgatctcaggcaggctaacaatggagcccacagtttttactactattaggggaaaagaccaacactatcgaatgaaatagattggatcaaatctaagtcactgattgtgtgagcttatgcaaattatttgacctttctgcctagatttgtttagactataaaatagaactaatgataatacttttgtcagacagtggatttgatgattaaatgcggtaaatcaaggtaggatcttacacatagtatttatggaatctatttcagttaatattattaatgtctttcatttgtagggctcttcagcatttcccaaac

SEQ ID NO: 263761 - DNA, 587 bp, Homo sapiens
agagagactctgcccctctccaagggaagccagaggcttgaagccaggcagggattaggtggcatttaagaggaatctgtgtgttaagacttgccacaatttaactgctcaagtaaggagctgtcatttgtggataatgtaagtatgcttcaggtgatactatcaaacttgatttcctgaaagcaaaggaccactgcatagctcagaattctatattcctaggatctctacctcaaaaccattgcgtcttcttggtctgagatttaccccagcctctgaaatctccctgaatrctagaatagagagggaagcccaagaataacagggcatgctatttgacacagtcagggctcaagaaacggactttgaaaaatgtgaggaaatagccatggaaataggatgatggagcaccaaatgtattgaatgatatccacaatgaggtggatggctttgcaaggttgagtcatctagatgattcattcccaggaccttctcaggcctcctctgaacttttcactgaaatctgaggcatgtacactactcatgctccagctccctttgaagagacattattactcaaggaaagg

SEQ ID NO: 263762 - DNA, 587 bp, Homo sapiens
agagagactctgcccctctccaagggaagccagaggcttgaagccaggcagggattaggtggcatttaagaggaatctgtgtgttaagacttgccacaatttaactgctcaagtaaggagctgtcatttgtggataatgtaagtatgcttcaggtgatactatcaaacttgatttcctgaaagcaaaggaccactgcatagctcagaattctatattcctaggatctctacctcaaaaccattgcgtcttcttggtctgagatttaccccagcctctgaaatctccctgaatgctagaayagagagggaagcccaagaataacagggcatgctatttgacacagtcagggctcaagaaacggactttgaaaaatgtgaggaaatagccatggaaataggatgatggagcaccaaatgtattgaatgatatccacaatgaggtggatggctttgcaaggttgagtcatctagatgattcattcccaggaccttctcaggcctcctctgaacttttcactgaaatctgaggcatgtacactactcatgctccagctccctttgaagagacattattactcaaggaaagg

SEQ ID NO: 263763 - DNA, 587 bp, Homo sapiens
agagagactctgcccctctccaagggaagccagaggcttgaagccaggcagggattaggtggcatttaagaggaatctgtgtgttaagacttgccacaatttaactgctcaagtaaggagctgtcatttgtggataatgtaagtatgcttcaggtgatactatcaaacttgatttcctgaaagcaaaggaccactgcatagctcagaattctatattcctaggatctctacctcaaaaccattgcgtcttcttggtctgagatttaccccagcctctgaaatctccctgaatgctagaatagagagggaagcccaagaataacagggcatgctatttgacacagtcagggctcaagaaacrgactttgaaaaatgtgaggaaatagccatggaaataggatgatggagcaccaaatgtattgaatgatatccacaatgaggtggatggctttgcaaggttgagtcatctagatgattcattcccaggaccttctcaggcctcctctgaacttttcactgaaatctgaggcatgtacactactcatgctccagctccctttgaagagacattattactcaaggaaagg

SEQ ID NO: 263764 - DNA, 651 bp, Homo sapiens
tatttcccccccaaaatttggtggcgagataagaaaggaagccaatttgtttcatggtaaaatgtcatgaaattatttcacttattttttcttcagagcttcacgatgattattagacattattagatatttagtacttcagattgtattacagattacataaatcactccagttattttcaacatagtgaagcagcttcgttgtctggggaaatacctgcagttcgttgtcttgtgctgtgccgattaatgacacagactcacacacggagtgggttaaggaacagaaagtttattaggcaagaaggaagagaagagcttccccatasagagggagaagcactctgaatggagtaaccccacttgtggggaaagcagtcagttatattgggaggctcagggaggtagtgtctgatttgcatagggcccaggggattcctttgaccaggtgtgtcattcacacaacccatgaaaagactggccctcccaccctaatcttttattctgcaaatgcggcttctacctggctgtcaccatgatgcctgcacatgtggctttacttggctggtgccatgacaactgcacatgtggcaacaaaggaaagtgagcgggaagagtcatattgagtggacctggctgttagccacctgc

SEQ ID NO: 263765 - DNA, 573 bp, Homo sapiens
tggctggtgccatgacaactgcacatgtggcaacaaaggaaagtgagcgggaagagtcatattgagtggacctggctgttagccacctgcatttacttctgcaagcctgtaatttacatacctatgcttccagcatggcttttcaggctgctttctgttagaaaagaaatggtttgggggctgcttttttattaaaaggaaaagcctttctgaggactcttttaccctttctagctgcctaaaaataatttcttaataactcctgtattaatagtggggtctaatgtgagaaattaggtacttataaaatttttcaagtatagaagaccattatttatgctgggcatctattatagaaattrttaccagaaaaacactgtagaactaacctgctaagtgacctatccctgccataaccaggagactgagaggacaagaaaccactttcccagctcttggctcagggaacacatcaatcagccatggtctggcatgaagagaattgtagagagcacctctcatgttattgtctctctaattattttttctaaattaaattttgtatgagtatat

SEQ ID NO: 263766 - DNA, 573 bp, Homo sapiens
tggctggtgccatgacaactgcacatgtggcaacaaaggaaagtgagcgggaagagtcatattgagtggacctggctgttagccacctgcatttacttctgcaagcctgtaatttacatacctatgcttccagcatggcttttcaggctgctttctgttagaaaagaaatggtttgggggctgcttttttattaaaaggaaaagcctttctgaggactcttttaccctttctagctgcctaaaaataatttcttaataactcctgtattaatagtggggtctaatgtgagaaattaggtacttataaaatttttcaagtatagaagaccattatttatgctgggcatctattatagaaattgttaccagaaaaacactgtagaactaacctgctaagtgacctatccctgccataaccaggagactgagaggacaagaarccactttcccagctcttggctcagggaacacatcaatcagccatggtctggcatgaagagaattgtagagagcacctctcatgttattgtctctctaattattttttctaaattaaattttgtatgagtatat

SEQ ID NO: 263767 - DNA, 607 bp, Homo sapiens
caaacttgatttcctgaaagcaaaggaccactgcatagctcagaattctatattcctaggatctctacctcaaaaccattgcgtcttcttggtctgagatttaccccagcctctgaaatctccctgaatgctagaatagagagggaagcccaagaataacagggcatgctatttgacacagtcagggctcaagaaacggactttgaaaaatgtgaggaaatagccatggaaataggatgatggagcaccaaatgtattgaatgatatccacaatgaggtggatggctttgcaaggttgagtcatctagatgattcattcccaggaccttctcaggcctcctctgaacttttcactgaaatctgaggcatgtacactactcatgctccagctccctttgaagagacattattactcaakgaaaggcagcttctgtgcttccagagccagctttctgtggtcacccagcaatgttatctcaagagaaagacacagaaatccatgtcctttgatagaaaatcctcctttgctcaagggcatgagttactgaataagtccaaggagggtgacacttttcattcttgtttgatgtctgtcattctcagagca

SEQ ID NO: 263768 - DNA, 475 bp, Homo sapiens
cacatttactaatttgcgtatgctgaaccaaccttgtgttccagggataaascctacttgattgtgttggagtagagttttaatgtgctgctggattcagtttgctagtattttctttttttctttttttttttgctagttttctttttttgttgtatctctgccaggttttggtatcagaatgatgttggcttcatagaataaattagggaggagtccttcctcctcaaattttcagaatagtttcagaggaaaggtaccagctcttctttatgcatctggtagaactcagctgtgaattcctctgatcctgggctttttctggttggtaggctttttattattaacacaatcttggaacttgttattagtctgttcagagtttcagtttcttcctagttcaatcttaggaggttgtatgtttccaataatttattaatttcttctagtttgtgtgcataaagttgttcatagt

SEQ ID NO: 263769 - DNA, 635 bp, Homo sapiens
tgtcttttttgattgttattggtttatagtctattttgtctgaaattagaatcagaccatttgctcttttctgttttctttggcttggtctattttttctccatccctttattttgagcccctggatatcactgcatgtgagatgggtctcttgcagagagaatacagttgggtcttgcttctttatctgacttgccactctatgccttttaaatgccttgaagcatttaacccatttacattcaaggtcactcaaggttagattgtgtctttcccagcaatgattcctaamccataagaaattactgaaatgagagacatagaattcaggatctggatgtcatggaagctcattgagattcaggacaaatttgaaatccaatccatggaatccagtaaaatgacagaagagctgaaagacaaaatagccactttaagaaagaaccaaactgaaactctcgagttaaaaattcactagaagaagttcataatacagttagaagtattaacagcaaaatagaccaagctaaggaaaatatctctgagctcaaagactggttctttgaattaacactgtgagacaaaaataaagaaaaaacaattttaaaagtgaacaaaacttctgagaaagatta

SEQ ID NO: 263770 - DNA, 560 bp, Homo sapiens
cacatggaacatattgtaagatcaaccacacgcttcgtcagaaagcaagtctgaatacattcaaaaacactgaaatcatcccaggcacattcttgaaccacagtgcaataaaattagaaataaacgtcaagaaggtctctcaaaagtacacaaattcatggaaagtaaacaacttgctcctgaataactcatgggtccacactgaaattaggcaaaaatcaaaaaaattctttgaaattaaaacagggacacaactaaccaaaatctctgaaatgaagctaaagcaggaaataaaactttttatataaataagtaaataagataataagaggaaagattatagcactaaataccttcatcaagaagttagaaaaatctgaatttaataatccaactttgtacctaaaggaactagaaaaaaaaaaagctcaaagctagcagaagaacakatataactacaaatagagaaaaacttaatgaaagtgagatgcaaaaatatgtacaaaaggtcagcgaaaccaataattggtccttcaaaataaaaataaacaaaattggta

SEQ ID NO: 263771 - DNA, 560 bp, Homo sapiens
cacatggaacatattgtaagatcaaccacacgcttcgtcagaaagcaagtctgaatacattcaaaaacactgaaatcatcccaggcacattcttgaaccacagtgcaataaaattagaaataaacgtcaagaaggtctctcaaaagtacacaaattcatggaaagtaaacaacttgctcctgaataactcatgggtccacactgaaattaggcaaaaatcaaaaaaattctttgaaattaaaacagggacacaactaaccaaaatctctgaaatgaagctaaagcaggaaataaaactttttatataaataagtaaataagataataagaggaaagattatagcactaaataccttcatcaagaagttagaaaaatctgaatttaataatccaactttgtacctaaaggaactagaaaaaaaaaaagctcaaagctagcagaagaacagatataactacaaatagagaaaaacttaatgaaagtgagatgcaaaaatatgtacaaaaggtcagygaaaccaataattggtccttcaaaataaaaataaacaaaattggta

SEQ ID NO: 263772 - DNA, 450 bp, Homo sapiens
gaatgaaactagaggcatcacactactcaaactataaggccattgtaaccaaaacagtatgctactggtacagaaacagacacatagacccatagaacagaatagaaaacccagaaataaatccatgcacttacaaccatcagctcttcaacaaggcagacaaaaataagcaatggagaaaagactctctgtttagaagcccctactgaggaaagttgtgggcttgagtctggagcctaagaacattcaaccaagctaactctcaggtctctctattcaataaatggtgctgggataactggctagtcagatacaaaaaaaagtgaaacttgacccttatttttcaccatatacaaaaatcaactcaaaatcgattacagatttaaatttaagacctcagcctatrgaaatcctagaagaaaacctaggaaatactcttctcagccacag

SEQ ID NO: 263773 - DNA, 508 bp, Homo sapiens
atctctttaaaaattgggcaaaggacatgaacaaaggcttttcaaagacctacatgcagccaagaagcatatgaaaaaatgctcgacatcgctaagcacatcaaaaccacaacgagataccaactcacagcagtcagaatggttattattaaaaagtcaaaaaataacatgctagtgaggtttcagagaagagggaacacttatacgctgctggtgggaatgtaaattagttcagccattgtggaaagcagcgtggcaatttctcaaagaaattaaaagagaattatcatttaacctagcaatctcattattgggyacatatccaaaggaatataaatcattttaccataaagacatatgcacacatatgttcaacacagtactattctcaatagcaaagttgccatcaatggtaaactgtataaagaaaatgtggtacacagacacaatggaatactatgtagtcataaaaagaatgagatcatgtcctttgcaagaaagagataaa

SEQ ID NO: 263774 - DNA, 508 bp, Homo sapiens
atctctttaaaaattgggcaaaggacatgaacaaaggcttttcaaagacctacatgcagccaagaagcatatgaaaaaatgctcgacatcgctaagcacatcaaaaccacaacgagataccaactcacagcagtcagaatggttattattaaaaagtcaaaaaataacatgctagtgaggtttcagagaagagggaacacttatacgctgctggtgggaatgtaaattagttcagccattgtggaaagcagcgtggcaatttctcaaagaaattaaaagagaattatcatttaacctagcaatctcattattgggcacatatccaaaggaatataaatcattttaccataaagacatatgcacacatatgttcaacacagtactattctcaatagcaaagttgccatcaatggtaaactgtataaagaaaatgtggtacayagacacaatggaatactatgtagtcataaaaagaatgagatcatgtcctttgcaagaaagagataaa

SEQ ID NO: 263775 - DNA, 523 bp, Homo sapiens
ggcaaatcattttaaatgtcctgttgatagctggaattggtagcgttattttaagaaaagcaagagcgttttgtattcccttttgcattttcaagtctctctttgtttccaggaacaaagcctacttgatcgtggtgaattaacttactgatgtgccgctgaatttggtttgctagtattgtgttgaggatttttgcatctatgttcatcaggatawtggcctgatgttttctttctttgttttgtttctgccagattttggtattaggctgatgctagcttcatagaatgagttaggggggagcccttcctttttgatttttttgggaatactttcagtaggattggtaccatttcttctttatatgtctggtagaattcaactgtgaattcctctggtcctgggctttttttggttagtagagttttttttttttattactgattcaatttcagagcttgatattgacttattaaggattacagtctcttcctaattcaattttaggagattgtgttgttc

SEQ ID NO: 263776 - DNA, 616 bp, Homo sapiens
aggattggtaccatttcttctttatatgtctggtagaattcaactgtgaattcctctggtcctgggctttttttggttagtagagttttttttttttattactgattcaatttcagagcttgatattgacttattaaggattacagtctcttcctaattcaattttaggagattgtgttgttccagggatttatccgtttcttccagattttctaatttgtgtgcatasagttgttcatagtattctctgaggaccttttgtatttctgtgggatcagttgtaatgtcatttttgtactttttgacggtactcatttggatcttcttttttttttactatttttttaatctaactagcagtctaacaatcttattttttcaaaagactaactcttggtttcattgacgttttgtatagatttttgcacctcactttcattaagttgttctctaatttttgttatttcttttcttctgctagctatggagttggtttgtcctttattttctaattccttgaggtgcaaagtgcaggaggatgaagctagacccttgcttttcagcatgtaagaaaattaacaggatagattaaagatttaaatgtaaggccacaaac

SEQ ID NO: 263777 - DNA, 523 bp, Homo sapiens
ttggtattaggctgatgctagcttcatagaatgagttaggggggagcccttcctttttgatttttttgggaatactttcagtaggattggtaccatttcttctttatatgtctggtagaattcaactgtgaattcctctggtcctgggctttttttggttagtagagttttttttttttattactgattcaatttcagagcttgatattgacttattaaggattacagtctcttcctaattcaattttaggagattgtgttgttccagggatttatccgtttcttccagattttctaatttgtgtgcatagagttgttcatagtattctctgaggaccttttgtatttctgtgggatcagttgtaatgtcatttttgtactttttgackgtactcatttggatcttcttttttttttactatttttttaatctaactagcagtctaacaatcttattttttcaaaagactaactcttggtttcattgacgttttgtatagatttttgcacctcactttcatta

SEQ ID NO: 263778 - DNA, 598 bp, Homo sapiens
tgatgcataaagattgcggagagtttcttccctttggcatccaggaatgtagaagtcttttgcataccaaggttagaagctatggcatggttgtaaactcataaaatactatctttgtgagggagagagagagaggagagagagaaagagaaaacaaactcaagaccactttttagactgtacaagaggaaatgtggcatgtatataagagaagcatcattatataaatctgtcttttagtgtgcgtatcttggtatcaatcacatttttatttcaaaggcttttctgatccaagatctcggattgttcaaatccatgaggtgggaccacactcaagaaaaagtccagggtaagctttccatctagaatgataccttaaccaccagtgaaagaagcaaggtcaattttcattgattcaaattatattcaaaggtaaattctttacttctgtaaattattcacctgctttacaacgtctgttctagtaattaatttaagaawtagtatattacaatttaaagtgtgtatcaatataatttcagttggaatttagtcctaggtttactaggtttaccaccatcagtaaacttagataatt

SEQ ID NO: 263779 - DNA, 598 bp, Homo sapiens
tgatgcataaagattgcggagagtttcttccctttggcatccaggaatgtagaagtcttttgcataccaaggttagaagctatggcatggttgtaaactcataaaatactatctttgtgagggagagagagagaggagagagagaaagagaaaacaaactcaagaccactttttagactgtacaagaggaaatgtggcatgtatataagagaagcatcattatataaatctgtcttttagtgtgcgtatcttggtatcaatcacatttttatttcaaaggcttttctgatccaagatctcggattgttcaaatccatgaggtgggaccacactcaagaaaaagtccagggtaagctttccatctagaatgataccttaaccaccagtgaaagaagcaaggtcaattttcattgattcaaattatattcaaaggtaaattctttacttctgtaaattattcacctgctttacaacgtctgttctagtaattaatttaagaattagtatattacaatttaamgtgtgtatcaatataatttcagttggaatttagtcctaggtttactaggtttaccaccatcagtaaacttagataatt

SEQ ID NO: 263780 - DNA, 598 bp, Homo sapiens
tgatgcataaagattgcggagagtttcttccctttggcatccaggaatgtagaagtcttttgcataccaaggttagaagctatggcatggttgtaaactcataaaatactatctttgtgagggagagagagagaggagagagagaaagagaaaacaaactcaagaccactttttagactgtacaagaggaaatgtggcatgtatataagagaagcatcattatataaatctgtcttttagtgtgcgtatcttggtatcaatcacatttttatttcaaaggcttttctgatccaagatctcggattgttcaaatccatgaggtgggaccacactcaagaaaaagtccagggtaagctttccatctagaatgataccttaaccaccagtgaaagaagcaaggtcaattttcattgattcaaattatattcaaaggtaaattctttacttctgtaaattattcacctgctttacaacgtctgttctagtaattaatttaagaattagtatattacaatttaaagtgtgtatcaatataatttcarttggaatttagtcctaggtttactaggtttaccaccatcagtaaacttagataatt

SEQ ID NO: 263781 - DNA, 598 bp, Homo sapiens
tgatgcataaagattgcggagagtttcttccctttggcatccaggaatgtagaagtcttttgcataccaaggttagaagctatggcatggttgtaaactcataaaatactatctttgtgagggagagagagagaggagagagagaaagagaaaacaaactcaagaccactttttagactgtacaagaggaaatgtggcatgtatataagagaagcatcattatataaatctgtcttttagtgtgcgtatcttggtatcaatcacatttttatttcaaaggcttttctgatccaagatctcggattgttcaaatccatgaggtgggaccacactcaagaaaaagtccagggtaagctttccatctagaatgataccttaaccaccagtgaaagaagcaaggtcaattttcattgattcaaattatattcaaaggtaaattctttacttctgtaaattattcacctgctttacaacgtctgttctagtaattaatttaagaattagtatattacaatttaaagtgtgtatcaatataatttcagttggaatttastcctaggtttactaggtttaccaccatcagtaaacttagataatt

SEQ ID NO: 263782 - DNA, 319 bp, Homo sapiens
tttaccttccacttttttggttgtgctgagatttttgttttgactgtcatggcttttgatcgctatgctgctatctgccaayccctccgttacactgtcatcatgagtgctaatgcttatactgtgctggcatcactgtcctggttgggggccctgggtcattcctttgttcagaccctcctgaccttccagctgcccttctgtaatgctcaggttatagaccattacttttgtgatgtccacccagtcctaaaacttgcctgtgctgatacaactctggtaaatatgttggtggttgccaacagtggtctcatctccc

SEQ ID NO: 263783 - DNA, 616 bp, Homo sapiens
agctgggtctgtgttctataccaccatcaccccaatgctgaacccactcatctatactctgaggaatgaggagtaaagaatgccatgaggcggctatggagtagcaagatctccttgaaggaaaagcagagaggatagtttgtcagaattgcaaaatcactgaattagtggataccttcaatgatccctaatttactaataattaaaaaaacagttcctaaaatgcagcttttatattttgtctaacaggaaataatttgaggctattttagaygggctaaacttaaacctttccatacttggcaaggtttattctctcttctagagtacaagagttaacactcctactcaatatctcatttaacctcgttaaatcccttctattcacatcaaactctcttaagctaccattcagtaatttagagtggggttataagagaaagatatccctgatcatatcttctcaccatatcatgtctcttcaaaaaagaggtctaatttaccagaagctgcaccttttccctccttcttttgttttctttttcgtccttctctagtcttttcttatacatattgcaaaatctagtcagggaaacagatttgcaaggagataatt

SEQ ID NO: 263784 - DNA, 616 bp, Homo sapiens
agctgggtctgtgttctataccaccatcaccccaatgctgaacccactcatctatactctgaggaatgaggagtaaagaatgccatgaggcggctatggagtagcaagatctccttgaaggaaaagcagagaggatagtttgtcagaattgcaaaatcactgaattagtggataccttcaatgatccctaatttactaataattaaaaaaacagttcctaaaatgcagcttttatattttgtctaacaggaaataatttgaggctattttagacgggctaaacttaaacctttccatacttggcaaggtttattctctcttctagagtacaagagttaacactcctactcaatatctcatttaacctcgttaaatcmcttctattcacatcaaactctcttaagctaccattcagtaatttagagtggggttataagagaaagatatccctgatcatatcttctcaccatatcatgtctcttcaaaaaagaggtctaatttaccagaagctgcaccttttccctccttcttttgttttctttttcgtccttctctagtcttttcttatacatattgcaaaatctagtcagggaaacagatttgcaaggagataatt

SEQ ID NO: 263785 - DNA, 553 bp, Homo sapiens
ccttctattcacatcaaactctcttaagctaccattcagtaatttagagtggggttataagagaaagatatccctgatcatatcttctcaccrtatcatgtctcttcaaaaaagaggtctaatttaccagaagctgcaccttttccctccttcttttgttttctttttcgtccttctctagtcttttcttatacatattgcaaaatctagtcagggaaacagatttgcaaggagataattacaatacaatacaacaaatgcagacatagaaatacatacttcctataatgaagagggttagtataaatcaacaaattgcccaaaggatggtttctgtgcaggaaaaaaaaaaatagaactttacatattttgaggtggacagcaatttcttcaaagaccctcttggagaatttgaatactcttctacccattactataatactatctttactgaaagaaatcttacttttttgccaataaaaacagactagattaaagcaactaaaatgagttggtatttgtaccattgaaatgactaaggagatgtaattct

SEQ ID NO: 263786 - DNA, 553 bp, Homo sapiens
ccttctattcacatcaaactctcttaagctaccattcagtaatttagagtggggttataagagaaagatatccctgatcatatcttctcaccatatcatgtctcttcaaaaaagaggtctaatttaccagaagctgcaccttttccctccttcttttgttttctttttcgtccttctctagtcttttcttatacatattgcaaaatctagtcagggaaacagatttgcaaggagataattacaatacaatacaacaaatgcagacatagaaatrcatacttcctataatgaagagggttagtataaatcaacaaattgcccaaaggatggtttctgtgcaggaaaaaaaaaaatagaactttacatattttgaggtggacagcaatttcttcaaagaccctcttggagaatttgaatactcttctacccattactataatactatctttactgaaagaaatcttacttttttgccaataaaaacagactagattaaagcaactaaaatgagttggtatttgtaccattgaaatgactaaggagatgtaattct

SEQ ID NO: 263787 - DNA, 648 bp, Homo sapiens
tacttgtcaaaatctgttgattgtaactccaatttctatttttttccttagtaatggggacctgacattattcatggtggmccaactaaaatattgcattgacttgcctcaggctcttttaaacttcaattcaataatttagaatgaccttataagaaaaagatattccttttgaagcccagtggacaatctgatgttaatagtagttggttggtgggacttttgaaaagtctttaaaatggtttgtctactccagccctctcatacatgatcaccattaacattttgattattaaaatttctttatagttattgcatgtccttatagttattttcatattactttccctttgcaaaagggtcattctatcctttttttaaactcctgattttttaagatagacaacaaacccacaaattatattaaaaatgatagaatacattaggtttccttttccctcctaagagcaaagtattaataataaaaataacaacacttgcagtaagaaaaaaatggctgagacccacaggaacaaagaaacaggacaggagttagatgcagagaagagatttcaacaaaagtttggaaaaggtaagacaaaaaagtagtaactgatttggcagggtcgggaaggctaagtctaaatt

SEQ ID NO: 263788 - DNA, 601 bp, Homo sapiens
tggactagaggggcttgcacagtaggtacttgtcaaaatctgttgattgtaactccaatttctatttttttccttagtaatggggacctgacattattcatggtggaccaactaaaatattgcattgacttgcctcaggctcttttaaamttcaattcaataatttagaatgaccttataagaaaaagatattccttttgaagcccagtggacaatctgatgttaatagtagttggttggtgggacttttgaaaagtctttaaaatggtttgtctactccagccctctcatacatgatcaccattaacattttgattattaaaatttctttatagttattgcatgtccttatagttattttcatattactttccctttgcaaaagggtcattctatcctttttttaaactcctgattttttaagatagacaacaaacccacaaattatattaaaaatgatagaatacattaggtttccttttccctcctaagagcaaagtattaataataaaaataacaacacttgcagtaagaaaaaaatggctgagacccacaggaacaaagaaacaggacaggagttagatgcagagaagagatttca

SEQ ID NO: 263789 - DNA, 601 bp, Homo sapiens
tggactagaggggcttgcacagtaggtacttgtcaaaatctgttgattgtaactccaatttctatttttttccttagtaatggggacctgacattattcatggtggaccaactaaaatattgcattgacttgcctcaggctcttttaaacttcaattcaataatttagaatgaccttataagaaaaagatattccttttgaagcccagtggacaatckgatgttaatagtagttggttggtgggacttttgaaaagtctttaaaatggtttgtctactccagccctctcatacatgatcaccattaacattttgattattaaaatttctttatagttattgcatgtccttatagttattttcatattactttccctttgcaaaagggtcattctatcctttttttaaactcctgattttttaagatagacaacaaacccacaaattatattaaaaatgatagaatacattaggtttccttttccctcctaagagcaaagtattaataataaaaataacaacacttgcagtaagaaaaaaatggctgagacccacaggaacaaagaaacaggacaggagttagatgcagagaagagatttca

SEQ ID NO: 263790 - DNA, 601 bp, Homo sapiens
tggactagaggggcttgcacagtaggtacttgtcaaaatctgttgattgtaactccaatttctatttttttccttagtaatggggacctgacattattcatggtggaccaactaaaatattgcattgacttgcctcaggctcttttaaacttcaattcaataatttagaatgaccttataagaaaaagatattccttttgaagcccagtggacaatctgatgttaatagtagttggttggtgggacttttgaaaagtctttaaaatggtttgtctactccarccctctcatacatgatcaccattaacattttgattattaaaatttctttatagttattgcatgtccttatagttattttcatattactttccctttgcaaaagggtcattctatcctttttttaaactcctgattttttaagatagacaacaaacccacaaattatattaaaaatgatagaatacattaggtttccttttccctcctaagagcaaagtattaataataaaaataacaacacttgcagtaagaaaaaaatggctgagacccacaggaacaaagaaacaggacaggagttagatgcagagaagagatttca

SEQ ID NO: 263791 - DNA, 648 bp, Homo sapiens
tacttgtcaaaatctgttgattgtaactccaatttctatttttttccttagtaatggggacctgacattattcatggtggaccaactaaaatattgcattgacttgcctcaggctcttttaaacttcaattcaataatttagaatgaccttataagaaaaagatattccttttgaagcccagtggacaatctgatgttaatagtagttggttggtgggacttttgaaaagtctttaaaatggtttgtctactccagccctctcatacatgatcaccattaacattttgattattaaaatttctttatagttattgcatgtccttatagttattttcatattactttccctttgcaaaagggtcattctatcctttttttaaactcctgattttttaagatagacaacaaacccacaaattatattaaaaatgatagaatacattaggtttccttttccctcctaagagyaaagtattaataataaaaataacaacacttgcagtaagaaaaaaatggctgagacccacaggaacaaagaaacaggacaggagttagatgcagagaagagatttcaacaaaagtttggaaaaggtaagacaaaaaagtagtaactgatttggcagggtcgggaaggctaagtctaaatt

SEQ ID NO: 263792 - DNA, 648 bp, Homo sapiens
tacttgtcaaaatctgttgattgtaactccaatttctatttttttccttagtaatggggacctgacattattcatggtggaccaactaaaatattgcattgacttgcctcaggctcttttaaacttcaattcaataatttagaatgaccttataagaaaaagatattccttttgaagcccagtggacaatctgatgttaatagtagttggttggtgggacttttgaaaagtctttaaaatggtttgtctactccagccctctcatacatgatcaccattaacattttgattattaaaatttctttatagttattgcatgtccttatagttattttcatattactttccctttgcaaaagggtcattctatcctttttttaaactcctgattttttaagatagacaacaaacccacaaattatattaaaaatgatagaatacattaggtttccttttccctcctaagagcraagtattaataataaaaataacaacacttgcagtaagaaaaaaatggctgagacccacaggaacaaagaaacaggacaggagttagatgcagagaagagatttcaacaaaagtttggaaaaggtaagacaaaaaagtagtaactgatttggcagggtcgggaaggctaagtctaaatt

SEQ ID NO: 263793 - DNA, 580 bp, Homo sapiens
ctttaaaaaaaatcccaatctcttttttctttcttcatgtgagtcaggtaatgtatatatgtcataaggtttgagggaggtacatttcacacaggagtgcaaaaactcagtcatcacgcttatgaactacgaagggatcaaaaggcacttttaagatgacagatgtacagtaggcataggagacaacagaaatggatgaaagcagaagatggaagccctccaggttcataaaacagaaaggagagkgtgaaaatttatattatctaatatattgaagcatcttagttgtaaaggtacagtcaataagatgaaacaagttgatacactcaaggaaggatacatttatagaaaattatatcatttagagttccaacaggaagttaatgacacacttaatataggataatttgataaacatttatttaacgagatgctgtctatgaatttataggtatagagtaccacacaggccaggggtaagatggggtggagctgtttacaccattgtgcctgaagggactgagagagggaggaaatacagaaaccccaaaaagagatatttatgatagccatttgaaag

SEQ ID NO: 263794 - DNA, 580 bp, Homo sapiens
ctttaaaaaaaatcccaatctcttttttctttcttcatgtgagtcaggtaatgtatatatgtcataaggtttgagggaggtacatttcacacaggagtgcaaaaactcagtcatcacgcttatgaactacgaagggatcaaaaggcacttttaagatgacagatgtacagtaggcataggagacaacagaaatggatgaaagcagaagatggaagccctccaggttcataaaacagaaaggagagggtgaaaatttatattatctaatatatwgaagcatcttagttgtaaaggtacagtcaataagatgaaacaagttgatacactcaaggaaggatacatttatagaaaattatatcatttagagttccaacaggaagttaatgacacacttaatataggataatttgataaacatttatttaacgagatgctgtctatgaatttataggtatagagtaccacacaggccaggggtaagatggggtggagctgtttacaccattgtgcctgaagggactgagagagggaggaaatacagaaaccccaaaaagagatatttatgatagccatttgaaag

SEQ ID NO: 263795 - DNA, 580 bp, Homo sapiens
ctttaaaaaaaatcccaatctcttttttctttcttcatgtgagtcaggtaatgtatatatgtcataaggtttgagggaggtacatttcacacaggagtgcaaaaactcagtcatcacgcttatgaactacgaagggatcaaaaggcacttttaagatgacagatgtacagtaggcataggagacaacagaaatggatgaaagcagaagatggaagccctccaggttcataaaacagaaaggagagggtgaaaatttatattatctaatatattgaarcatcttagttgtaaaggtacagtcaataagatgaaacaagttgatacactcaaggaaggatacatttatagaaaattatatcatttagagttccaacaggaagttaatgacacacttaatataggataatttgataaacatttatttaacgagatgctgtctatgaatttataggtatagagtaccacacaggccaggggtaagatggggtggagctgtttacaccattgtgcctgaagggactgagagagggaggaaatacagaaaccccaaaaagagatatttatgatagccatttgaaag

SEQ ID NO: 263796 - DNA, 533 bp, Homo sapiens
aaagtcatcagatcttgtaagaacttactcactatcacaagaatagcatgagaaaactgcccccatgattcaattacctttcactgggtctctcccatgacatgtgaggactacgggaamtataattcaagatgggatttgggtggggacacagccaaaccatatcaggtttcctttacatccttgccaacacatgctatcactggactttttgataaaaggcaatctaacaggtggttggtgatatctcagtgaggttttgatttgccttgatgatttctgattttgagcattttttccatatacctgttggccatttgtgtatcttctttggaaaaatatctattcagatcctttgcccattttatgaaatcattttaaaaatatcttttgcccatttagaagcttgtttgtttgctatttggtagtataagttctgtatatattttggatattaactccttattggatgtgtggtatacaaatattttctccctttctgtagatttctctttcatcaagcaaataaagat

SEQ ID NO: 263797 - DNA, 600 bp, Homo sapiens
gactttttaacaatattaattcttccagttcatgaatatgggatatgtttcacttatttttgtcttccacaatttatttcattaatcttttatacttttcagtgtacagatattctatctctttagttaaatttatttgtaagtattttattctttttgmtgtgctcataatgataactttttcttgactttttctttctatagatcattattggtgtaaagaaatgcaactgaatttttctgttgattttgtagtctgcaaaattactgaatttgcttattagttctaacagttttttagtggagtcttcaggattctttctacataggatcatgccatcttctaacagagacactaacttttttatttggatgcactttatttctttttcctaattactttggttatgacgtccagtactatgttgaatggaagtggggagagtggtcttgttcttgatcttagagggaaacatttcaatttctcatcgagtataatgtttatcataggcttgtgatatacaggctttattgtgttgaggtacattcctataatttgttgaaaattttgtattgtgaaagaatgttgaattttgtcaa

SEQ ID NO: 263798 - DNA, 589 bp, Homo sapiens
ttttcctgttattattgattttagtttcataccactayggtcagaaaatatatttgatatgatttcagtcttctgaaatttgttaagacttgtttgtggcttaacatacaatctgtccaggagaatattctgtgtaagcttgagaagaatgtgtgttctgctgttggatcaaatattccgtgtatgtctattagattcatttagtctgaagtagttcaagacaatgttttcttaataatattctttctggatgatttatccattgttgaaaatcagatattaaagttctctattattgcattgcagtctatctcttgctttagatttgttaatatttgctttatatatttaggtgctctgatgttgggtgtattcatatttataactgttctattatcttgatgaattgactttcttaccaatatctaatgaccttctttgtctcttgtgacagtatttaaagtctattttgtgtgatacacatgtaactgctactgctcttttttggttttcattttcatggaatatttttgttttttatccctttacttttagtctatgtgtgttattaaaggtgaagtgagtttct

SEQ ID NO: 263799 - DNA, 589 bp, Homo sapiens
ttttcctgttattattgattttagtttcataccactacggtcagaaaatatatttgatatgatttcagtcttctgaaatttgttaagacttgtttgtggcttaacatacaatctgtccaggagaatattctgtgtaagcttgagaagaatgtgtgttctgctgttggatcaaatattccrtgtatgtctattagattcatttagtctgaagtagttcaagacaatgttttcttaataatattctttctggatgatttatccattgttgaaaatcagatattaaagttctctattattgcattgcagtctatctcttgctttagatttgttaatatttgctttatatatttaggtgctctgatgttgggtgtattcatatttataactgttctattatcttgatgaattgactttcttaccaatatctaatgaccttctttgtctcttgtgacagtatttaaagtctattttgtgtgatacacatgtaactgctactgctcttttttggttttcattttcatggaatatttttgttttttatccctttacttttagtctatgtgtgttattaaaggtgaagtgagtttct

SEQ ID NO: 263800 - DNA, 479 bp, Homo sapiens
caggttccctggggacccgcatcttagcttctgcaatggcagaccatatctaatttttggagagctccagcggggtggcccctagggccatgcaccaacctgcctgctccctccctctgctgcagcttcttccaagcccatggccaaccacccctgccccctgacatcatttggctggcttgtatgtgtgcaggtggattttcccttcccttcaccaccagcttgtgtgagcacgtgtacsctgccctgcctctgctgccagcaggagtgcactctgctccccttcctcggccatactaccattgcagtcagagctgtagtgggcacagagcccaccagtcctgcctctgtcagtgacctgcccctgtgccaacactgccaccagaatgaaactaggcactgaaaacaatgaaccctcccctgccctgagtagccacagagggtgcacacacacctgaacccaccagtgtcctgccccc

SEQ ID NO: 263801 - DNA, 607 bp, Homo sapiens
gactccactgctgatatcaacaaatcactgaagcagtccctctttttttgtggttttaacatggcaattaaccagcattccttcctgataagagaccaactatatgctactcatgaaggggcatgaagcacaattgtgcatgtgcatggttgtcctttcataaatattcaagattcctcctatagcttattgagcatatgtatttggccacctcactcagtacatattccttttgacactgtctcgaaatrtttgtttctggctcctggccagaggctatatttcccagcctgtcataatagccacccttcaggctacaactctatgagaaataaaggtcctcctttccaaatttatgaaccccatcattcttcagttgatagcactgacaccccatatctaagtatattaaaagagaaataagctgcaaatatatataatatataaatatgtaatatatgtaaatatatgatatatacatatttatatataatttatattatatataaaatattttaatatactttaatatattcaagtaaattaaaagaatatattaatagttgtatataaaataagtattttaatatactttaataatgttaat

SEQ ID NO: 263802 - DNA, 472 bp, Homo sapiens
taaacataattgcttgctttgggtttttttggtacaattcccagcttttyttggggtgttacagtgcatacccaagtatgtatagtttatttagcccaattttattaaggacgtggtatgggctggatgaacctcattttagacacagaagataggaaaacaatatttttaaattgccattgtggagttcaaattccagctgcctttggtactatgacaatagcaacatatgatccattgataaaccctggagttgcatctcctaaatattttctaaacaaattattattctcttcaaatagttattgctgtattgttagtttaagccatatatatatatatatatatatatatatatatatatatatatatatattcttgtaatgttgtcttactctgatttattcacatagcagccagggtgatatttctaaattgcaaattgtattaagctattctcccgagttttatt

SEQ ID NO: 263803 - DNA, 578 bp, Homo sapiens
tatagctgattctagataaaaaaaaattctagacagggagacatctactaatttttaactactgcaatggaagaaatgtatcaacattctctgattttctgtttgtaatccaaggtaytgtcaccaaacattggggatgaatatgagtgtagagcagggaaaatggatctaacaatatcttagcaaatcttttattttcttatgtatctatggttgttgaaaagtccagaagcaacacaactgtggtttctcttattactttgtcctgtaaaagggtcatggtgggcttttgtgcatgcctccacgatatgggtcatggctcttggtctcttgtcttggtgattggtgtcttttaatcattgtcctactcatccccagtctgatgcttccctaaatcttaaagattgagactgtttcttcttacctcatttttacaaacttcccaatctctgtaacctgggatagtaaagacaaaaaatatgagctttttcaatccttcctaaatgatttgtttcctaatatatttattcacagtaactactaaactttgtacaacatagcaatttgttgtttacaaa

SEQ ID NO: 263804 - DNA, 578 bp, Homo sapiens
tatagctgattctagataaaaaaaaattctagacagggagacatctactaatttttaactactgcaatggaagaaatgtatcaacattctctgattttctgtttgtaatccaaggtattgtcaccaaacattggggatgaatatgagtgtagagcagggaaaatgkatctaacaatatcttagcaaatcttttattttcttatgtatctatggttgttgaaaagtccagaagcaacacaactgtggtttctcttattactttgtcctgtaaaagggtcatggtgggcttttgtgcatgcctccacgatatgggtcatggctcttggtctcttgtcttggtgattggtgtcttttaatcattgtcctactcatccccagtctgatgcttccctaaatcttaaagattgagactgtttcttcttacctcatttttacaaacttcccaatctctgtaacctgggatagtaaagacaaaaaatatgagctttttcaatccttcctaaatgatttgtttcctaatatatttattcacagtaactactaaactttgtacaacatagcaatttgttgtttacaaa

SEQ ID NO: 263805 - DNA, 419 bp, Homo sapiens
caagtgcaacatggattacaaagcttggaacacaaaataaaatcttgtcttatttcatattttgtctatagctgattctagataaaaaaaaattctagacagggagacatctactaatttttaactactgcaatggaagaaatgtatcaacattctctgattttctgtttgtaatccaaggtattgtcaccaaacattggggatgaatatgagtgtagagcagggaaaatggatctaacaatatcttagcaaatcttttattttcttatgtatctatggttgttgaaaagtccagaagcaacacaactstggtttctcttattactttgtcctgtaaaagggtcatggtgggcttttgtgcatgcctccacgatatgggtcatggctcttggtctcttgtcttggtgattggtgtcttt

SEQ ID NO: 263806 - DNA, 578 bp, Homo sapiens
tatagctgattctagataaaaaaaaattctagacagggagacatctactaatttttaactactgcaatggaagaaatgtatcaacattctctgattttctgtttgtaatccaaggtattgtcaccaaacattggggatgaatatgagtgtagagcagggaaaatggatctaacaatatcttagcaaatcttttattttcttatgtatctatggttgttgaaaagtccagaagcaacacaactgtggtttctcttattactttgtcctgtaaaagggtcatggtgggcttttgtgcatgcctccacgatatgggtcatggctcttggtctcttgtcttggtgattggtgtcttttaatcattgtcctactcatccccagtctgatgcttccctaaatcttaaagattgagactgtttcttcttacctcatttttacaaacttcccaatytctgtaacctgggatagtaaagacaaaaaatatgagctttttcaatccttcctaaatgatttgtttcctaatatatttattcacagtaactactaaactttgtacaacatagcaatttgttgtttacaaa

SEQ ID NO: 263807 - DNA, 497 bp, Homo sapiens
tttctttgcctgagagtactccattggtaatggtggagctaggcattcgatctagatactccattccagaacttttgtccttagaggacattattctgtgtattaaaagaaatggaaagattagcacttccaccctcatgtccaggtcattgtgtttctttctagtttattgggaatgcaatttaaaagtagtacaggaataaagagttggaagamgtgaacaaaattcaatgttctatcaatataagactactgcctatactacctcatagaatttgctaaaataatttttatgtaatttatgtattacatactatatatatagtgtatatctatatctatctatatagatagatagatacatagatagattgataccttaaatctcccttgttctgatttaattcttctttctctaggtcacttgatattcttggcttgatgaaaaaaaacaagattctaacgtgacagaacttgttcttctgggcctatcatct

SEQ ID NO: 263808 - DNA, 497 bp, Homo sapiens
tttctttgcctgagagtactccattggtaatggtggagctaggcattcgatctagatactccattccagaacttttgtccttagaggacattattctgtgtattaaaagaaatggaaagattagcacttccaccctcatgtccaggtcattgtgtttctttctagtttattgggaatgcaatttaaaagtagtacaggaataaagagttggaagaagtgaacaaaattcaatgttctatcaatataagactactgcctatactacctcatagaatttgctaaaataatttttatgtaatttatgtattacatactatatatatagtgtatatctatatctatctatatagatagatagatacrtagatagattgataccttaaatctcccttgttctgatttaattcttctttctctaggtcacttgatattcttggcttgatgaaaaaaaacaagattctaacgtgacagaacttgttcttctgggcctatcatct

SEQ ID NO: 263809 - DNA, 584 bp, Homo sapiens
ttgttcttctgggcctatcatcttcttgggagctgcagctatttctcttattactatttttgtttttttacattgctattgtcctgggaaacctcttgatagtggtaacagtgcaagcccatgctcatctgctccaatctcctatgtattattttttaggtcatctctctttcattgacctatgcctaagctgtgttactctgccaaagatgttaggggatttcctacagcagggcaagagcatctctttttcaggatgcctggcccagatctacttcctccactttctaggagccagtgagatgtttttgctgacagttatggcctatgacaggtatgttgccatctgtaaccctttgcgctaccttataagtcatgaacccccagctrtgcctttggttggttcttgcctgctggtgtgggggttttatccactctatcatgcaggtcatactagtcatccagctgcctttctgtggccccaatgaactggacaacttctactgtgatgtcccacaggtcatcaagctggcctgcatggacacctatgtggtagaggtgctgatgatagccaacagtggtct

SEQ ID NO: 263810 - DNA, 567 bp, Homo sapiens
attactagctttgggagtagggggtttgattggctgcctgactattggattgagatgctccagcaaaatatttcttttccacttgacacttgtgaarggtggaggacagagacactcatcaaggagtgtggagggatgaatcctttgtatttttgtcctaaggaataaatgtggttgattttggttcttaatgcaaagtatatacatcattagtttctaattttatgtcatatgttgaacactgaggtacaaaagaaaatctctttgacacttttttctggtaaaatcaccctttctattccataatacctgatgtatgtctgtcttttcaagacatcaacactcattcacataaattctttctagattagtgccattttctacttctgttttggtggaatgggtatggagtagagcagaggaagaaggggtgatttgtgtgatgacactcagaatcattgcatcatgtccccataataataaaaaagcatatgatcttgtaatggtatttactgctttaaaatattcatctcctttcaataataaaagggacaattatttacttaa

SEQ ID NO: 263811 - DNA, 567 bp, Homo sapiens
attactagctttgggagtagggggtttgattggctgcctgactattggattgagatgctccagcaaaatatttcttttccacttgacacttgtgaagggtggaggacagagacactcatcaaggagtgtggagggatgaatcctttgtatttttgtcctaaggaataaatgtggttgattttggttcttaatgcaaagtatatacatcattagtttctaattttatgtcatatgttgaacactgaggtacaaaagaaaatctctttgacacttttttctggtaaaatcaccctttctattccataatacctgatgtatgtctgtcttttcaagacatcaacactcattcacmtaaattctttctagattagtgccattttctacttctgttttggtggaatgggtatggagtagagcagaggaagaaggggtgatttgtgtgatgacactcagaatcattgcatcatgtccccataataataaaaaagcatatgatcttgtaatggtatttactgctttaaaatattcatctcctttcaataataaaagggacaattatttacttaa

SEQ ID NO: 263812 - DNA, 563 bp, Homo sapiens
tgcactgcggcaagtatctccatctctgagtgggctttggggatgattttgaggctgagttgaaccactgttagagtccccaggtaaggcatttctagaccctacactgtgctaataatgggctgtggtatgcatctccctgcctggctgggtccctgttgtgggttttgagactaagccaaaccactgtttgggcttctgagtggggcaggtctagcccttgtactttaccaaaatatgctgtggtcatctccccctctggacaaggctttgtggtaggatctggggctggcatggaggctgattgtctagggattcaagccaggtagaacttcctatttcccggggcaaccagcttgactttgttggtttgttatactgttcgctaatgcccctaatcacataccactgctggtggttacatagacctaccaccaagatctgcatgtttgtcactatgagctttgccttcctgctytgtttctacctgaccacaggtagtctagccatgctattacccctatgctccttgcaaggtgagaccagagttggcttcctggggg

SEQ ID NO: 263813 - DNA, 563 bp, Homo sapiens
tgcactgcggcaagtatctccatctctgagtgggctttggggatgattttgaggctgagttgaaccactgttagagtccccaggtaaggcatttctagaccctacactgtgctaataatgggctgtggtatgcatctccctgcctggctgggtccctgttgtgggttttgagactaagccaaaccactgtttgggcttctgagtggggcaggtctagcccttgtactttaccaaaatatgctgtggtcatctccccctctggacaaggctttgtggtaggatctggggctggcatggaggctgattgtctagggattcaagccaggtagaacttcctatttcccggggcaaccagcttgactttgttggtttgttatactgttcgctaatgcccctaatcacataccactgctggtggttacatagacctaccaccaagatctgcatgtttgtcactatgagctttgccttcctgctttgtttctacctgaccacaggtagtctagccatgctattacccctatgctcyttgcaaggtgagaccagagttggcttcctggggg

SEQ ID NO: 263814 - DNA, 446 bp, Homo sapiens
tttcctatagtacaatggttaaaagacaaatctattaaaacacatagagcaaaaatagtcaatggatacacataagaaaatgatgtatattttgacatcaaaatcgtaaaatgtgggagaggagaaataaagtgtaccgctgttgttggcaaataaagcatacagttgtgattgttgtcagcttagaatagtatatcatataaaaataaagactaaaaacatcacccaacactacacaactacatggaaattaagtgacttgctcytgaatgacttctgggtgaacaatgaaattaaggcagaaatcaaaaaagtctttgaaataactgaaaacagagacactatatgccaagatctctgggatgcagcaaaagcagtgttaagagaaaagtttatagcaccaaacaattaccgcagaaagttagatatacctcaaattaatgacc

SEQ ID NO: 263815 - DNA, 506 bp, Homo sapiens
tgaacactgctgcaaaaatcctcaacaaaatactaacaaactaaatccaacagcacattaaaaatttaattcaccatgatcgattgagttttattctagaaatgctaggatgattcaacatatgcaaatcaataaatgtgattcatcacataaagttaaaaacaaaaaccataggatcatttcaattgatgttgaaaagaatcataaaataggagaaaatatttgtaaactatccatctggcaagggattaataaccagaatatataaggaactcaaacaactctataggaaaattctgatcatccaatttaaaaatgggcaaaagatcttgctcagaagaagacacataaatggcaaacaggcatgtgaaaaagtgctcagcatcattgctcatcagggaaatgcaaaccaaaactrcaagacgaatcatctaaccctagttaaaatggcttatatccaaaagacaggcagtaagaaatagtggctaggatatggagaaaaggga

SEQ ID NO: 263816 - DNA, 418 bp, Homo sapiens
tgttctcacttatttgtgggagctaaaacttaaaataactggatttatggagatagagaatacagtaatggttaccagagactaggaagaatagtagggttaaggggaggaatggataatcrgcataaaaatacagttagatagaataagtaagatctagtatttgatagaacaacaaggtgactatagccaaacaatttatagtacatttaaaaataactaaaagagcataattgcattgtttgtaacacaaagaaagggtaaatgtttgaagtgatgaatatcccatttaccgcgatgtaattattatacaccgtatgcctgtagaaaaatatctcatgtaccccataaacatatacagtcactgtgtacccataaaaatttaaaaaggaaaatataaaataaacaacctgatatt

SEQ ID NO: 263817 - DNA, 475 bp, Homo sapiens
ataattgcattgtttgtaacacaaagaaagggtaaatgtttgaagtgatgaatatcccatttaccgcgatgtaattattatacaccgtatgcctgtagaaaaatatctcatgtaccccataaacatatacagtcactgtgtacccataaamatttaaaaaggaaaatataaaataaacaacctgatattacaactctagtaactaataaaaaaagaacaaactaaacccaaagtcagcagaaggaaagaaataacaaggatctgaatagaaataaacaaaatagagactaaaactacaatagaaaagaactcaatgtaataaagagtgttttttcagaaggataaacaaatcaacaaacctttagccagaccaaggaaaaaaaagaaaggactcaaatattaatacaatcaaaagtgaaaagggagacattacaactgataccatagaaatataaaagctcataagaaaaaaaag

SEQ ID NO: 263818 - DNA, 467 bp, Homo sapiens
tacttcaacataataaagaccatgtattacaagcctacagctcacaytatattcaacgcaccctccaaatctcaggctgaattgtgatccccagtgtcagagggggtgcctggtgggaggtgtctgtgttatggaggtgaatccctcatgggatggtgatggtatccaacccaaccctcaggaatgggtttgcattttacccatagtagagttaccatcagatctgatggttaaaaagagtatgggacaaccccctccccacctagctccctttcttgccatgtgacacaactgctccctctttgctttcttcaatgagtagaagtttccttaggcttcagaagctaagcagatgctgatgccatgcttgtactgactgcaggaccatgagccaaataaacctcttttctttataaattactcagtctcaggtattcctttatagcaacgtaaaatggactaacaca

SEQ ID NO: 263819 - DNA, 467 bp, Homo sapiens
tacttcaacataataaagaccatgtattacaagcctacagctcacattatmttcaacgcaccctccaaatctcaggctgaattgtgatccccagtgtcagagggggtgcctggtgggaggtgtctgtgttatggaggtgaatccctcatgggatggtgatggtatccaacccaaccctcaggaatgggtttgcattttacccatagtagagttaccatcagatctgatggttaaaaagagtatgggacaaccccctccccacctagctccctttcttgccatgtgacacaactgctccctctttgctttcttcaatgagtagaagtttccttaggcttcagaagctaagcagatgctgatgccatgcttgtactgactgcaggaccatgagccaaataaacctcttttctttataaattactcagtctcaggtattcctttatagcaacgtaaaatggactaacaca

SEQ ID NO: 263820 - DNA, 530 bp, Homo sapiens
ggaaagtagccttgcttaactgggaaaagacccaagtgacagagtagctccctatggaaaatcgtaactggtttaaatgacagcttaaactccagaatgtctcaccaaacagtcaaatgctagttctgtgaattgttttttcttctcatgtgaatctrtatactgtttttgtcaattacatcttagtaaggctgggggtaaaatgcacctctgccagctcccacacacactccctattgacctgacgtttctaatttttctccacgtttcctcatcactccctaatatactatagtttacttatttatttaacacctgttgtctccctttggaatataagttccacataggaatttttgtacattttgttcactgctatgtgcatgagcatttagagtagtccctggaacattcacaatcaattattattattgaattaactaatcagtttttaatattaaaatataaatataaataatataaacatgcatagtaaattttacacttaattacaaacattatgaatataa

SEQ ID NO: 263821 - DNA, 530 bp, Homo sapiens
ggaaagtagccttgcttaactgggaaaagacccaagtgacagagtagctccctatggaaaatcgtaactggtttaaatgacagcttaaactccagaatgtctcaccaaacagtcaaatgctagttctgtgaattgttttttcttctcatgtgaatctatatactgtttttgtcaattacatcktagtaaggctgggggtaaaatgcacctctgccagctcccacacacactccctattgacctgacgtttctaatttttctccacgtttcctcatcactccctaatatactatagtttacttatttatttaacacctgttgtctccctttggaatataagttccacataggaatttttgtacattttgttcactgctatgtgcatgagcatttagagtagtccctggaacattcacaatcaattattattattgaattaactaatcagtttttaatattaaaatataaatataaataatataaacatgcatagtaaattttacacttaattacaaacattatgaatataa

SEQ ID NO: 263822 - DNA, 530 bp, Homo sapiens
ggaaagtagccttgcttaactgggaaaagacccaagtgacagagtagctccctatggaaaatcgtaactggtttaaatgacagcttaaactccagaatgtctcaccaaacagtcaaatgctagttctgtgaattgttttttcttctcatgtgaatctatatactgtttttgtcaattacatcttagtaaggctgggggtaaaatgcacctctgccagctcccacacacactccctattgacctgacgtttctaatttttctccacgtttcctcatcactccctaatatactatagtttacttatttatttaacacctgttgtctccctttggaatataagttccacataggaatttttgtacattttgttcactgctatgtgcatgagcatttagagtagtccctggaacattcacaatcaattattattattgaattaactaatcagtttttaatattaaaatataaatataaataatataaacatgyatagtaaattttacacttaattacaaacattatgaatataa

SEQ ID NO: 263823 - DNA, 528 bp, Homo sapiens
tggaggaaaatctactaagtaaatagaaaacataaaaaatacagagattgtaatcctaatttcagacaaaacagactttaaaccaacaaagataaaaaaagacaaaaaagggtaatgacataatggcaaagggttcaattcaacaagtagtgctaactatcctaaatatacgcgcacttaacacaggagcaccctgttcaaacaaaytcttagaaacctacaaagagacttagactcacacacaataataatgagagacttcaacaccctactgacagtattagacacatcacttaggcagaaaattagcaaagatattcaggaccttaactcagcactggatcaaatggacctgatagatgtttacagaactctccaccaaaaagcaacagaatatacattcttctcatcaccccatggcacatattctgaaactgtttcatggaggaaactgtttcatggagaggaagccacagggctgacaggaaaccagaccttaacctccctctgcacctgccctgaggctgg

SEQ ID NO: 263824 - DNA, 528 bp, Homo sapiens
tggaggaaaatctactaagtaaatagaaaacataaaaaatacagagattgtaatcctaatttcagacaaaacagactttaaaccaacaaagataaaaaaagacaaaaaagggtaatgacataatggcaaagggttcaattcaacaagtagtgctaactatcctaaatatacgcgcacttaacacaggagcaccctgttcaaacaaattcttagaaacctacaaagagacttagactcacacacaataataatgagagacttcaacaccctactgacagtattagacacatcactkaggcagaaaattagcaaagatattcaggaccttaactcagcactggatcaaatggacctgatagatgtttacagaactctccaccaaaaagcaacagaatatacattcttctcatcaccccatggcacatattctgaaactgtttcatggaggaaactgtttcatggagaggaagccacagggctgacaggaaaccagaccttaacctccctctgcacctgccctgaggctgg

SEQ ID NO: 263825 - DNA, 509 bp, Homo sapiens
actccactgccgacagatgcagccaagaagacaggacaccttctaccaactcccaccagaggaaactcttccccagggcccagtacgttggccctctgaccctgcacacagcacatgatgctgaggttcagtgctgaacaagagctaccgagagccagagaytcacttcttccatggagccccactcatggatggaggctctgccccgggtccagtgccactgggaacactgggtctctggtttctagctctgtcctatggcagaggttccaccccacaataaccgaagtgctgagaaggtgggaagctcctgcccgaccctccactgagagctcagctcctaggctgaggaataaaacagctcaactttgtctacacctgcagaaccttgtttaggagctctgtcccaggagagagggagcaatggaattcagtcataaaatatgatccttaattagtcctaaaaatcctaacttcagtaacaacagaatgtggacaaattgaaagcc

SEQ ID NO: 263826 - DNA, 509 bp, Homo sapiens
actccactgccgacagatgcagccaagaagacaggacaccttctaccaactcccaccagaggaaactcttccccagggcccagtacgttggccctctgaccctgcacacagcacatgatgctgaggttcagtgctgaacaagagctaccgagagccagagactcacttcttccatggagccccactcatggatggaggctctgccccgggtccagtgccactgggaacactgggtctctggtttctagctctgtcctatggcagaggttccaccccacaataaccgaagtgctgagaaggtgggaagctcctgcccgaccctccactgagagctcagctcctaggctgaggaataaaacagctcaactttgtctacacctgcagaaccttgtttaggagctctgtcccaggagagagggagcaatggaattcagtcataaaatatgatccttaattagtcctaaaaatcctaacttcagtaacarcagaatgtggacaaattgaaagcc

SEQ ID NO: 263827 - DNA, 540 bp, Homo sapiens
taaatgttcctgcctgccatctctgaagggagcagcagatctcccagcaaagcgcttgaactctgctaagggacagactgcctcctcaagtggctccctgatgcctgtgcctcctgactgggagacacctcctagcaggrgttgacagacacctcatacgggagatctccagctggcatctggctggtgcccctctgggacaaagcttccagaagaaggaacaggcagtagtctttgctgttctgcagcatctgcgatgacacccaggtaaacagggtctggagtggacccgcagcaaactccagcagacctgcagcagaagggcctgactgttagaaggaaaactaacaaacagaaagaaatagcatcaacatcaacaaaaaggatgtccacccaaaaacaccaactgaaggtcaccaacatcaaagaacaaagttagataggtccaagaagatgaggaaaaaccagagcaaaaaggctgaaaattccaaaaaccagaacacctcttctcctccaaagtatcacaactccttgccagca

SEQ ID NO: 263828 - DNA, 576 bp, Homo sapiens
tattaattttatttaaaaattagtttaatcttttgctttaaagaaaacactgagtttatgggtcactttacaagtgaaataagaacacagatttgggggtaataaacataatttatcaccaaatayatttgttttaatttatttcacagttcaaaaacaaagtgtaagagtagaaaaaggaaagaaagaagaaaggagagagagagaagtacagaaaaagttacaataatcaaaataaaaatcaagagaaaagggaaaagaaagactagcagagacataaatggaaagatagtcgtatgacttaaaaacaaatggtgaagagacagagagatactagtccatgaggagagcaagaccatccagaggcaaaactccttatccaaggaattcagaagtaattagacatccctattatgtaaagctggcatctggtatgagatttcttttccaaaaatttgtgagtaaccagaatttctatgcatctctggaatgcatgtattctaaactcattgtgcaatccctgctgacatcaaggcaccaaaatgtctataaatgtaattgtttaccatgacctat

SEQ ID NO: 263829 - DNA, 576 bp, Homo sapiens
tattaattttatttaaaaattagtttaatcttttgctttaaagaaaacactgagtttatgggtcactttacaagtgaaataagaacacagatttgggggtaataaacataatttatcaccaaatacatttgttytaatttatttcacagttcaaaaacaaagtgtaagagtagaaaaaggaaagaaagaagaaaggagagagagagaagtacagaaaaagttacaataatcaaaataaaaatcaagagaaaagggaaaagaaagactagcagagacataaatggaaagatagtcgtatgacttaaaaacaaatggtgaagagacagagagatactagtccatgaggagagcaagaccatccagaggcaaaactccttatccaaggaattcagaagtaattagacatccctattatgtaaagctggcatctggtatgagatttcttttccaaaaatttgtgagtaaccagaatttctatgcatctctggaatgcatgtattctaaactcattgtgcaatccctgctgacatcaaggcaccaaaatgtctataaatgtaattgtttaccatgacctat

SEQ ID NO: 263830 - DNA, 576 bp, Homo sapiens
tattaattttatttaaaaattagtttaatcttttgctttaaagaaaacactgagtttatgggtcactttacaagtgaaataagaacacagatttgggggtaataaacataatttatcaccaaatacatttgttttaatttatttcacagttcaaaaacaaagtgtaagagtagaaaaaggaaagaaagaagaaaggagagagagagaagtacagaaaaagttacaataatcaaaataaaaatcaagagaaaagggaaaagaaagactagcagagacataaatggaaagatagtcgtatgacttaaaaacaaatggtgaagagacagagagatactagtccaygaggagagcaagaccatccagaggcaaaactccttatccaaggaattcagaagtaattagacatccctattatgtaaagctggcatctggtatgagatttcttttccaaaaatttgtgagtaaccagaatttctatgcatctctggaatgcatgtattctaaactcattgtgcaatccctgctgacatcaaggcaccaaaatgtctataaatgtaattgtttaccatgacctat

SEQ ID NO: 263831 - DNA, 576 bp, Homo sapiens
tattaattttatttaaaaattagtttaatcttttgctttaaagaaaacactgagtttatgggtcactttacaagtgaaataagaacacagatttgggggtaataaacataatttatcaccaaatacatttgttttaatttatttcacagttcaaaaacaaagtgtaagagtagaaaaaggaaagaaagaagaaaggagagagagagaagtacagaaaaagttacaataatcaaaataaaaatcaagagaaaagggaaaagaaagactagcagagacataaatggaaagatagtcgtatgacttaaaaacaaatggtgaagagacagagagatactagtccatgaggagagcaagaccatcyagaggcaaaactccttatccaaggaattcagaagtaattagacatccctattatgtaaagctggcatctggtatgagatttcttttccaaaaatttgtgagtaaccagaatttctatgcatctctggaatgcatgtattctaaactcattgtgcaatccctgctgacatcaaggcaccaaaatgtctataaatgtaattgtttaccatgacctat

SEQ ID NO: 263832 - DNA, 576 bp, Homo sapiens
tgaacagaaatgtagtgtagcatgttgtggcaaacagcaaggagtgcactgggatcctggaccaaatggacagcaagctcagggagcacaataggatccctagtatccaagggacaaaagcaaggcatgtccaatgccttattgtttcattgagagacttcccaggccatgactggtgttaaggtttagggcacaactgtctccagctcgcyggggaaaagccaaagccacctccagctttgagccctgggccaggccgatgtgctctaggatggggtactagggtgtcctttccaggtgggcatgtgctcaagcggactgactggctatcagcacttgccgtgtttggttgaagtgatggcctatttggaggtttctgccctttggattataacaaataagtccacaatacaagcagccacatggacaatggtgagaccagcagtcaacagaggggtgcttggctgcagttggcaggtgttgatgttgttttcatttgttttttgagtttgtttttgtggaactttacgttcaaatgggctcatatcagatgagcagccgactgacccacgggac

SEQ ID NO: 263833 - DNA, 576 bp, Homo sapiens
tgaacagaaatgtagtgtagcatgttgtggcaaacagcaaggagtgcactgggatcctggaccaaatggacagcaagctcagggagcacaataggatccctagtatccaagggacaaaagcaaggcatgtccaatgccttattgtttcattgagagacttcccaggccatgactggtgttaaggtttagggcacaactgtctccagctcgccggggaaaagccaaagccacctccagctttgagccctgggccaggccgatgtgctctaggatggggtactagggtgtcctttccaggtgggcatgtgctcaagcggactgactggctatcagcacttgccgtgtttggttgaagtgatggcctatttggaggtttctgccctttggattataacaaataagtccacaatamaagcagccacatggacaatggtgagaccagcagtcaacagaggggtgcttggctgcagttggcaggtgttgatgttgttttcatttgttttttgagtttgtttttgtggaactttacgttcaaatgggctcatatcagatgagcagccgactgacccacgggac

SEQ ID NO: 263834 - DNA, 529 bp, Homo sapiens
gttcagccaggcacacagaaccaggaaggcatcatggcttttctagagggagctgacctgggtaatcaacggttggagtagaaagtgtctttgtccatgtttcacagccctgagggccatgggaagaaggtcaggaagagaggatgaccagacggccggggaaaccagtatgaacaaagccactttctttcctggtgaagaggggctgtccctgtaggggatgaaccacactcacctacccactgttacttgccaacgaggtgacccgcagagcagcagctcctgagtcaccgacagtggcgccttcctcctccaaaccctccaagatctgtccttccaggagtgtgaaccccagcagatctgcatgttttcaatgggtccacttagctagtgtctgtcctcagccccatccctgggatscttccctggttctgtgtacagtgtcacaatagtggtgacattgacagctggtgcctgcactttccaggccaagaaatttgaaagaagcaagtcacaggaccagcttgga

SEQ ID NO: 263835 - DNA, 502 bp, Homo sapiens
tgattttacataatcacagcaaaaaaatgaacactaaaataaaattgttaaatttgatgtaatccagttaatgtctcatgacacagatttacctatataacaaacctgcacgtgtacctctgaacttaaaagttaaaaatatcaacataacaaaaatattcatattttttcatacagctctaaaaaggggcaatacgaccttaatctttgggattatcttttctaccacactaaaaagatacaatgyagcagttttctataacatctagctatatgtaattatacaatgtctgagattccataattcatatatagtaagttaaacaaaatcacatttgctagagagtcagatgacccttagctgggcttgctaaacaatgttttttgttttgttattttttatttctgtgggtacagagtaggtgtatacatttatagagtatgagatatttgggtacaggcatacaatacataataatcgcatcatggtaaatggggtatt

SEQ ID NO: 263836 - DNA, 567 bp, Homo sapiens
ctcatggcagatgacatgatcttatatagagaaaaacataaaaacgttatcaagacaactcttagaagtgataagtgaattcagtaacgttgcagaatacaaaatcagcatacaaaaatcagcagcacttttatgtggtaataatcaactgtctgaaaagaattcaagataacaatcttatttacaatagctccaaaataaaaaaatataattcttaggaattaatttaaccaaggatgtgaaagatacctataatgaagccataaaacacttatgaaaaaaatttgaagacagaaataaatggaaagataatcctgcattcrtggattcaaataattaatattgttaaaatgttcacactacccaaaacaagctatggatttatcaaaataacaatgacatccttcagagaaatagaaaaaacaatcctaaaatacgtatggaatctacaaaagacctggaatagccaaagcagtcttgacccaaaagaacaaagttggaggcatcatactacctgacctcaaagtatactgtaaagctatagtaaccaaaacagcatgatactgg

SEQ ID NO: 263837 - DNA, 567 bp, Homo sapiens
ctcatggcagatgacatgatcttatatagagaaaaacataaaaacgttatcaagacaactcttagaagtgataagtgaattcagtaacgttgcagaatacaaaatcagcatacaaaaatcagcagcacttttatgtggtaataatcaactgtctgaaaagaattcaagataacaatcttatttacaatagctccaaaataaaaaaatataattcttaggaattaatttaaccaaggatgtgaaagatacctataatgaagccataaaacacttatgaaaaaaatttgaagacagaaataaatggaaagataatcctgcattcgtggattcaaataattaatattgttaaaatgttcacactacccaaaacaagctatggatttatcaaaataacaatgacatccttcagagaaatagaaaaaacaatcctaaaatacgtatggaatctacaaaagacctggaatagccaaagcagtcttgacccaaaagaacaaagttggaggyatcatactacctgacctcaaagtatactgtaaagctatagtaaccaaaacagcatgatactgg

SEQ ID NO: 263838 - DNA, 572 bp, Homo sapiens
gaaataaatccacaggtgatacacagtcacctaatattttgacgaagctgccaagcacacacaatggggaaaggacagtcttttcaataaatggtattcggaaaactgggtatctatatgcagaagaacgaacttatacccttacttcataccatatacaaaaaatcaacaaaaaatagtttaaacactaaaacatgagacctaaagctgtaaaactacacaacattgatgtaggcaaaagctaaggcaagaaaaacaaaaatagacaaatgaggttacatcaaaataaaaagcttctgctcaaaagaaayaacagaaccaaaaaatgacctacagaataagagaaaatttttgcaaattatacatgataaggggttaatattcaaaatatataaggaactcaagcaactcaatagcaaaaaacaacactaccaccaaataattcaatttaaaagtgggcaaaaaacctgactagatattttttaaaatatgacgtgcaaatgaccaaaaagcatatgaaaaaatcctcagcatcactgatcatcaggtaaatgcagatcaaaaccacaatg

SEQ ID NO: 263839 - DNA, 550 bp, Homo sapiens
gtaatagtcagtaagaatgcagagaaaagggaacgtttatacactgttggtggtaatgtaaatttgtatagtcattatgaaaaacaatatggaggttcctcaaaaaattaaaaatatatakagtatatgtttgagtatccagtaggcattcagtaaatatctgtggaataactaaatgtcaatcaaatttcttgtgctctacataaaattcaactcaaatatctctaataactctgcaggtacaaatatttgatgaccagagaatgatttttcttcaaaatagatctagagagtattatggtaaagctaaccactgtagctaaaatgacaatcccttttactacttaattattcctcaggaagttttgacaatacatgaacacgaaagaagaaagaaaagataagatctgcttctacattttcactattctttaggggacagtaagaactggcttttgattgtgaaaattcaaaatgttatcctcttttaaacaaacactatcaaaatatcccaagagagacagagctccaagtcccaaaaggctatagt

SEQ ID NO: 263840 - DNA, 550 bp, Homo sapiens
gtaatagtcagtaagaatgcagagaaaagggaacgtttatacactgttggtggtaatgtaaatttgtatagtcattatgaaaaacaatatggaggttcctcaaaaaattaaaaatatatatagtatatgtttgagtatccagtaggcattcagtaaatatctgtggaataactaaatgtcaatcaaatttcttgtgctctacataaaattcaactcaaatatctctaataactctgcaggtacaaatatttgatgaccagagaatgatttttcttcaaaatagatctagagagtattatggtaaagctaaccactgtagctaaaatgacaatcccttttactacttaattattcctcaggaagttttgacaatacatgaacacgaaagaagaaagaaaakataagatctgcttctacattttcactattctttaggggacagtaagaactggcttttgattgtgaaaattcaaaatgttatcctcttttaaacaaacactatcaaaatatcccaagagagacagagctccaagtcccaaaaggctatagt

SEQ ID NO: 263841 - DNA, 600 bp, Homo sapiens
atctgcttctacattttcactattctttaggggacagtaagaactggcttttgattgtgaaaattcaaaatgttatcctcttttaaacaaacactatcaaaatatcccaagagagacagagctccaagtcccaaaaggctatagtgcaagtaaatagatatatataatacactcacttgagcttgcattttgaccattaatatrtgctttgaaggtggggaaaatcttttagggtttactttttgcaacccatgagagataacaaacaggatcatgcaatttcttggaagttcttcacatgtctttggctctggggaataatattttgtctcctgtccctgaccttctcagcattcactcaaagagcgaatgggaagtatataacatgtgagtcacccagttttttttgcaaaaatcatagaaaatgttttcttcttgtctttgagaaaactaaaaatatatctcagaatgaaaagctggcaaagaatgaagctgaaaaatataagtttttcttcttgtttccctgaaatctggaaaatattttccaattatggttcatatccctttaaaatatgaatagccatttatacaaaaagaata

SEQ ID NO: 263842 - DNA, 573 bp, Homo sapiens
aagatgtatattaactgatgaattgctggagaagggtatattttggcaatttttgttacttggtgagcagaagaaatatggcatatttctctttccagcaatattttctttcttaagcccaaatactgatttttcagttccattacattaataagacttggtattatacaaattagttattatttaagaaacaaaaatcttcagctcatatgactttttcttgtttttgttgttatttgggctagaagttaaccggagggtaatcaggsgaaaagttttatgtttcggatttgcctagataggaaaggcctcagaaaacaaccacagtgagatgcaaaataacaccaaaggtcaaaggaagaaaaggaacatgtggaagaaagcagtgaataaaaaacatggaaacttttgtaatataaactttatctgcctttcttattttcctgcagctgacttgaccatggttaacaaaaaacaagcacattgaacttggccacagtcacgcagaccagctgttctccctaaggtcaatgtcataataggcatatgaagttcttacattcacctggaagc

SEQ ID NO: 263843 - DNA, 614 bp, Homo sapiens
ttcaattctgtcttcataattggcamctttctctttatcctttgttcctatgctctggtgattctggctataatacggatgccttcagaggctggcaaacgaaaagctttctccacttgtgcctctcatttggcagttgtcaccttattttatggctctatcatggtgatgtatgttagtcctggatcagcacacccagtaaaaatgaaaaaatcattaccttgttcttttctgtgataacaccactctgtaatcctctaatatatagtctcaggaacaaagagatgaaagattatctgaggaaaatcttcaggactggaaaagatgttaataaaatataaataagagaattttcatttatcaaatgtaactttattatacatgaatatttgtctacaaatttattgttttatttaagaactgctataataatgagccattaacatcttaaacaccactcaccacaatctgcattactgtggtcttatttaagaatgtttcaacagtgaattagattttctgttgaagtgaataatacgtatgtaaaattctatgtctatgctaatcagaacgtgtatatgtaacccaactttttaaaaagaatgcagacgtcc

SEQ ID NO: 263844 - DNA, 614 bp, Homo sapiens
ttcaattctgtcttcataattggcacctttctctttatcctttgttcctatgctctggtgattctggctataatacggatgccttcagaggctggcaaacgaaaagctttctccacttgtgcctctcatttggcagttgtcaccttattttatggctctatcatggtgatgtatgttagtcctggatcagcacacccagtaaaaatgaaaaaatcattaccttgttctwttctgtgataacaccactctgtaatcctctaatatatagtctcaggaacaaagagatgaaagattatctgaggaaaatcttcaggactggaaaagatgttaataaaatataaataagagaattttcatttatcaaatgtaactttattatacatgaatatttgtctacaaatttattgttttatttaagaactgctataataatgagccattaacatcttaaacaccactcaccacaatctgcattactgtggtcttatttaagaatgtttcaacagtgaattagattttctgttgaagtgaataatacgtatgtaaaattctatgtctatgctaatcagaacgtgtatatgtaacccaactttttaaaaagaatgcagacgtcc

SEQ ID NO: 263845 - DNA, 614 bp, Homo sapiens
ttcaattctgtcttcataattggcacctttctctttatcctttgttcctatgctctggtgattctggctataatacggatgccttcagaggctggcaaacgaaaagctttctccacttgtgcctctcatttggcagttgtcaccttattttatggctctatcatggtgatgtatgttagtcctggatcagcacacccagtaaaaatgaaaaaatcattaccttgttcttttctgtgataacaccactctgtaatcctctaatatatagtctcaggaacaaagagatgaaagattatctgaggaaaatcttcaggactggaaaagatgttaataaaatataaataagagaattttcatttatcaaatgtaactttattatacatgaatatttgtctacaaatttattgttttatttaagaactgctataataatgagccattaacatcttaaacaccactcaccacaatctgcattactgtggtcttatttaagaatgtttcaacagtgaattagattttctgttgaagtgaataatacgtatgtaaaattctatgtctatgctaatcagaacgtgtatatgtaacycaactttttaaaaagaatgcagacgtcc

SEQ ID NO: 263846 - DNA, 582 bp, Homo sapiens
tgtctgaatctacacttagacaagataaaaactgactaatgctgcagcttaacgcctctccagrgtagccatagaatgtagtggtggaggaaatcctcgtaagccaatgattcggtagcaatatacttagttgtccactttgaatgttggggagaaatagcttgctatgcaagataaggatatgtgtagtataatgattgttgtaaaaaagtttcactaagcaaaccccctcaaaatacagaaaaatcagatttaatgaaatttgaggtggaggcctatgtatgggcctatgagaataagcacaaagtatgcagatctttgtttctcaactctgtgcccattagagagtatcctccagagtggaggcactcaatagctaagtgaaaagaatgagtcatctaaaaatgtcagtcagctctgatttcattcacctcagagcttataaaagggaatataaagaaagctgtataaatggaaaatatgcacgtgccaaaaaatacaggcattatcttaccaaggttggtgacaaatcactgagccactgaagatgcagcctcgatgagaaaccaatgttaagccctc

SEQ ID NO: 263847 - DNA, 582 bp, Homo sapiens
tgtctgaatctacacttagacaagataaaaactgactaatgctgcagcttaacgcctctccagagtagccatagaatgtagtggtggaggaaatcctcgtaagccartgattcggtagcaatatacttagttgtccactttgaatgttggggagaaatagcttgctatgcaagataaggatatgtgtagtataatgattgttgtaaaaaagtttcactaagcaaaccccctcaaaatacagaaaaatcagatttaatgaaatttgaggtggaggcctatgtatgggcctatgagaataagcacaaagtatgcagatctttgtttctcaactctgtgcccattagagagtatcctccagagtggaggcactcaatagctaagtgaaaagaatgagtcatctaaaaatgtcagtcagctctgatttcattcacctcagagcttataaaagggaatataaagaaagctgtataaatggaaaatatgcacgtgccaaaaaatacaggcattatcttaccaaggttggtgacaaatcactgagccactgaagatgcagcctcgatgagaaaccaatgttaagccctc

SEQ ID NO: 263848 - DNA, 611 bp, Homo sapiens
gtctaccatactatagccacaaawgtttgcatgtttggcttcttcagtttatccagatatgatccaaaatgtcagctcttcaaggcctttttttattattaaacacaaattggttactcccaatccagagtcacagtttatcatttcacttttcgttttagtttttacagagcagtatctcttcctgaaactatgctgtttattttctaccttaacggcggtctatttttactaggttgtatctcttggagagcagatagaccttatctgcctcaatactttctttcttcagttcctagaatagtcctgacaaatgggaggtattcaatgattgcagtacttggaaataaacaaatcaatttcagataaaattctacagtctatttttattctttttttttttgccctttttcaggctatgtgtttattaaacacctttttcatggaagctttcacttcctggttatgaagggtataaatgacaggattcaacaaaggaagaatcactgtgtggaagagagaaaccaccttgtcggctgggaaagccctgaaggggcacgtgtagatgaagatgccaggtccaaacatgaagaatataacaatgatatggg

SEQ ID NO: 263849 - DNA, 611 bp, Homo sapiens
gtctaccatactatagccacaaaagtttgcatgtttggcttcttcagtttatccagatatgatccaaaatgtcagctcttcaaggcctttttttattattaaacacaaattggttactcccaatccagagtcacagtttatcatttcacttttcgttttagtttttacagagcagtatctcttcctgaaactatgctgtttattttctaccttaacrgcggtctatttttactaggttgtatctcttggagagcagatagaccttatctgcctcaatactttctttcttcagttcctagaatagtcctgacaaatgggaggtattcaatgattgcagtacttggaaataaacaaatcaatttcagataaaattctacagtctatttttattctttttttttttgccctttttcaggctatgtgtttattaaacacctttttcatggaagctttcacttcctggttatgaagggtataaatgacaggattcaacaaaggaagaatcactgtgtggaagagagaaaccaccttgtcggctgggaaagccctgaaggggcacgtgtagatgaagatgccaggtccaaacatgaagaatataacaatgatatggg

SEQ ID NO: 263850 - DNA, 611 bp, Homo sapiens
gtctaccatactatagccacaaaagtttgcatgtttggcttcttcagtttatccagatatgatccaaaatgtcagctcttcaaggcctttttttattattaaacacaaattggttactcccaatccagagtcacagtttatcatttcacttttcgttttagtttttacagagcagtatctcttcctgaaactatgctgtttattttctaccttaacggcggtctatttttactaggttgtatctcttggagagcagatagaccttatctgcctcaatactttctttcttcagttcctagaatagtcctgacaaatgggaggtattcaatgattgcagtacttggaaataaacaaatcaatttcagataaaattctacagtctatttttattctttttttttttgccctttttcaggctatgtgtttattaaacacctttttcatggaagctttcacttcctggttatgaagggtataaatgacaggattcaacaaaggaagaatcactgtgtggaagagagaaaccaccttgtcrgctgggaaagccctgaaggggcacgtgtagatgaagatgccaggtccaaacatgaagaatataacaatgatatggg

SEQ ID NO: 263851 - DNA, 655 bp, Homo sapiens
taaacagtgtatttgttttaaataagtgctctagcggccgggcgtggtggcttatgcctgtaatcccagcactttgggaggccaaggcgggtggatcacgaggtcaggagatcgagaccatcttggctaacatggtgaaaccccgtctctactaaaaaaatacaaaaaaaattagccgtagtggtggtggttgcctgtagtcccagctactcaggaggctgaggcaggagaatggtgtgaacccrggaggcagagctttcagtgagccgagatcatgccactgcactccagcctgggtgacagagcgagactctgtctcaaaataaataaataaataaataaataaataaataaataaataagtgctctagcacatggggtacggaaggaagggaaaatctttgacagaaaatgctactgcaacagtacctagaaaagaaagacaagaagatagaggatgagggaagaaagaagagagaaatagaaaatcaggcaaacaaacaccaaacaagcaaacaaacaagcaaacaaacaccaaaagacagacagcacatctatatagtgtcatcttagggtacatattttaagaagcattaaaactatctgctttatgtatccctagagtggaatagagtggttaatacagaaatttctg

SEQ ID NO: 263852 - DNA, 606 bp, Homo sapiens
tttgctggtaacataaacagttgaataacaaatatttttgttttatgtattatatactatattcctacaataaattaagctacagaaaataaaatataacaaaatcataaggaaaggaagatataaatactgttcattaagtggaagcaaatcatcataaagttcttatcgttgtcgtcttcccactgagtaggctgaggagaaggaaaaggaagggttcgttttgctgtctcaggggtggcagaggtggaagaaaatccacatataagtggacacgtgtggttcaaacccatgtttttctggagtcaactgtacttacttatatgttttatgcatcccacatgctaacatagagtgaggtatttcttgatgtgttagcatttaacaatatccctgagacatttgaggatttctgaaggactttgaaattgaaggttataagctcttccattctgcctgtgtcccagcctcactgttatttttccactgtttcttaacagatgggattctgtactacttgacatcttgatcaactttcttccctgtcccayttccatctttgaattatctctaccttctctaaattgtggttggaatagacgcaga

SEQ ID NO: 263853 - DNA, 186 bp, Homo sapiens
aggctgggcctgcctagaatcacgtggcttatgaccgtttatggctcatagaccctgctgagaacttggtgaaagccaaggatcctcacccccattctctctcacactcacactcacacacwctcactcttgcacacatgcacacacatcacatttggttttgtgtttccagggctcatgaccctc

SEQ ID NO: 263854 - DNA, 555 bp, Homo sapiens
aaacctatcaagaataataactacaacttcttaagacataggcagtacaataacataaatataaacaacaaaaatttaaaaaaatcagggggatgaagttaaaatgtagaatttgtattagttttgtctttgcttgcttgtttgtttgtttatgcaattagtattaagttgtcatcagcttaaaataacatgtcataagataccatttgcaaaccgcatggtaaactcaaaaaacattacaacagataaacaaaaaataaaaggcatgaaattaaaacacaccatttgagaaaatcaccttcactaaagggaagacaggaaagaagggaataaagacaagaagatcaccaaaaataagagacaacaaatgacaaaatagcagaagtaagtccttacttatcaataataacatcgaatgtaaatgaactaaactctccaatcaagacacagtgtggytgaatgaataaaacaagacccagtgatctgttgcctacaagaaacatgcttcactgataaagacacatagactgaaaataaaaagatgaatggaaaaag

SEQ ID NO: 263855 - DNA, 480 bp, Homo sapiens
acacttcgtcacccacgattactattcttgaggatctaacccctctattggcctggggggtggggagatgggagaagctcctttaaggcatccttaggacccttggttgttatgttttagggtgggggttgatgcctttgtctaaaatttcctcagctcaaaaccacatgccagtttctaggtgctctgtgtagaaggcgggtggataacaggagtgggggcgacagaggagggggagcagggctgctccatgcccagccagatattcttctgccaagaataggaaatcaggagctccagggaaagtcagcacttttcattacagaggggaacaaaatgtccccagagtgacctttcttacaggacaaacaatcctacctcagggtcgacagggakaaaggggccagaactgcagaaggtgggagaccctgcacagccaacctctttcggtgaaagccagagaaggaaatgaccccaagt

SEQ ID NO: 263856 - DNA, 506 bp, Homo sapiens
catcctaataagaagagcaggagactacagccctcttctctcagccatgtgaagatacaacaagaacacctgcaaaccagtaagagggccttcaccagacactggctctgctggcccagattttaatctttgaattcccacaactgtgagaaacaagtatatgctgtttaagccactcagtctacagttgtttgtagcagcagcctgagcagacaaagacatagggttccttttattttcagaattcagtttagctgtaatcacctaccatcctgagatgctgtttcctccctcctcccttgaaatataagctctgggactatagcttcatggacaaattctgaagaatttgtctctgcttttgtgggakgctaacctaaccaatcaaggaatgtttgctcaatgaaatgaaacatcttaatgcagctcgccagccaatgtctgcagagcacacctcatgggttctggctggcttggatttctgagactacttcatcctactcatc

SEQ ID NO: 263857 - DNA, 552 bp, Homo sapiens
gctcctttggacttaaccatctgcaaggctcattccagttagagtgttccatcaccctaaatgctgggaaaccaagcgaatctcctcccacttgcaagcttccaacagtggcttccaacagtgccactgcagtatcagaaactgcagggaaggtgccagggctgacttccatgaagaaataggagaacaggcaggcagacattggggaggcccacagaatgtcgtgaycagaattcataaagaggctggcaggatacaaatcaatcaaataaacgttagttcaaaaaaattcactacacctgtgagtgagagaaagtcatcagcactgtctctaaaaatgagcctagggcttctggtgacatccaatcggtgggttatcaggagtgccccaggtgatcaggagttggcctcgactcagtcctttttgtgctgtctcctcctctttcccagagttcctctctctcttctcccactaggcagggatgagcaagaggaatggctcacccttgagagctggggtccatagcccaggtcagttctccagctctccca

SEQ ID NO: 263858 - DNA, 554 bp, Homo sapiens
ggtgcacgccccttctgtggcctctcctgggcgagcactgctctgcagataggctagactaccggctccgcgtcgcctcgccaagggttggttcagccaaggctgcaaaaaacaaaaaaagaccaggcagacagcctatccagggtggctattgaaactgggctggaaaactgcagtcccaggaactccagagagctggacattgggaagcatccttggctcacatacaatcggagatcactatgtctttctctcctccaggaacacgattagcttgtgtcctatccagataggaatagatgctccctatctgggagcatccttagctatggtgaatggtatctagccatccactggggatggcgagtgacttagggatttgtgtctcacgtatatgaagcagtcatcgccagatgttggttgtttttcttaacccccatcataacccggtgggtrtgtaagattcagagagattcattcattcattcacaataaatatctttggagtgtatgctatatgccagtaatctgcaaacggaaacggttttgagcat

SEQ ID NO: 263859 - DNA, 556 bp, Homo sapiens
caaggctttcacttggcagcaataggcttgtttcagaaaattgaaagctaaagcttcaaagaatgaacactgtcacttctcatccacctgggcttcccatacatccagatctccaatttgccatttaaagagcaccttttcatcccctccatcgttgcagaagataaatgaccttgcatagaaagcatgacagrgagatcacagtgggttcagttactcagaaaaatcccttcattgaattagattcccgatgaggaatagaggctgatacacctcaacatggatttttatacatacagatcatttcttgggtctgatcaatccagctacataatgttgcaaaaagcaaacagaataaagaacaccagtagctttagggaaattaagtcgccctaatctaaaatgttagtgaacaaggacctgcctagagtgactctaggagtccaaggagagctgtcagtggttggggggccgggattccatccatcaaaatcacattacctgagccgctgttaggtgtataatatcgtcaatgcccagggtggcagagatggca

SEQ ID NO: 263860 - DNA, 556 bp, Homo sapiens
caaggctttcacttggcagcaataggcttgtttcagaaaattgaaagctaaagcttcaaagaatgaacactgtcacttctcatccacctgggcttcccatacatccagatctccaatttgccatttaaagagcaccttttcatcccctccatcgttgcagaagataaatgaccttgcatagaaagcatgacagggagatcacagtgggttcagttactcagaaaaatcccttcattgaattagattcccgatgaggaatagaggctgatacacctcaacatggatttttatacatacagatcattkcttgggtctgatcaatccagctacataatgttgcaaaaagcaaacagaataaagaacaccagtagctttagggaaattaagtcgccctaatctaaaatgttagtgaacaaggacctgcctagagtgactctaggagtccaaggagagctgtcagtggttggggggccgggattccatccatcaaaatcacattacctgagccgctgttaggtgtataatatcgtcaatgcccagggtggcagagatggca

SEQ ID NO: 263861 - DNA, 556 bp, Homo sapiens
caaggctttcacttggcagcaataggcttgtttcagaaaattgaaagctaaagcttcaaagaatgaacactgtcacttctcatccacctgggcttcccatacatccagatctccaatttgccatttaaagagcaccttttcatcccctccatcgttgcagaagataaatgaccttgcatagaaagcatgacagggagatcacagtgggttcagttactcagaaaaatcccttcattgaattagattcccgatgaggaatagaggctgatacacctcaacatggatttttatacatacagatcatttcttgggtctgatcaatccagctacataatgytgcaaaaagcaaacagaataaagaacaccagtagctttagggaaattaagtcgccctaatctaaaatgttagtgaacaaggacctgcctagagtgactctaggagtccaaggagagctgtcagtggttggggggccgggattccatccatcaaaatcacattacctgagccgctgttaggtgtataatatcgtcaatgcccagggtggcagagatggca

SEQ ID NO: 263862 - DNA, 556 bp, Homo sapiens
caaggctttcacttggcagcaataggcttgtttcagaaaattgaaagctaaagcttcaaagaatgaacactgtcacttctcatccacctgggcttcccatacatccagatctccaatttgccatttaaagagcaccttttcatcccctccatcgttgcagaagataaatgaccttgcatagaaagcatgacagggagatcacagtgggttcagttactcagaaaaatcccttcattgaattagattcccgatgaggaatagaggctgatacacctcaacatggatttttatacatacagatcatttcttgggtctgatcaatccagctacataatgttgcaaaaagcaaacagaataaagaacaccagtagctttagggaaattaagtcgccctaatctaaaatgttagtgaacaaggacctgcctagagtgactctaggagtccaaggagagctgtcagtggttggggggccgggattccatccatcaaaatcacattacctgagccgctgttaggygtataatatcgtcaatgcccagggtggcagagatggca

SEQ ID NO: 263863 - DNA, 547 bp, Homo sapiens
cccacacccagctaattttttgtatttttaatagagacagggtttcgccatgttggccaggctggtctcaaactcctgacctcaggtgatccacctgcctcggcctcccaaagtgctgggattacaggcgtgaaccactgcgcccagcctgatacttttaatcttaatgatgttcatgaaatcttgattgtcattgcaataataggaattctatgtgcacaagtattttctggacctagaaaaggagacttataaagttatggctggaaaagctaggctttgattcagtaaagaaatgctactctaacataaaatctagtgatgccccacaaacctaaagcaggcaggctgccaaagtctaataaactggctgaaatcaattggaaccctaattcacttttgcataatttcattctccttgcatattttccagtcaggatctggaattcttctcttttcytccagtgcagatggaactccagtgagggagagcttttcactcttcatttttgaatataatcacatttgtcctgaaagcttgtgtgtc

SEQ ID NO: 263864 - DNA, 556 bp, Homo sapiens
ttagcttctctgataggtgcaaattcctttgggtttttcctaaaaatccaggcaaaagacagacaagagggaaatacaaaaattcatcattcctaacaaggtttctctcatcgctggacatagtagtcaattcaaccagttcatttccgttaagcactatttcccaacctttccagatatttcattcctgcctctgaaatgtgaagatgaaatagtaggtagataaaaggccggacataagcagactcttaacagtaggtttaacagtctctttctctttgggttctgggattktggctaatattctaaattgtttccaatgagaatataccacctctataatcagaaaatgaggctatgaatatgctttatgaactgtgaaactacacaaatgttacatttttatttttgctgctattgaccattttagagttctcattttaacatagctcttttatcctggcaacactgctgaagtttgtctgtagaaagagaacctggctggcataatttatacatccaagtctgcttattccaaaagtctattattctgcac

SEQ ID NO: 263865 - DNA, 556 bp, Homo sapiens
ttagcttctctgataggtgcaaattcctttgggtttttcctaaaaatccaggcaaaagacagacaagagggaaatacaaaaattcatcattcctaacaaggtttctctcatcgctggacatagtagtcaattcaaccagttcatttccgttaagcactatttcccaacctttccagatatttcattcctgcctctgaaatgtgaagatgaaatagtaggtagataaaaggccggacataagcagactcttaacagtaggtttaacagtctctttctctttgggttctgggattttggstaatattctaaattgtttccaatgagaatataccacctctataatcagaaaatgaggctatgaatatgctttatgaactgtgaaactacacaaatgttacatttttatttttgctgctattgaccattttagagttctcattttaacatagctcttttatcctggcaacactgctgaagtttgtctgtagaaagagaacctggctggcataatttatacatccaagtctgcttattccaaaagtctattattctgcac

SEQ ID NO: 263866 - DNA, 571 bp, Homo sapiens
caaaaattcatcattcctaacaaggtttctctcatcgctggacatagtagtcaattcaaccagttcatttccgttaagcactatttcccaacctttccagatatttcattcctgcctctgaaatgtgaagatgaaatagtaggtagataaaaggccggacataagcagactcttaacagtaggtttaacagtctctttctctttgggttctgggattttggctaatattctaaattgtttccaatgagaatataccacctctataatcagaaaatgaggctatgaatatgstttatgaactgtgaaactacacaaatgttacatttttatttttgctgctattgaccattttagagttctcattttaacatagctcttttatcctggcaacactgctgaagtttgtctgtagaaagagaacctggctggcataatttatacatccaagtctgcttattccaaaagtctattattctgcacgggaaatggttcttttccatttatggaagaagttttgtttctttttgttttggttgattttgttatgtaaggagagttatcaacaaaaaca

SEQ ID NO: 263867 - DNA, 571 bp, Homo sapiens
cacttaaatctaaattctttaaaaactggcacaaaataaagcttgaaaaaataaacctagttcttctaactcccgtgatttttctattatcatatttactattttttaatacgaataaatttgcaacagaacaatacataaatcaaacactgcatgagagataaagcaatgaacaggacccttggctgaggctagagaaaagcaacgcagaacctcagtgccacagggtcaagtcgccattcccacgyctcctctgctaagggcacttcaccactggaatgtcaagagaaccaacctggaaaggtggaggcagaaattttcatgctgaccttgctaatacctaattagttacatcaacctgggcagttatttcatctctgtttctctttcttcatctgtaaaatgaaatcactctctactttacaagggcttttagtgaggttgtataatgaacgttgaaaaaacactataaacactaaagtgcttaataaagtaaggttaaatttgttatcttaaacttagtttaaagcaataataaacattaagtctgtcatcaaattggggaagactt

SEQ ID NO: 263868 - DNA, 571 bp, Homo sapiens
cacttaaatctaaattctttaaaaactggcacaaaataaagcttgaaaaaataaacctagttcttctaactcccgtgatttttctattatcatatttactattttttaatacgaataaatttgcaacagaacaatacataaatcaaacactgcatgagagataaagcaatgaacaggacccttggctgaggctagagaaaagcaacgcagaacctcagtgccacagggtcaagtcgccattcccacgtctcctctgctaagggcacttcaccactggaatgtcaagagaaccaacctggaaaggtggaggcagaaattttcatgctgacmttgctaatacctaattagttacatcaacctgggcagttatttcatctctgtttctctttcttcatctgtaaaatgaaatcactctctactttacaagggcttttagtgaggttgtataatgaacgttgaaaaaacactataaacactaaagtgcttaataaagtaaggttaaatttgttatcttaaacttagtttaaagcaataataaacattaagtctgtcatcaaattggggaagactt

SEQ ID NO: 263869 - DNA, 571 bp, Homo sapiens
cacttaaatctaaattctttaaaaactggcacaaaataaagcttgaaaaaataaacctagttcttctaactcccgtgatttttctattatcatatttactattttttaatacgaataaatttgcaacagaacaatacataaatcaaacactgcatgagagataaagcaatgaacaggacccttggctgaggctagagaaaagcaacgcagaacctcagtgccacagggtcaagtcgccattcccacgtctcctctgctaagggcacttcaccactggaatgtcaagagaaccaacctggaaaggtggaggcagaaattttcatgctgaccttgctaatacctaattagttacatcaacytgggcagttatttcatctctgtttctctttcttcatctgtaaaatgaaatcactctctactttacaagggcttttagtgaggttgtataatgaacgttgaaaaaacactataaacactaaagtgcttaataaagtaaggttaaatttgttatcttaaacttagtttaaagcaataataaacattaagtctgtcatcaaattggggaagactt

SEQ ID NO: 263870 - DNA, 571 bp, Homo sapiens
cacttaaatctaaattctttaaaaactggcacaaaataaagcttgaaaaaataaacctagttcttctaactcccgtgatttttctattatcatatttactattttttaatacgaataaatttgcaacagaacaatacataaatcaaacactgcatgagagataaagcaatgaacaggacccttggctgaggctagagaaaagcaacgcagaacctcagtgccacagggtcaagtcgccattcccacgtctcctctgctaagggcacttcaccactggaatgtcaagagaaccaacctggaaaggtggaggcagaaattttcatgctgaccttgctaatacctaattagttacatcaacctgggcagttatttcatctctgtttctctttcttcatctgtaaaatgaaatcactctctactttacaagggcttttagtgaggttgtataatgaacgttgaaaaaacactataaacacyaaagtgcttaataaagtaaggttaaatttgttatcttaaacttagtttaaagcaataataaacattaagtctgtcatcaaattggggaagactt

SEQ ID NO: 263871 - DNA, 535 bp, Homo sapiens
ctacactacacattgggtacagtgtactctgctcaggtgatgggtgcaccaaaatctcagaaatcaccactaaagaactgattcgtgcaaccaaacaacacttgttttccaaaaamcttttggaaaaaaaacttccatgcatctagggataatatgacttcaaatatatttgaaatatatagtcatgaaataacatgacttcaaaatatattcagcaaaaaattgagagaacaatgataaatacatatatttctggtgagattttaatatacttcctcagtacttggtaaaatggggaaaatatctgctaacatacaagatgatatagtttgaatatatgttcctgccaaatataatgttgaattgtaatccccaatgttagagttaaggtctggtgggaggtatttgggtcatccctcatggcttggtgatgtccttgcaatagtaagtgacatctcgaaagatctggttgttgtaaattgtggcacctcccccccgcactcaccttcttgctcctgtttctgccatgtgagac

SEQ ID NO: 263872 - DNA, 535 bp, Homo sapiens
ctacactacacattgggtacagtgtactctgctcaggtgatgggtgcaccaaaatctcagaaatcaccactaaagaactgattcgtgcaaccaaacaacacttgttttccaaaaaccttttggaaaaaaaacttccatgcatctagggataatatgacttcaaatatatttgaaatatatagtcatgaaataacatgacttcaaaatatattcagcaaaaaattgagagaacaatgataaatacatatatttctggtgagattttaatatacttcctcagtacttggtaaaatggggaaaatatctgctaacatacaagatgatatagtttgaatatatgttcctgccaaatataatgttgaattgtaatccccaatgttagagttaaggtctggtgggaggtatttgggtcatccctcatggcttggtgatgtccttgcaatagtaagtgacatctcgaaagatctggttgttgtaaattgtggcacctcccccccgcactcaccytcttgctcctgtttctgccatgtgagac

SEQ ID NO: 263873 - DNA, 460 bp, Homo sapiens
taatggagaaatgagaaaggagcaactttgtttgaaatcttagtttttaactggatttagtttcaattctcaagttttagggatacctgggtgcaaaattcccaaacatacgttatgtcagaggccgaagtacaggatatagttttgagacctgtttttctatgccttcctgttcctaagtgcttgttgttttatgaatattactgtcagagcttattaattttgccttttatctctcagcaaggcttaagaagaaggaaatgagcacttctccatrtaagttaaatgctacacaactgatacctgacagttcattttgtggtttttcagggttattttaatttataataaaagatgaatggattgggatattagggaggagttttccataatccttattaatagaatattgagtattaaaattggaaatactttgaagaacatctcattcactgccatc

SEQ ID NO: 263874 - DNA, 522 bp, Homo sapiens
cattactagtatcagaaacatggtgcctacagttgctagacattaaatgtctacactgatttatataatttaggagaaatggtaagggataaggaagcaaaaatataatcagagaccaaaataagagacctatgagaatattatttcccagatgggttcttagaagctcaagcaagaggatatatgtattaaaaatggtctcaacaggctgcaagttgacatactgagactaagtatttgtctttaaaaaataaccatcctcctgtcactgactgatataattcccaaggatcggaacactattatttttctggcagatacacagggcaactgctttaaagggttagcttccacaactaaaggtcattcacctatggttttgcagagcagcaactctaaaacctttctcctaagaaatgaaaaatgtctaaacatcctttggattcacagagtcaacactacyacctagtaaattaccatatagtgaaatccttactggatctaaatgctacatggattatg

SEQ ID NO: 263875 - DNA, 522 bp, Homo sapiens
cattactagtatcagaaacatggtgcctacagttgctagacattaaatgtctacactgatttatataatttaggagaaatggtaagggataaggaagcaaaaatataatcagagaccaaaataagagacctatgagaatattatttcccagatgggttcttagaagctcaagcaagaggatatatgtattaaaaatggtctcaacaggctgcaagttgacatactgagactaagtatttgtctttaaaaaataaccatcctcctgtcactgactgatataattcccaaggatcggaacactattatttttctggcagatacacagggcaactgctttaaagggttagcttccacaactaaaggtcattcacctatggttttgcagagcagcaactctaaaacctttctcctaagaaatgaaaaatgtctaaacatcctttggattcacagagtcaacactaccacctagtaaattaccatayagtgaaatccttactggatctaaatgctacatggattatg

SEQ ID NO: 263876 - DNA, 619 bp, Homo sapiens
agacacaagcagcagagaattttaatagtatgcaaacaactgcaattaaacagctttactaatagtgctattttaaagagagaaaccttcagttttaaagtcagataaaatacatatgtatgtataaccaacatggaaagtctacaatgaactcaaaaagccttttgaaattactttaagaaattattttaaagaaatggttttgtccttgcccatttcaaggcattatgcatttgtaatatacagtcttttctaaggcacacttggattctcattggtcttcttttccttcttcatctcagcaaggatggtttatgagtattttttttctgggtttcctawggcaaaattctgagtaaaggcaagaagacagtttacagtcagagaactgatgcatttcacagcacaaagattaaaaatcaaactcaacagagagtgcaaaaatagtgaaaccgctcttatctcccctattaaataaaatatagaaattcattcagcaatattttattgagcacctactatatgcaacgcattgcactgtgtgctgcagatagaagtcagaacagtctctgctctcctggaccttgggttggagagacagaaatgaaactagtaatca

SEQ ID NO: 263877 - DNA, 619 bp, Homo sapiens
agacacaagcagcagagaattttaatagtatgcaaacaactgcaattaaacagctttactaatagtgctattttaaagagagaaaccttcagttttaaagtcagataaaatacatatgtatgtataaccaacatggaaagtctacaatgaactcaaaaagccttttgaaattactttaagaaattattttaaagaaatggttttgtccttgcccatttcaaggcattatgcatttgtaatatacagtcttttctaaggcacacttggattctcattggtcttcttttccttcttcatctcagcaaggatggtttatgagtattttttttctgggtttcctatggcaaaattctgagtaaaggcaagaagasagtttacagtcagagaactgatgcatttcacagcacaaagattaaaaatcaaactcaacagagagtgcaaaaatagtgaaaccgctcttatctcccctattaaataaaatatagaaattcattcagcaatattttattgagcacctactatatgcaacgcattgcactgtgtgctgcagatagaagtcagaacagtctctgctctcctggaccttgggttggagagacagaaatgaaactagtaatca

SEQ ID NO: 263878 - DNA, 549 bp, Homo sapiens
gctacatattaagagggcttgctttgtccaaaataaatgtctccctttttaaacttgacaagtttacaaaatgttctctcagatcatttcagcaaattaatcttcacggtgtaggctgatgggatgcatgggggaaattctgactgaaaaaaaaaggtcctggtcaaaatgacaaggcagcactgtgatgggccattcatttattctttcattcatttatttaacaaatatttagagagttccctatatgagcaagaaacagggctaaatcctgctgtggaaggagcagaaatgatccaaaattcagtaagtatggtttgaattataaagtctaatataccttggactagagagaagagacatgtaaataaataattacaatacaatgtaacaagggctaaaatagataggtgtacrgtgttgcagaacagaagagggcgctaattactcaatttcattgctagttacacagaaataaagtgttttgataaccaaaacaaagcagaaaatggaagtaatgatcccaatgcctgaatttttaaaaaacct

SEQ ID NO: 263879 - DNA, 551 bp, Homo sapiens
gagccactgcgcgcagcccagattgtattttttaaacgacctcacttcataaagtcctagttgctattatggcttgactttggaatatgaagatatgacttcaagtctcattactattttttcctagcagcattgggtgaatcagttaatctctaacaccttgtcatcttctttaatgttgtagaaggagagaagagtactcacctcagaagattaataagggacaaatgagcatcatgtatgtgaatatattttgctaactataaacaaatgcacattattaaaaataatgaacatatataactgcattatttgtataactaaaaatactttctaaagaagagaactttgtagtatatagtattggctggggagagggcagaggttgggttgttttcrtaattagctatattctattgtattttgtagtcagttccatacagtagtaagactccctcagccttagggagtaggataagcagtcagattagccaggtgggtatgaggcaagaggaagtggccagtccagcacggagccagagaaaaggcag

SEQ ID NO: 263880 - DNA, 617 bp, Homo sapiens
aaaaatcaatcatttacgaaaagaacaccagtgttagatgaaaagctgcagagccacttctgtggaaaagaagtagagattcttgcctgggtgttctctctcttgtttcataattgctgtgtagtaccattttactcaaatagctaatatttcattaacaactcacattatagagtcagattattatggattttctgtttgtgacaggaaagtttgtttttcttaaccaaaataattacaagccacgaatcctcatgagggtagaagttgttgacataataaaaagataatttagaaatccaaaaatgggtctgaagggtcaaagtgaaaagataagtaaaatgtgttttccttttaataaactcatactccctgaaracatctgagaaatgctaataatagcatacaaattattaaatttctaaagaagattaatggagtgcagccttggcaaaatttagttgcactctcttggtatgcctcacattttgtgatgactctattgtgtgctttctctctactcctcacattgtaccagagcttctgaaaccctaaggtgtgcacagatcacagattggctggacaattacaacaggaatgcagattctcattcagta

SEQ ID NO: 263881 - DNA, 617 bp, Homo sapiens
aaaaatcaatcatttacgaaaagaacaccagtgttagatgaaaagctgcagagccacttctgtggaaaagaagtagagattcttgcctgggtgttctctctcttgtttcataattgctgtgtagtaccattttactcaaatagctaatatttcattaacaactcacattatagagtcagattattatggattttctgtttgtgacaggaaagtttgtttttcttaaccaaaataattacaagccacgaatcctcatgagggtagaagttgttgacataataaaaagataatttagaaatccaaaaatgggtctgaagggtcaaagtgaaaagataagtaaaatgtgttttccttttaataaactcatactccctgaagacatctgagaaatgctaataatagcatacaaattattaaatttctaaagaagattaatggagtgcagccttggcaaaatttagttgcacwctcttggtatgcctcacattttgtgatgactctattgtgtgctttctctctactcctcacattgtaccagagcttctgaaaccctaaggtgtgcacagatcacagattggctggacaattacaacaggaatgcagattctcattcagta

SEQ ID NO: 263882 - DNA, 602 bp, Homo sapiens
gagtctattttgttaggaacatacagactcagcactgctattgataccctgtgaattaatctttagtcgttgaatcatgaccttctttattccaaatwaaacttttatgccttaatattgctttccttgcaatgttagtctttatctgttttgtctttttccatacctttcaaccattaagcattatcatgttttaggtatccctcttaaaaactacacatagatgaattttattttctaaaaataatctgagggtccccatttttgaacacactagtttaatctgttcacatttactgagattactgatatatctacactttttctactatatgttttttgtgtttattatgccttttcttagcttatttttctttttcctgctccttattagagcaatctagtgttcttccttttttaaaaacttttattttaggttcaggggcacatgtgcaggtttgttatataggcccactcctgtcaccagggtttgttgtacagattatttcatcatcctggtactaagcctagtacccaacagttattttttctggtcctctccctccccactccctgcccccgacaggcctcagtgtgttgct

SEQ ID NO: 263883 - DNA, 586 bp, Homo sapiens
tttttttaaagaaggggttttgcagagtcctgtgagaatctgatagctgaagtcacccatacattcccctccrtacaagatcaggaggttcagagatcacttgaagtctatctttgaatcctcttaagaacttctgccgagaattgctctaaaaccaacaaaaagtattcaaaaaatatatttgctaagttaattaattaatggacatagggtatggatggacatctggatgggtgaataaatgaatcctgggtaatcctagggaaaagtcatgatttcagacatcctacctgttactcctgttaacattactgatggctatttcttagtctattaatgcagatgctataatttgaatacaaaaatgaaatgaatatcacttcttagagatacatttgtacttcaaggtgacaatttgactattaataaaaataccctgctgaaaagataaacagtgtttgctttttaaagtttgcagagcatttccatatacattcttttaattcatttaattatcaagtaaacctagtgagttaagtatttttgccctcattttttgcaactgaggaagccaaaaccatggaga

SEQ ID NO: 263884 - DNA, 586 bp, Homo sapiens
tttttttaaagaaggggttttgcagagtcctgtgagaatctgatagctgaagtcacccatacattcccctccgtacaagatcaggaggttcagagatcacttgaagtctatctttgaatcctcttaagaacttctgccgagaattgctctaaaaccaacaaaaagtattcaaaaaatatatttgctaagttaattaattaatggacatagggtatggatggacatctggatgggtgaataaatgaatcctgggtaatcctagggaaaagtcatgatttcagacatcctacctgttactcctgttaacattactgayggctatttcttagtctattaatgcagatgctataatttgaatacaaaaatgaaatgaatatcacttcttagagatacatttgtacttcaaggtgacaatttgactattaataaaaataccctgctgaaaagataaacagtgtttgctttttaaagtttgcagagcatttccatatacattcttttaattcatttaattatcaagtaaacctagtgagttaagtatttttgccctcattttttgcaactgaggaagccaaaaccatggaga

SEQ ID NO: 263885 - DNA, 593 bp, Homo sapiens
aattaatggacatagggtatggatggacatctggatgggtgaataaatgaatcctgggtaatcctagggaaaagtcatgatttcagacatcctacctgttactcctgttaacattactgatggctatttcttagtctattaatgcagatgctataatttgaatacaaaaatgaaatgaatatcacttcttagagatacatttgtacttcaaggtgacaatttgactattaataaaaataccctgctgaaaagataaacagtgtttgctttttaaagtttgcagagcatttccatatacattcttttaattcatttaattatcaagtaaacctagtgagttaagtatttttgccytcattttttgcaactgaggaagccaaaaccatggagaaaattttagtgatttgcttaaaattttataaccagctagctggattcaatgcaggttttcattttattctctctttctctttgcctgctcttacattctccattcctctgcaacttagtcattttgggctcctataacaaagtaccatatgctgggtggcttttaagcaacagaaatttatttctcacagtctggaggctgg

SEQ ID NO: 263886 - DNA, 600 bp, Homo sapiens
aactactatacagtcatgcatctcttaatgatggggatatgtgctgtgaaacacatcattagcaatttcaacacagtgagaacaccatagagtgtacttacttcaacctagatggcatagcctccttacacacctaagctatatggtatagcctattgctcctaggctacaagcctgtatagcatgttactgtactgtactgaataccataacacaatggtgagtatttgtatatcttaaagtagaaaaggaacagcaaaaatactgtattataatcttatgggcccaccatcatatatgtggtctgtcattgactgaaacatcacgatgtagcgtgtgactatagcatatcccaaagcatacattaatgcatagagatgcacttatgctttaagagcaacaycaccggttgattaataaagtacatttgtgtcatttaaccttaaggttgcccattatcttaattttttgtgtaaataagtcttgtaaaacatgcttagcctgaaaagagatgcaggaaaaatatggcattagtttgctttatgccttttcaagtcacatcagcagtaagggtgagtgatagaagcaggaggagtgaga

SEQ ID NO: 263887 - DNA, 486 bp, Homo sapiens
tcacagttacagggagcccatctgttgctctgtgggtcttgtaaaacttactttcccaactgaaattgaatcacacaaatactcataaattgttaaatcttctttaagacaacactagaatattcagaggctggcaaggtgattttcctcagagacaaatcagaataagtttaataaaagaatgtagcctctggaaccagactgctsaagttcaaaccctggctccacctcttattagctgtggaaatttacatatttactaataataaattagaatttattaaaccactctaaaccttagtttcctcatcggtaaaagaggttaataattgtgtttaccttatagttttgtcgtgaggattaaatggaataatatacattaagtgcctgacctatagtgaaagcttagtaaatattagctataactattattaccaatcatgtgtatctaatagcattaatgcaaaaataaacactatccaaaca

SEQ ID NO: 263888 - DNA, 557 bp, Homo sapiens
tagccgaaatgtattagcacacaatcttctagccaacaaacttaaattctttattggaggctattaaaatacttgagagtaaatgttagaagtagattcataaccttactgagttttttaaatgaacaaaagaagaaaatatttatatactatgtgaaaattaaaatttcagcctggtaaaagacatcataaataagaaattttaaaaatgaagcaaattgggaaaaaatgacactatacgacaggcagtgtactggtacataacaagttattatgaatcaccgggaaaaatatgaacatcccaggagaaaatgggcaagggatttgtacaagcatgtcccagataaagaaatatatataaccattaaacagaagaaaagagtctaactaaaatttaaataatcacatctaaaaacaataagagatatatttacctctcagattaccaaagataaaaaagagtaataatatctcacascttggttagcatataggaaaggaagtttttaaaaatatatgcctagtattgacataactttcctggagggcaatttggc

SEQ ID NO: 263889 - DNA, 496 bp, Homo sapiens
tgagagttcccccatcccctactcctgccccatcctaccctatgctcaccattaaataataatttttctcaacactagaagtaaactggaaaaacatacaaataggaaactctgattaaaactgatcargtttttttctctaaatcaagttattttctctgaagaatagaaacatgaagcttcatgtgaagagattcaaaccaaagtgactgaaaatggctgcagacagtgtacacacacatgactggtttcctatgaagccgttttgcttccttcttctgtgagtacaggctttccttaacaaaatcctctcccaacaagtcgagccctgtttctgagtgctccttgactaatgcaagtatttgtttagctattgcccctcctgtcttcccaactggtttcaaatgctttcatacttgaaaatgatctctttaaaatcaccctgatttttcccaacagattattgtatttggagtaatagcatgagctgaggctg

SEQ ID NO: 263890 - DNA, 496 bp, Homo sapiens
tgagagttcccccatcccctactcctgccccatcctaccctatgctcaccattaaataataatttttctcaacactagaagtaaactggaaaaacatacaaataggaaactctgattaaaactgatcaagtttttttctctaaatcaagttattttctctgaagaatagaaacatgaagcttcatgtgargagattcaaaccaaagtgactgaaaatggctgcagacagtgtacacacacatgactggtttcctatgaagccgttttgcttccttcttctgtgagtacaggctttccttaacaaaatcctctcccaacaagtcgagccctgtttctgagtgctccttgactaatgcaagtatttgtttagctattgcccctcctgtcttcccaactggtttcaaatgctttcatacttgaaaatgatctctttaaaatcaccctgatttttcccaacagattattgtatttggagtaatagcatgagctgaggctg

SEQ ID NO: 263891 - DNA, 496 bp, Homo sapiens
tgagagttcccccatcccctactcctgccccatcctaccctatgctcaccattaaataataatttttctcaacactagaagtaaactggaaaaacatacaaataggaaactctgattaaaactgatcaagtttttttctctaaatcaagttattttctctgaagaatagaaacatgaagcttcatgtgaagwgattcaaaccaaagtgactgaaaatggctgcagacagtgtacacacacatgactggtttcctatgaagccgttttgcttccttcttctgtgagtacaggctttccttaacaaaatcctctcccaacaagtcgagccctgtttctgagtgctccttgactaatgcaagtatttgtttagctattgcccctcctgtcttcccaactggtttcaaatgctttcatacttgaaaatgatctctttaaaatcaccctgatttttcccaacagattattgtatttggagtaatagcatgagctgaggctg

SEQ ID NO: 263892 - DNA, 496 bp, Homo sapiens
tgagagttcccccatcccctactcctgccccatcctaccctatgctcaccattaaataataatttttctcaacactagaagtaaactggaaaaacatacaaataggaaactctgattaaaactgatcaagtttttttctctaaatcaagttattttctctgaagaatagaaacatgaagcttcatgtgaagagattcaaaccaaagtgactgaaaatggctgcagacagtgtacacacacatgactggtttcctatgaagccgttttgcttccttcttctgtgagtacaggctttccttaacaaaatcctctcccaacaagtcgagccctgtttctgagtgctccttgactaatgcargtatttgtttagctattgcccctcctgtcttcccaactggtttcaaatgctttcatacttgaaaatgatctctttaaaatcaccctgatttttcccaacagattattgtatttggagtaatagcatgagctgaggctg

SEQ ID NO: 263893 - DNA, 582 bp, Homo sapiens
gggaacacatatgggaactctaagagctgcctggcacagaataagcactttataagtgatttctattgttatttttacatctgttgtttgggaaaataacattttctgtgtgaaagtgcaacttaaactgtaaattttagaaaagatgattcccgtaatcctgtaatttgtctaaggatgacccatttgtgattccctagggaaaaagtcagaagttgaaaattaaatatactaaacacaagttcaaattagtgcatcttagggaagaaaactcaactgcatagccgccatcaattaattacatcttcayaagagcccagcgcaggcacagctcagctggaagatagcaactgaacagttaaatccaggaagggaacaaaagatgggcaactattgttcaagaaacagagggtctgccatttttaaaattaccccttgggagtcactgctaatgggtatgggcttctttttagagtgatgaaagtgttctaaaattgattgtggtcacgactacacaactctgtgaatatactaattccatcaaattgtacacttcaaatgaatgaatagtatgatatgtga

SEQ ID NO: 263894 - DNA, 603 bp, Homo sapiens
tccttccctgaagggagattatctgtttaatggttaggagaatgtgaaacactcccttgacactcagcatttggaaataatatctaatgtgatagagagtctgggtaccctgtccaaggaaattatttcccatccttctgtgcaagacatcgaagaactattgtttggactattaaggtaatgagatgcagatgagaacttaaattacaatgctatatatagactcttgaaatgttttcttactggattttagctacccctgtccttttcttgcctaattttctctttacttgttttatgtttatgagttcattagctgctattgtcatgacactgtgggaagaggcttaaggactttgtcatttgtcatttgacaaatgcttttaggaacttcaacacatcattctgccccctccacctcccccaccccgccgccactccctaccctcctgccccaagtcatatttctaactggtggaaaaaaaaaaatagagaaaggaagggaaggaaagagaagagaattaacaagtgatttacatcaatrtctcatttaatctttgcacaatcttggaaggcaggtggcaatatttattgacagatgga

SEQ ID NO: 263895 - DNA, 565 bp, Homo sapiens
ctgagaacttcctttctacttttatgtccaggccaatgatccctaattttgtgtatttatggcttacataaaaggttgcaagctctcctgaccatgagcatttggagagtctcccatcattaatgaagatagtagcmccagggaacccatggttcagaagtcaggctaattaaaaatagcaccacatttattggtggtaacaatccaaacctaatattgggtattgtgcccatttcaaacaaattaaatttcagtggggaaaagtgcattttaggtaatccaggctggaacttttttttcagatatgagatctcctccacctgacagggatatggaaatatcaactttctgaactaaagaataagatgaactacatgaccttgaaagtcccttttaactaaaggcttaatgataggaggatctgtgtttgtgtttatttgtttcacctgtgctgctaacctggctttctaaactggcactcagtttttctgtatccaaaaaaagcagtgatgaaaacacctacacagtgatgaaaggaaattttgaatatgacaccaatacatca

SEQ ID NO: 263896 - DNA, 565 bp, Homo sapiens
ctgagaacttcctttctacttttatgtccaggccaatgatccctaattttgtgtatttatggcttacataaaaggttgcaagctctcctgaccatgagcatttggagagtctcccatcattaatgaagatagtagcaccagggaacccatggttcagaagtcaggctaattaaaaatagcaccacatttattggtggtaacaatccaaacctaatattgggtattgtgcccatttcaaacaaattaaatttcagyggggaaaagtgcattttaggtaatccaggctggaacttttttttcagatatgagatctcctccacctgacagggatatggaaatatcaactttctgaactaaagaataagatgaactacatgaccttgaaagtcccttttaactaaaggcttaatgataggaggatctgtgtttgtgtttatttgtttcacctgtgctgctaacctggctttctaaactggcactcagtttttctgtatccaaaaaaagcagtgatgaaaacacctacacagtgatgaaaggaaattttgaatatgacaccaatacatca

SEQ ID NO: 263897 - DNA, 550 bp, Homo sapiens
atccaaaaaaagcagtgatgaaaacacctacacagtgatgaaaggaaattttgaatatgacaccaatacatcagtccttctcagctaccttgtctaaacagcatacatagtggtcaagagaatgttcagggccagacagtcctagaactgagtttgaattctactactttctagctgtgagatattgggcaggttattaaatctctttagatcttcttccctcctctgtataatcagggcaattataaataatcattgaagataattcaatgagacaatgtatataaagtgttttgcacagttcttgacatatggtaagtgcttaacaaatgttttctcttatctataaatgctgggatcaaagtgggtagatagtatcccatagtgaaacagtataagttctggagtaacacaggaacaggtcaaatcttggcatggtttttctacttacaaattttgtgatttcctgcaagtaacaaactacgagcyttagtgtcttcatttgtaattattcaaacccagatctgtttgactcaaaagcttatgcttt

SEQ ID NO: 263898 - DNA, 532 bp, Homo sapiens
ccatgagacaagatggccagtgcaagaagagaccattgcttgtggtgccgttaggttgtttatgctgttgtttatatgttttaaacagcatagctattaatgagattatgttatgaaatactcatttccttctatgttattgccatgwcactcagcggcaaaggggaaacacccaaatacacagtaactacatatgcagttggattctacagactttctcccctcctttcagaaggaaatttctattactttcacttctcaggtatgtcacaaagagtttgagaaataaaaaagagaaaataactctcgaaagaacaaatagcacataccacgaattaatagagcaatagcaattggcaacaacatccacagatattaacccgcagtgctgagccacacagaaacgagtgagattagttccatttcagttacaatagcaacaggaaccaggcccacatatttgtatcttagcggaagcaaagaacagattataaagcaagtctagattcaatgatcagacaggatgccgccc

SEQ ID NO: 263899 - DNA, 599 bp, Homo sapiens
atagagcaatagcaattggcaacaacatccacagatattaacccgcagtgctgagccacacagaaacgagtgagattagttccatttcagttacaatagcaacaggaaccaggcccacatatttgtatcttagcggaagcaaagaacagattataaagcaagtctagattcaatgatcagacaggatgcmgccctgcttcctaaaatcaaaatgaaataattgccagtggcagcttacactgggttctaagagttaggaggcaaatatgtttgcaacaagaaccatggggaagcaaaatgaaaatacattgctccaggttctaggcattctctgtgcttgggccctggctggcttatacacaattttcagaaacatggacggttcaaaagcaagacaaaacaaaatagaacacatcaacaggcaatttttgcatggccccgagtaaaacgattcagatctcccaagctggtgtctatggtttaataaaggatttaaaatatgccttgcaatatttctaattctttctacaattgagtcaaaacacaaagaaccgaagttgtaaaagaatgttcagaatgagtactatactggaaataga

SEQ ID NO: 263900 - DNA, 429 bp, Homo sapiens
ctttggccagagagtagctaggactacaagcacacaccaccacatctggctaattattataaaattttgtagagacaggatcttgctgtgttgcccaggctggtcttgaaatcttggccccaagaggtcatcctgacccggcctcctgaagtgctgggattacagatgtgagccactgtgcctgccccagcctgtccttgactcttagttggatatcattccatagtttagaaatgttttttcatccacagtttggctgttatcaagacatattctaatgtaaagttgtttcacctttcaggacgattagaaagtagatagctaaaacataaaaawacaaagttctcatttcctgaagtcaattttcacacatcagaccaagttatctggtgggctcatgtgctacaaaaaatataaaattacaaagag

SEQ ID NO: 263901 - DNA, 558 bp, Homo sapiens
agattttgttgttagtcatttaatttatgctcatctgtaacgaactgtttgtctttgctaagaattaaaaccatatatcattacgagtctttgcttttgttttacagtttttttattttttcagttaaaatgaggtggtttctagggatgaaggatatgcaaggttgagattggagagggctaacaaaatggatgtggactggaagtaaatgctgtaattatattggctttaaggattattttaaaccttaggaggaaaggaatgtattgagaactttgtttgtttgtttgtttgtttgttttaatagaaactgtagatagcatgtctctaaatagtttcaggttagtttccttgaaaagtatactgcctcgtttccttcctcatatccttgttagrttttgcttagtaataatgtgaggggccaaaaaagcttttaaagctgatttccttcactttgtaattccttgccaagaactagagttctgattgtccatgccctcttcagtctcctggctatttatgaaaatataaaatgaaacaaagtgcacatgccccct

SEQ ID NO: 263902 - DNA, 562 bp, Homo sapiens
tcaccaacagtgatactttttcctaatggttctgggaggataattargttgtttatcacctttgatgcttataaccctaacacaggtgttccctggaaaccaattaaaaatacttacagctgataaacagtgcctttcagctcaacaaatttactaataattccaatcccatttggaaaagaatcttgtaaggtcttttgacaccaaaaggcaactttcatactcatttacacttcagtgcccatagtgataagcatacacagggtatttactcagcctcccttgatctcaatagaagagtcctccagaagcttcccctggtagttgaatgacaactttggtttcaaggtatgaattgtgctctatagtttcggatttcctttaaaaggaaatggactaggatctttctgatgatacttttgcctaattgtgaggaaatagtagtgcttaagtctatttccctcattttgtaactttcagtggacacccagttgattatttttagtactcatggaagaaggaagaaggtccttgtgaaaatcccaggtagcttatgtgtcag

SEQ ID NO: 263903 - DNA, 524 bp, Homo sapiens
gtatttgtgcacccatgttcatagcaacatgattcacaatagccaaaaggaggaagcaattcatcccattcttcttccaagaacatttgctgaaagggccaaacgttttccctactgttttaggatgttttctttttcacaagttcattttaatgcatattaagaaattccttgttcaactttagtgagctaagaatcacctttaaatttgtttaaaatgcaaatttctggattcatccacagaaatttcaattagtgagaactgaggaaaaaccaagaagcctgcattccacaggtaggccagaggygtttctgctgtgtgagattaccaggcaaaaacttcagaaacactgagtgatcatgtttcaacactatttattctgtgttctccctccctccctccctcactgcttccctgtctctctctctctctgtctctctttctctctgtctctctctcctctgtctctctttcttccatttactgttaatccccatttctaccacctgtcccgggcacccta

SEQ ID NO: 263904 - DNA, 567 bp, Homo sapiens
aactcttaagttgagaattacagtttgggatgcccttatttatgacttatttatgagccgggaggactgcagaaataatttatgcttcattagccacagattattcttcttagtcctgaaactcttgcaagcgtaagtgaggccctttaatcagccctctgcctctctaagccccaagctaagacccaaaccgagattcctagtgcttggtgtcctcagtatccatcatgatttatgaacacaggtcacaagaaagctttgtgagatacacaaaatgcagtcagatatctactgaatttgtgaattgaacaataaaatttgcaaatttatttaaaagcctaaggaagaactatgtgtcttgtgtttttaaattttaaccaatgtgaattccaattgctaaaaccaaaataaacttctgaataggctttccgaaaaaactgttttgagtgctccagaaaactcacatcagcccttctgttttgcatcttctgttctgcaatagcctgataacatcagyatgtcctcaatcgctgctcagtgcttagtttagagaaaaatccccatgat

SEQ ID NO: 263905 - DNA, 408 bp, Homo sapiens
aggttttgctccaagctgtgcatttgggcccccagcaacccaacttaggcctgaaggtcctttagctgtgccatgtcccgcagggactgagcgtatacttcacgtagtgcagtcagaaatgcccatccaactctgctggcgaaggtgcaccccttcttggtggtgtgagcttccagttgcttcagtgccttcttcacacttgtgggagacctgtccactgcctcccatgtttccactggggcgcatccaagcagcgcctctgccaccgggtaccacagctcatgctgcakccacatagtctggttctctcactgtggagtgttccttactccactcaccttccccattctgcctggtgaacctatgcatccttcctttccttagacaagccttcccagaaaacccaga

SEQ ID NO: 263906 - DNA, 519 bp, Homo sapiens
cgaagagatgcaatatgacatggcaaaaagtggccaagaaaaacagaccattgagatattaatgaacccgatcctgttagttaaaaataccagcctcagcatgtccaaggatgatatgtcttccacattactgacattcagaagtttacattataatgaccccaagggaaacagttcgggtaatgacaaagagtgttgcaatgacatgacagtctggagaaaagtttcagaagcaaacggatcgtgcaagtggagcaataacttcatccgcagctccacrgaagtgatgcgcagggtccacagggcccccagctgcaagtttgtacagaatcctggcataagctgctgtgagagcctagaactggaaaatacagtgtgccagttcactacaggcaaacaattccccaggtgccaataccatagtgttacctcattagagaagatattgacagtgctgacaggtcattctctgatgagctggttagtttgtggctctaagttgtaaatcccacagagctt

SEQ ID NO: 263907 - DNA, 616 bp, Homo sapiens
ttttgtggcagttcagccactcgcatgataaaagtctgtgtctgttttttcacaatttcacctctttttctacaggagataagactctcactcaaagcaatcttagtagatttgaggctcagtatctgcttctgaagctgagagacagaatccttgagttcataattttctttcatcactttatccactgaacttaggagcaactaacagcttcatcrtgttccttggctctccacatacagtcaaaggtattatatatagagtcactaagctccttgcctctcatgagcggtgaatcaggagtgtcgagtgcatttattttgcataagtctctaaacagttaatgccaaagactatcagtattttccatactattagaagtgcagtccttagcattttggggtctaatcatattaagcagctaactccagaaaccccaaaaccaataaaagaattccatccttaatattctcttcctctagaaccactcctggtaccaaaatctgtattagtcagggttccctagagggacagaacgaacaggatagatgtttatatataaaggggagtttattaagtattaacttacatgatcacagggtcccacaataggttg

SEQ ID NO: 263908 - DNA, 622 bp, Homo sapiens
tgggatgtctttgcattttctggtgtccttttcaactttttaaatccatgttttatagttttcactttagagatcttttacttctttggttaaacttayttcaattattttataatattttgcagctactgtgaatgtgatcgctttctttctcagattgtttgttgttgatgtataaaaatgctattgatttttgtatgttaattttgtgtcctgcaaacttactgaattcatttatcagttttaacagttttttgatggaatctttagatttttctaggtataagattatgtcacctgcaaactaggataacttgactttctcctttccaatttggatgccctttatttgtttatctttttcttgcctaatttgtctggctaggacttccagtactatgttgaataaaagtgatgaaagtgggcatcctttccttatttcagatattaaaggaaaggctttctgttttttcccatcagtatgatattagctgtgggtttgtcatatataacctttattgttttgaggcatattccttctacacccagtttgtgtaagttttcatcatgaaaagatgtgaattttaacaaatgctttttttggcatctattaacatgatca

SEQ ID NO: 263909 - DNA, 619 bp, Homo sapiens
ggaagatttatagagaacattggaacttaaacactgctctagaactaaattgtttcccagtctgagaaagacataaacaggcactgcaacttaatcctgatcttttagttgtttccaggccagaggagggctccatgtgagcacctgggctttgtgaaaaacctggctaggaatttgggccttcccacagattgtgccccctgtggcgctatgataccagccaatctcttcagtgcggtaccctcactgtttggagcactgagtagacaccatgattcatgtgccagtcactgcagtcaacatctcaattcaccccaggtggtctggtcctcctggcactcccaatagttcctatgggaagggaccagaatggggcttcccatgaaaactcccagactagtggtggggtcagatgttcacctccaattctctcctctcacctcagcaactatgggtgtaaggaaatgttcccggaaataagccaggttcggctgctttttcttgtggcccaataacgagaagcagacaaactagawaagaagggaatttattgctgttacaggatacagggagaagaatggagataattccatcagaccaactcaaagtgttacaattt

SEQ ID NO: 263910 - DNA, 424 bp, Homo sapiens
gtgttttttgccttatgtatagcttagaataacacatagataatatcacactctctatgttaaagtatcttaaaagtaaattacaacatcataattctaatcaagaaaaatgagagtaagcaaaatcacacaaaattgaaaacaaatcagttacagagagtgagaaaattggaaaaaaaaygagataacaagccttacaacattatgcaaatgcatttaaaacctagaaaatattatttaaaaaatatatatttataaatgatcaaaattgactttaagtagtaaaagaaaatggagcaagaagcatagaaaatcctgagaaaattattgaaaaactgtcttctaaaattaaaaaaataacaaaaatgacatggtagtctcacatcttttactggttcattagttcataactttaaaaagcaca

SEQ ID NO: 263911 - DNA, 594 bp, Homo sapiens
aataaactataacatcatcttacatctggacagtttatactagaaacaggtgctttgaatcacttcaaactagaaactctgattttcagaatctccagaggtttctctaaacagtttttatattggcctgcaagttttgccattytgttatttttttccacctggatggttgttcagtctgtggtagaaagagcaacagtgattatttgtgatatgggttgtttattttaactgtctagtcaaataagccctcatgtttgcagtctcaggtgtttgttgatgatttggagttaaaggctcactctgaaaagagcttggcttctttgggaattcttttattgttcaaatagcttggtaattttccaggttaacagggacctaaggcagataaaatatctctaataaggtattttcccgtatctcttgaataaaaatatattgcttgcccataggaggttttagctaccagtatcttaattggaatgaggaggataatttacatctatagattgtttaaaaaagaaactttaagaagtcagggtcctgccccaaagttatatatgacatgtatgggatctggttaaagaaatgtat

SEQ ID NO: 263912 - DNA, 596 bp, Homo sapiens
aggtattttcccgtatctcttgaataaaaatatattgcttgyccataggaggttttagctaccagtatcttaattggaatgaggaggataatttacatctatagattgtttaaaaaagaaactttaagaagtcagggtcctgccccaaagttatatatgacatgtatgggatctggttaaagaaatgtattatctatgggaatagttccaagatggtctgattatataattcatagcataaattaattaaattttttagcacatagcctaatctctgattgtatcttgggaaatactaacctctctagcagtaaaggacaaaaaatcttggagttgttttaactgatattatttttgcacaatttggacatagtatttctgaggactgacccatttgataaaaatgacataataaaacaaatacctgaagtcctcctctcttaatatatctatctacataaaatttaaagcagatagcataaagtgtatatttatcatctattactgtgtagcaaattataatacaactcaatggcttaaaacaacaaacatttactgcctcatagattctgagtggagaatccaggaatgactta

SEQ ID NO: 263913 - DNA, 438 bp, Homo sapiens
taatcatcaatcttttaatttaaaaaaacacaacagagaagtaaaaccttgtcatcacttaaaacagtgccagtttctggctatttataagcaaaaatattgaaactggatcccttccttacatcttatacaaaaattaactcaggatggattaaagaataaaatgtgaaacaccaaaattctttattttttggaagataatacatttgacacragtagcataaaaaaacttatcaaactcaatttattaatctttttattacaaaatcctgaattaaagtatgaactcacaggattcagctgtaaattaaaagaataatacaacataactaatcaaggttctttataagaaggtgaggatgatataaataatcatcaatcttttaattaaaagcacaacagagaagtaaaaccttgtcatcatttaaaacagtgcca

SEQ ID NO: 263914 - DNA, 632 bp, Homo sapiens
cttaattcaagttgccttagtttttacctaaagacttttttttctgttccaagatttcatccctaatatcatatttagttgtcatgtctcctcttggctttcagtttctcagattttccttgtttttgttaaccttgataattcttagtaatggtcaaatattttgcagaatgtcccccgattgggatttgtataattctctcatgatactataggtttttaggaggaataaccacagagataaagtgccattctcatcacattatatcaaggaaacatactatcagcgtgatttatcactattgttaaccttgatcaaacctggctgaggtagtttccaacagctttctccactgcgaagttactatcttcctccttgttttccatgttttactggtaggagagctgtctgtrtaagtcagttttcacgctgctaataaagacatacccaagactgggtgatttataaagaaaaagaggtttaattgactcacagttctgtgtggctggggaggcctcacaatcgtggcagaaggtgaaaggtacatcttacatggtggcaggcaagagagaatgagaaccaaacaaaaaggaaaaccccttactaaaccaccagatcttgtgagacttat

SEQ ID NO: 263915 - DNA, 621 bp, Homo sapiens
agaacttaacaaataataataatcatttatttttaacatttgtgggtacagaataagtgtatatatttatgaggcacatgaaatgatttgatacagacatacaatgtgtaataatcacatcatataaaatgggatattcatctcctcaagtatttatcctttgaattataaacaaattatacttttagtatttcaaaatgtataattaaattgttattaactataatcccctcttatgttattatatcctaggttttattcattcattctatttattttgtacttattaaccattcccatctcctccgcaacccaaccaatacccttcccagcatctggtaaccatccttctactgaatctctatctttttttatggctgaatagtactctattgtgtatatgtaccacattttctttatcccttcatttgttcatggacatttaggttgcttctaaatcttgsccattgcgagcagagctgtggcaaatatgagagtgcagataccactcaacataatgatttcattttggggagttacctactcagcagtgggattattggatcacatggtagctctatttttagttttttgaataacctccaaactgttctccgtagg

SEQ ID NO: 263916 - DNA, 621 bp, Homo sapiens
agaacttaacaaataataataatcatttatttttaacatttgtgggtacagaataagtgtatatatttatgaggcacatgaaatgatttgatacagacatacaatgtgtaataatcacatcatataaaatgggatattcatctcctcaagtatttatcctttgaattataaacaaattatacttttagtatttcaaaatgtataattaaattgttattaactataatcccctcttatgttattatatcctaggttttattcattcattctatttattttgtacttattaaccattcccatctcctccgcaacccaaccaatacccttcccagcatctggtaaccatccttctactgaatctctatctttttttatggctgaatagtactctattgtgtatatgtaccacattttctttatcccttcatttgttcatggacatttaggttgcttctaaatcttggccattgcgagcagagctgtgkcaaatatgagagtgcagataccactcaacataatgatttcattttggggagttacctactcagcagtgggattattggatcacatggtagctctatttttagttttttgaataacctccaaactgttctccgtagg

SEQ ID NO: 263917 - DNA, 516 bp, Homo sapiens
atgtctgttgcatttttcagctccagactttctgcttgattcttttatattatttcaatcccttcattaaatttatctgatgraattctgaattccttctctgtgttatattgaatttctttcagtttcctcaacaccactattttgaattatctatctgaaaagtcacatctttgtttctccaagattgttctctggttgcttatttagttcattttgtgaggccatggtttcctggatggtattgatgtcagtagatgttcttcagtatgtgggcattaaagagttgggtatgtcttgtagtcttcactgtctgggcttgtttggacccatcctttttgggaaggctttccagatctttgaaaagacttgggtgttgtgaactaagctgtgtctgctttagggagtacctaagcccagtaacactgtggttcttgcagactcatataggtaccatcttgatggtcttgaacaagatccagggggattctctggattaccagaaagagtctcttg

SEQ ID NO: 263918 - DNA, 541 bp, Homo sapiens
gaatattagagatagaaaaaatgccagaataaatgtgtacaaccttcacttttatagaggaggagactgaggctcagctaagtattcagttggatagttttgtgtattacagtaacaggatartattttaaaaatactttcagaaatgttttccttgctcaagaagatgtctcaatgtgtcaatctgaagacagcttcatagatctctgcattccccaataaggtgtgaagaaagcagccagaacatccaaatcctcaagcagttacaaacatttctagagctctgatggtttggtagaaacctgatcttgggatagagaggccacatttagggacaagaggcttttgcaagggccattgattttagcagttggtgccagtaaatgcctaaatcatcagatgagactaaccacatttgagtgggtaccaacaatggatgctcagtgaccatgaagggtgtgaaatatctcagtccaacaagtccaactcagagatatctctgagtccaacaaggactcagaggactgcacgtggaagagtc

SEQ ID NO: 263919 - DNA, 467 bp, Homo sapiens
ccttctcttattctggatatgcagagatgtccagtacaactgcataaaataaaggaagttagactgtacgagacaaagctagaggagttagcaggaaccagggagccatgttattttatacaaaaccatagaacaatttatttatttatcattttttctttatctgccaattaaatatttttaaattaaagacatagataaataaattagggaaaaacctgtccatgttgtacaatgtgctgatttgatatatgtatacattgtgtaacaatgatcacagtacattaattaacacatccatcattacctatgctgtacattggatacacagaacttgtccktctcataactggaactttgtaccctttgaccaaatctccctatttctcccagcccctagcccctggaacctatcattctactctctacttttattagtttgattattttaaattccacaaataagg

SEQ ID NO: 263920 - DNA, 623 bp, Homo sapiens
tttaattgtaattttaatgttttaatattgttttccatattgggtgtaccactttacatttccaccaacagtatacaaggctgaaagccayagaatagttttaagtagggaatgagacataaaaagatttgcattttaaaagatccttttaactgcttgagaaaaaataattatcaaaagggcaatggcagcagagaagaagagagatgattggggttcaaactttttagaagttagcctctattagatttcgcgaataagcagaggtaaagagtgatggagaagaagaggacatcagtgaatcttgcattgtgagcatgaccaagtatgtagtagaccaagataggaaagtcagagaaaggagcagatgtgggtgctggaaaataaagaattcacatgtgtgagtctatagctaagatgacaatttgagtgtggaaatatacatttggggaccataaacatctggatggcatgtaaaatgataacgggggtaagatggcctgggaaagagaaaaatttaaggagatagagcatgacatttctcggtagagtggagataattagtgtgaaagcctaagatggaacgtaagcctggaaaagtcagaactcacttataaagagga

SEQ ID NO: 263921 - DNA, 453 bp, Homo sapiens
aatggttaaatcttaagagataggaattaccattctctaaaacataaaagtcataaaagcatcaacatcatgcaatctacatgctattattaaaattgtactaaaaattcattagacatttgttactaaataaaaaaatgtaaaaataattaattcaaataaatcaaagttgaacaaatatttaagagacttaagaaaaataggtagaggagataaaaatttttaaatgttaataagataaacagaaaaaagtacaactaagaactctatctaaaagctagttctttccagagagaggtaaactactttctawccttttttaaagtaacctaacacaatttagtcctttttgatacataaaggtagctcccaaaatagttacatgtgacagataaaaattggcttctaaagcctcattatcagttatcaatgacaaatctcagaccaaaattt

SEQ ID NO: 263922 - DNA, 554 bp, Homo sapiens
agaatcccctaacacttgtcctcctccataaagatagccaaaattttgaaaaaataaaaataaaaaaagaaccacattgtggtgaaaataactaaaggagagtgccagagtatatacaaaaagtracagaagcactagtgagcacagaaactcaggatagcctcataaacaatgaaaggaaacacctggatgccaccacctaccctatcctccagtcaggatcagcagcagggaagaggtaagcaagaggaccccagcatccttcatccaccaccttggacacttacagttttcaagactggggaaccctgcagtcctcatgggcactaaacccaactgagggagcttcctagagtccacacagctgtgctctctccagagaaagagctgacactgtgcccactccctgtcccccatctagctattacactatgttatcttgaaactggaaatactgctgaagtgtgtcttggctctgtgaaatggaatagccacaacacccttttatccctaaggctaagctgccatggaaccacctctccccaacagtggtc

SEQ ID NO: 263923 - DNA, 526 bp, Homo sapiens
gcaaattgtgcattagagcctccccttcatcaccttactcagcttcatttgccagggtttgacacaatgactctatttttaatcttacaactttcacatactattttcgccttaaggcacatcatatcctccttgagttttggaaygctaggcagcacttcagccctatgtttggaagcctttcaaaacagcaaagtcaccaacacagagcacaaaaatgcaaattcatagaactaaatataccataaaaagaacacttgtttacagtacaagagctgaaacaagaaggcagagtgttgccctgtaggaccttagcaaggaacaaacacattgggcaactcaaacttctcactgcactctgaatagctgtgaatgacctccaaagcactgtggctattggtttaggggttacaaataaatgtgagtgagtaggtgaatttgcaaatataaaatctacatataatgaaggtagactatgtcttccaactaaggtctatggaacagaatccagataactgaaatccat

SEQ ID NO: 263924 - DNA, 575 bp, Homo sapiens
agtggactcttacctgccaatgtgcaaagaatagytgggaacaagaaaatggcaccaagactgtagaactcctaactagaaaggtccagatattggacagacggtagtttagaacaggcctctttggatagaatttggactttcatgggggaacatatgctattttaaaggaagaacgttatgtttatttctcatcatgtctctctgggatctttaggacaggcatacttcattttattgctcttcactttattgcattatgcagatttattttggttcaaatttacagccttttgtaatttgttcttcattattaattgtctgcgatgctgactctccagctatgctctgagctcctaaaagaaaataaccatccttctaccctctgtgcctaaaagactacatggtacagaattatggcttagaaaatgtaattccacttgaatgactgcagtgatccattttcaaggggaaacttaaggaaccactcaaatgtgtaaaggttattctatagttatgtaatttgagttctagctataccaaaggacatttttatatggcaaccatatgggaag

SEQ ID NO: 263925 - DNA, 645 bp, Homo sapiens
catggggtacagttattatctttttaacacaatgaactgtggccaagagttgaaaacataaaatgtgaaacatgattataaatatctactcaagttcagagaggttataggatacacatttttaatggcttaaaatttggggtagaaaggaacatcattctagaaatgtgggatttctaaaataatatatcagaaaataattttattttccaaaaaaatagcacttgtgttaaattctggaatttgaagttgaaaaagcaaatttcctcatgtaaggctcatagttgatggcagggacataactaaacagatacaaatgtttgtgtgaacaagaaggctgaaytatatatagggcaggacagaaacactgaaaagatagtgattacttgggaaaggcttgtcagagaagtggatgctgttggggcctcagcaaaatgccctttaccagttggtaaacacaagccctgactcttgtagtgcttgtacaaacgcaagccctgactcttgtaagtgctgactgatgacaatttttagctccccctttctctggagaattacttttgtcaactggggatctgcctccgtgatacactcagcatcttccctgtaggggagaaaggatttcttttttctcacagatccttt

SEQ ID NO: 263926 - DNA, 645 bp, Homo sapiens
catggggtacagttattatctttttaacacaatgaactgtggccaagagttgaaaacataaaatgtgaaacatgattataaatatctactcaagttcagagaggttataggatacacatttttaatggcttaaaatttggggtagaaaggaacatcattctagaaatgtgggatttctaaaataatatatcagaaaataattttattttccaaaaaaatagcacttgtgttaaattctggaatttgaagttgaaaaagcaaatttcctcatgtaaggctcatagttgatggcagggacataactaaacagatacaaatgtttgtgtgaacaagaaggctgaactatatatagggcaggacagaaacactgaaaagatagtgattacttgggaaaggcttgtcagagaagtggatgctgttggggcctcagcaaaatgccctttaccagttggtaaacacaagccctgactcttgtagtgcttgtacaaaygcaagccctgactcttgtaagtgctgactgatgacaatttttagctccccctttctctggagaattacttttgtcaactggggatctgcctccgtgatacactcagcatcttccctgtaggggagaaaggatttcttttttctcacagatccttt

SEQ ID NO: 263927 - DNA, 557 bp, Homo sapiens
agatcagagatgagaaattatttaagtgttgtatagactctaataatttttcatacggtgccaccagatcgtctttccctgaatttctagctttctgtccttgctataccctgctcaaaaattatgtcctgctcaaaaattaaaacaaaacaaaaacaagcacacaaaaatactgacaaattcattgtagcagctggcaagctagaaacttttcagcaaagtccattaatgctagaaactcwtttgacggtactcataaactttggctgtggaaattaagactatgtgccagatttattaggaattctctccaggttttgaagttttactattgtttgactgtgaaagacttaattaatcattaacatgccttacctgatatttcgcaaagtagccagaaaaaatgatctcagcacttagattccaatttgtatctcatgctatttctcgggaaaatctagtccaacttgtaaatcttagagttttaaggtcaaattcggagtttctgttctcctgtaatgtggctagctaaggaaatagtatcctaagatatttaa

SEQ ID NO: 263928 - DNA, 618 bp, Homo sapiens
ctggggagtggcatgcagataagtttggagttgtaaaacatcaagacaagctcaagacctacagattgttgttttcagctgaagtgtaagggataagtatcaatgatgacagattaagatatagttagatttcatatatatatttatatacatggatatgtatgcacatatatgcatatgtatgtataggatatatacatatgtatatatacatatacagcaggcccttgaataacattgtttcctgacaatgttgaggaaaaaaaaattgatycccagccaacatcattgtctatgtggagtctgcatgttcttcccacgtctgtgtgggttttctcctggtattctggctgatttcctctcatatcccagagctgtgcaggttaggtgaattgagtgtctaaattgtttcagtctgagtgagtgtagatgtgtgaaagagtgtgccctgaaataaaatatcccatccaggattggtatctgctttgtaccctgcactgctgggttaggctccgactacccaagaccctgaactgaaatcagtgtattgggaattgaataaatgaatgagcacaaattattgccaaataaaaatttgtaaagtatagaacactcata

SEQ ID NO: 263929 - DNA, 618 bp, Homo sapiens
ctggggagtggcatgcagataagtttggagttgtaaaacatcaagacaagctcaagacctacagattgttgttttcagctgaagtgtaagggataagtatcaatgatgacagattaagatatagttagatttcatatatatatttatatacatggatatgtatgcacatatatgcatatgtatgtataggatatatacatatgtatatatacatatacagcaggcccttgaataacattgtttcctgacaatgttgaggaaaaaaaaattgattcccagccaacatcattgtctatgtggagtctgcatgttcttcccacgtctgtgtgggttttctcctggtattctggctgatttcctctcatatcccagagctgtgcaggttaggtgaattgagtgtctaaattgtttcagtctgagtgagtgtagatgtgtgaaagagtgtgccctgaaataaaatatcccatccaggattggtatctgctttgtaccctgcrctgctgggttaggctccgactacccaagaccctgaactgaaatcagtgtattgggaattgaataaatgaatgagcacaaattattgccaaataaaaatttgtaaagtatagaacactcata

SEQ ID NO: 263930 - DNA, 659 bp, Homo sapiens
gtgtctaaattgtttcagtctgagtgagtgtagatgtgtgaaagagtgtgccctgaaataaaatatcccatccaggattggtatctgctttgtaccctgcactgctgggttaggctccgactacccaagaccctgaactgaaatcagtgtattgggaattgaataaatgaatgagcacaaattattgccaaataaaaatttgtaaagtatagaacactcatacaaatgcatgacaataaatgatgcaatcccaaagtgctcagtgagcccatgatatgttattgtttggttttgaactgcatggtggtaggaggggctcytcaaaatttttgctttgcaaacatttatttcatgacttaacccaccattgtcatgaccacagtcactcactgattcaccaaaaattgagtaaataattcttgtttttattaatattttataaatatatgtattgatgtatgtatagttcacagttcagtgtataatatttagaagtgtttggcctctatttataagtttggtgatatttttatgactagaaatatgccataggagcttaactcttgtttatgtcaattagcctatgtagtttccttatatgccgttttgcttaaactcagtttccaagggccaaagatgacattgaggactacttattg

SEQ ID NO: 263931 - DNA, 402 bp, Homo sapiens
gaccaaaactaaacaaatacacaaagctgagaaaaaaatcaatgaaaaaatgctgaaaacccaaaaggccagagcgcctcttctcctccaaatgatctcaatgtctctccatcaagggcacagaaatggatggaggatcagatggatgaattgacagaagtaagcttcagaagatgggtaataaaaaaactgtgctgagctaaatgagcatgttctaacccaatgtaaagaagataagaaccatgataaayggatagaggaattactaactagaataaccagtttagagaggaacacgacctcatggagctgaaaactacagcaccagaacttcgtgaagcatacacaagtatcaatagccaaatcaaccaagtggaagaaaggataacagagtttgaagac

SEQ ID NO: 263932 - DNA, 586 bp, Homo sapiens
gcaccaagctattaaaactattatttatctattttatcatctgttgggattattcccccttttactcttctgtttaaatatttcttttatcctggaatatttgtttttccacataaaatttagaattactttgatcaggtaaatacttttttaaaaaaaattcatatggccttctatttgtaatcagtttaggcataatagaacaagcttttatatatttcaaaataaaaaggtctcatatctagaaagtggcttaatggccatttcatcttggaacatattcctaaccattatccagtgctaaaaacaatgttgataggcagctgaacacaaattttattaaaaatgtaaaaatacagttgtgaaggcattggcaataccatattgaccctgttagatgtcctaattaggacacaagagacrtttcacttacaatgtatgtttatgggccattttttaaaggaaaataatcataaggtagatggacatgaaagagtaaagcaaattccataaatgcttggagctaggagagattgtaatgaatgtttaattccactgtcggattctacagatggaggcagtgagg

SEQ ID NO: 263933 - DNA, 543 bp, Homo sapiens
agcaaccatcaacattgaggcaagaccctccactggcaaaatgattatgactcactgaaggaacagatgattatttgcatttttaacaataaggtatttttaactaaggtatgcacagttttttagatgtaatagtattgtatgcttaatagactatagtataaacatatattttatatgcactggaacactaaaaatttatgtgactctctttattagatattctccttattgtggtagtctgtaactgaatcttcagtatctctgatgtaggcctgcattttgaaaatgacccaaaaagcaagcactaaagaaaccataaaattaatatatggttaataactccattttggctctgcaatttcttcagattsgggatgggatctgttctcttggctttctttgagtgttcttggttcctggctgagaactgtgctacatacaaactctgctgataatctttcttggagtatttgtattctgtgctctgctctgtcatctctgtagtcttaaatgctggtgcctagctgctgtcccctaacc

SEQ ID NO: 263934 - DNA, 609 bp, Homo sapiens
atttttaacaataaggtatttttaactaaggtatgcacagttttttagatgtaatagtattgtatgcttaatagactatagtataaacatatattttatatgcactggaacactaaaaatttatgtgactctctttattagatattctccttattgtggtagtctgtaactgaatcttcagtatctctgatgtaggcctgcattttgaaaatgacccaaaaagcaagcactaaagaaaccataaaattaatatatggttaataactccattttggctctgcaatttcttcagattggggatgggatctgttctcttggctttctttgagtgttcttggttcctggctgagaactgtgctacayacaaactctgctgataatctttcttggagtatttgtattctgtgctctgctctgtcatctctgtagtcttaaatgctggtgcctagctgctgtcccctaaccactgtcccacaaaatgagtacggaaaaatctgcttcttattagaagttaaaatggccatcctctagaactttacttgtaataatgacacctcacatagtgataaccaactgaattgattatattatcatatttaagagtgtgtt

SEQ ID NO: 263935 - DNA, 558 bp, Homo sapiens
taaagaaaacatggtacatatacaccatggaataccatgcagtggaatgttttaattggaaatgactgggtagttctgctacctgcctgagatgtcatggtggaacaggaaaggaaaatttgacagagaatggttaaagggagtgactggaaaaaaaaatagcactgttcatgtttggatgcaaagaattcagactctaaaatcaattacattaagtatacctttagggcttttccctttactcctttgatataagaaaggcggctgggcgctgtcgctcactcctgtgattccaacactgggaggttgaggtgggtggatcacctgaggtcaggagtttgagaccagcctggccatcatggtgaaaccccatctctactaaaaaatacagacaaacaaacaaaattaatcgggcrtggtggtgggcacttataatcctagctactcgggaggctgaggcacgagaattgcttgaacttgggaggcggaggttgcagtgagctgagatctcgccactgcactctagtctgggtgacagagcgagactttgtctcaaag

SEQ ID NO: 263936 - DNA, 392 bp, Homo sapiens
tatataatttgtttattgaggaaatagaaatgagtaagaatctattcacctattcacttatttatagctagggtgaaaatgtaatgagggacatgagrtcactaagatacattcccagactaagcaaccagcaaactcaaagatggaaacatgggcgttccactaacactacttctattttgtaggaggaaaactgacaatttgaaatttgggttcaaagtcttttcttgctgataggtgccacctttgtgtttgactaagtgtgtttttgaagtgggcagtttcaattaaattttccaaaacattttttgtaaacctttttcttctgataacttagaaatcagacaacagccacccctgacatagtttgcagcatgtcttcaagaagaaac

SEQ ID NO: 263937 - DNA, 590 bp, Homo sapiens
tatatgtatgtttattataatacataaatattgaatgtattatactttataatacataaatattgaatgtattatactttataatacatacatattgaatgtattataatttataatactttacaacatatattcatactgtatatatgtatgaatatatacgtacagtatgtatatattcatactgtattaattgaatgtatatttaattatactttcaatttcattttatttgtgaaataccacccaatttattctgatgtgcaaagatgggaacaagtgctctagtaactaacatagtacccatcataaagcaggtactcacttcactctttgggaataagccattattcagaaaagaaactagaaatcaaaakatttgattattttacttataaatacttttcagtttgggagtaaatgtcaaaatgtatttgtattgttacatgtattttatgtggcatcttatacacaaattgattatgcacatatgattaaactcaatagagattcagaaagtccagatttgtttttaattaatgaagtcaatgtataaagaacagcaagcacaacaggcccgcatatgagga

SEQ ID NO: 263938 - DNA, 590 bp, Homo sapiens
tatatgtatgtttattataatacataaatattgaatgtattatactttataatacataaatattgaatgtattatactttataatacatacatattgaatgtattataatttataatactttacaacatatattcatactgtatatatgtatgaatatatacgtacagtatgtatatattcatactgtattaattgaatgtatatttaattatactttcaatttcattttatttgtgaaataccacccaatttattctgatgtgcaaagatgggaacaagtgctctagtaactaacatagtacccatcataaagcaggtactcacttcactctttgggaataagccattattcagaaaagaaactagaaatcaaaagatttgattattttacttataaatacttttcagtttgggagtaaatgtcaaaaygtatttgtattgttacatgtattttatgtggcatcttatacacaaattgattatgcacatatgattaaactcaatagagattcagaaagtccagatttgtttttaattaatgaagtcaatgtataaagaacagcaagcacaacaggcccgcatatgagga

SEQ ID NO: 263939 - DNA, 609 bp, Homo sapiens
aggagtccaaagagatcttgtttatgagagacaaatttatcaacatttccaatattagaattatactggagacatttaaaaaatttgattatatatatatatatataacaataataaatgtattatgatttaacatattttttgaaaaattattttacaaaaattttaacatgttttattgttttaaattttttcaaatccttttaatatttggcttaatagggaagacttgtattttaacatatgtatttacattaaatcagttgcaatatattgttttgcttgaastatataaagaaaattttacctcataatgatatgtagttgaaaaaggatagaatattttaatagccttttcaaataattgttgattttctttcatcttatacccaactgtgatgaacaatagtatctcaatggtcatttgtaatgtagaatatggagccatatcaataagtttcttgtatttaaaatccattggtctatgtttcgctgagaatggatcttagatgcaaacatagttttgtagcatcatgcgttggtcatttggaaaatatttatttcctgaggtatgtaaatcttaaagatgtcaatgtagtagacaatgtc

SEQ ID NO: 263940 - DNA, 552 bp, Homo sapiens
tgtttcttcacatgcaagttaggggtcattactggaggaatggtcttggtggaggaatggaaagtccaggctggaaggggcagtgggtggcaagcaggccagcaggaggccaaggcacagggcagagaggacagtcttccttgttctttaacacactccctcctgccaccttgtgatgaagattcctgcttccccttcamcttccaccatgactctaagtttcctgaggcctcctagccatgcttccaattaagcctgtggaactgtgagtcaattgaacctctttcctttataattacccagtctcaggtagtattctttatagcagtgggagaacagactaacagacattctcatggactactacccaccccttgccaaggagacagagggaccataattcagaaacaggtgtgcaacctaaggcctccgctcctgctgagggtgtatttctactgggggaaggaagggcaggaaaaaagaaaaggagtaacacatttcagagtgaaaatcactaggaagaaataaaacagggtgatgtgatagaaagcc

SEQ ID NO: 263941 - DNA, 587 bp, Homo sapiens
tggttcagcttggagctgatgctcaggaggcctgtgctgggagtgcagggaggtcaccctggcaaccaggtagctactgagacaaaaaggacagggaggtagcaggagaagacattcatgagctccctccatccccccagggaccgctccattgtttctgcctgccctgcagaaacccactccttggatgtaaccacccttctatttctccatggagctgaggaggccccactccctcgatgccagaagcaggcaaaagacctgggctgccactcagtgccatccacatcacaggcacggcgagtggttcagagatgggcttgagacccatgctcacatacccggccctctttccatcartgtggtaggatgaggacctgggctaccctcaggctccactggggacagcctgcccgagaagggagccaacagaggagggtagggctgaagggtgaatagggacagcagcagcctttgggatccagctgagccttctgctggctctggctactttcagttgagtcactgtcacatgccataaagagtcctgcccagggccagctgcataatttacacctagtgcaaag

SEQ ID NO: 263942 - DNA, 530 bp, Homo sapiens
cttggagatgaaagacttggaggcaggggaataggggctgccccattcctcatggtctcagtttaatccccctggctgcagggccaggtgagggcagacatggaattaggtctctacgccaagtttcaactgcagacacccacccagctcagataaggacacttttgaggcgtgggatttacaagccaatgagacagctggcctaaagtcaccrcatttaataatcatgatgaaataacattaaacacagtaggtattagttataagcatggcaagtgaaatctagttgtttttgcagaaaaattttatttaatggctcttgcaaagtcccctgaattgttgagcatggggctggggttggctggagagtcacagcttctgtgaggttatactgcagtaacaaagaactccccaaatctcattgatttatatcaacaaaggccctattccccacttatgttacatggccgctaaagattgctgtgggtcacgtgagactctgcttcatgtgtctttgttattcccagatc

SEQ ID NO: 263943 - DNA, 530 bp, Homo sapiens
cttggagatgaaagacttggaggcaggggaataggggctgccccattcctcatggtctcagtttaatccccctggctgcagggccaggtgagggcagacatggaattaggtctctacgccaagtttcaactgcagacacccacccagctcagataaggacacttttgaggcgtgggatttacaagccaatgagacagctggcctaaagtcaccgcatttaataatcatgatgaaataacattaamcacagtaggtattagttataagcatggcaagtgaaatctagttgtttttgcagaaaaattttatttaatggctcttgcaaagtcccctgaattgttgagcatggggctggggttggctggagagtcacagcttctgtgaggttatactgcagtaacaaagaactccccaaatctcattgatttatatcaacaaaggccctattccccacttatgttacatggccgctaaagattgctgtgggtcacgtgagactctgcttcatgtgtctttgttattcccagatc

SEQ ID NO: 263944 - DNA, 486 bp, Homo sapiens
ttacagaaaatcactcttgacattgtattgcattttctctcaaacttttatatggcataaaacagggcaattcaaactgtggtctgcaaactgtaccaaactatcaacttgcaatagattgaaggttgtaaagtcatccctccgcctcgctagtttgaggagcactaatatagatattattttaataaaaatagaattgtactccactcacaaaaccctacatcctgttttgggactgcttcctgctccatctgcatggtggacctctcttgctatgacacgctgtgttwttttattttattttattttatcttttattttattttattttattttattttattttattttattttttgagacagagtcctgccctctcaccccggaaggaatgcagtggcacaatctcagctcactgcaacctctgcctcctgggttcaagggattctcctgcctgagcctcctgagtagctgggattacaggca

SEQ ID NO: 263945 - DNA, 211 bp, Homo sapiens
acttgctcccctaggagaactctgagacccgaattcttctcctggaagccagtccctatgacaggttcccactacatgctgccaggctccttggcattatagccacagttctttatcctgctttcagatcccttcctgatctggtctatcttataattgtcccagctcaggtgatgarcccattaccaccaactcctaatccccaataccc

SEQ ID NO: 263946 - DNA, 560 bp, Homo sapiens
tctgtgactcacaatgggatctaggttctgtcaacactttcttgtggcctagggtctcacacaaacaataaaagcatggaccatcttctgacaggtggtcacatgaatggcacttccttgccaccacccacaggtgggagagtgtctttaacataaaatgaacaggcacagggtgtcacccccttcatgagggtgcccactctgggtacagggctttgagactccacaggggaaatcagtctacctggaaaagcrcctctgttcccagcagttccaggaaaccccagggcctcccaacatgtggtcttttctgctccagggagaacaatgttttcagagaccgccttcctgtcttgtggtcgggctattcttgtgcctcggaatgcctttctgctcagtgctgacagccgccacctctctagacggtgccaggcctctggagccccgcttggtgggtggtgagggctcctacagcctccacgcccacctgggctctggtaggcatgctggggaatgcagagcatgtggcgctggggggctcctctctggcattgcccagc

SEQ ID NO: 263947 - DNA, 560 bp, Homo sapiens
tctgtgactcacaatgggatctaggttctgtcaacactttcttgtggcctagggtctcacacaaacaataaaagcatggaccatcttctgacaggtggtcacatgaatggcacttccttgccaccacccacaggtgggagagtgtctttaacataaaatgaacaggcacagggtgtcacccccttcatgagggtgcccactctgggtacagggctttgagactccacaggggaaatcagtctacctggaaaagcacctctgttcccagcagttccaggaaaccccagggcctcccracatgtggtcttttctgctccagggagaacaatgttttcagagaccgccttcctgtcttgtggtcgggctattcttgtgcctcggaatgcctttctgctcagtgctgacagccgccacctctctagacggtgccaggcctctggagccccgcttggtgggtggtgagggctcctacagcctccacgcccacctgggctctggtaggcatgctggggaatgcagagcatgtggcgctggggggctcctctctggcattgcccagc

SEQ ID NO: 263948 - DNA, 560 bp, Homo sapiens
tctgtgactcacaatgggatctaggttctgtcaacactttcttgtggcctagggtctcacacaaacaataaaagcatggaccatcttctgacaggtggtcacatgaatggcacttccttgccaccacccacaggtgggagagtgtctttaacataaaatgaacaggcacagggtgtcacccccttcatgagggtgcccactctgggtacagggctttgagactccacaggggaaatcagtctacctggaaaagcacctctgttcccagcagttccaggaaaccccagggcctcccaacatgtggtcttttctgctccagggagaacaatgttttcagagaccgccttcctgtcttgtggtcgggctattcttgtgcctcggaatgcctttctgctcagtgctgacagccgccacctctctagayggtgccaggcctctggagccccgcttggtgggtggtgagggctcctacagcctccacgcccacctgggctctggtaggcatgctggggaatgcagagcatgtggcgctggggggctcctctctggcattgcccagc

SEQ ID NO: 263949 - DNA, 560 bp, Homo sapiens
tctgtgactcacaatgggatctaggttctgtcaacactttcttgtggcctagggtctcacacaaacaataaaagcatggaccatcttctgacaggtggtcacatgaatggcacttccttgccaccacccacaggtgggagagtgtctttaacataaaatgaacaggcacagggtgtcacccccttcatgagggtgcccactctgggtacagggctttgagactccacaggggaaatcagtctacctggaaaagcacctctgttcccagcagttccaggaaaccccagggcctcccaacatgtggtcttttctgctccagggagaacaatgttttcagagaccgccttcctgtcttgtggtcgggctattcttgtgcctcggaatgcctttctgctcagtgctgacagccgccacctctctagacggtgccaggcctctggagccccgcttggtgggtggygagggctcctacagcctccacgcccacctgggctctggtaggcatgctggggaatgcagagcatgtggcgctggggggctcctctctggcattgcccagc

SEQ ID NO: 263950 - DNA, 574 bp, Homo sapiens
tcctgtatgttgcagcactgttcacaatagctaagatttggaagcaacctaaatgtccatcaatagatgaaagaataagaaaatgtgtacatatacacaatggagtactrttcagccataaaaagagtaaggtccaggcatttgcaacaacatggaagaaactggagtgaaataagccaggcacagaaagacaaacattgcatgttctcaattatttatgggatctaaaaattaaaacaattgaactcatggacatagagactagaaggatggttaccagaggctggaagggtagtggcaggctggggaagaagttgggatgattaatggagacaataaaaaaaagtagctagaaaaaatgaataagacctagtatttgatagcacaacagggtgactatagtcaataataacttaattgtacatttttaatagaaaagaaaaccaccccatttacaataccatgaaaacaaataagatacttaggaatagattagcaaaagtggataagataaggcttatccactgaaaattacaaaccagtattgaaagaaagtatagaagacctaaatgaa

SEQ ID NO: 263951 - DNA, 473 bp, Homo sapiens
cttgcctcatattaatgtatactactatctgttaagtagcaattccacaattaagctcaggtgatttgaaaagtaaactttttattgtgtgtacagtgaacatggagaggttcttttatttttttaatgatactggttcatagaagactagaaattaagtaatatcatatatattaagtattatatgtgtatttaagaattttcaaaattgagcaaattttgaagaaaaaaatatggtttattacttttcttgcccattctaattctaaatctaatattctttctactcaaaatgtttaaatgtaagttccttgctaaccaattctttaatccctggtggacataaatgcttacctgcctttagtatttcaagctaatgcctaatatttcctaaygtctaatgtcaaaaatcaacccaagtaactttctttaactcttaaaaggtttgtcatcaacattacaatcactagatc

SEQ ID NO: 263952 - DNA, 588 bp, Homo sapiens
tgtcattttatactacgaaaataaatctataggatcaatttccagaagtagactgcctgggacaaaaggtattaaaaaaaagatattgccaacttatcctccacagaggttgtgctagttttataatcccaccagcagtaggtaagagtactcatttatttcaaaaaatttattgtgaaaacatttggagttttattagtctgacaagtgaaaatgccattaaattgtagttatcctttgcatttctcttcttatgagagaaggtaaccatcatggacaagtgctacaaagaaaagatacatagtgccatgartatctataataagtggcaatatgtaagctttccctgcaagaattccactaaagctgcaactttacagcatgaatgggagttaaccaggtgaagaggtactatacaaaaataaaaaataaaaaaataataataataaaaaaacctgtccttttcacagtgaaacacaggtttggtcccagtagagagaatgagaagggactgtggtgcatgaagaggttggagaggcaggcaggatctccatgtgttttattaaggcatatgatctgtattccagg

SEQ ID NO: 263953 - DNA, 542 bp, Homo sapiens
ctcattcgattggccaaagccagtcagatggatgtgatgaacttcagtgagggtgaggtagtacagtcttaatatgtgtgaggatagctggaatatttggaagcagcctaatgacaactgtactttcccatgttgagtggctatgagtctcatcccatcaaatcttggtgataccaatgagaaccaatttactttctcatatacaaataygaagttgacattttttccaaacatctgggacaatgaatattgctcttgatcaaatttcaagttattttcatttaagaattagacagacatactgtgatctctttttatgttacacatttctctcatactggcattttatctgcacatgatctggtgaaagcttacttggtaatgatggcttgtcactttcttccctgtcttgcagagttcatggtctcttttcaggagccagtcattctaatatcctagttcaagaaaacatcttcttctgtttattagttgttcaatttctgtagtcctttttcaaagtacttagcttcaggtggaagaaa

SEQ ID NO: 263954 - DNA, 562 bp, Homo sapiens
ctcatatacaaatacgaagttgacattttttccaaacatctgggacaatgaatattgctcttgatcaaatttcaagttattttcatttaagaattagacagacatactgtgatctctttttatgttacacatttctctcatactggcattttatctgcacatgatctggtgaaagcttacttggtaatgatggcttgtcactttcttccctgtcttgcagagttcatggtctcttttcaggagccagtcattctaatatcctagttcaagaaaacatctycttctgtttattagttgttcaatttctgtagtcctttttcaaagtacttagcttcaggtggaagaaagtttcctaataatttctaaattagaaattgtatgctattttctacctactgtgccatttgtttccaggagagtcagctgaggcgagtaactgtggatggatctagtgcctttttgcaggttattgccaaatattaatagtaatgacaacaaaaataatgacctattgtatgtgtatagacactaacagtttaaccatatgagatctcatttgatc

SEQ ID NO: 263955 - DNA, 607 bp, Homo sapiens
gttaattctgtgaatacacaaggatcaaagagtaacattcctcataatctccatccctcatctgccctagcctttgccatcgtgctttataaagtagaggctgcctttgttgctttaacaaacccttctacattattcccaatctagtcatcacaatcatcaaagtgggatccgagggattttagggttttggtttttgtaattcttgtattgcctctctgatgtgcaayagctcaggagatatatttttaatgttttattgttcttccagaaaaaggcgcaaacatgaaaagttcactaaacacccttggttcacttacttttctttcttaatttaaagggtatatcggtctcctaactttcggtcttctcagaatttctatggcatatgccaaagggcctattaagtaccagcagggaacactgcagacagacctttctgcctttataagtgtatacagctgcgcaggctgctgaccagctgctggggcagccctgacttgtgatcagatgtgccactgacttgggggcagaaggctatttctaatagcacttatcattctttatttgggaaatttgagccctgatttcagaccatgtgattgat

SEQ ID NO: 263956 - DNA, 584 bp, Homo sapiens
ataaataaccactttcaattcttttggccctgagctatctccattacttaatagaaaaacttagataaaaaacactttaagactcttctattcacattgaaataaagaattatctagatgataattcagataattcagtttgttcatagaattactttcttatcactctttttctactactttttctcaaatacctctctaatccaagaggcacttccaagaaattccacacattccttatatcccttttttgcttgtctagcaaagcttgtttgtatatatgcaccccattgtaaagcaggtatgcaggtatgtgggtgaaagtgactatgaaaagacttaatgaattctgggatttgtaatggtattgatgggtatctctgtatgtatatcaagagtgggcagaaatgtttggctggtgatggcaaatgactggctttctcttgtggatggactataggaagcactttctgaattatgtaatgatttggaccaaaaagtattttgctgaaatactcaggtaattgagatagcaatggttttatggcatgaattatccaraaaaatatcagaattacttatta

SEQ ID NO: 263957 - DNA, 569 bp, Homo sapiens
atgagtcatatgttcaaaattgtggtgtgctggtgactcaaatatataaatatctcagtttacaaaagttacttgactcttgtatctctgagtctataaaaatttatgctttaattttatatttgtaagaagttatctgaaatgctaatctaaatttaaagttcttaaaattatattatgaatttactgaattgtgatacaactttagacctagagcaaaatctctagttggagctactagtttgggtttttttttccacttgtacatttctatataatgaaagcatattatgtaattcattctwgattgtcttgattccccttaagttactgcttaactttaggaaacaatcaatttccttgagtaagtgctttacattggtacctagttttgacagcttcatgccattctaaatgttgaaaaatgttctcacagagagaattttgcttcatccctagaaggacatcatgacaaacacaaagaccttgtgcaattgaggttattacattgttagctctaaattgtcattatttggttctacatgaattgtctatgtagcaaggcagca

SEQ ID NO: 263958 - DNA, 609 bp, Homo sapiens
ttacattgttagctctaaattgtcattatttggttctacatgaattgtctatgtagcaaggcagcaaaatgaggggtaaaactagcaatagcaatttttcttttaaaaatgtttcctggatatcaatgtgttagtagcaaaactggcttaattttcaattcattagctttcaaagcatgttcaaaagtgagaaaaagaggcagagtaaaagtaattatgatagtaaagaagaaaaagaaagttagggagtccaccaccttaattatagagctacatccatgaaaagccaagtattcagtaaaaatttgtatttgtgtaaaactggtggctatcgcaataacttatgcatgagaaaggaggtttatacttctgcttaagctcctcttcaagctaaacgttatttctatcctcagctacaacttatatttttccctcgatagtttttaayattaattcaaacatagtgagtcctccttattcctctaattaattccaaaaaatgtcaattctaccacaacttcttctacacctgtttcttcctatcaattatcactttcacatcctagatcaagttattgttatagttcacattaattctattcctaatcc

SEQ ID NO: 263959 - DNA, 674 bp, Homo sapiens
gatgctattaatttctgttatatgtacattatcttatgtgggttttgttgttactgctgtggtttctttctctttttttaagagaatatctactgacctagccatcttccgtctctaccatgtggcataaagtttcaagacagcaggctgagttccatagccatagaacacatagaaactcacagccaagaaagacagggatcaagctcacaactgtgctaagaaatactaagataaccatctgcttccagctctgttagactacaaggggcattttgttgattagcctgctaaatgcttttaaagcattgactttgwttccacaggacaaaagtagttaatcaaagactacattagttaatgcaattttaactggaaagatgtatacaaatagatttcgacatacattgccaggatagtggaaactgtctctttttcactttacttgcaattttaatgtttctattgaaattatttatttcatttaaaaagtggaaacttagaaccacctgtattaccccctcacattgcacccacattgctgaagaagctatctatcctaggacattgggtattcatgttatttcccccatcgtgaactagtgaaagggaatgattacaattaagcacaacttagatttgagagaaaaagtaatctgtgttcagaaatcaat

SEQ ID NO: 263960 - DNA, 566 bp, Homo sapiens
acgctcacagccacaaacctctccaactccccgctaggaggagtcacacctccccacccagaaaccctcccaccctctcctctatttctccttccctcccctctccgcggggttccggcaggcttcgaatcacaatgctcgccgggaatagtagtcttccggtccgagcctatggcgtttttaatgcatttccagaactacgcttcccagggagcctcgcggcatagtgaggctgagtcacctgaccaagaccctggagttacaatggcggcgcccatgctgcgctggggctgccgtggaagacgttgggctttcgcccgggttgacggtggttcttgccaccgaagaggggctccgactgggtccacatccaaccagattaggggagagagctcagtggctcagcagcccctccacacggcccagaagacgaggaaagggtattcygtttcatacatttctgcccacctaactgtgaggtggaactgcaggactggggaaataatggcaattacggcccagcttctagacgttttggctgacgggagggcgttgagttataacct

SEQ ID NO: 263961 - DNA, 376 bp, Homo sapiens
gaagatgttagaacactgagcagtctaaggaaggtttggcaaagtcatttatgagccaaaaatcagccactaaagaagtctcatatctcccaaatacacatctgctttagtatcccagctgtactcattcattcacgtgcaagaaatcttgagacaaactcagtgcaggattttaatacacagcatctggggctctcattcaatcacattccctctagcaaggcctctgtaaggcacatctcatggccaccacartaacttaccaaaaagataattggtaaaggatatgaaatcagaatgactaacaaacatgaaaatatatagcatcttacaagtaattggggaattccaaattagaactagaggtagaacaata

SEQ ID NO: 263962 - DNA, 595 bp, Homo sapiens
aaccgttattgaagtatataaaataagatctggatgaatagaaagatcataatttttaataaaattttgcatcttaaaaagtgaaccctctccaaatatatgcacatttaataaaattataaatacatcccaatgaggttggttttgaaattttgttaattggaacttaaatttcacctaagaagaaaaaataaagaatagttaagagtgcatgctttgtagacaaattgccttagttagaatcctggctctatcatctattagctatgttatctttgggataacattcatcttttcttatagatatgcttaaaacagtgcctgacatatagtaagcacaaatatccattagctattcttcttattatttatgttattagtattgttaatatttgttattatatggaagactaaatgaccaaagagagtcaagaaatttatgaataagatttatgcgttgttagatattagagccattaaaaaaaaaaaaaccaaagtgccaaaaaacctagcacagtgttaatacaggaataaaaaaatggatcagagsaaccaaacagaaaagccagaaatggatcttaggaaacatgagaat

SEQ ID NO: 263963 - DNA, 576 bp, Homo sapiens
ggtttgtacccaacaaagtcttcttgtttatataactggcacataataattagtttccgggatttgtttttccaggcttctcagtgatctgttgaataaggctagagtacttcccgcaaataagcttttaagacataccctaaatctaagtcagtgttttctaataacttcaatgcacctcctccctgagaatgttggatcaagataaatcaaaataatatgttgaaagttaaacagtgttgaatttggtgctagctgtaattgcattgtaccatgaatagaacatttcctttcagggtgtcttactcgccattttaatactgcaacagatggaagactcttgtaattatttttcattaccytgtggtctccagaaatcaagatgacaagtcaactgaaatttagatccacaaggtgattataattgaatcttttatgtgttcatatatctctattaattattaatgaaacatagtattgagaatatgctgcttatacccactgaatgattcaactactttacaccaatgtttatcaagatagaaaatgggatatgtgtttaacaaagcaaacaag

SEQ ID NO: 263964 - DNA, 548 bp, Homo sapiens
aggtcatgagaggaaaatataccacaaaaatttgtgaaaacagaaaaataaggatagacatgatcaagaaaccattaaaaggagaccaaaaaaaaaattgaagaaatgactcctcccctcagattcttacagcaaaaactactttcagtacaagaaaattaggcattaggagtaatgcagaaaagccaggttccccttttctccacacatcaggcttcttgttggtcatggtacaatcagtcacttgatctttactggaacccaaaacaaacacaggcartaaaaggacaaaggagaaacccagggagtttgtattgacagaaaactcttctcagattgcatcaatcttggaagaactttctagagcctcactaacagaaatctatccacaagccttgcagactcattgccttccctgctcaccctggtggctttcttattcttatgttattagaaacacacagttgaacagggtagacagctaatggaaacaaggatggtttatctgctgcttcacttggagaattaaagaaacagaataatattca

SEQ ID NO: 263965 - DNA, 542 bp, Homo sapiens
tagtgcttatttaagctacataatgcttaagtagctaagaataggagaaagacaagacttatgttactaaaaatggaaggcatcttatgagtacaaagaaaataaaccagcacataactttgttttggaggaaaagatgtaagrtaattgctttagcaataacaactataaattcatatagtatttgaggtatggagttttaaaaaattaacacttttcttttcaccccatctatagaatggtatgagaaatataattgaaatgaatagagatagatagccacaatttatgttaaaataaagagtgaattagtaatagaaataaacaatttttaaaacattgagatatcaattgaaataactggaaatcccctaacatggggtgttccaataggaattattaaattagattctgataattttactattttttaaattgcaggggtgattcacaaactattaaactatattattcataaagtgacaatgttcagatgactttttatccaacctgccaaatagggccagacacattagtaagta

SEQ ID NO: 263966 - DNA, 346 bp, Homo sapiens
tgaagtcctgacctcatgatccacctgcctcagcctcccaaagttctgggtttacaagcgtgagccacagtgcctggccaagaatcttatcttaatcctctgtcttaagacaatttatcctggaaaaatgattatccattttcttcaagtctctctccataaaacctctttatggaatctccttttgatttgaactttgatccaaatcataaacaatcctcattccctcttaatgttatgtatcacggatgtgagactgggtgtatacyggtgtatatgtgggggaacagtggtgtcctgaatgccctttagacctgatctttatgaatcaccatgatatttctat

SEQ ID NO: 263967 - DNA, 634 bp, Homo sapiens
gtgactttgtagataggaaaataccataaacccttttttaatggctggcttattactctttataacaaccttgacaatatagatgcttgtggtaagggaggagggtaagaagcttggttgggtaaaggaaacatgaactttagaggtaatgccattcaataaagcatgtcattaacactaaatcattgggtggttagtgtcattgttattaatatttgataattactaagcacttgtgctttatgcacaaggaaaatggacaaggggggaataagtgtggtaggagcagagggaacargtagaaagaacagaggaagggaagagtagagtgtgtgagagaacgtaagagagccaagagtattataaagagagagagaatgaagtaacatttttgtatacagctactatacatgtgaacgtgtatctgagagtgttacatggccctgtatgatatctatcaacataattcaacttccacagcagaaaatagatactaaataattcagaaattaaaattggggttctgtttttttaggaaagattgtttgttgacctaagtcaaacatgattactaataactgtatatagaaatattggctaaagattaatcaccactagaaagcatgagaactaa

SEQ ID NO: 263968 - DNA, 606 bp, Homo sapiens
tccaaagaacaaatcattagtgtctgagatagaatttcttttctaatatgaacactaatagggcatagcaaaaagataagtagttagatttggattgtattgctggtcccaccaattatgagacatgtgatcttaaacaagtctcttaaacattccctctttttactttaaaatgtgaataacaatatttcataaacttctaaccacaacattttcattatccccttccagtttgcatattgacaatagatgaaaattcctaaaatattgtttgggctatagcacttccccataaagaaaagcaactgcggaagacacaattcctttccttccaggccctttcctgtgctacaaaggctagaacactaagcactacgcttcccaaactyttctatagctagaatgctgtaaaataattggatttcgctggttacatggcacgtgaaagttagtggaggaccttctgtctttctgcctctttttttgtttttcgggttttttgtttttttgtttgttttttttttttttaagtaaggagatggacaccttcaccttcataaggtggatggctctatagtaataatgtgatgagtactatactggaac

SEQ ID NO: 263969 - DNA, 606 bp, Homo sapiens
tccaaagaacaaatcattagtgtctgagatagaatttcttttctaatatgaacactaatagggcatagcaaaaagataagtagttagatttggattgtattgctggtcccaccaattatgagacatgtgatcttaaacaagtctcttaaacattccctctttttactttaaaatgtgaataacaatatttcataaacttctaaccacaacattttcattatccccttccagtttgcatattgacaatagatgaaaattcctaaaatattgtttgggctatagcacttccccataaagaaaagcaactgcggaagacacaattcctttccttccaggccctttcctgtgctacaaaggctagaacactaagcactacgcttcccaaactcttytatagctagaatgctgtaaaataattggatttcgctggttacatggcacgtgaaagttagtggaggaccttctgtctttctgcctctttttttgtttttcgggttttttgtttttttgtttgttttttttttttttaagtaaggagatggacaccttcaccttcataaggtggatggctctatagtaataatgtgatgagtactatactggaac

SEQ ID NO: 263970 - DNA, 582 bp, Homo sapiens
ggcagccagtgtgcttcagtggtccacagactggccatttggagacatcaatcaagtaatccttttatcttgttttataggtaagaataaggaagtctaaatgtaagaggtcaggccaatgtcacaaatgatttagcaatcacaagcaaacttgagagatgattgaataatgttatgtgaacttcttgcaaccacggggaaatcaattacccaagccttagatgttcccttgccaaggcagggtggacagtgtttagggccatgtttattcacctggcacttgcctaatgaaaagggatggttttaagaamtacttggaaaatgtttttgaaaggattgccaaatcctcgtgctggaggattattggatcaaatatgcaattgcttgttgaaatggagctctgaatggcctctgtatgcagacagccagagtctctgagaattgtaagccaaaaaagtaagaaccttaagtcaaagaaagggcagctcacctccccacctctcaaagaataaaataaagtacaaaaaaaaaaaaaagaaaaaaaaagcttagagttagacttatggagaatggaaaaagtgt

SEQ ID NO: 263971 - DNA, 617 bp, Homo sapiens
tgttatgaaaaataaaaaagggaaatgctttagaactggtttaagtgcttatgtagatgttactaattaacaaaccatttcagaaactatactttttattttatggccactattcactgtttaacttaaaatacctcatatgtaaacttgtctcccactgttgctataacaaatcccaartcttatttcaaagtaccaagatattgaaaatagtgctaagagtttcacatatggtatgaccctctatataaactcattttaagtctcctctaaagatgaaaagtcttgtgttgaaattctcagggtattttatgagaaataaatgaaatttaatttctctgtttttccccttttgtaggaagtcaccaaagcagtacagcctctcttactgggaagaatcatagcttcctatgacccggataacaaggaggaacgctcctatcgcgatttatctaggcataggcttatgccttctctttattgtgaggacactgctcctacacccagccatttttggccttcatcacattggaatgcagatgagaatagctatgtttagtttgatttataagaaggtaatacttccttgcacaggccccatggcacatatattctgt

SEQ ID NO: 263972 - DNA, 534 bp, Homo sapiens
cagccccctcttccttgaaactagacttgtacatccaactaacatctctatttggatgtcaaataggcatttcaaacttaatattcccaaaccaagctccatccaaaacctgtttctcccattatctttctagtaaayggcacatttatccttccagttactcagtccagaaagcttggaatcatctttgactcctctgtgacttttctcatatgccattgttcaacttatccattaatcctattggatcttccttcaaagcatgtcctgaatctgatcacttcctactatactacttccactactacctggatcaagccaccatcatcacttgcctgaactggcacaatagactcctaactcatctccttgcttcctcccttgtctccctacagaatagcctaaaaacattagccaaagtggccctgttacttctgtttaaaactctccagtggcctctaatctcacccagagaaataagccttagtctttacgagcactttatggtttaccccctacctccaccgccgatta

SEQ ID NO: 263973 - DNA, 531 bp, Homo sapiens
ctgttgtcacacaaaggtagtgtttcagttcctgagcccatgtccttggagttgcccaggctccaataatactaataattactgtacattaggtacttaccatgtgccatattctgtgggagccgctttccacaaattatctctggtaatccttgtaacaaccctttgacatcaatattattattttctccatttttttacatatgagataaatgagacttaaaataatgtgcctgatatcatcagcaaatgagctgaggagggcagattcaaagctgattgtgtttgactctagagctgcagtyttaagccagaccttttcttgctggttaattttactgaaaaaaaaaaaaaaaaaaaaaccctcaaatactgctgattgatctaaagtactaacatttctatcagtgttagggaaattttaattttataatttgattttgtgagaaatttatagcatcttgaatactcacatgcaaagtgatatgtcttagataacattttacaatggcagagcttaagccagtgctc

SEQ ID NO: 263974 - DNA, 538 bp, Homo sapiens
atagaacaatagacatattatcaaggtaaatacagatcattactgttctgtgatattatgtgtggtattttctttcttttctagaacataccaaataattagaagaactctaaaacaagcatttgctgattgcacagtaattctctgtgaacacaggatagaagcaatgctggaatgccaacaatttttggtgagtctttataactttacttaagatctcattgcccttgtaattcttgataacaatctcacatgtgatagttcctgcaaattgcaacaatgtacaagttcttttcaaaaatatgtatcatacagccatccagctttactcaaaatagctgcacaagtttttcactttgatctgagccatgtggtgaggttgaaatayagtaaatctaaaatggcagcatattactaagttatgtttataaataggatatatatactttttgagccctttatttggggaccaagtcatacaaaatactctactgtttaagattttaaaaaaggtccctgtgattctttcaataactaa

SEQ ID NO: 263975 - DNA, 308 bp, Homo sapiens
actgccaaactgtcttcaaagtggctgtaccattttgcagtcccaccagtaacgaatgggagttgtggttgctccttatcattgccagcatttggtgtcctcggcgttttagaatttggccattctaatagttttgtggtggtatctcattgttatttcaatttgcatttccctgakgacatgatgtggagtatgttttcatatgcttatttgccagctgtgtatcttttttggcaaggcatctgttaaggtctttggcccgtgttttgatcaggttgtgtcttgttgttgagttcctttactggatt

SEQ ID NO: 263976 - DNA, 588 bp, Homo sapiens
tggtttatttggggagggatgtggtgaagagactggagagtgcacaggtgtaaacagcgtggatctgtgccttagggacacgtcagatgcaaacccattctgatgataaaaatataaagaaatacttctttcactttttttttttttttggctgtgttattaaagtgtgagtcaatgtctgctttcattaaatcagatacttcttgggtttcaaatacttgctgtgaacaaattgacttctctggtgaatgcatacgccttccctgacttcaatcaaagaatagaatttcatacacttaaaggtttgggggaaaaaaaacaacaaacaaaaccaaaatctctgggaaatgggaaaaaagaaggtaaactgtatgagyatccacctacatatgcatatgtgtgaagtcaatggttaaattgtttggtacctgattaatgctctaggtgatgttccttgatgtttatagaaactgtttattaattagaacagtgctatgcaggtaatcaatttaatatttcattgttagatttttacccacactgggattttctttaaaaaagaaaaagagaggatacaaaactgatttt

SEQ ID NO: 263977 - DNA, 590 bp, Homo sapiens
tggttgtttccctcaatccataaataggctcacatatctcatttcttttttaaaaataataaaaataaatattttactttgatttctatatattatttctcttccatgcatattgcttctaattataaactatctcaatttcttaccgtccatttcttttagaacttaccattatctaacatcttcctcaatgatgtcaaggaaatttctcctgcccagattcctagttcatattttgatcattttatttatcatatattttgggagtatctgcaatatggcagacaccattgaattgtttggattaaatcagcgaggataacaataaagaaaacagacaaaatctcttccctcaagaagtttacattttactggggctagacagaattttaaaaaatgaacaaacatgctcaataggtaaattatgtygtgttttagaagttggcaagtgccatgcttaataatatgttaaaagaagacgagcagaacagggaatcagaacttggcccagaagatgagttacaattttaaattgaatggtcataactgacctcatttgtaaagtgctatctgaactaagatttaagaaa

SEQ ID NO: 263978 - DNA, 628 bp, Homo sapiens
tagttggcaaaaatgtctaatctttttaaaaaattctttcataaatagtggaagcatttgtragttgtagattgtttttaaactggaagaaagttattgaaaattgtgattagttcttctatgcagaaaaattaagactacaatctgacagacatattccatgaagttaagatgtagattcatcaatttaaaaaaataattttaaattcctgtgtattgtccctccctcaatttccctgatttgtaaaaactaatttctgagactctttttggtcagtttattttgtgtaactgcaaatatataaggagttagccacgaacaaccatagattgtcagttagtcaagaattggtttaaaaatattgaaacaaaagcttctggagcctgcataacagatgcaagtttgtgtagctagtaagagggatagttgggctagaataaagaaccattgaattattgaaggtaatatagtgaatttttaaaagtgttccatagtacaggtttttttggctgcataattttaccaaaaatgtgaataaattgacaaaaatgctttttacaaaatgcttgtcaacagcattcataggcacagaaagaagataatttgtgttaattgacatataatatg

SEQ ID NO: 263979 - DNA, 628 bp, Homo sapiens
tagttggcaaaaatgtctaatctttttaaaaaattctttcataaatagtggaagcatttgtgagttgtagattgtttttaaactggaagaaagttattgaaaattgtgattagttcttctatgcagaaaaattaagactacaatctgacagacatattccatgaagttaagatgtagattcatcaatttaaaaaaataattttaaattcctgtgtattgtccctccctcaatttccctgatttgtaaaaactaatttctgagactctttttggtcagtttattttgtgtaactgcaaatatataaggagttagccacgaacaaccatagattgtcagttagtcaagaattggtttaaaaatattgaaacaaaagcttctggagcctgcataacagatgcaagkttgtgtagctagtaagagggatagttgggctagaataaagaaccattgaattattgaaggtaatatagtgaatttttaaaagtgttccatagtacaggtttttttggctgcataattttaccaaaaatgtgaataaattgacaaaaatgctttttacaaaatgcttgtcaacagcattcataggcacagaaagaagataatttgtgttaattgacatataatatg

SEQ ID NO: 263980 - DNA, 578 bp, Homo sapiens
aagtattttcaggtaaggaaattattctgcattatccagatgaggctaatgcaattacaaggtccttgtaagagagaggtagtagagttagattcagagattacaaagagatgtgatgatgaaggcagaagctgaagtaatacactttgcagrtggagaaagggaccatgagcccagaaatgcaaatggtctttagaagctggaacacacagggaaatggattttcccctgaaattttcagaaggagcagagccctgctaacactttgatttcagacttctgactttcacaatgataagggaatagatcatatttgttttaagccacaattgtagcaatttatcatagcagcaataggaaacaaatacacctatttttaattatagagattaagtttagtctgccattatgcagtatttttggtttctatgatggtaaacttttaacttggattggaatgtaatcacagatgcacaagcaagtgacaattatttcacctttcaagatattacaatatcaacatagatcatatatgtttcatcattgttctgatgccatttagaaattatttttaaatt

SEQ ID NO: 263981 - DNA, 530 bp, Homo sapiens
aaaaatcatttaataaaattcaatattgttcatggctaaaaaaaaaaaaaaaaaactcaaaaagctggtaatggaagaaacataccacaacataataaaagccacatacaacagacccacagctagtatcatactgaatggggaaaaactgaaagccttttctccaagatctgaaacaaagcaagyatgcctactttaaccactgttgtttcacatattactggaaatcctagctagagcaactagacaatagaaagaaataaatggcctccaaattggaaaggaagtcaaattatctgtgtttgcagatcatatgattttatcggtggaaaaccctaaagactccaccagaaactactagaactaataaatttactaacgttgaaggatacaaaatcaacataccaaaatcaataacactttcatcaaaggatgcttgggttgtcacttcaccagccagaacctctgtgggcaatattgcccctgctcgagatttgcttgggcgtgctgggctcattccgcttactcag

SEQ ID NO: 263982 - DNA, 637 bp, Homo sapiens
tgtaatataaaaaaatttaaatattatgtaaacatatttgttatgcagtggcttaatataaataatagttcaagatacatatatatgaagccagtgwtcataaaatgaacctagagccatttgagggtcatttcaactataataatccctagtttaaaaagaaaaacacccagggctaagtaaggaagattttattctcttttaagagctggaaagtaatccctttggaatatatcacttcatatattctgaacactatgattctggaccttctgactctctaatttaacttctgtgaatttcatctaaatatctcatttaaccctgcctcattttttaaatgtgaatgactctaaagtctgaagtgtggaaagctgggttccaatctgtgcttcccacctacgaatagtgcagcattcataaattgttttagcctcttctgcctcatttattctcatctgttaaatgtgtatgatagcagatgcagatcagaaaattattcaaggattaataaaaaagtgtctgttagcattacctggccaacgctgcacagtatgtctattgatattagctgttcttatttctgtttcttttcaaaactatgctatgcctttctagccacctttaaagtagcttt

SEQ ID NO: 263983 - DNA, 571 bp, Homo sapiens
caaaatccaaataagaatatgtcacaggagctatacattgctgcaaagtcttaaatatttactatctggcctttaactgcaaaagtcagtctcccactagagtagtcagttagcaaatatataattaatcaactcatttctttgactcattttctttgactcattaatgaatacatttaacacttwcctgttgacagacatagcttgctgtgtgctggagcaatgctgataaagtaaccacctaaaacactgtactcctcagtacagtgaatcaggagtagaattcaaggtctactcagattccttgcccatttttaaatcagatcattagaaatttcctgaagagatgtttgagctccttatatattctagttattaattccttgtcagatgagtagtttgcaaatattttctctcattctgttggttgtctcttcactttgttgattgttttcttggttgtgtactcctgttggtaaaggaatagaaaatcaacaaatctttagaaagtaattacaataatgacaagctctgaaaagaagcatatatgttttctaacagggagcaatgt

SEQ ID NO: 263984 - DNA, 581 bp, Homo sapiens
aaaaagattatgactcactgaakgctcagatgattgctagcatattttagtggtaaaagattttgaaattaaggtatgtatattgttttttggacataatgatattatacactgaatagactacagtataacataactctatataaccttggaaataaaaagaaaatgtcacttgctttttgctgtgatctggaaccaaatacacaatatcttgaagatatgcctgtattgagaatatcttattttaaatggaaaataagttaatgataatacagtatggtttttcatgaattggatagaaaaacattgtgatttatcaacatcactttcataattaaattttcatttctctgattaggtcttagaaagaaatgagccaaaataaataggctctggcttctgaaatgactaccttttcaagacataagtactggggtggttgttttgatttattagaaacttgagcttctgcaatttgtatcatgttataagtcctaaatatgttactctgattcctcttggacaaaatataaatggggactggtctatctgaaacgttggttctggagtagccagtggac

SEQ ID NO: 263985 - DNA, 591 bp, Homo sapiens
ttgctaaatactctttgcaataaattcaagtttgccaatatataactatatgatgactgctcctctgagaccccaccaaaggacaagcataatttataatatttctaacagggtaaagacatgccctgtctcagggaattcatgaactgtgattttgagaaacattgcagtcactaagtacttctagatataccataattgtgttcagatgtgtacttaatcaattttgttttaaatattatccaaatgaaataagacctcattttttaacatcttgcatcaaacaattagccacacttccaacaacattcaatctatacactttgttaaatgaaacaaaagcccagctatttccttttgttttgtgttccatgcagaattttatgttcatttttctattttgttatgcatgatactaaaattcctgttagttagaatacagacatgacttatgtaaggaaaatgwgtattcttaattatataaaagcacagaaaactcatactgtcacctgtgaatgtcgggaaagccaattgtgagaatatgaaacaaggactttgttgttatccatttatcaaaggacaaagactgaa

SEQ ID NO: 263986 - DNA, 564 bp, Homo sapiens
cagtggggcaaatggcattctactgtgtttcccgttttaccctaagcctcattttatcaaggaaacttctctgaccctcttttcagccyctccctttctatgttgttcccatttaggtcaagaccttcatcagctgcaaaagaatcaagtgccttcctttagggcacatataacgatgtacaattatataatcatttatatgattaaatgattcttttctcctgctagagtgtgaactttgtgagggtgagaactgaatgaggtactgatttccattatatccgcagtgctaagcagaatatctggcaaagtgtagctattcaataaatagctggagaataaatagctgaatacataaaagaacacaattttacctgctgatttcatagaaaccttaggccactgccttgacactagagatcaaatgatacacagaggcaggcccagcttaataggagtcaagtacatattattgtccttgtttactaatgacaaatggatttatcaatgttgtttgtctgttaaatgtcaacattgattactgtgcaaacattcacctgtgaa

SEQ ID NO: 263987 - DNA, 602 bp, Homo sapiens
gaacagctaaagtctttaagaacaccaaagccggatctttcctctatttgctgaaagccagtcacagcgataacaagaggaagatgacaagttttatccttatagagaacaggtgggtcgatggttggaataaggcatgaactagctggggtgtagcacagaataaagggggcatctcaccctaccaggagaagggctttatggcagaggcatcatgccaagtgagcctgaaaaagaatgtggtccaggtggataactcttaggttggccagcattccccactggtcagccattctgcataattactaggtgttcctggatcatctctcatatgctaaagctttgctggaaaaccaggggaactaaagatgacaaggagcctcttygacctctcaaaagcctagatggctacccacctagagcttgcagggactctgcctctcatttctcccaaaggaacatttcttggtggatgataaaatacctcatgttcccagcaaaccctcagactgaaacataagaagtacttgagttgttgccagagaaacgttccagagccaagtggacgactgctaggggtggccttgggataagctatcctc

SEQ ID NO: 263988 - DNA, 570 bp, Homo sapiens
cactactggggaacacatggacattgctccttagggcccatgtgcacctacgtggctccaggctgtccctgtggctgcaagaaagctgctttcaagcccaggtctccaggcttagactggaggaacacccgcggtgcccttgtgctctcaacccggacatcatgaagtgctggagatgacttcaggttccctcacatctctccccgaacttccggaggggcactggagttagggtggtacaatgagaagtacctgaacatggggtcaggcccacctttcagctgcaggacctaggatagattaactatatctggcttgcatttccatgggaaataattactaacgccatggggttgttgtgtaaatgtacccagcacagtgtgtagcacagaataggcactcaaaaaaattgcatccatgatgattactgatgctacatttgtctgaatatttggctgctacgaagtaacagtgacttmagatagatgtttttctcgtgtaaacagcacagggctgatgcaatcatggacctctgcttcttgcctttccatcttcaacatgtgcttctat

SEQ ID NO: 263989 - DNA, 464 bp, Homo sapiens
aagctggaaactaactgttcaagaagtgtcacatacttatatgatgacagatctataatgcattatgtggagagtcaagcaatgttggaggggcatgccttctttaaaactctgcttacagtcactgtcggaaaacatgatgctggcctaggtgaactgggcttggggtatttgtccctagtggggcaactctgatgctgctatccacatcacaggtcacatgagaaaataacacctcctytttgtaatgctttcacattgcaataattcttggaagaaacttgcggtacatgctaagttcttgctagcgcctctgcagaaaaccttctgttaccaccatccctgggttttcctgactctgcttgaagctgtgggatttctgttgctgaaaggacacagctgggctaccggcaattaagatcttaacctccaaagtgtgacattaatcaaatgtatgtccaaaa

SEQ ID NO: 263990 - DNA, 464 bp, Homo sapiens
aagctggaaactaactgttcaagaagtgtcacatacttatatgatgacagatctataatgcattatgtggagagtcaagcaatgttggaggggcatgccttctttaaaactctgcttacagtcactgtcggaaaacatgatgctggcctaggtgaactgggcttggggtatttgtccctagtggggcaactctgatgctgctatccacatcacaggtcacatgagaaaataacacctcctctttgtaatgctttcacattgcaataattcttggaagaaacttgcggtacatgctaagttcttgctagcgcctctgcagaaaaccttctgttaccaccatccctgggttttcctgactctgcttgaagctgtgggatttctgttgctgaaaggacacagctgggctacyggcaattaagatcttaacctccaaagtgtgacattaatcaaatgtatgtccaaaa

SEQ ID NO: 263991 - DNA, 490 bp, Homo sapiens
tcgttgactaagtaaatgaagcttgttcataagattaaaattagtcaatagctaattaaaacactatttaaaatgagtcaatagcttcgcagaaaaaaaggacctcacttggcagaagaggaactgcagatgttatagctgtttactttttcatcccgcaaataaaagcaataatctaaaacagaatgtgatctttgttctctagatactcaacaatgcctyaaatgccagcagaccctctaaactcacaaaaggagctccggtcctgctgagcaggagaacagcagggtttgggaaagctgctgattgaaatgcaagccttctcctgagaagatagaatatctagaatcaagaaagaggcatttggcttttccgggtgcacccaccccagcttcacttacaaaggatgaagttaaccataggaagttgggcagcaaccagagtagcaactggatctgatctcaaaggacacaccagtgaaagagcagcc

SEQ ID NO: 263992 - DNA, 562 bp, Homo sapiens
caggagaacagcagggtttgggaaagctgctgattgaaatgcaagccttctcctgagaagatagaatatctagaatcaagaaagaggcatttggcttttccgggtgcacccaccccagcttcacttacaaaggatgaagttaaccataggaagttgggcagcaaccagagtagcaactggatctgatctcaaaggacacaccagtgaaagagcagccttttgtggttactgagttaaaattgtttccaattactccgtattgtttctctgagagtgagtgagaagtgatacagaaccttccctccctcgaacacctgttcttgtgggaaggcgggggaccccctttaaaaccttgatcctctactccaaagccagtgtctgtggcacaattaaacacacrggcaggaacccacatgtcctcttcaggtgttatttaagatggcaagttcaaggagttagctatagctgccagaatctagcacctgttacacattagcaattaaagttaagcggatctaacttggaaccaatgaaaataatggcagcttctcagaggtccagt

SEQ ID NO: 263993 - DNA, 581 bp, Homo sapiens
aagacatatgttgacttgatgttctctcttctgttggaatgtccttccagctattccaggaagttcacaccctcattactaaagctcagatattacctgctttgtgcatttttcacaaccactctaaagaaaaaccactagttacctcctctctgactggcgttgcttttatgaaagcttgcgcacaatctacttcccattaagatcttcttctctcagcaattgctccatgatagtaagaaaagtatcttatccttcttcctatccctatccctagcaccaagcctggtgcctagcacatgggaaatattcagtaaatctttgttaaagyaatttgttgaattgtattttcactttttttaaaaaatgaagcacattgaacttggagtcattctctaggttttgttttgctatagtgagcctttgtgatagaaccttatatatgtttatttttttgagacagggtcttgatgttttgcccaggtcgggcttgaactcatcctcctgcctctcaagtagctgggactacaggtgtacaccaagaaacttatgtttgcacaggattttagaatgtataaagc

SEQ ID NO: 263994 - DNA, 581 bp, Homo sapiens
aagacatatgttgacttgatgttctctcttctgttggaatgtccttccagctattccaggaagttcacaccctcattactaaagctcagatattacctgctttgtgcatttttcacaaccactctaaagaaaaaccactagttacctcctctctgactggcgttgcttttatgaaagcttgcgcacaatctacttcccattaagatcttcttctctcagcaattgctccatgatagtaagaaaagtatcttatccttcttcctatccctatccctagcaccaagcctggtgcctagcacatgggaaatattcagtaaatctttgttaaagtaatttgttgaattgtattttcactttttttaaaaaatgaagcacattgaacttggagtcattctctaggttttgttttgctatwgtgagcctttgtgatagaaccttatatatgtttatttttttgagacagggtcttgatgttttgcccaggtcgggcttgaactcatcctcctgcctctcaagtagctgggactacaggtgtacaccaagaaacttatgtttgcacaggattttagaatgtataaagc

SEQ ID NO: 263995 - DNA, 527 bp, Homo sapiens
acgttcaaggtggtatggctataaacgggtgtcatttccaatcaaaccaagttgtcgtaagaggagtttctttttaagccattatctgtcatctttggcttgttaaggcacaaggatctgggagcaggtgttggtagagcaaggagaggaaagagccagaaaacttactcattttttttttaagtctctagggcagagcttgttgattgatggtttcaggccatctctcttgaatgaatgagtgaatgagtggtgtactaccttccatggagaggatgcagcacagcaaggaccragaagtctgaggctaccaaccatcggtttcattccagtcgatctttgtgtccaagatcgctcttttgcggatgaatgaattgtgaagtgaagcgacccagttggacacacatgtagcttagtgaaattgtgtccggaattggtgggttcttggtctcactaacttcaagaatgaagccgcggaccctcgcggtgagtgttacagctcttaaggtggcgcgtctggagtctgt

SEQ ID NO: 263996 - DNA, 577 bp, Homo sapiens
atttcagctcctctgtgtttctgaagtcatttgtttcacaccaagacagaagcattggagggagtggcaggttggcagagcaagtagacggggcatggctgggtaaagaaaccacatgcaagcctcactcacagctcattgttgtaggggaggcagcaaaagcaatttaattccacattttgtcacaatcaaaataagggcagacagaggcaacttttagtcttatgcctttgtccactacagctttgccccagtcataaacacctargtttttcacaagtcttaggcattgtccccatttaacattgatatttctactaaagctgtttattgacaaaaatatttacagacttgaatattttcctgaatgtcaagtgtaatgagctactttaaaaacagccatctgaatggtacagccatttcggaaaacactgatattctcttatgaagttcaatttcacactcatcaagtgacctggcagctctgttcttgagtacccaagtgaaatgaaaacatttgtttacacacactcacaaaacttgtatgcaaatatttatagcagctttacctgtaacc

SEQ ID NO: 263997 - DNA, 577 bp, Homo sapiens
atttcagctcctctgtgtttctgaagtcatttgtttcacaccaagacagaagcattggagggagtggcaggttggcagagcaagtagacggggcatggctgggtaaagaaaccacatgcaagcctcactcacagctcattgttgtaggggaggcagcaaaagcaatttaattccacattttgtcacaatcaaaataagggcagacagaggcaacttttagtcttatgcctttgtccactacagctttgccccagtcataaacacctaggtttttcacaagtcttargcattgtccccatttaacattgatatttctactaaagctgtttattgacaaaaatatttacagacttgaatattttcctgaatgtcaagtgtaatgagctactttaaaaacagccatctgaatggtacagccatttcggaaaacactgatattctcttatgaagttcaatttcacactcatcaagtgacctggcagctctgttcttgagtacccaagtgaaatgaaaacatttgtttacacacactcacaaaacttgtatgcaaatatttatagcagctttacctgtaacc

SEQ ID NO: 263998 - DNA, 577 bp, Homo sapiens
atttcagctcctctgtgtttctgaagtcatttgtttcacaccaagacagaagcattggagggagtggcaggttggcagagcaagtagacggggcatggctgggtaaagaaaccacatgcaagcctcactcacagctcattgttgtaggggaggcagcaaaagcaatttaattccacattttgtcacaatcaaaataagggcagacagaggcaacttttagtcttatgcctttgtccactacagctttgccccagtcataaacacctaggtttttcacaagtcttaggcattgtccccatttaacattgatatttctactaaagctgtttattgacaaaaatatttacagacttgaatattttcctgaatgtcaagtgtaatgagctactttaaaaacagccatctgaatggtacagccatttcggaaaacactgatattctcttatgaagttcaatttcacactcatcaagtgacctggcagctctgttcttgagtacccaagtgaaatgaaaacatttgttyacacacactcacaaaacttgtatgcaaatatttatagcagctttacctgtaacc

SEQ ID NO: 263999 - DNA, 621 bp, Homo sapiens
gatttcttaactataacaggtttctacaaattagtaagaaaatacaaaaatagatcaaggmttttgtttcttttatctattgctgttgaacaaaccacttcaaatagtttgttcaaatggttgttcagctctttcttcatatggcctttcctgcaggggactgggcctctgtgaaatggcatagggttctaagagggagctacacaaagataaaaaccccactgtacaaacccttatcaagcctcagcttgggctatgatgactaattcactgttgaccagaaagaagttacatggccaagcccagagccaatgtaggaggtgataacattagagtgtgaatatgaggggtgattcatgggaagcccccgtgtaacagtctactacagatacgaacaggcagtttattgatgaaatggggatgactcataaacacaaaaaatacacaacttcattagtcaaagaaatgcaaatgaaaacgaaaggctattttcattggaaaatctacaaatattcagcatatagttcatatctagtgttaagcttatagaagaatgtcatacgttttggtgagagaatagattgacccttttaaagggttgtcaatgcatttcaaaagaga

SEQ ID NO: 264000 - DNA, 583 bp, Homo sapiens
ttagcttgtttacacaaaagttacctggagactgtgtcatcattcaaaccctatagatacccaagccagcaaaaccaccacaggctctggagcagcctcttggtgggcaagcttcctctaattcagggattggcaaactatgacccatggaccaaatccagtccactgcctgttttatgaataaaatgtgctggaacacagccatactcatttgtttccacattgcctatggctgatttcgagtgacaacagcagagctgagtggttgtgacagaggcaatctagcctcaaaagcctaaaataactatctggsctttagagagttttctggatcctaactggtggcgtcgctgctcagaagggccttcatctgcactcagaagccttcacaacaccaccctccgcagtgggctgactccctggtcaatcttttccttcctcaagtggactggactcaaaagtactcataggttccctcaggaaaggaaaagctgcacctcagacaagttaggcctgcccaaaccgtgagccctgtgacgttagaacattagcagctcaagaatcctaatgcaaaccccaaaca

SEQ ID NO: 264001 - DNA, 246 bp, Homo sapiens
caaatggagaggaaggagccaggatacagcttagcttgcttgtgyccagagaaagagttaagctgctgaccctgaaggcaaggaagagctgactgcacagctgtgtatgggggtggccagctccagcagccgagacagggtggacagtgggagagtaaactggtgatgagaaagctagtttgagaaagctgttgaagagagctactgctgaataaaatcacgtttcacctgcctacggccccctaa

SEQ ID NO: 264002 - DNA, 246 bp, Homo sapiens
caaatggagaggaaggagccaggatacagcttagcttgcttgtgcscagagaaagagttaagctgctgaccctgaaggcaaggaagagctgactgcacagctgtgtatgggggtggccagctccagcagccgagacagggtggacagtgggagagtaaactggtgatgagaaagctagtttgagaaagctgttgaagagagctactgctgaataaaatcacgtttcacctgcctacggccccctaa

SEQ ID NO: 264003 - DNA, 596 bp, Homo sapiens
tgtgtgcgtgttatccctttggacttttgattttgttccattcacctgtttgtctatttccttaccaatatcaagctattctgattactatatgtttatgtatctttggtagaaagtgatctctactttgtttttcaggaatattttggtggttcttggacatttgcacttttatttctaacttaggttcaggggtacatgtgcaggtttgtttatataggtaaatcttgtgtcacggggtttggtgtacagattattttatcacccaggtaataaggatagtgtacccaataggtagtktttcggtcctcaccctcctcccaccctccaccctcaagcaggccccagagtctgttgttcccttatttgtgtccatatggacacgatgtgatgtttagctccctcttagaggtgagaacatgtaatgcttggttttctgttcctgtgttagtttgcttttagctccatccctgttgttgcaaaggacatgatcttcttttttatagctatgtagtattctatggtgtgtataccacattttttttatccattgtaatgttgattggcattcagttgattccatgtatttgctattg

SEQ ID NO: 264004 - DNA, 599 bp, Homo sapiens
ttgtttggaacaggttactcctagtggtcctgtggtttgggtgtttgcaccggggaacatgattaataaaaaccacacaattcattttgacagccttggcccatctctcccaaagtgaggagctgctcgtgactttctttttctattttcagcttgtgtttttttattgcaaaaccaggcattcctttgaattcatgtgtgtccttgaaaacaaagcagccgtgttttcaatagtgcagactcttcccctgtctgttgctggtagatgcrcctaatggtaaacaatttataaacaaaatgttctcccctcagcccccggccctccaaccccttgcttttgtactgatctgtagcaagggtctcctagcacgtacaggataagacttgtgagagttcgaaagaaactcacggccattgattattacctgggcttatgcattatgtgaacatgttccttcagagaacccaggaaggcatcctatccttgtccagactttgctcagtaagaggcaggtgaccaagtgcaaacagcacagtgggtgggttcgaaaagaagctggtttgaatgtttgctctgccatctgacaatttggtgtctt

SEQ ID NO: 264005 - DNA, 674 bp, Homo sapiens
accactgcactcaagtgtcttatccaaccacagcagcagttccatttagtgttttgggttctctgccttgtcttgttgctgacaatcctaaccctccttaggaatcatgggctaagtgtgaagattaaaggggagaactggaggttagcacctgacccctaagacaccccccaggtacagggctcctgttcttctcacaaaacctgtggacccacttgactggyctgccactgtgcctcatagtagggtgctcctgtaccctccggaaagctctcttccttcgtcttcaccaggctaaatcctacccattgtttaaggttcgagtcaaaagcaacttctcctatgaagtcttcaccgccacctctcccccgtcagttaactttcttatactttctcctgaactcatatacttgtgacaaaagagaaaactgcatggtgacctgaaaccatgccacttccactgatttcttctagggtcttagacttcagaggtgatgttgtccaagcctgaggctttactcagctgagcaggtaccagtctaatcataatcaccagaccacaccatgaatgccaagtacgtgacaagaaaaagctgaaacttaaatgttttgtgcaaacagactaagattttatttggagacttttgccagagactgaggcaagagactcttgg

SEQ ID NO: 264006 - DNA, 555 bp, Homo sapiens
tatgactctcctgcttgagattggcaagttaacagtttcctattgctgtaaggcaaaggatcagaatgcaacacacatgttctgcccttcacctggcttgcaagacgcaccatggctcatgacctcccagctgtccgagttggagtcacactgtcttgctttagtttctgcagcagcccgccatgttccttccagccaaaaagccttcaacatgttccctcaatatggaatagccctggctcacccttcagatctcgtaagtgtcatctgttacaggcaaccccttctgatgccacctctactcccaaggtacccaggtctctctgttacaagccctcttatcccccatgtaatcaccttcatggcayttcaatgctatctgaaatcacaatggccattttacatttttggccattttacatttatttggtgaacatctgattattatctgcctctccaccaagactgcaggctcctgaaaataagaatcctgttgggctatcactgaattcccaaaatcaagctcaaggtttcacatgtcccagaaactcagaa

SEQ ID NO: 264007 - DNA, 567 bp, Homo sapiens
actaacagactccattttcaagagcttaacatataaagtatatttcttgctcatacacagtctgcttatggtctataggctttttggagtagctgtcttccaagaagcgactcagatctaggacgcatttgtctaatctatcgccactcctattcagcatttttctgaaagtctcagctactgagttaggcaagaaaaagaaatatgaaagaaaaataaartttatcttaatcacagataagattataaaacagaacccaaaagaatcttgaagttaattactaacataagtttagcaagtttgctagataaaaatttatacttgaaatcaattgtactttttgtaaagaggcaacaaatgaatttttgaagatactatttttgatagcaaggagccagcaataagttggagaaaagaactctacaaagaaaatataaagctttgcaataaattagagaaggctaagaagaaatcggatcctgataatgagttggaagacttgtattatacatatgttggttcttaaattcatctatagattgaataaaatcctaatagattgtttt

SEQ ID NO: 264008 - DNA, 564 bp, Homo sapiens
tcacaaaatctttatgtcacaaaggaaatggtgaaaacgcaatttcaggcaaaattgaaataattgtaaagttctaaaacatcaacatgttctaaaaaatgatcataaaaatgaaagatagactgaattatgtawtcaataaaaaatctttaaatacattaaccttcaatcattgtaaactcatgattttattacttttcagttctagtaaaaatttgaactatttataccattctctacaaccaagatattacgttatactttatcatgtgcataagtatgtgaccttcaatccaaaatcaaaattctgccacttttaacaacaattaaaatataataacttgatcaaaaagtactataatttcaaggttttctattctatttaactttaaaatttgtgactctcaggcagtttaaaagataaagccaatagacatgtagatacatttcagctaagtagaaagatcctgtaaccatttttgtacatctgctgactataatgcatgtatacatatcaatatgcagtacaaatttgtaaacatgaacatttgaaactttgaaagg

SEQ ID NO: 264009 - DNA, 608 bp, Homo sapiens
ggacaaatgctgactccagtaaaaagtgaagggactcacaatacccttcccttttcaaaatagcaaggaatagcatttgctacatgaggaaagattgttggttgcatacttgaccgaacaagtacggaatttctaagtggagcagaatattattaccacaaggctttgttcatgtccctccccaaccataataaaaagctatagaagagaaagtatgagagaaaaagctgtgtcccaacctccttttcaagggtactttctgtgaggcagatttgtggaaggctgaaattagttagactcacaaaataamcagctgcagtgaagtggctgtcccatgccaaaaggtggctatgggaatggctcacctcaaaataacctgggccaggtctagcgggcgcgaggaactgtgacatgggatactgtccatggttatcttagaggccttaactgagaggtctggccacagtctaagaccaaagtctgatttttgtcttatactacacaggcaggagacggggaagtgagttattggagtcacagtgtacaggaaaggaagaatgagccacttacatggggccaggtaagtccgagccctatcaattgagggg

SEQ ID NO: 264010 - DNA, 568 bp, Homo sapiens
gctatcctattttgcatgttcctttgtctccttggtgctactcttggaacaaaccagaacttcccagcagtttgcggagcgggcgccttctgggcagagccagatacctagctttcttccagccaagcgtacctcacaggacctttgctgctgtagagcttgaatcttgacttrgtaatttaggtcgcgaatggctgctctgggcgccaagatgtgctcaaaagtttggggtgaggttgctgcactcatcagggactccaaaagcactttcctgtgatagtaaagctctgtctgggtcaaacaggccgttttacaaacactttagaaagtcaaagcacaagtgccattttccggtgctcctctgaatccctattacccagttatatcatccgacctgtgattcagcttcccagtatcttcctggaccagcatgacctttgaaagaccatgatccagggcgccatcgatttattaaaaacactattttgtgagaagccaagaagtttctgatattattccccttgccggaatgtaacaaaatgccactcatatttttaaattgggagag

SEQ ID NO: 264011 - DNA, 547 bp, Homo sapiens
aaaaagaataaaatacctatgaatacagctaaccagggatgtgaaatatctctacaacaagagttacaaaacacctttcaaagaaatcagagttgacacaaaataggatcaatattgttaaaatggccatacttcccaaagcaatctacagattcaattctattcctgtcaaactatctatgacattcttcacataattagggaaaaaaaactattttaaaagtcatatggaaccaaaacagggcttgaatggccaaggcaattgaacaaagaccatgaacaaagaacaaaagaacaaagctggaggcatcatgttacccaacttcaacctataatacaaggctgtagtaaacaagcrgcatggtattgctacaaaaacagatacatagaccaatgtgacagaatagagagcccagaaataatgccacacacttaaaaccatctgatctttgacaatgcccacaaaaacaagcaatgagggaagaactccctatttaataaatggtgccatatggctagccatatgcagaagattgaaactggacac

SEQ ID NO: 264012 - DNA, 583 bp, Homo sapiens
ccatctcacaccagtatgaatggttattatcaaaaagtcaaaaaataacagatgctggcaaggttgtggaaagaagrgaatgcttatacactactcatgggaatgtaaattagttctgccactgtggatagtagtgtggtgatttctcaaagaactcaaaatacaattaccattcaacccagcaatctcattattgggtgtatatccaaaggaatataaattgttctactataaaggcacatgcatgcatatgttcatcacagcactatttgcaataccaaagacatggaatcaacttaaatgcccatcaacagtagactagataaagaaaatgtgatacatatacaccacagaatactatgcagacataaaaaggaatgagatcatgtcttttgcagcaacatgaatggagctggaggtcactatcctaagtgaactaatgcagggacagaaaaaccaaacacagcatgttcccaattataagtgggagctacacagtgggttcacatggacacaaagaagggaataacagaaaccaggacctaccagagaatggaggatgagcagaaggagattaatgaaa

SEQ ID NO: 264013 - DNA, 596 bp, Homo sapiens
tacaaaaatgcaattttactttaatattgtgtccattaattacttgagacaaaatccgttacaaatatccttctgttaattgaagtttaaagcatattttaatatgtatcattatcaattaaggagaaaaaatttagtgtgatttatgatattaggcatagtagaaataatctagaagcaatattacacttgtattgacaaagtgacatagtagcaataagatttctatattgaaggatctgrtcataattcactaaaatacaaagggtttgtaattctgtcctttatagtcacatgcttaatttgcttcatcaaagatagttttgactatttagattcaattattgcctattattaaatcaaaccattaaaacactttaaggacaaatctttaatttcaaaatatctgaaagataaagtaaacattagcaaaaatacctagtagcttattctgatacttatgaaacaatttctctctgtgttctcaaatgtcatgtccctaagcaaagcttaatttcatcttcaagtttatttttcttctaatgaagttttacgaactgctagtctcttatttttatatgatgtatgtttatgtt

SEQ ID NO: 264014 - DNA, 599 bp, Homo sapiens
caattattgcctattattaaatcaaaccattaaaacactttaaggacaaatctttaatttcaaaatatctgaaagataaagtaaacattagcaaaaatacctagtagcttattctgatacttatgaaacaatttctctctgtgttctcaaatgtcatgtccctaagcaaagcttaatttcatcttcaagtttatttttcttctaatgaagttttacgaactgctagtctcttatttttatatgatgtatgtttatgttcagaactgtgactcctaaaaagaaaaattaaatctgaagagaactctaccctgaaaagcttggaaaacctatgtgttaatgtgcataaaatgaaaatggaattttgaatatttctagtcttttctttatgttttggtttattctcttctcactgtgccatactgtgggagaaatcttttcagtaaattctgattccttctagtttccatcctattccatgggtgtctactgaattttgagaattttactttatatccctgttgttatttccaagtackggtttgcatgcatgaataatgattgtttgagtaagaaattgtccttatttgctacagtttact

SEQ ID NO: 264015 - DNA, 555 bp, Homo sapiens
ggaagtgtgctgcagaaacaggtgcagaaactgggtgaccctgcttcatgcacagattgggaggggtgtggccagaaagccagagttgctctccccactgagaaggctatggcctggggcagtttacagttctgagcaagactttctagaatgtagtgagctgctaccagttgaatgctgtaagtttgagtcctgcattgccaagtgtccattacaacatatacaggcacaataacagggtacaggaaagagaacacatgtgtctratcttagctatctgaattgcctgcatcacccgggataaccatgaggtcctcattttttgtgacaagttcattattactacaactggtatttgagaaagccaatgcactaaggctatttataaccaagaaatctcacagtctgtgtcactccgctgtcaccccaatcagagctggtactggtagccactgctgggaatgtagaggacaattaacatcactggaccacttgcagacattccacagcaccagcctgaagtgtagcaacctcacttggtggctagacttagag

SEQ ID NO: 264016 - DNA, 493 bp, Homo sapiens
accaaattagcttacaataaactataaacattaaagttgcatctcaagaggaaataataaaaaatcacrgtcaaataaaaaataaactaaaaatatttagaagaaatgcactgcccaaataagatagaaacagaaaaataattttggcaatatgacaaaacaaggttttataacagctgccaaagatcacactagctcttcagcaattgatcaaaacaaagataaaatatttgaaataccagataaataattcaaaatgttgattattaagctactcagaaagacacaagagagaggtgaaaatgaacataaataaattaaggaaaataattcagaatatgggtgaaaaattttctaaggagataggtattttaaaggaaaaccaatcataactaatgcagttaaaagacatatttagaaaattataaaatgcagtgaaaagttctaacaatagactaaaccaaatagaagaaagaatttcaggcctcaaaga

SEQ ID NO: 264017 - DNA, 493 bp, Homo sapiens
accaaattagcttacaataaactataaacattaaagttgcatctcaagaggaaataataaaaaatcacggtcaaataaaaaataaactaaaaatatttagaagaaatgcactgcccaaataagatagaaacagaaaaataattttggcaatatgacaaaacaaggttttataacagctgccaaagatcacactagctcttcagcaattgatcaaaacaaagataaaatatttgaaataccagataaataattcaaaatgttgattattaagctactcagaaagacacaagagagagktgaaaatgaacataaataaattaaggaaaataattcagaatatgggtgaaaaattttctaaggagataggtattttaaaggaaaaccaatcataactaatgcagttaaaagacatatttagaaaattataaaatgcagtgaaaagttctaacaatagactaaaccaaatagaagaaagaatttcaggcctcaaaga

SEQ ID NO: 264018 - DNA, 493 bp, Homo sapiens
accaaattagcttacaataaactataaacattaaagttgcatctcaagaggaaataataaaaaatcacggtcaaataaaaaataaactaaaaatatttagaagaaatgcactgcccaaataagatagaaacagaaaaataattttggcaatatgacaaaacaaggttttataacagctgccaaagatcacactagctcttcagcaattgatcaaaacaaagataaaatatttgaaataccagataaataattcaaaatgttgattattaagctactcagaaagacacaagagagaggtgaaaatgaacataaataaattaaggaaaataattcagaatatgggtgaaaaattttctaaggagataggtattttaaaggaaaaccaatcataactaatgcagttaaaagacatatttagaaaattataaaatgcagtgaaaagttctaacratagactaaaccaaatagaagaaagaatttcaggcctcaaaga

SEQ ID NO: 264019 - DNA, 616 bp, Homo sapiens
attattaagtaacctataaaggaaaactacagactaataacagacatctcagcagaaatcttacaagccaaaagatattggggtcctacctttagccactttatacaaaaaaaagaaaaaaaaaaacctgtcagccatgaattttgtacccagcaaaactaagtttcataaatgaaaattgtatttgtccattttcatgctgctgataaagacatacccaagactgggaagaaaaagaggtttaatggacttacagttccacatgacaggagaggcctcaaaayaatggtggaaggcaaggatgagcaagtcacatctttcacagatggtggcaggcaaagaggaagactttgtgcagagggaaactcctgtttataaaactatcagagctcatgggatttattcactatcctgagaacagcataggaaaggcccactcccataattcaattaccttccaccaggttcctcccatgacacatgggaattgtgggagttacaattcaaaatgagatttgggtggggacacacccaaaccatatcattctttccctggccactcaaaatctcatgtcctcacattttaaaaccaatcatgctttcctaacagtccccc

SEQ ID NO: 264020 - DNA, 616 bp, Homo sapiens
attattaagtaacctataaaggaaaactacagactaataacagacatctcagcagaaatcttacaagccaaaagatattggggtcctacctttagccactttatacaaaaaaaagaaaaaaaaaaacctgtcagccatgaattttgtacccagcaaaactaagtttcataaatgaaaattgtatttgtccattttcatgctgctgataaagacatacccaagactgggaagaaaaagaggtttaatggacttacagttccacatgacaggagaggcctcaaaacaatggtggaaggcaaggatgagcaagtcacatctttcacrgatggtggcaggcaaagaggaagactttgtgcagagggaaactcctgtttataaaactatcagagctcatgggatttattcactatcctgagaacagcataggaaaggcccactcccataattcaattaccttccaccaggttcctcccatgacacatgggaattgtgggagttacaattcaaaatgagatttgggtggggacacacccaaaccatatcattctttccctggccactcaaaatctcatgtcctcacattttaaaaccaatcatgctttcctaacagtccccc

SEQ ID NO: 264021 - DNA, 616 bp, Homo sapiens
attattaagtaacctataaaggaaaactacagactaataacagacatctcagcagaaatcttacaagccaaaagatattggggtcctacctttagccactttatacaaaaaaaagaaaaaaaaaaacctgtcagccatgaattttgtacccagcaaaactaagtttcataaatgaaaattgtatttgtccattttcatgctgctgataaagacatacccaagactgggaagaaaaagaggtttaatggacttacagttccacatgacaggagaggcctcaaaacaatggtggaaggcaaggatgagcaagtcacatctttcacagatggtggcaggcaaagaggaagactttgtgcagagggaaactcctgtttataaaactatcagagctcatgggatttattcactatcctgagaacarcataggaaaggcccactcccataattcaattaccttccaccaggttcctcccatgacacatgggaattgtgggagttacaattcaaaatgagatttgggtggggacacacccaaaccatatcattctttccctggccactcaaaatctcatgtcctcacattttaaaaccaatcatgctttcctaacagtccccc

SEQ ID NO: 264022 - DNA, 544 bp, Homo sapiens
aagccatatgattatctcaatagatgcaggaaaagcattcaataaaatccagcatccctttatagtaaaaacmttcaacaaggtagacacagaaaggacattcctcaaaatactggaagccattatgacaaacacacagccaacatcataccaaatccaaataggaaaatgttgaaagcattagccctaagaactggaaaaagactacaatgctcacttttattacttgtattcaacaaagaactggaagtcctaggcaaagcaaccaggtaagagaaagaaatgaagggcattcatattggaaaaagaaagttaaactatctctgtttgctgatggtatgattatatacctagaaaaccctaaatcctcaaccaaaagatgcctagatttgataaatcaattcagtaaagtctcaggttataaaatcgatgtgtacaaaatgcactgctatacctcaacaatgtccaagctgagaatcaaatcaagagctcagtcccttttacaatagctgtaagaaaaataaaataactagaaatatactta

SEQ ID NO: 264023 - DNA, 544 bp, Homo sapiens
aagccatatgattatctcaatagatgcaggaaaagcattcaataaaatccagcatccctttatagtaaaaaccttcaacaaggtagacacagaaaggacattcctcaaaatactggaagccattatgacaaacacacagccaacatcataccaaatccaaataggaaaatgttgaaagcattagccctaagaactggaaaaagactacaatgctcacttttattacttgtattcaacaaagaactggaagtcctaggcaaagcaaccaggtaagagaaagaaatgaagggcattcatattggaaaaagaaagttaaactatctctgtttgctgatggtatgattatatacctagaaaaccctaaatcctcaaccaaaagatgcctagatttgataaatmaattcagtaaagtctcaggttataaaatcgatgtgtacaaaatgcactgctatacctcaacaatgtccaagctgagaatcaaatcaagagctcagtcccttttacaatagctgtaagaaaaataaaataactagaaatatactta

SEQ ID NO: 264024 - DNA, 544 bp, Homo sapiens
aagccatatgattatctcaatagatgcaggaaaagcattcaataaaatccagcatccctttatagtaaaaaccttcaacaaggtagacacagaaaggacattcctcaaaatactggaagccattatgacaaacacacagccaacatcataccaaatccaaataggaaaatgttgaaagcattagccctaagaactggaaaaagactacaatgctcacttttattacttgtattcaacaaagaactggaagtcctaggcaaagcaaccaggtaagagaaagaaatgaagggcattcatattggaaaaagaaagttaaactatctctgtttgctgatggtatgattatatacctagaaaaccctaaatcctcaaccaaaagatgcctagatttgataaatcaattcagtaaagtctcaggttataaaatygatgtgtacaaaatgcactgctatacctcaacaatgtccaagctgagaatcaaatcaagagctcagtcccttttacaatagctgtaagaaaaataaaataactagaaatatactta

SEQ ID NO: 264025 - DNA, 561 bp, Homo sapiens
tttgctgatggtatgattatatacctagaaaaccctaaatcctcaaccaaaagatgcctagatttgataaatcaattcagtaaagtctcaggttataaaatcgatgtgtacaaaatgcactgctatacctcaacaatgtccaagctgagaatcaaatcaagagctcagtcccttttacaatagctgtaagaaaaataarataactagaaatatacttaactaaggaggtgaaagatctctacatggagaactacaaaatactgcagaaagaaatcatagatgacacaagcaaatagaaataaagatgacatgaacaaatagaaatacatcccatgcttattaattggaaggatcaatattgtcaaaatgagcatactgaccaaagcaatccatagaatcaatgcaattcctatcaaaacaccaatatcattttttatggaattcaaaaaaacatttcaaaaattctataatatggtttggctctgtggccccacccaaatctcatgttgccttgtaatccccagtgttgggggagggacctggtgagaggtgattggatca

SEQ ID NO: 264026 - DNA, 607 bp, Homo sapiens
atcatacatctaaaaaccctgaacgctctaacaacaacaaaaacaacaacaaaaactcttagatctgataaataaatttaattaagtaatagaacataaagtcaatataaaaaatcagtagtgtttctatacaccaataatgaacttgctgaaaaaatcagaagtaagtcccatttgcaataactacaaaaaatacttataaatatgtataaccaagcatgtgaaagacctcccyaagaaaaactataaaaacctactgaaagaagttgaagaggtcaaaaacaaatgaaaagataccccaaactcatggactggaagaattaccatcattaaagtcaccatgctacccaaagaaatccacagattaaatgtaatccttataaaaatgccagtcatttttcagaaaaatagaaaaagaaattctagaatttgtatggaaccaagacaaagcccaaatagccaaagcaattctcagcaaaaagaacaaagttgtagacatcacattatctgacaacaaaatatattaattactaatctatagtaaccaaaacagcatcatactggcataaaaacagatatattgatcaatggaacagagtagagggcc

SEQ ID NO: 264027 - DNA, 562 bp, Homo sapiens
ccttataatacggctcatgagagtgaaaaatgctacaatcactttggaaaacaatttaccagtttcatttatataccttttgtcccatcaatggccacctcttaaaataaggaaatatgttcaatcatataagaacagaattgtaaagtaaaactgcactgagatcttatctgccataaaattataacacatttattccacaaaacaatgggaaaatagttactttcatataaatctggtggaacgtgtaaaatgatacacctataggggagaatttggtactataaatcaaaatttcaaatgtgtgtgtctgtttctgggaatttatcccactgatcatgcacataagacacatatcaaaaaacgtatgttcaaagttattttcttcaggattgcttgtaatagccaaagactgaaaacaagtcagtgtccatccatggtggatgggtaaaattagccataattcacccacacaatagaatatagtcctgatattaagaaatgataargaagatccctatggactgcaatgactccaaggacatcgtgagtgaaaaataaa

SEQ ID NO: 264028 - DNA, 627 bp, Homo sapiens
atactctctctaaaatggtctaaggyaactgtacactcatccagcctgtgtggctgctcttggtaccaacttgcctcaattgacagcttgtggctcttttccagtgtcagcttattttgtaaccttcctggagtgatgagaaactatgaacttttctttttttctgtagctagttactctcacctttcttttccactaatcttgtgagaatgggaggcaatttttaaaacttgtttgggcttttactcaagcaatctgtatcttcatgtaaaggtccctatatctaaaaggaaaataatcagatttaatctaaaattagtcatttataaaataaaaacttcagccaagagtaactcattaaaccataaagacaatctaaagatatctttagacatagaagaaatcattaatctcaccatttacagaataaattatttgaacaataaggaacttatagttaatgtattctactgtaaacagtaaatgaagcagaatgaagtactagtatgggattaagttacagtgaatacactcatccattactcaagcaattaaaatcaaattaacaataaggaaaaagagaaagagttttttattctggttatttcctcacctatcacactctta

SEQ ID NO: 264029 - DNA, 502 bp, Homo sapiens
acttaattattaactgaaatatttctccttaagatcaggaagaagacaaggatgctacgtttcaccaaatatttagcataatattggaagtaacattaagaaagaataagagataaaaagcatccaaatagaagaaaaaagaagtaaaacaatctctatttgcagatagcatgattctgtatataaaaagcagcaaataacttgcaaaaattagaatacataaatgaattcagaaaaattttaagktacaaaatcaacatgcaaaactagttttcttattagtcaaaatgatgattccaaaagaagaagtaaagaaaacaattttattacaataaggttcaaaatagtaaaatgcttagaagtacttgaaggagttgttagaattatgcacagaatgttggaaaactttgtggaagaagttatatttgacctaaattaataaacagataccctatgtttatgcactaaatattatatttttataacggtaatgtcaacggaa

SEQ ID NO: 264030 - DNA, 538 bp, Homo sapiens
caacacacgtaagatgtacattgttttggtatagaaaggtgggacaacttgaagcaggggtgagaggaggccttccaggccataggtagattcaaaatttttctgattaggaactggatgaaagagttgaaagaaacgtctggrttaagatcagaggttgtgaagaccaaggttttatcatgcagatgaagacttcagaaaccaagcttcagagctcttatgagatctacaaagttgccagacctttagttagttctcttccgaatcagggaaaagacctgaaaagggaagagaattctctacagaatgtagattttcccaacaagagacagctttacagggccatcccagtacatatcaaagaaatatattttgggataaaatatttcaatttctttcataaccttctatctttcatgagacactatactaaagccaggttgaaatttgttgtctcattgctaaaaagtgtctgctttgtcagtcttaaaatctctgtttaaatgttaaaactggtcagctttgctggacttccaaa

SEQ ID NO: 264031 - DNA, 611 bp, Homo sapiens
gtcttttgtatttctgtagtatcagttttattatctcccattttgtttctaattgagcttatttggctcttctctcttcttttcttggttaaactcactaattgtctatcaattttctttatctttccaaaggaccagtttttgtgtcatttatgttttttatatttatttatttatttatttatttattttgagatggagtctcgctctgtcacccaggctggagtgcagtggcgtgatcttcgctcactgcaagttccacctcctgggttcatgccattctcctgcctcagcctcccgagtagctgggactacaggtgcctgccattaagcctggctaatttttttgtatttttagtagakacggggtttcaccatgttagccaggatggtctcaatctcctgacctcgtcatccgccctcctcagcctcccaaagtgctgggattacaggcctgagccaccgcgcctagccttttttatttatttctttcaattttattttatttagatctgctttaatctttgtcatttctttttctttcttttttttttttcctgctgggtttggttttggtttgttcttgtttccctagttccttgaggtatgac

SEQ ID NO: 264032 - DNA, 522 bp, Homo sapiens
ttgaaaagctgttataggtcattattcttcattattcttcatgaccttaagttgtttagtttttctacttaagaatagtttgcacaccacagttacagtgttacagtattttgtgtttgtctgtgtacttactattgccagtgagttttgtacattcagatgattttcttttttaaacttttttgctgtgttcyggtatacatgtacaagtttgtggaataggtaaacccatgttatgagggtttgttgtactgatttttttttatcacacatgtattaaacctagtacccattcgttatttttcctgattctctcccagctcccacctctaccctctggttatccccagtgtctcttatttccctctatgtgtccatgtagtctcatcatttagctcctatttgtgagaacatgcggtatttggttttctgttcttaaattagtttcctaaggattatagactccagctccattcaggtccttgcaaaggacataatgtcattttttatgactgtatagta

SEQ ID NO: 264033 - DNA, 585 bp, Homo sapiens
aaatgccatctgtgacaagcccacagccaacattatactgaccatggaaaaattgaaaacattccccctaagaactggaataagacaaggatgcccatgttcaacacttcttttcaacataataccagaagtcctagccagagcaatcagacaagtgaaagaaataatggacatccaaactggyacggaaaagtcaaactattgctcttcaccaatgataaaatcatatatgtagaaaaacctaaagactaatccaaaagctcctagatctgataaatgaattcagtaaagtttcagaatacaaaatcaatgcacacaaatttaatagagctgctatgaaccaaactgagaatcaaatcaagatctcagccacttttacaataggtgtgaaaaaaataaaatacttagaaatataccaaacaaggaggtgaaagacctctacaaggaaaattagaaaatgctgctgaaagaaatcatagatgacacaatcaaatggaaacacatctcatgctcagggatgggtagaatcaatattgtgaaaaggactatacttccaaaagcaatctacaattcaatgcaattccc

SEQ ID NO: 264034 - DNA, 582 bp, Homo sapiens
aggctcttgctcagtcatgtggctgtcttatattttctcacagttgcagctgcctctcagtactcaatactctgaaactgtggacccttctttcacttgagtgttggttgtagatcatagcttggtactcccagactgcccaccacagctctggggagatctcagggtttatgtttcctccctaacttgaaggcaacagaggaagtgacctaccttagcagtggttgaagacgaggtctcttacttgtctyctgggggctctgccccagagagatgcagatcatcaattgatcagtgtaatcagctcaggatgggggtcggtgtggtaggctcaagccaggagttctgtgcctgatgataagcactgtgggtgggtgaatgggacctggtcttctttcctctgggttgactgctgcttgttggagctgtggataaggcacttaggttcttttctccttcgttagtatgggaagtaccactgctactctctctgcagtggcagagaggctttcggttgcccctgggggcttcacctctgagaaacatgaagccactgttgctggaagtttcagccagggcagt

SEQ ID NO: 264035 - DNA, 596 bp, Homo sapiens
cagcaggaagagtgatgaagggagaggaaccggtgactgtgatgaaatattgagagtgaattgtttgactatctcatcagcagaaactaatgattttcttagcagagaataaattgaaatttatatcaaaactctacttgctacctattatttttaagttatttatataattatgcctaagtaaatgatataaaggtacttgacactcatgttcattcattgtttatttagaaattctcaattaatttcagagatataaaattctgacagatattctaaggtagttgtaggttaatttttagattgattaagtttatgtaatgactacaaccgattttcttgtctactgagctggtaagctgtactatttacagaccctactttactcaaacayatttatggcatggtgagatatatatataatattataaaaatcacctaccacaatgctagacactcctcaccttacacatggtttcttctgacccctctctaaactttctacactctttactataaaataagccaactgtcttgaagcaaaacttaacattctctctttccagataaaatatctccctctctttcaaccacat

SEQ ID NO: 264036 - DNA, 393 bp, Homo sapiens
cactccaaacactcagctgtaacctagcaagttgcaaaatatggagayatcgccaattcagtcatactatatgcaaattatctgaatacttcaaagcattatatattgttgcattgtataaaaatgatgcaaaggtgagaatgcatgactattacctttccataaactcttatatttattagtttaaccactctaccaataagccagtttaaaattatcaatattcaactaatcaatcatatttaatttcttacagtctatcaaataactagaaccagtaggattattttggctctgaagcaagcagatacaccacttaatggtgaaattgtttattcagttaattcatgataatattaatcctttgaatagaataattctaaacaaacagta

SEQ ID NO: 264037 - DNA, 393 bp, Homo sapiens
cactccaaacactcagctgtaacctagcaagttgcaaaatatggagacatcgccaattcagtcatactatatgcaaattatctgaatacttcaaagcattatatattgttgcattgtataaaaatgatgcaaaggtgagaatgcatgactattacctttccataaactcttatatttattagtttaaccactctaccaataagccagtttaaaattatcaatattcaactaatcaatcatatttaatttctyacagtctatcaaataactagaaccagtaggattattttggctctgaagcaagcagatacaccacttaatggtgaaattgtttattcagttaattcatgataatattaatcctttgaatagaataattctaaacaaacagta

SEQ ID NO: 264038 - DNA, 686 bp, Homo sapiens
ttactgcaatcttatcaaaggtcatagaataggaaggaagtttctgagcatagagtctctatggagaacttaagcattgctcttctcttcataacaagaatcctagcaactcccttgcaaatggaaccaaatcctggaaatttaccaattgttcttgactaggtacaacgttagcatctgccagcggactctaatcttctgataggagatccctatatccaaaacatgattggcatataaataaaatctatgagcaagatctactttggaacactgtgaagagagtaaacatacccccaataaaacaagtcttgaagagttaaaacacacacatacactgtcaaataatctcaaagcaggaaatttctaaactctccatggttactgaaaacgggcatccatgttaagggatggattaaaaaacagataatatttaaygtcctttcaattattgaaataatatgagtctacttacattctgatgtatttcacagtaagacctccctcttttgtaacttatagctgcagatcaaatccaagatcaatgagacatatccatctcagaaattcctgcttagggctagctggaacctcagaataaaagtgtcaaggctcaagccacattcaaccaaaggtttaaagattaaaaggaagactcctcctcccatgcaataaactgtagaagt

SEQ ID NO: 264039 - DNA, 559 bp, Homo sapiens
tctcagtttctttgactcatagttcatattaaaacatttgttccaaaggcttaatgtgataatcaatgccatataattattatatggcaaatcctgaactatgtcctgaattaataaatgataactatgattggaaagcagtatagtattgggcatctatatttaaaattgtgaataataaaaattaataggtaacacaacacactagaatctgtttttaagtctgyaaatattttttcttactttttcctcacagcaactccaaaatggaagtactattgttatctccgtttacaaattaggaaactgaggcacagatatgctcttgggtacttgtcagcagcagttgttctacaagtaaggtgaaaagtagaacctctttatcactaggtattggataaataatttccctaagattgtttcatcctctcattctctacatcgatttaaaggactgccactatattcacatgcaaaacattgccaaaaaaaagtgtgaacattgttttttcaataggcttttatgtaagttatttagctacacattagaataatttta

SEQ ID NO: 264040 - DNA, 553 bp, Homo sapiens
aaacagatttttgttctgaatggtgaccttttctacctttgcttcacagatcatcctgactttcattcctacatgtaaacacacacgcacacacacacacacacacacacacacacacasagagagagagagagagagagaaacacatatctgttttgggctcctgagtctgtgacactcctccccagacagtgaccttgaaatataccatgagttttcatactatgagtaaatgtgctactctgtccataaacactgttgataagctatggacatgagggtgatgttgaagaccattccgaaaaattacaccgttgtttgccacacattttcttggagatagcctatgaagctatttaagtcacttaaccaatattcatctttgaagtaaacatggtttctactccctcctgcaagtcatgtgacacatggtggaaacctagggaactttcttttatatcaactttcaggagaaaagagtggattctggggaaaataaaacacactgaaactaaaaacaaataccaggtatcgggctttgtttgtagctaca

SEQ ID NO: 264041 - DNA, 676 bp, Homo sapiens
tttctattgaatgtctatcactttttcaccatcctagaaaaacccaggttgaatcatcataagttggggatcatctgcataagccacatagtatttgctgagaacttggtatgtataatttattctgacttccgtggagagaagagagagtatgcagatcatttggatatattaatgcactgctcctaaaagcaaataaaaaacagcaaggtgctcaccttttttttctaaagcatgtggatttttgtcttgttttatgttgttttgttttgttttatcctaaacccactgactcagaatctctggaagtggagtttagactctggcattttcagtaagcttcccaaatgattcttatatttggggaaatcttttgaaagccaaacacgtgttgaactacttgaaactttttwaaagctggttagaatgaccatctaatctgtggtactttaaaagagaaagaagacactattaaaaaattattgcagaacaacctgtgtgtatatatatatatatgccaagaacttcccagaaaatcaagaaatactttcattttagtgagaatggaatactaggatacatgtcttaaacataaaatccagaacagactaaatgttttggatgtatactagactgttagctccaaattatccctgttcatttcaagttagaactg

SEQ ID NO: 264042 - DNA, 553 bp, Homo sapiens
gttgaatttttctccttataaatacctttattgtctttattaccaatctgcagggtaagccaagcctcaagtgctaactaaatttatgtgtgtgtattgaaattggaggaaaatatacattgaaagagcctcttatgatatagtgcatgatttcctgctccctgttcccacttccagcagatattgtctgtcctccaggaaatattacagtatgtctacttcaatagcttctttcctagattatcagctgagagctagagcctgccagacctaagcataattattgttcttggggcttcaccccagcctggctccagtatcgcctctgtagaactctacaattggaacaataaaagaaagagagatttcaaactggtccccaaagcactggtttcaagctttttatccaagattctttctctttcatctcttttatttgtcttttccctttyttagtttctctttcttcaattttgtcttttcacttttttagtttctttctcttttttctcttttatttgtcttttcactttttttcttttttccttttttc

SEQ ID NO: 264043 - DNA, 600 bp, Homo sapiens
gcacgatagatattatatttaaattacctacataaacatgactgagtagactgacttttgactgaaaaacttctaaaagccttttttttttgtttttgatctgagtgcatttcatgaggtaaattgcattttatgttgatggtctttaataaaatactttttaatcttgagatcagtgctataattttgttttgaccaatttaaaacttttgctatggcatcccatatagctgtatgttttaatattagtaaaagttactgatgtgaaagtatgcacacacatatattcatagtttttcatttttctattaaaaatagttctagyacaattgtttccacaagtcatagacatgggaattagttatattactttagaatgaaaggtaaaaatttatttaaatttcaaactggataaaagtgcttttggaataataaagctgtctatatattagcttctcagcttaaaatgaatatattaagataattactctcattaaaagttatcaataaactttggaaaattgtagataaaatatacgaatatatcactttatcattgataaggtataaatgtgttgttcaccttgaaataaataatgt

SEQ ID NO: 264044 - DNA, 600 bp, Homo sapiens
gcacgatagatattatatttaaattacctacataaacatgactgagtagactgacttttgactgaaaaacttctaaaagccttttttttttgtttttgatctgagtgcatttcatgaggtaaattgcattttatgttgatggtctttaataaaatactttttaatcttgagatcagtgctataattttgttttgaccaatttaaaacttttgctatggcatcccatatagctgtatgttttaatattagtaaaagttactgatgtgaaagtatgcacacacatatattcatagtttttcatttttctattaaaaatagttctagcacaattgtttccacaagtcatagacatgggaattagttatattactttagaatgaaaggtaaaaatttatttaaatttcaaactggataaaagtgcttttggaataataaagctgtctatrtattagcttctcagcttaaaatgaatatattaagataattactctcattaaaagttatcaataaactttggaaaattgtagataaaatatacgaatatatcactttatcattgataaggtataaatgtgttgttcaccttgaaataaataatgt

SEQ ID NO: 264045 - DNA, 543 bp, Homo sapiens
atttacctagtgagcattgtgcaagactgcatggataagggctgcatcatttaattgcgacataccagkggaaattgtatgtatgttagtgacaaatttgatttcaaagagcaatgcatcttctcccccagatcatcacagaaatcactttcaggcaatgatttacaaaagtagcatagtagatgatgacaactgtgaactctgacataaatttagtgctttataacgaactgaatcaggttgaggattttgaaaactgtataaccataggatttaggtcactaggactttggatcaaaatggtgcattacgtatttcctgaaacatgctaaagaagaagactgtaacatcattgccattcctactacctgagtttttacttgcataaacaataaattcaaagctttacatctgccgttgtcttaatgacctttcttttaaacaaaagtaatcagcttttcgaacaaagaacttttctaagcaaccatatgatatgattcttatgcaatattttataccattcataattaactccagctagat

SEQ ID NO: 264046 - DNA, 541 bp, Homo sapiens
tagccttaaaaaataaaaaagaaacatccttatcttaaagtcttctagtattaacagaagaagcaccacataacacaaaaacaaacaygcttttctaaatacaaggaaaactgaatcctgttcaagcttttctccaactgtaaatatgcatgtcacttaatttttcagaaccatagttttgttaatttgttttaaagatgtaaaactaagagtgaacagtaagactttgcttgtcttaggactcatccattgcaggttgacctcccagagatgggactgacttccttcaaagctccatggcaacaagctatggcccagtgattgagacagtttctcaaaacttgaacatcagtccctcggcatatcaaaggaagggctggtatttccccagttgtgaacacaggtgtgcctaatactgttgtttatttgttacgccatatgactttaaccatccggcttagatcccaggcctctgctgcatcaggggaggggtaactgtcccccaagcctgccccaatccagaaagcagaggtaccacagt

SEQ ID NO: 264047 - DNA, 431 bp, Homo sapiens
aggcgagaggaaatgaattgggttaaagatttaatgggaattttagggggtggatacctattctttcagcaatgtttgttatggaaatttgcaggagaaaaacaaaacctggtcttttctaggatctatgtgtttccttaatgtcttagcacaagcgactctgttttggtttggtttggtttggtcttttggggcctagtgcatgaactcagtccaaaacaattgcctcctatgcttttgcttaaaaagaaaattcccccctttttgataaggttctcacttaggtgagagtgtgaccaaaacttagggcyttagcaccactctcagttactattatttcgggtttctggtctcaccacatcattcataggttatggtgtcctcatggtcacacatttctttcagctcttgtcattctaattgaagagaga

SEQ ID NO: 264048 - DNA, 431 bp, Homo sapiens
aggcgagaggaaatgaattgggttaaagatttaatgggaattttagggggtggatacctattctttcagcaatgtttgttatggaaatttgcaggagaaaaacaaaacctggtcttttctaggatctatgtgtttccttaatgtcttagcacaagcgactctgttttggtttggtttggtttggtcttttggggcctagtgcatgaactcagtccaaaacaattgcctcctatgcttttgcttaaaaagaaaattcccccctttttgataaggttctcacttaggtgagagtgtgaccaaaacttagggccttagcaccactctcagttacyattatttcgggtttctggtctcaccacatcattcataggttatggtgtcctcatggtcacacatttctttcagctcttgtcattctaattgaagagaga

SEQ ID NO: 264049 - DNA, 561 bp, Homo sapiens
tggtataaataaaaggacaaaccgttttacttttcgtatagaatagccaattgagagatggtacatattgaaaataaactttcctccaaaaattgagatgaagaatgaatgtcagtactataattaactattaaggaatctattttctttttgatggcgtaagggtarcagaagtaggcagaaagaagggagtaggtctctctcttttatagatgtacctcaagggcatcagtagagttcttcagctttttctttattgtcactatcaaagacaaggttggcctcattatgattctactagtaccatagggcaattcttcttttgttccattgttaatgaatctgggaatcacagttcctttgagataatcgagatcattatattggtattccccctcttagaagttttttaaactacatatttcaatgcagacctttgtttttcttgacttagtttccagcaatggctttactaccggtgttgtttctggttactgtgctgcttccatctttacctgcagaaggaaaggtaaggttaaaatggaaaatcttttcagagct

SEQ ID NO: 264050 - DNA, 571 bp, Homo sapiens
gataattaaagtctaaagtttttaaagtatatttcaatgtggcaacacacttcatctcccaacagacttcgtcaaattgctaagatgatgtascaaaaggtgctggcaaggggtaaaacatatcccctagagagataagaaaagttcctgaagcacagaaggttgcaatatgaaaaataacatttaatgttaaatgtaacttataattaaaaataaaaaaaaccataatttctacaatatgaggtagggtaagtacagtttcagcgtaaattttggcttctaggtggagtggtgattttcacatggtttttgctgtatgtttgtgaaagggtattgggcttggaaaggtttgggaatgtctacaggtggtgtgtatgagatgtttatgtttgccaagaatgggaatgttagggaaaaaaagatttaattaatactaatctcctctgtgtgttcatcttacagtgactagcctgtacatcattgatgattattttcctatcggtaattatcatctgaaaatacaagaaagtcaaagtcttaattgcactaagtaggctaacggtccaaggct

SEQ ID NO: 264051 - DNA, 571 bp, Homo sapiens
gataattaaagtctaaagtttttaaagtatatttcaatgtggcaacacacttcatctcccaacagacttcgtcaaattgctaagatgatgtagcamaaggtgctggcaaggggtaaaacatatcccctagagagataagaaaagttcctgaagcacagaaggttgcaatatgaaaaataacatttaatgttaaatgtaacttataattaaaaataaaaaaaaccataatttctacaatatgaggtagggtaagtacagtttcagcgtaaattttggcttctaggtggagtggtgattttcacatggtttttgctgtatgtttgtgaaagggtattgggcttggaaaggtttgggaatgtctacaggtggtgtgtatgagatgtttatgtttgccaagaatgggaatgttagggaaaaaaagatttaattaatactaatctcctctgtgtgttcatcttacagtgactagcctgtacatcattgatgattattttcctatcggtaattatcatctgaaaatacaagaaagtcaaagtcttaattgcactaagtaggctaacggtccaaggct

SEQ ID NO: 264052 - DNA, 446 bp, Homo sapiens
aaagctgagtttggggaaaacccctcccactagtggtgaacaacttcaaatattaaaaggaaattaaagctaatagatatgttgtgaatatatcttcaatatatccacagattttttttcgtgagtaggtcaactatattgcttgagaaaaaaaagtggactttctgcagaaaacccgagataattaagaaattaggatcttaatggawggttccatgaaattttttttgtggtaaattctaagaagcaaaaatttaagacattatcttttcttggctatttgaaatatattggggatctcttaaaagtctttgaggtccaagatttaatcatttcttaatgtataatgtgaaattttctgataagcaggagtaacagcatttgagcagaaaggactgatattgctaaaatgggtcattccttatttgtttgttaccttactttat

SEQ ID NO: 264053 - DNA, 446 bp, Homo sapiens
aaagctgagtttggggaaaacccctcccactagtggtgaacaacttcaaatattaaaaggaaattaaagctaatagatatgttgtgaatatatcttcaatatatccacagattttttttcgtgagtaggtcaactatattgcttgagaaaaaaaagtggactttctgcagaaaacccgagataattaagaaattaggatcttaatggatggttccatgaaattttttttgtggtaaattctaagaagcaaaaatttaagacattatcttttcttggctatttgaaatatattggggatctcttaaaagtctttgaggtccaagatttaatcatttcttaatgtataatgtgaaattttctgataagcaggagtaasagcatttgagcagaaaggactgatattgctaaaatgggtcattccttatttgtttgttaccttactttat

SEQ ID NO: 264054 - DNA, 531 bp, Homo sapiens
taaaatatatattaatataatttgaattctgaattaaataatatacatatttttcaggatttttctacaaattgattagcttgcaaaaggtctgcatgctcatatctctacattttctccaacatttaatatagtactaacttttttaaaatcattccctgttttaaatctttgatagattgccaatgaagtgatatctcattgcttcaatttaaatttctttatcagttattttgggcatttttgtttttcctttttgggggagtgaaggggcatttatatttcttcactgtgaatttttacttattcattttgcatttttctttttgaatcggtctacttattgatttgtaaagrctaattgcacagtaatggtattaatcctttcctgccatatttgtggaaacatttttttcttattttataacttacccttctaatttatttagggtgtttttgatctgcagaagcatttgtttcctctgtaattgacaacttctgtgttggcttctgctttagggattatgctta

SEQ ID NO: 264055 - DNA, 343 bp, Homo sapiens
aggataaattctatcccctaagtcatgagccagtatgtatttcctcctatgagtggattggcaatctgtattgctatggtcgaatgagacctcaccacaatttatgagttgaaatttcatcactaatatgatagtattaaaaggtgagacctttgggaggtaatraagtcatgagagcagagctcccacaaatggggtttatgctttttataaaagggattgaagggagcctcctagcccctttggccccttccaccatgtgaagacacaaagcaggtgtcatctataaggaactggccctcgtcagacattgaatctgttggcatcttgatcttgaacttcc

SEQ ID NO: 264056 - DNA, 629 bp, Homo sapiens
ggagcgtttaaaaagcagggatacatgggtcccaatctggtttcaaagtccaaatttctggagactggacttaagtatgttttgaaggactctcaggtgattgaaacggcagccaaagtcaggagccactattataaacaatgttatttggcttatctgtctcctattttctgtacagtgtgtacagtgtctaactctctcttttgtactgaggctattttaacctatacrttaggctctcagggtattactggctagaagattagtcttgggctataattttcttagactttaagaggttgttaacacatctctacctttaatagtttcatcacatctcaatttctttatgatttgcaactctcaaatctctaagttaaactcaccaagaaatttctacccctattaaaactttttcccagagccatgctgctgaggcctgtctaagcgcactccatggcaggcatacgtcttctgcttgttcttccactcaaccttgcggcctttttctgcctttcttggcttattcgtggactcttccctttgggacttttacctgtcagatgattctttccacaaaagtgggtgtaactttcctctaatcttctcatagggtgaattcctttcaa

SEQ ID NO: 264057 - DNA, 606 bp, Homo sapiens
gtttctcatatgatttttacagtggtgtagacatcttctgagatattagactttaattaaagcaatgatttgcatgatactgctgctgaagaatataacatacagcatatctatatgtgtgyatatatacacatatatgtacacatatatacacatatatacacatatatacatatatacacatatatacatatatacacatatatacatatatacacacatctatacatatgtatacacacatatatacatatatacacatatatacatatatacacatatatacatatatacacatatatatacatatatatacacatatatatatatgtttagatcagtgttttcaaattgtattcattgagatggcagtagtgttctgtgaaaaaaagacatccctgatgaaataagcttgggaaacctattttaaagaaagcttagcaagattctcctctgtaggactatctagaaccttaatattcttttgagtactgtgaatctctctgttggggtaaatgatgtaatatttctcaaatatatttgcccatggaactcacttattttttctttattaaataactaacattccatcagaatgcccatgtt

SEQ ID NO: 264058 - DNA, 606 bp, Homo sapiens
gtttctcatatgatttttacagtggtgtagacatcttctgagatattagactttaattaaagcaatgatttgcatgatactgctgctgaagaatataacatacagcatatctatatgtgtgtatatatacacatatatgtacacatatatayacatatatacacatatatacatatatacacatatatacatatatacacatatatacatatatacacacatctatacatatgtatacacacatatatacatatatacacatatatacatatatacacatatatacatatatacacatatatatacatatatatacacatatatatatatgtttagatcagtgttttcaaattgtattcattgagatggcagtagtgttctgtgaaaaaaagacatccctgatgaaataagcttgggaaacctattttaaagaaagcttagcaagattctcctctgtaggactatctagaaccttaatattcttttgagtactgtgaatctctctgttggggtaaatgatgtaatatttctcaaatatatttgcccatggaactcacttattttttctttattaaataactaacattccatcagaatgcccatgtt

SEQ ID NO: 264059 - DNA, 606 bp, Homo sapiens
gtttctcatatgatttttacagtggtgtagacatcttctgagatattagactttaattaaagcaatgatttgcatgatactgctgctgaagaatataacatacagcatatctatatgtgtgtatatatacacatatatgtacacatatatacacatatatacacatatatacatatatacacatatatacatatatacacatatatacatatatacacacatctatacatatgtatacacacatatatacatatatacacatatatacatatatacacatatatacatatatacacatatatatacatatatatacacatatatatatatgtttagatcagtgttttcaaattgtattcattgagatggcagtagtgttctgtgaaaaaaagacatccctgatgaaataagcttgggaaacctattttaaagaaagcttagcaagattctcctctgtaggactatctagaaccttaatattcttttgagtactgtgaatctctctgttggggtaaatgatgtaatatttctcaaatatatttgcccatggaactcwcttattttttctttattaaataactaacattccatcagaatgcccatgtt

SEQ ID NO: 264060 - DNA, 608 bp, Homo sapiens
aaccatatcattccacttctggtccctcccaaatctcatgtcctcacatttcaaaacaaatcatgccttcccaatagtcccccaaagtcttaactcatttgagcattaactcaaaagtccacagtccaaagtctcatctgagacaaggcaagtcccttccacctatgcacctgtaaaaccaaaagcaaacaaaagcaagttagttttttcacaatgggagtaaaaaaaaagataaaatgggggtacaggcattgaataaatacacccaatccaaatggaaaaatgggccaaaatgatgtggctacaggcttcatgcaagtctgaaatccaatggggcagtcaaatcttaatgctccaaaatgatctcctttgactccacatcttatatccaggtcaagctgatgcaagacatagactcccacagccatggacagatccagccttgtgactttgcagggtagagccctggtcctggctgctttcatggactggcactgagtatctaccatcctgggttctggaggacagtggccctcttttcacagctccactyggcagtgccccagtgggggactcagtgtgggggctctgacctcacatttcccttc

SEQ ID NO: 264061 - DNA, 595 bp, Homo sapiens
ggggggaagcctcacaatcatggtggaaggtgaaggaggagcaaaggcatgtcttatatgctggcatgcaagagagtgtgtgcaagggaactgccctttataaaaccatcagatcttgaagacttattcactatcatgagaacagcatgggaaaacctacctccatgattcaattacctcccaccaggtgtctcccatgacacatggggattataggagctaaaactcaagatgagatttgggtggggatacagcctaaccatatgaggtcctgaatatctttgttaatgttctgccttgatgatctgtctaatactgtcagtggaatgttgaagtctcctatattattgtgtgggagttgatgtctctttgtaggtcaccaagaacttgcttatgaacctgggtgtttctgtgttgggtgcatacatatttaggatagttaactcttcttattgaatttaaccctttaccattatgtaatgcccttctttgtcttttttgatctttgttgctttgaagtctgctttgtctgaaattagaattgcawctcctgcttttttctgttttccatttgcttggtaaattttcctccatc

SEQ ID NO: 264062 - DNA, 591 bp, Homo sapiens
ctgtgtatttaagtgtgtttttgtattagctggtaacagtcttttttttctatatttagtgctcctttcaagatctcttgcaaggtaggtctggtggtaaaaactccctcaacatttgtttatcttaaatggatcctatttctcctttgcttaggaagcttagtttagcgtggtgatatggtttggctgtgtccccactcaaatctcatcttaaattttagctcccataattcctacatgttgtgggagggacttggtgggaggtaattgaatcatggggcaggtcttttttcctgtgctgttctcatgatagtgaataagtctcatgaaatctgatggttttataaaggggagtttccctgcacaagttctcttcccttgtttgccaccatgkgagacatgcctttcaccttatgccatgattgtgaggcctccccagccacatggaactgtcagtccactaaacctgtttttccttataaattacccagttttgggtaagtctttatcagcagtgtgaaaatggactaatacagctggatatgaaattcttggttgaagatttttttctttaagaatattgaatatagg

SEQ ID NO: 264063 - DNA, 558 bp, Homo sapiens
cccaggctggagtacagtggtgtgatcttggttcactgcaacctccccatcctgggttcaagcgattctcctgcctcagcctcttgagtagccgggattacaggcatgcactaccatgccaacctaatttttgtattttaagtagagacggggtttcaccatgttggccaggcaggtcttgaacttctgacctcaggtgatctgcctgcctcagcctaccaaagttttaggattacaggcgtgagccaccgttcctcgcctaatttttgtattttcattagagacagggcttcgccatgtcggccaggctggtctcaaattcctgacctcaagccatctgcctgccttggccttgcaaagtgctgggattacagatgtgagccgccatggcctgtccaatatttgtctttttgtacctggcttgtatctcttaagataatgacctctagtttcatccatatttctgtaaatgacatgatttcattctattttattggtgaatagtatttcattgtgtgtgtgtgtgtgtgtrtatatatatatatatataaaatattt

SEQ ID NO: 264064 - DNA, 512 bp, Homo sapiens
cttttgtggtttcaggacttacatttaagactttaatacattttgagtcaatgtttgtatatagtgagaaaataggggtctagtttcattaccctgtatttggctgtccagttttcccagcagcatttattgaagggtgtgtttttttacgaatgtaagttcttgttggctttattaaagatcagttgactgtaaatttgtggctctatttctggcttctctattctgttccattagtctatacatctattttwatactagtatcacgctgttttggttattatagccttgtaatatattttgaagtcaggtaatgttatgcctctctagctttgttctctttgctgatgattgctttggctattcaggttctgtatttcattccacatgaattttaggattgttcttctaattctgtgaaaaatatcattggtatttcaatagcaattgcattgggtctgtagatggctttgggcaatatagtcattttaagaaaattaattcatccaatc

SEQ ID NO: 264065 - DNA, 624 bp, Homo sapiens
accatatggggaaaaaatgaactaaagaaatggagaaaaccaggtgtcatcctgattaagaatgtgggctctggaatcacacagcctgagttcaaatcctggcactgccactcaccagctccttaaaattaggcaattagcctatctgtgccctgttatccttatctctacgtaggaataacaaatacttagtctggctacaccaatagaaggtgaaagagttagccacttactttccagctaggatataatgytgtccatatggaatcattacggctagtgagatatatctctggtaggagacactaagaaaccctttgctgcctctagaagagacagaggtagatagctctacctctttctctatcttcttgctttgaatgcagaagagatgtcttaaattgtggcaatcattttgcaatttgagggaaacgcctggagaatcccaaatatactggccctgacatcactgagacacagagtaactatccataattgcctatctcaaaacttctttttatgttaaaaaaaaagcacctatgtttaatttattctgctattctaagttgagctctcagttacttgcagctgtaagcatttctaactgatacaatgagattagta

SEQ ID NO: 264066 - DNA, 624 bp, Homo sapiens
accatatggggaaaaaatgaactaaagaaatggagaaaaccaggtgtcatcctgattaagaatgtgggctctggaatcacacagcctgagttcaaatcctggcactgccactcaccagctccttaaaattaggcaattagcctatctgtgccctgttatccttatctctacgtaggaataacaaatacttagtctggctacaccaatagaaggtgaaagagttagccacttactttccagctaggatataatgctgyccatatggaatcattacggctagtgagatatatctctggtaggagacactaagaaaccctttgctgcctctagaagagacagaggtagatagctctacctctttctctatcttcttgctttgaatgcagaagagatgtcttaaattgtggcaatcattttgcaatttgagggaaacgcctggagaatcccaaatatactggccctgacatcactgagacacagagtaactatccataattgcctatctcaaaacttctttttatgttaaaaaaaaagcacctatgtttaatttattctgctattctaagttgagctctcagttacttgcagctgtaagcatttctaactgatacaatgagattagta

SEQ ID NO: 264067 - DNA, 608 bp, Homo sapiens
ggagtgagctctagataaaagacatgttgttactatattagagccttctaatgactctataggacaaaaagaactagtatagtcaaattcaatacattgtattctgaccacttgatctggtcatttttaatcccaaattagagtcaaccacattatgatccttttttatgctacatttttagataatcattggttaacaacagattcctatcttagtattagaaacaaagtctagctctgattgaggtcaactcttacctgctactacgcagtaactttcaagacactgaagaactggaacatggggaggagccaagatggccaaataggaacagctccrgtctacagctcccagcctgagcgacgcagaagacgggtgatttctgcatttccatctgaggtaccaggttcatctcactagggaatgccagacagtgggcgcaggtcagtgggtgcgcgcaccgtgtgcgagccgaagcagggcgaggcattacctcactcaggaagcgcaaggggtcagggagttccctttcctagtcaaagaaaggggtgaccgaaggcacctggaaactcaggccactcccacccgaatactgcgtttttccgac

SEQ ID NO: 264068 - DNA, 608 bp, Homo sapiens
ggagtgagctctagataaaagacatgttgttactatattagagccttctaatgactctataggacaaaaagaactagtatagtcaaattcaatacattgtattctgaccacttgatctggtcatttttaatcccaaattagagtcaaccacattatgatccttttttatgctacatttttagataatcattggttaacaacagattcctatcttagtattagaaacaaagtctagctctgattgaggtcaactcttacctgctactacgcagtaactttcaagacactgaagaactggaacatggggaggagccaagatggccaaataggaacagctccggtctacagctcccagcctgagcgacgcagaagacgggtgatttctgcatttccatctgaggtaccaggttcatctcactagggartgccagacagtgggcgcaggtcagtgggtgcgcgcaccgtgtgcgagccgaagcagggcgaggcattacctcactcaggaagcgcaaggggtcagggagttccctttcctagtcaaagaaaggggtgaccgaaggcacctggaaactcaggccactcccacccgaatactgcgtttttccgac

SEQ ID NO: 264069 - DNA, 608 bp, Homo sapiens
ggagtgagctctagataaaagacatgttgttactatattagagccttctaatgactctataggacaaaaagaactagtatagtcaaattcaatacattgtattctgaccacttgatctggtcatttttaatcccaaattagagtcaaccacattatgatccttttttatgctacatttttagataatcattggttaacaacagattcctatcttagtattagaaacaaagtctagctctgattgaggtcaactcttacctgctactacgcagtaactttcaagacactgaagaactggaacatggggaggagccaagatggccaaataggaacagctccggtctacagctcccagcctgagcgacgcagaagacgggtgatttctgcatttccatctgaggtaccaggttcatctcactagggaatgccagacagtgggcgcaggtcagtgggtgcgcgcaccktgtgcgagccgaagcagggcgaggcattacctcactcaggaagcgcaaggggtcagggagttccctttcctagtcaaagaaaggggtgaccgaaggcacctggaaactcaggccactcccacccgaatactgcgtttttccgac

SEQ ID NO: 264070 - DNA, 608 bp, Homo sapiens
ggagtgagctctagataaaagacatgttgttactatattagagccttctaatgactctataggacaaaaagaactagtatagtcaaattcaatacattgtattctgaccacttgatctggtcatttttaatcccaaattagagtcaaccacattatgatccttttttatgctacatttttagataatcattggttaacaacagattcctatcttagtattagaaacaaagtctagctctgattgaggtcaactcttacctgctactacgcagtaactttcaagacactgaagaactggaacatggggaggagccaagatggccaaataggaacagctccggtctacagctcccagcctgagcgacgcagaagacgggtgatttctgcatttccatctgaggtaccaggttcatctcactagggaatgccagacagtgggcgcaggtcagtgggtgcgcgcaccgtgtgcgagccgaagcagggcgaggcattacctcactcaggaagygcaaggggtcagggagttccctttcctagtcaaagaaaggggtgaccgaaggcacctggaaactcaggccactcccacccgaatactgcgtttttccgac

SEQ ID NO: 264071 - DNA, 537 bp, Homo sapiens
aataatccatacagagactacactattatatgcatccagaatcaaagccaaggtgccctacccaaccaacaccacagatatatcttcaggaaaaagtcctccccacaagtaatttcaaaaataggaaaaactgattcacagatgcacagaaatcaacaaaagggcacaggaaacatgaaaaacaagtcaatatgacaaagaaagaacacataattctccagcaatagatcttgatcaaaaagaatcaccaaaattccagatgaataattcaaaatattgattttaaagaagctcagtgagatacaaaagaattctgagatgaatacaaagaaatcagaaaaacacttcagkatataaataagaactgtaccaaagacatagataactttaaaaagaaccagatagaaattctagaactgaacaaataattgaagaaaatacaaaatatatttgaaagcttcaacaatggaatagatcaggcagaagaaagaatatcagaacttaaagacaggccttttgaaataacccagtcagata

SEQ ID NO: 264072 - DNA, 605 bp, Homo sapiens
atggtagatcaatagaacagaataaagggtctaaaaccagatatacacaatcatgaatgctaaatttatcataaaggttgcagtatagaaaagagatgaaacaattgatagatggtgctgggttaactgaatattcatatgggaaaaaatgaaagttgacctctaacttacatcataataagtaagtctacttggatagtagatctaaatataaatagtaaacaaaaacaatttctagaacataacaaaaaaggtctttatgatcttggcataaggaaagatttctcaacaaaaagcactaacagtaaagaaaatattagtaggttgtactaaattaaaatgaagaagttctaattatcagaagacactataaggaaagtgaaaaggcagaccacacaatagaagatatttgcaatwcatgcagttgacaaaggtcttgttcccaaaatgcagaaagaattcctaaaaatcagtaagaaaaagctatatataatccaatagatcagcagacccctgaggaagcacttcacaaaagaagatcttcaaatggtcaataaacatctgaaaaagagctcagctttttgagtcatcagggaaatgtaaac

SEQ ID NO: 264073 - DNA, 590 bp, Homo sapiens
atggtagatcaatagaacagaataaagggtctaaaaccagatatacacaatcatgaatgctaaatttatcataaaggttgcagtatagaaaagagatgaaacaattgatagatggtgctgggttaactgaatattcatatgggaaaaaatgaaagttgacctctaacttacatcataataagtaagtctacttggatagtagatctaaatataaatagtaaacaaaaacaatttctagaacataacaaaaaaggtctttatgatcttggcataaggaaagatttctcaacaaaaagcactaacagtaaagaaaatattagtaggttgtactaaattaaaatgaagaagttctaattatcagaagacactataaggaaagtgaaaaggcagaccacacaatagaagatatttgcaattcatgcagttgacaaaggtcttgttcccaaaatgcagaaagaattcctaaaaatcagtaagaaaaagctatawataatccaatagatcagcagacccctgaggaagcacttcacaaaagaagatcttcaaatggtcaataaacatctgaaaaagagctcagctttttgagtcat

SEQ ID NO: 264074 - DNA, 538 bp, Homo sapiens
tccctatatgattaactgaggtctttcttgcaactgcatggccattcaacctctccttttgcccaatccttcttacctgactcctttacatattgtcatggctcatttatatatcaacttgactgggttcagagatgttcacatagytagtaaatattatttctgggtgtgtctgtgaaggtgtttgggaagagattatcatttgaatcagtagactgagtaaagaagatctacccacaccaatttgtatggacatcattcaatctgttgaagacccaaatagaacaaaaaggtagaggaaaagcaaatttcctttctctttcctttagctaaaacattcatcttctcctgccctcagacatcagagctcctggttctcaggctttcagactccaggacgtacaccagccactgcccaccccactcactctacctcttgtctcaggtctttggacttggactgaatgataccaccaaatttcctggttctctagcttgcagaaggcatagtatgggatttctctgcctccataattgc

SEQ ID NO: 264075 - DNA, 638 bp, Homo sapiens
cccactttacatatgataaaattgaggcccaagggcattaaataaataatcatgcatgatttcaagatgatatccaaaatttttctttacatgtctaaatagattcaaatatgtagtttctcccatactgtgaagttagtagtttaaaataaatactttatactcatcacaatacaagtacacaatatatgaatatggatgaacttgacaaacataatgctgagtgaaagaagacaaaaaaagtacataacatataattccatttatataaagatcaaaaacaggcataccttatcattggacattggaaataaggattgtggttacctttggaggataatgattaagagagggcaccaagtgcttttggggtcctggtgacattcgtaatcttaatctgggtgctgttttacagcttcactttgtaaaaatgtcatgtgttttccatgtttattttayggaaatttattgagttacacttaagatttttaaaattttctgaatatatgctgactagacactatactttgataaaaagtaagtaaataaagattaaaaacaaggtcctctttaaaaagatttttttatagcttttactgcttgagcctatgttttgatttcatttttataacagaatt

SEQ ID NO: 264076 - DNA, 519 bp, Homo sapiens
ttgctgagttatgactgaggtaacccaccaaaaataagtgtttctcatatcaaactgtcaactcaaatatcttatttatccctttgttcttcctttgggagactacatgttggtgaaggcatgtgtggcaattgaaaagacttggactgatcttaccttcaagatcgagcagttttgctttatctgctaattacaagataccttcaaataacttttgcttcaatagttcattttttccctaatgagtacatggaaattgtggaaatagcattctggagattaatgttttcttctgattcttttcccatcagtyggttcattatgttggaccctgaggtggtgaataaaagtgaacattagaagaaaacacctgacttggaggtgtttacaattaagccaataagagtagagaaaattgaaatagcaaagtttaattcttagtgcaatgaagaaaaaattattttgaaaatgacaaatttctccccaccatgggccagtctatcagaagatatactgggt

SEQ ID NO: 264077 - DNA, 483 bp, Homo sapiens
caaaattctaaatcaagattaataaacagaatctagcaatatataaaaaggctattatatcaggatcaaatggaatatagtccagaaatgcaagagtatttaccatttgcraataatttttttaaatttacaacattaacagaataaaagagaaaagtagatacagaaaaataattttataaaacttatcttccattcataataaaaactttaggaaattaagaatgggatggaagagttccttaatctgattatggtgcagatgtacaaaaagcctacagcaaacatcatacttaaagaagaaatgttgaaaggtttcctctgagctaaaaatgagaaagaaaggccttatttctattaaacattgttttgtaggcaaggaaaactaaaagcttcttttcccaagatggtgaattatgaatagcaagatagtgcacaagattcaactctgcgggcttcaattcaagacagaaaatggaactc

SEQ ID NO: 264078 - DNA, 483 bp, Homo sapiens
caaaattctaaatcaagattaataaacagaatctagcaatatataaaaaggctattatatcaggatcaaatggaatatagtccagaaatgcaagagtatttaccatttgcgaataatktttttaaatttacaacattaacagaataaaagagaaaagtagatacagaaaaataattttataaaacttatcttccattcataataaaaactttaggaaattaagaatgggatggaagagttccttaatctgattatggtgcagatgtacaaaaagcctacagcaaacatcatacttaaagaagaaatgttgaaaggtttcctctgagctaaaaatgagaaagaaaggccttatttctattaaacattgttttgtaggcaaggaaaactaaaagcttcttttcccaagatggtgaattatgaatagcaagatagtgcacaagattcaactctgcgggcttcaattcaagacagaaaatggaactc

SEQ ID NO: 264079 - DNA, 483 bp, Homo sapiens
caaaattctaaatcaagattaataaacagaatctagcaatatataaaaaggctattatatcaggatcaaatggaatatagtccagaaatgcaagagtatttaccatttgcgaataatttttttaaatttacaacattaacagaataaaagagaaaagtagatacagaaaaataattttataaaacttatcttccattcayaataaaaactttaggaaattaagaatgggatggaagagttccttaatctgattatggtgcagatgtacaaaaagcctacagcaaacatcatacttaaagaagaaatgttgaaaggtttcctctgagctaaaaatgagaaagaaaggccttatttctattaaacattgttttgtaggcaaggaaaactaaaagcttcttttcccaagatggtgaattatgaatagcaagatagtgcacaagattcaactctgcgggcttcaattcaagacagaaaatggaactc

SEQ ID NO: 264080 - DNA, 483 bp, Homo sapiens
caaaattctaaatcaagattaataaacagaatctagcaatatataaaaaggctattatatcaggatcaaatggaatatagtccagaaatgcaagagtatttaccatttgcgaataatttttttaaatttacaacattaacagaataaaagagaaaagtagatacagaaaaataattttataaaacttatcttccattcataataaaaactttaggaaattaagaatgggatggaagagttccttaatctgattatggtgcagatgtacaaaaagcctacagcaaacatcatacttaaagaagaaatgttgaaaggtttcctctgagctaaaaatgagaaagaaaggccttatttctattaaacattgttttgtaggcaaggaaaactaaaagcttyttttcccaagatggtgaattatgaatagcaagatagtgcacaagattcaactctgcgggcttcaattcaagacagaaaatggaactc

SEQ ID NO: 264081 - DNA, 444 bp, Homo sapiens
gtggtgcagcaggaccctctctactttatggtcaggcagatctataggctttcaggggatctacttgcctggaccagcaacctaaaccactccatccttcctgtgccaagatcatggtgcagctgtgccttctttgctccaggcaattggagcaactactcaccaagataagcagcctgagctgccccatccttcctttgcagaaattgttgtgaagctgggccctctatgcttcatttccaggcatcccactctcctaggttaggcctttaggctacccatactccccacgcagagaaactggggctgaggaggtctcccagttccacagctaggcacacytctgcatgcttggtggctgcccatgggattctcccttggtgctggtgtttttgcctgccattgtgggacctgtaggtgggtctgcctggtttgtgtatgttg

SEQ ID NO: 264082 - DNA, 634 bp, Homo sapiens
ccccagacctcagcatcacgtaatatactcatgtaacaaatgtgtacatataccttctgaatctaaaataaaagttgaaattataaaaatacataaaaaaattaaaagctactgggatttgaaagatatggaaattttgtttttaatgatatgattgcatacatcaaaaactcaaaacagtctacagacagaatgttataattaataagttaatttatcaagtttctttgtacaaggtcatatacamattttcatatatttctatatagctagacaagttagaaaatcaaatgcaaagatgactatttacagtagcatgttggctattgatatggtttggctgtgtccccacccaaatctcatcttgaattcccatgtgttgtgggagagacctggtgggaagtaattgaatcatgggggcagatcttttccgtgctgttctcatgatagtgagtaagtctcacgagatctgatggtttctataagggggagtttttgtgaacaagttctctttttgcttgctgccatccatgtaatatgtgacttgcttctctgtgacttccaccatgattgtggggcttccccagccatgtggaactctaagtccaattaaaactctttcttttgtaaattg

SEQ ID NO: 264083 - DNA, 634 bp, Homo sapiens
ccccagacctcagcatcacgtaatatactcatgtaacaaatgtgtacatataccttctgaatctaaaataaaagttgaaattataaaaatacataaaaaaattaaaagctactgggatttgaaagatatggaaattttgtttttaatgatatgattgcatacatcaaaaactcaaaacagtctacagacagaatgttataattaataagttaatttatcaagtttctttgtacaaggtcatatacacattttcatatatttctatatagctagacaagttagaaaatcaaatgcaaagatgactatttacagtagcatgttggctattgatatggtttggctgtgtccccacccaaatctcatcttgaattcccatgtgttgtgggagagacctggtgggaagtaattgaatcatgggggcagatcttttccgtgctgttctcatgatagtgagtaagtctcacgagatctgatggtttctataagggggagtttttgtgaacaagttctctttttgcytgctgccatccatgtaatatgtgacttgcttctctgtgacttccaccatgattgtggggcttccccagccatgtggaactctaagtccaattaaaactctttcttttgtaaattg

SEQ ID NO: 264084 - DNA, 564 bp, Homo sapiens
aggcaattctttctcatgataaaaccactcaggaaccatacctttaggaaatgatgggggaaaaagcaattgaggcagcatgatagttgactgtactagggcagtgatttttcaaactggactctagggattcctaggtgtcatgtctcagagactgtcacatgggacttaagttgatgaggacccaccttgctctctcagatctctccaatcctcttcaccgttgcccrtcatcaatctatgaggtggctctaattacatttgttttgtttgttagatttacttgaaaaaagttctaaagaaaaagtaaacttctatcctagagtatcaaaagaaagaaagagagaaagcgagagagacagagagagagagagagagaggcaggagagagacagagagaaagaggagagagggagagagagagagagagagagagagagaaagagagagagaaagggagctgaaatcacagtatacccttaatttagtatgtctaattattccaatattgtaaaggtgggtaagccagaaacataggacaatatcaggcaaaggtaaaccaaa

SEQ ID NO: 264085 - DNA, 556 bp, Homo sapiens
ggcccagctgcacattacccttgctcctgctgtattatcttctctctcccagcctgcatgtatggtctcatgaggaattccttatgagctgatctgaagaagaaaaaactcaagatcagtttacaatattgcagtcaccacccaaaagttgacagatgtactattcctgtctcactctggatggccctgaaagaaagttgtgaagggaagtccttctcataggcaaaattttgatcagtgcatctggttgctcattgtgcctgaggagagatggctggaggcgcacagatctacactgattcatgagcttagatagtggtttggctggatgtcggggacttggaaaaatataatactggaaaagtagtgacaaggagatctgaggaagcactatgtggatagamctttgtcaataggcatagagtgtgatgatatttgtgtaccatataaatgcccatcaaagaattacctcagcagagaagtagcttaataatcagatggacaagtttgcctgttctatgtaagccagacagctaacttatttctccaactcctg

SEQ ID NO: 264086 - DNA, 500 bp, Homo sapiens
tatggttattagcagagacacagagtaatattcaaaaagtctaacccatattacacagactgtctgaggccaagaaaggtgctccttgcaaacacagacaatctggccagcctcgtctggatggagtcaaatgtcattctrtggtgacattagtagagggcataataagtggtaccacttttgcctttacttgattctcctagtcctcctttttctccttcttgatggctttttctctggaggtcttgccacatcatctattaaaaacttgtatatgggcataaactacacaaaagtctataattaagagaggatggaatgatggacttgattatttgcattgtgagttgggcttcctttattacaaaatgaatgagctattaggattctctcaaaaagtaaacacccctgaatcatctgaaagatgactacacaaacttgcttttcacccagccattgtacaaagtaaagcccacatgtttgagagttattggcactgc

SEQ ID NO: 264087 - DNA, 602 bp, Homo sapiens
gaaaatgactatcaaaatgggcacattgcactctgcttaattaagggtggcagaatgtacattatactcaaagcaaaataaatctgattaaagactttctgaataggtcctatcttcatcttgagcttagctaaagtatccgtgggagattgcagtcagcaggagcagctatagcaattccacagatcatttggtcagatgctttcttctaactttttttttttcatttaaagaggagaaaaattaaagcttggagtctcaggggatggtaatattattctctcccatcaggatgtagaagggtctcaggggatccattagatccctggttctggaaggatataactgtgaaactaactgaatctcatatattaatccacctgtacttcctgagcaascacataggttgctggcctgggtattatgttcagcaatttctgctacatactgtttatgagatgcctcagagccaggcccaaggaatgttaggacaaactacccagaattagcaaccttcaggaaaatgaaggggaccttttaatttttctctccctaatcatagtttatcctcatgtacccatgctgcattgggtaggccaggt

SEQ ID NO: 264088 - DNA, 598 bp, Homo sapiens
ggttctgacctgaaattgtctaaaatcaatgaagataaaaagaactaaaggaaaagaaaataatttgagagaagacagccctgtgttgttagtcactcagcttttcagttttccttctgtttgagtacttaccacatttcagtgtttacttttttgttcacgaatatttccttttagacaaaatacaattttcctaaagaatatgtactttctctttgcatcccttgtgccaagcaaaatgcttgatgcatacgggtgttagtaaaaaggtctgtggaactgaatatttgtgtgctgaaataaatgcactgtagccaaatctattggattttataaccatcctagaaatgaaaccaaatrgggctgttggtagaatctgaaagaccctgaaagttcaagtctctggaactgttttactactgtgaacaacttctggaaataaatcgcgacatccagttcaggttctagagatctctcagacaattctcctgaagagactgaatcagaacctgattcattcagatttgaatacgaggctcagctcttaggagtgcagtgaaggatctggggagtgaaagagtattatctgattaaacgg

SEQ ID NO: 264089 - DNA, 594 bp, Homo sapiens
ggctgaaatggctgtaggacaggttcagctggggctatccctaagaaaggctacctgactcctctccagcatattggtctcagggtagtctgtctttttacatggcagctcagcactccaagagcaactgcttcagaggacaagatagagtggtttggccttttatgatcaagtctcagaagttacctagtatcacttctgtcatgctgtatgggtcaaagtagccacaagcacacgtagatttaaggagaggatcccacctaccaatgagaggagtgtccgagaattgtggccattttgttcaactgccacagtcctctttcatggcaccttttgtttataatgccttaacacctcttgtaactgttccttcctctccacatgctctggcattgctcgagttcagggccttgtcttttctcacttggagcactgcaaccattatttaaatggtctatctgcctccactcctgctctgtcttatccacttttcatagagaagtcagggtgaatctgtaaaaccagaaatccttccttaaaasctgtcagtaccttcccactgtccttataacaaagtctaaactcatgactgct

SEQ ID NO: 264090 - DNA, 643 bp, Homo sapiens
gtttcactctgttgcccaggctggagtgcagtggcgtggtctcagctcactgcaacctccacctcccaggttcaagcaattctcygcctcagcctcccgagtagctgggattacaggtgcgctccaccatgctcgtctaattttttgtagttttttagtagagacagagtttcatcgtgctggccaggctggtctcgaactcctgacctcatgatccgccctcctcggcctcccaaagagctgggattacaggtgtgagccactgcacttggcctatttttcttatcaaattagattctcaacctggtttaagcaaacaatctagaaaaagcatttatggaactcagaaaattgaaaattgatgatcattaaatgatattaggaaattaatattaattttgtataaagtttattattatatgagtaaatattcttaaatatttttagagattcatatggaagtatttatgggttaaatatctgtaatatacattacatccctcagggaaaaatagatgacgcatatatagaaaaatataaataaatgataaatttagatgatggatactcactatactattctcgctctttttctgcatttgaaaattttaataactaagaagtaaatacaaggaaaatagtc

SEQ ID NO: 264091 - DNA, 643 bp, Homo sapiens
gtttcactctgttgcccaggctggagtgcagtggcgtggtctcagctcactgcaacctccacctcccaggttcaagcaattctctgcctcagcctcccgagtagctgggattacaggtgcgctccaccatgctcgtctaattttttgtagttttttagtagagacagagtttcatcgtgctggccaggctggtctcraactcctgacctcatgatccgccctcctcggcctcccaaagagctgggattacaggtgtgagccactgcacttggcctatttttcttatcaaattagattctcaacctggtttaagcaaacaatctagaaaaagcatttatggaactcagaaaattgaaaattgatgatcattaaatgatattaggaaattaatattaattttgtataaagtttattattatatgagtaaatattcttaaatatttttagagattcatatggaagtatttatgggttaaatatctgtaatatacattacatccctcagggaaaaatagatgacgcatatatagaaaaatataaataaatgataaatttagatgatggatactcactatactattctcgctctttttctgcatttgaaaattttaataactaagaagtaaatacaaggaaaatagtc

SEQ ID NO: 264092 - DNA, 614 bp, Homo sapiens
ttacaatgcacacacatgcatgcacatgcacacacgtacactctttagattctgtaaggtctttctgttttcagatatattcatccctcagtatttgtgggagattagttctaggacccctcctcagatatcaaaatccacaaatgctcaagtaccttatataaaatggtgtaatatttgtatrtaacctatatattacctcccatatacataaatcatttctagattacttatgtctagtacaatgtgaatgctttaggctatatttttatttgtattttattgttgtattgttattattttttaatatatatgtacatatataaatacactttttttagatacagggtctctctctattgcctaggctggagtacagtggcacaatcataggtcactgcagcctcaaactcaagtgatcctctctcttcagcctctaagtagtttggactacaggtgcaaggcaccgcaccagcttcaagtatttttgatccgtaattgaagtactcatacccatggatatggaaggccaattgtagatctctctggcttggaaggctcctctccactcacttttatatttgaagggttatttgaactcctcctcctccttc

SEQ ID NO: 264093 - DNA, 603 bp, Homo sapiens
agtctcactcttgactcccaggtgataattttcatcagatattgttctagacatgaccattgccttgtttcaatcttacttaagtcacttttggattaaaaggaaacatgtttacatcatcaggcctcacagatttctcaagattttttttccacttggcataaaactgatgttgatattgatgtcaaaattgagygatgctgtaaagtactggtttggagcagactgcctgattttgaattgcagtctcctcttactagtgactttagacccatgacccagtgttatgggttgagttgcacccacttcccaattcatattttgaaatcctaacccccagtacattgaagtgtgactttatttggagatgggatatttacagaaataatcaagttaaagttacagtgagctctaatccaatatgactgatatcctcgtaaaaaggagaaatttggggacagagacagacatgcatgaaaggaagacaatgtgaagagatacaggaaaaagatggctatctacaagccaaggttagaggcttgaaacagattctttcctcataactttgtggagaaacctactctgtcaatcccttgatcacag

SEQ ID NO: 264094 - DNA, 585 bp, Homo sapiens
tctgggggaatactttcttttctgccagactttccttactgaacaattacatggtttttttttgtttgttttgtttttgccaytccccagccctgttatcttgtaaactactttacagttaataaacaacatatactttataaactttatattttataaatccaacaattccactcctagaaaattaaaaacatgtttacacaaaaacttgtacattagcagaacttttaatagataaaaactgggaaaaataaatgttaatcaacttatgaatgattaaacaaaatacggcattttcatttaggtatattcattcattcattcattcattcattcattcagtgaatagacctgatattcatttagtgaatatacctgaaagaaatatactgcaaagaatataccaaaaagaaataaagtgctgatatataataaaatatggacaaactttgaagatattatgctaagtgaaagaagtaagacacaaaaagccacattttgcatgactccacttctatgaaatgtttagtataagcaaatcatagagacaaaaagtgtattagtggttgctagagtcaagaggaa

SEQ ID NO: 264095 - DNA, 586 bp, Homo sapiens
ctattatcaattgtttcaagaaatttctcaattttcctcttaatttcttcattgacccactggtgattcaggggcatattgtttaattccatgcatttgtacagtttccaaaattcctcttgttattaatttctagtttcatttattccattgtggtcagagaagatgcttggtattatttccttcagggtcaagggctcttaagccaaactggtgaatgctgtctggcctgggactcattcttcagggaaatgggctyccctctggcccaggacaggtccagacatgctattgaagaatcaagtcctggaattgaaaagtcaaatcctgggcttgtccttgtctccctgtgactgtgctggtaaataaggtacaagacaacatccccttaagttttctttctgcttttctgaagcaaatgaaattttgccccatagccaccgcagttgataaggcgctgaaactcacctgtagccagcaatcatcagaggcttatccaaggccctcaacatagtacctgagtatagctgcttgtgattcagtgtccaagaactcttcagttagcaggtgaggaatactgccagga

SEQ ID NO: 264096 - DNA, 618 bp, Homo sapiens
ttgcaattgtgaattgtgctgctataaacatgagtgtgcaagtatctttttcgaataatgactttttttcctctgggtagatatgcggtagtgagattgctggaaaaaattgtagttctatttttagttttttaaggaatccccacagttttccatagtggctgcactagtttacattcccactagcaatgtagaagtgctgcctgttcaccgcatccatgccaacttttattattttttgattttttgattatagccattctagcaggagtaaggtggtatcacattgtggttttggtttgcatttccctaataattagtgatgttgaacattttgtcatatgtttaytggacatttgtatatcttcttttgagaattgtctattcatgtcctaagcccactttttgataggattgttgtttttttttttcttgctaatttgtttgagttcattgtagattctggatattagtcctttgtgagatgtatagattgtgaagattttctcccactttttgagttgtctgtttactctgttgactgttccttttgctgtcctaaagctctttagtttcattaagtcccaactgtttatgtttgtttttattgcatttgct

SEQ ID NO: 264097 - DNA, 606 bp, Homo sapiens
agctactcctgattgcttttttgtgttcatttgcatggaatgtctttttccacccatttaccttaagtttatgtcagtccttaagtgttaggtgagtcacttgtggcagcagatagttggttggtgacttcttattcattcagcaattctgtatcttaagtggagcatttagaccatttacrtccaatgttagtattgagatgtgaggtaccatacaattcatcatgctatttgttgcctgtataccttggttttttgtggggttttttatggtatttttgttttatagatcctgtgatatttatgctttaaggaggttctgttttgatgtgtttccaggatttgtttcaacatttagagctccttttagcagttcttgtagtgctggcttggtagtggcaaattctctcagcattcgtttgtctgaaaaagactgtatcttttcttcatttatgaagcttagtttctctggatacaaaattcttggctgataattgttttgtttgaagaggctgaagatagggccccaatcctttctagcttatagggtttctgctcagaaatctgctgttaatctgataggttttcctttataggttacctggt

SEQ ID NO: 264098 - DNA, 555 bp, Homo sapiens
ggtgttctttgagcttcctgtacttggatgtctaggtctctagcaaggctaaggaagttttccttgattattcccccaaatatattttccaaacttttaaatttctcttcttcctcaggaacacctattatttttaggtttggccttttaatgtaatcccagacttcttggagacattgttcatattttattattcttttttttttttgtctttgttggattgggttaattcaaagaccttgtcttcaagctctgaagttctttcttctgcttgttcgattatattgctgagactttccagagcattttgcatttctataaaggcatctgttgtttcctaaactttcgattgttttttctttatgctatctatttcattgaatatttctcccatcatttattgtatctttttttttttttaatttccttarattgggttttgtgtttctctggtgtctccctgattagcttaataactaaccttctgaattctttttcaggtaaatcaggaatttcttcttggtttggatccattgctggtaagctagtgtgatt

SEQ ID NO: 264099 - DNA, 587 bp, Homo sapiens
ttcttgggagaaatatgttctattcaagtcttttgccctttttttgtctttttgttattatgttgtaggagtttttctatattctgtatgttaagcttgtatcagagtcatgatgtgcaaatgtttcctcccatttttttgtcttttcacttcattgataatgtcttttgatgcccaaagtttttagttttgataaaacacaatctatttttccttttattactcatacttttaatatcatatctacacaatctattgccaaatccaagagcatgaagatttgtaaaatgctcttcatcttgttgaggaagcttcctctatttctaatttaagtgtttttatattgtaaggatgctggatttggtccagtgtttttttttctgtatcaacttagaagattgtgtgtgcattttaaattttacttatatgttttattgcatgacttgattatttttatgttgaaccttgaattcctaggaggaaacccactcgaccatggtgaacaattyttttaatatgttgctaaattctttttcctagtatattgttgaggatttttgcattattttcataaggaatattggtcc

SEQ ID NO: 264100 - DNA, 594 bp, Homo sapiens
actcacttttgttatatttccaaaagactcaatgagcttcttagggggctcagcactgatctcaggtggaaggaatggggatggatgggaggggctgggatggggggaatagggagcagggagtgggtccctgtttcctttccctaggctctctgtcactttttttctcagtaagtgggagattcatgtgctctatacctccacagtctgctgtgaacctgttgctggcatgaatctgtccgctggagtttgttcggttgggggccatgmgacagttgtaaagggagcaaccattgtgaaatggcatctttcagaatgcaggagtgaggtgccgtcacaaaccacggcttctgtggacagggtgtctaggggtggcttgggaagaaggcccagggatagaaggagagaactgaggccctctttcagctcaacttcagcctggagaatttagatcattgctttagctctaaatcaccacttccacacttggatgatttcaagggaccttaagttcccacttgccacaggctttgggacatggagcctgctttctaaaataaatatttttgagttttttaagatgtaagttcaaac

SEQ ID NO: 264101 - DNA, 629 bp, Homo sapiens
aataagaataaaaacaatatctatccactcatgaaaagaaaatcctcaacaaataagaaacaggagggaacttcaccaacatgataaaaaaaaatctgtgaaaaccctacagctaacatatttcacatggtgaaagactgaatattatcccccttagattgagaacaagataaagatgataatgtttatcagtctattcagcacctactaaggttctagtcagggcaattaggcaatgaatctataaaaggattcagattagaaaggaggaagtaaagttatcttattcacaaatgacatgatcttatayatagaaaatctgaaggaatccacttaagaaaacccctagaattaataaatgagttcagaaagttcacaaaataaacatacaaaaatcaattgtatttatatacaccggcaatgaagactcgaaaataaaattaagaaaattatttcattcacaacagcatcaaaaagaataaactattaggaacaaatataacaaaagcaaggtgtgtatactaagaacttcaaaacattgctgaaagaaattaaagacaagtaaatggaaaggcatcccacatttatggattagaagactaaatattattaacgtggcaatactcccc

SEQ ID NO: 264102 - DNA, 635 bp, Homo sapiens
aagtgacatatccagaagaactcttccaatccaatattaaaagataatccaatttaaaaatgggcaaaatactttgaatagacacttctctaaagaagatatgaccaataagcacatttaaaaatgctcaacactattgttactagcaaaatgcaaatcaaaaccacaatatcacttcacaccactagattgactataaacaatargacaacaataagataacaagtgttggagaggatgtgaaaaaatcaaaactctcatacattgctggtgggaatgtaaaatggtgtagccaattttttggaaaatagtatgataatttctcaaaatgttaaatatagaattgccttaaacccagcaatttcacttctaggtatctacacccaagggaaatgaaaacatatgtccaaccaaaatcttttaggtaaatgtccatagtagcactattctcaagaaccaacagatggagacaaacccaacgcctaccaactggtgaatggagaaagacatgtagtatacctatacaataaaatactgtttacaataaaaaggaagttctgatacatgctccacagcattgatatacctcaaaaacataatgcttcttgaaagaggtcaaacacaaaagaacacat

SEQ ID NO: 264103 - DNA, 635 bp, Homo sapiens
aagtgacatatccagaagaactcttccaatccaatattaaaagataatccaatttaaaaatgggcaaaatactttgaatagacacttctctaaagaagatatgaccaataagcacatttaaaaatgctcaacactattgttactagcaaaatgcaaatcaaaaccacaatatcacttcacaccactagattgactataaacaataagacaacaataagataacaagtgttggagaggatgtgaaaaaatcaaaactctcatacattgctggtgggaatgtaaaatggtgtagccaattttttggaaaatagtatgataatttctcaaaatgttaaatatagaattgccttaaacccagcaatttcacttctaggtatctacacccaagggaaatgaaaacatatgtccaaccaaaatctttyaggtaaatgtccatagtagcactattctcaagaaccaacagatggagacaaacccaacgcctaccaactggtgaatggagaaagacatgtagtatacctatacaataaaatactgtttacaataaaaaggaagttctgatacatgctccacagcattgatatacctcaaaaacataatgcttcttgaaagaggtcaaacacaaaagaacacat

SEQ ID NO: 264104 - DNA, 600 bp, Homo sapiens
atgagcatacagtcaggaaaatccaaactctgagacatggcatagtgaggatgtatttagcgaaatccaaaatataggaaaacaacctggtttcttcaataaacaaattgcaagggagaaaaagaagagatgaaaggagaagcctgtagatcaaaaaaagttcaaagacaagcaatcataaagtgggattttatttggatcctgattcaagcaagcaaaaatatataaaattaatggatatttagagataacaggatccaataacaggatatttgatattaaagaatagttatgctgagtggttggcttaatgatggtattatgattatgtttttttttttagtttttttttccctgggtgtggtgcctcatgcctgaaattccagcactttgggaggccaagttgcggggggaggattgcttgaggccaggagtttgagaccagcctgagcacaacagcaagaccccatytttacaaaaataaaaataaaaagttagtcaggtgtggtgtagtcctagctagtcgggaggctgagaaaggagaactgcttgaccctggcaggagattgatgctgcagtgacctatgatcacgccattgc

SEQ ID NO: 264105 - DNA, 628 bp, Homo sapiens
aagtgttgaaacccagaagaagaaaaatatttttaaaatagcatttatttttttttcactaacagagaataaaaataatctctgtaccatctataacaaagagaaattgtgagtataaaggtaaaaaaaaagacgtttcaatatttgcagagaaatttcagactttagtatgccattttaaggatataggctttggagtcaagtaaaataaagtacattggatgaaaarttttgggaaaaattttcacagatacacccccacactcattaacaaaaaggagaaaaataaaacctggaaaaaagcaaagaaattcccccaaatgtctgagactgtctatcttttttctgttctttcttttagagaaattcaaatgttggatggtaatggagccaatcacaaatgggagacattttttgtagctattcacctgctttccaaaatgtgcttaaaatttaaagactttttcagatctacttttcaatacatgcttttaataacttaatttttagttctttactgtacacttacctgcaagatagattacttagtgttgctatgtgtattcgttcatttttacactgctgataaagacatacctgagactggaaaaaaagaaggtttaatttg

SEQ ID NO: 264106 - DNA, 628 bp, Homo sapiens
aagtgttgaaacccagaagaagaaaaatatttttaaaatagcatttatttttttttcactaacagagaataaaaataatctctgtaccatctataacaaagagaaattgtgagtataaaggtaaaaaaaaagacgtttcaatatttgcagagaaatttcagactttagtatgccattttaaggatataggctttggagtcaagtaaaataaagtacattggatgaaaagttttgggaaaaattttcacagatacacccccacactcattaacaaaaaggagaaaaataaaacctggaaaaaagcaaagaaattcccccaaatgtctgagactgtctatcttttttctgttctttcttttagagaaattcaaatgttggatggtaatggagccaatcacaaatgggwgacattttttgtagctattcacctgctttccaaaatgtgcttaaaatttaaagactttttcagatctacttttcaatacatgcttttaataacttaatttttagttctttactgtacacttacctgcaagatagattacttagtgttgctatgtgtattcgttcatttttacactgctgataaagacatacctgagactggaaaaaaagaaggtttaatttg

SEQ ID NO: 264107 - DNA, 498 bp, Homo sapiens
caagctgcatgccagttagtctgcaggctgctctttcttttcagtcattggaaccatgctcccatttcagggatctctcagaaaccctgtgactggaaaaccaaatgaggaaaatgctcaatgtttgttatcaatctggatctcaaatgtgcttggcataatctacctgaatccttagaataytattttcagggtaggaaatacaaatgtgaatattttacaagatagagaagtaactagtttcatgctgtgatttagaaggggaaattataagggattactgaaataaaaccaggtttattgattccagaggctgcattagcactatacatttctattctctcaaacttgctgaaactggtctgcatatttcatcttgtaataccaaaaatttaaatgcattgttctaggatgtttgtattattggtttaattcaagttgcaaactgcaaatgggactatatttctaacactgctataatgaagtgaagaggactga

SEQ ID NO: 264108 - DNA, 559 bp, Homo sapiens
attttgcctcacaagtgaagaataattaaccttagactgggctctgtttcagaaatgcctaaaaatcacaagagtaagacctgaaaacagcgaaatgtttcaagtaacttaactgtatagtaaaacaaagctcaagaaaatctatggaaatacaaaaattttcattgcccaacaatatctgtcatgtaataaaagactaccaggcaggcaaagaggcaagaacacataactcataatgcagagaagaatcactcaattaaaatccacctagaactgacgcagatgttagaattagcagagaaggatattgaaagrgttcttatttaccaaaaacttgtagaaaaatgttccttgcagctttattcatgattgctaaaaaccaaaaacaatctatgtgtttatacatttgaacaaagagaactacttagtgataaaaaaagattttcaaagaagcacgtcaacattcatgaatctcaaaaacatcatgctaagtgaagaaagcaaaacataaaaaattacgtatcatatgattccacttatttgagattcttgagcagat

SEQ ID NO: 264109 - DNA, 565 bp, Homo sapiens
aacagcgaaatgtttcaagtaacttaactgtatagtaaaacaaagctcaagaaaatctatggaaatacaaaaattttcattgcccaacaatatctgtcatgtaataaaagactaccaggcaggcaaagaggcaagaacacataactcataatgcagagaagaatcactcaattaaaatccacctagaactgacgcagatgttagaattagcagagaaggatattgaaagggttcttatttaccaaaaacttgtagaaaaatgttccttgcagctttattcatgattgctaaaaaccaaaaacaatctatgtgtttatacatttgaacaaagagaactacttagtgataaaaaaagattttcaaagaagcacgtcaacattcatgaatctcaaaaacatcatgctaagtgaagaaagcaaaacataaaaaattacrtatcatatgattccacttatttgagattcttgagcagataaaactgttttgtgatggtagaaatcagatcagtggttacttttggagtgaaggaatctgttgagaaataatgcaaggaaacttttaggta

SEQ ID NO: 264110 - DNA, 582 bp, Homo sapiens
tgtaatgaagccccttcacttccytctgatcctgtcatctcaagaaggaaacaaatcagatggccaagacaggaattaaaaacagagctatgggccaaggctgttcccccatgagaacaataaatgcttgctgctctcaggtacatttggaaacctccttctctttgctctgcacacactactaatatcccaaagatttttgaaaccattgaagctttaactcctaaatcctaaaaatcgcagcctggttaagtgctgggcatacaacatataatggttccaagctattctgaaaaaatctctgagcataggcagcatgtaaggaacgatccctcagaacaggtcagaaaggtctagaaaccaagtcacttaagacaatatcaccaacatagaaacatttaaagaggggaaacttgtttctactgagaaattaaatgtaaacttaaaggattatccctttccaaaaatctacttttgtataattactatcaaatgtattaaggagacaataacttaggtaaacataaaacaggccaacaggcaatcttctgtataaccttccaggagacactgttaaacacc

SEQ ID NO: 264111 - DNA, 582 bp, Homo sapiens
tgtaatgaagccccttcacttccttctgatcctgtcatctcaagaaggaaacaaatcagatggccaagacaggaattaaaaacagagctatgggccaaggctgttcccccatgagaacaataaatgcttgctgctctcaggtacatttggaaacctccttctctttgctctgcacacactactaatatcccaaagatttttgaaaccaytgaagctttaactcctaaatcctaaaaatcgcagcctggttaagtgctgggcatacaacatataatggttccaagctattctgaaaaaatctctgagcataggcagcatgtaaggaacgatccctcagaacaggtcagaaaggtctagaaaccaagtcacttaagacaatatcaccaacatagaaacatttaaagaggggaaacttgtttctactgagaaattaaatgtaaacttaaaggattatccctttccaaaaatctacttttgtataattactatcaaatgtattaaggagacaataacttaggtaaacataaaacaggccaacaggcaatcttctgtataaccttccaggagacactgttaaacacc

SEQ ID NO: 264112 - DNA, 568 bp, Homo sapiens
aataaatgcttgctgctctcaggtacatttggaaacctccttctctttgctctgcacacactactaatatcccaaagatttttgaaaccattgaagctttaactcctaaatcctaaaaatcgcagcctggttaagtgctgggcatacaacatataatggttccaagctattctgaaaaaatctctgagcatmggcagcatgtaaggaacgatccctcagaacaggtcagaaaggtctagaaaccaagtcacttaagacaatatcaccaacatagaaacatttaaagaggggaaacttgtttctactgagaaattaaatgtaaacttaaaggattatccctttccaaaaatctacttttgtataattactatcaaatgtattaaggagacaataacttaggtaaacataaaacaggccaacaggcaatcttctgtataaccttccaggagacactgttaaacaccacaggggtgcaatgctgtattcctcccagtaagcaaggattattgctaagtgccattaaattgcacaaaatatcaaaatacagtgaggaacccataacccataa

SEQ ID NO: 264113 - DNA, 568 bp, Homo sapiens
aataaatgcttgctgctctcaggtacatttggaaacctccttctctttgctctgcacacactactaatatcccaaagatttttgaaaccattgaagctttaactcctaaatcctaaaaatcgcagcctggttaagtgctgggcatacaacatataatggttccaagctattctgaaaaaatctctgagcataggcagcatgtaaggaacgatccctcagaacaggtcagaaaggtctagaaaccaagtcacttaagacaatatcaccaacatagaaacatttaaagaggggaaacttgtttctactgagaaattaaatgtaaacttaaaggattatccctttccaaaaatctacttttgtataattactatcaaatgtattaaggagacaataacttaggtaaacataaaacaggccaacaggcaatcttctgtataaccttccaggagacactgttaaacaccacaggggtgcaatgctgtattcctcccagtaagcaaggattattgctaagtgccattaaattgcacraaatatcaaaatacagtgaggaacccataacccataa

SEQ ID NO: 264114 - DNA, 668 bp, Homo sapiens
tctgaaagtttacatattgcatgtacagctgtggcttacagtgaaacaaaactcccaactcttggcacaaagtttagctatttgtggagtgtagagtaaagctttatttgaagcttatcttatgagtgcatttatcagtttccattgaaatagtgagttgcaagcagagtattgtctgaccacacagtcagcattaagtatgtttgtcctagtttaagagtagaaaatcttttaaatgattctagaagcttcatcacagaaacaaaaataatttttcattgaaattctagggcacacagtaagaaaatgacacaatatagtgacttaaaagtcaggctgcatttttacatatagcccctaagactttttagccttggaaggaaagaattgataatagagcagacattgtgagttcaggtggaggtggagagggttaagacaatgaaaacctcaacaataacggccaaaagacccaccctgcatgtctgaaattgggaagagtgggaaggagccttaaaattcatccaacgcactcattttataaatcaggataaaaaaataccgaagggattaactgaytttctaatccctaggattttgacacagattttcttactccaaatccttcagacccacttttaatccatcccggcccaacaaaacacaga

SEQ ID NO: 264115 - DNA, 624 bp, Homo sapiens
gtacctggtaatcatctttctattcgctatctccataagttcaattgttttgatatttagctcccacaaataagtgaaagcatacaaagtttgccctgctgtgcctggcttatttcacttaatataatgamcttcagttccaaccatgttgttgcaaatgaccgaatctcattcttttttatggctgagtagtactccattgtgtatatgtaccacttttttttttttatccattcatctgttgagggacactaaaattgcttccaaatcttggccattctaaataatgcttcaataaacgtggaagtgcagatatctcttcgatacactgatttcctttattttgggtatatacctagcagtggcattgatggattatatggtagctctatttttagttttttgaggaacctccaaactgttgtacatagcagttgtgttaatttacagtcccaccaacagtgtaacgaggcttccctttctccacatccctgccagtatttgttattatatgggtaaaagccatttattaattaattaactaagttccggggtacatgtgcaggatgtgcaggtttgttacataggtaaacgtgtgcttggacaaaagccatcttaactggg

SEQ ID NO: 264116 - DNA, 624 bp, Homo sapiens
gtacctggtaatcatctttctattcgctatctccataagttcaattgttttgatatttagctcccacaaataagtgaaagcatacaaagtttgccctgctgtgcctggcttatttcacttaatataatgaccttcagttccaaccatgttgttgcaaatgaccgaatctcattcttttttatggctgagtagtactccattgtgtatatgtaccacttttttytttttatccattcatctgttgagggacactaaaattgcttccaaatcttggccattctaaataatgcttcaataaacgtggaagtgcagatatctcttcgatacactgatttcctttattttgggtatatacctagcagtggcattgatggattatatggtagctctatttttagttttttgaggaacctccaaactgttgtacatagcagttgtgttaatttacagtcccaccaacagtgtaacgaggcttccctttctccacatccctgccagtatttgttattatatgggtaaaagccatttattaattaattaactaagttccggggtacatgtgcaggatgtgcaggtttgttacataggtaaacgtgtgcttggacaaaagccatcttaactggg

SEQ ID NO: 264117 - DNA, 624 bp, Homo sapiens
gtacctggtaatcatctttctattcgctatctccataagttcaattgttttgatatttagctcccacaaataagtgaaagcatacaaagtttgccctgctgtgcctggcttatttcacttaatataatgaccttcagttccaaccatgttgttgcaaatgaccgaatctcattcttttttatggctgagtagtactccattgtgtatatgtaccacttttttttttttatccattcatctgttgagggacactaaaattgcttccaaatcttggccattctaaataatgcttcaataaacgtggaagtgcagatatctcttcgatacactgatttcctttattttgggtatatacctagcagtggcattgatggattatatggtagctctatttttagttttttgaggaacctccaaactgttgtacatagcagttgtgttaatttacagtccyaccaacagtgtaacgaggcttccctttctccacatccctgccagtatttgttattatatgggtaaaagccatttattaattaattaactaagttccggggtacatgtgcaggatgtgcaggtttgttacataggtaaacgtgtgcttggacaaaagccatcttaactggg

SEQ ID NO: 264118 - DNA, 581 bp, Homo sapiens
gattttttttccctcagaaattttttgagctccttatatattctgatgtaaatacctyttcagattggtagtgtgccaatattttctcccattctgtgggatgtctcttcacattgttgtttcatttgttatgcagaagctttttaacttgatgtgatcatatttgtccatttttgctttggttgcctgtgcttgtgggatattactcaggaaatttttgcctagaccaacatcctgaagattttccccaatgttttcttttagtagtttcatagtttgaggccttagatttaagtctttaaatccattttgatttgatttttgtatgtggcaggagataggggtctagttacattcttctgcatatgtatatccagttttcccagtataatttattgaaaagactgtcctttccccaatgtatgttcttggcatattcatcaaaaatgagttcactgtagatgtatgaattcgtttatggtttctctattctgttttgctggtctatgggtctgtttttatgccaacaccatgctgttttggttgctatagctctgcagtataatttgaagtcagaaaat

SEQ ID NO: 264119 - DNA, 581 bp, Homo sapiens
gattttttttccctcagaaattttttgagctccttatatattctgatgtaaatacctcttcagattggtagtgtgccaatattttctcccattctgtgggatgtctcttcacattgttgtttcatttgttatgcagaagctttttaacttgatgtgatcatatttgtccatttttgctttggttgcctgtgcttgtgggatattactcaggaaatttttgcctagaccaacatcctgaagattttccccaatgttttcttttagtagtttcatagtttgaggccttagatttaagtctttaaatccattttgatttgatttttgtatgtggcaggagataggggtctagttacattcttctgcatatgtatatccagttttcccagtataatttattgaaaagactgtcctttccccaatgtatgttcttggcatattcatcaaaaatgagttcactgtagatgtatgaattcgtttatggtttctctattctgttttgctgktctatgggtctgtttttatgccaacaccatgctgttttggttgctatagctctgcagtataatttgaagtcagaaaat

SEQ ID NO: 264120 - DNA, 592 bp, Homo sapiens
tgatcctttgatttgtgtgacattggttttaatgtctcctttctcatctctgatttttttgtttttttttttcttaactagtctgactaaagatttgtcaatgtttacatttcaaaaaaaaacttttctgtttcattgatctttgwatcattttgtttcaattttactcatttctgttctgatctttattatttctttccttctaccgattattggtttggtatgctcttgctttcctagttctttaggatgctttgttaggttgtttacttgaagtttttcttcttttttgatgtaggcacttatagctataaaattccctcttggtactgtttttgctgtatcccataggttttggtatgttgtgtttccattatcatttgttttaatacatttttcaattcccttcttaatttcttcattgacctactagtcattcaggagcatattatttaatttccatgcatttgtgtagtttccaaaattcttctcattattgatttctagttttattacactgtcatcagataatatgcttgatattatttcagtttttgaatgttttaacacttttttatgatataatatgtgg

SEQ ID NO: 264121 - DNA, 592 bp, Homo sapiens
tgatcctttgatttgtgtgacattggttttaatgtctcctttctcatctctgatttttttgtttttttttttcttaactagtctgactaaagatttgtcaatgtttacatttcaaaaaaaaacttttctgtttcattgatctttgaatcattttgtttcaattttaytcatttctgttctgatctttattatttctttccttctaccgattattggtttggtatgctcttgctttcctagttctttaggatgctttgttaggttgtttacttgaagtttttcttcttttttgatgtaggcacttatagctataaaattccctcttggtactgtttttgctgtatcccataggttttggtatgttgtgtttccattatcatttgttttaatacatttttcaattcccttcttaatttcttcattgacctactagtcattcaggagcatattatttaatttccatgcatttgtgtagtttccaaaattcttctcattattgatttctagttttattacactgtcatcagataatatgcttgatattatttcagtttttgaatgttttaacacttttttatgatataatatgtgg

SEQ ID NO: 264122 - DNA, 501 bp, Homo sapiens
cagtgctgatggttgggagttgaagtctctctctagctattattttactggggtctctctctctctttagctcaaccaatatctgctttatatatctggatgctccagttgggtgcatatgtgtttacaattgttatatcctcttgctgagttgacccctttatcattatatagtgactttctttgcctcttyatgtagtttttgtcttgaaatctattttgtcttatataggtatagctactcctactcttttttggtttagttggcatgaaatacctttttccatctcattattttcagtctatgtgtatctttacaggcgaagtgtttttcttgtaggcaacatattgttgggtcttttttttaatccattcagccactttatgtattttattgaagagtttagtccatttacatccaatgttattattgataagtaaggacctactcttgtcattcattatgctatttgttttctgtttttttatgtgtgtgtgtgt

SEQ ID NO: 264123 - DNA, 556 bp, Homo sapiens
ggatgctccagttgggtgcatatgtgtttacaattgttatatcctcttgctgagttgacccctttatcattatatagtgactttctttgcctcttcatgtagtttttgtcttgaaatctattttgtcttatataggtatagctactcctactcttttttggtttarttggcatgaaatacctttttccatctcattattttcagtctatgtgtatctttacaggcgaagtgtttttcttgtaggcaacatattgttgggtcttttttttaatccattcagccactttatgtattttattgaagagtttagtccatttacatccaatgttattattgataagtaaggacctactcttgtcattcattatgctatttgttttctgtttttttatgtgtgtgtgtgtgtgtgtgtgtgtgtgtgtgtaatcttttcttcctcctttccttccttcctgtcttccttttagtgaaggtaattttctatggtggtatgttttaatttcttcctttttattattttttatctgttgttttttgatttgaggttaccatgagg

SEQ ID NO: 264124 - DNA, 501 bp, Homo sapiens
cagtgctgatggttgggagttgaagtctctctctagctattattttactggggtctctctctctctttagctcaaccaatatctgctttatatatctggatgctccagttgggtgcatatgtgtttacaattgttatatcctcttgctgagttgacccctttatcattatatagtgactttctttgcctcttcatgtagtttttgtcttgaaatctattttgtcttatataggtatagctactcctactcttttttggtttagttggcatgaaatacctttttccatctcattattttcagtctatgtgtatctttacaggygaagtgtttttcttgtaggcaacatattgttgggtcttttttttaatccattcagccactttatgtattttattgaagagtttagtccatttacatccaatgttattattgataagtaaggacctactcttgtcattcattatgctatttgttttctgtttttttatgtgtgtgtgtgt

SEQ ID NO: 264125 - DNA, 556 bp, Homo sapiens
ggatgctccagttgggtgcatatgtgtttacaattgttatatcctcttgctgagttgacccctttatcattatatagtgactttctttgcctcttcatgtagtttttgtcttgaaatctattttgtcttatataggtatagctactcctactcttttttggtttagttggcatgaaatacctttttccatctcattattttcagtctatgtgtatctttacaggcgaagtgtttttcttgtaggcaacatattgttgggtcttttttttaatccattcagccactttatgtattttattgaagagtttagtccatttacatccaatgttattattgataagtaasgacctactcttgtcattcattatgctatttgttttctgtttttttatgtgtgtgtgtgtgtgtgtgtgtgtgtgtgtgtaatcttttcttcctcctttccttccttcctgtcttccttttagtgaaggtaattttctatggtggtatgttttaatttcttcctttttattattttttatctgttgttttttgatttgaggttaccatgagg

SEQ ID NO: 264126 - DNA, 566 bp, Homo sapiens
aggccaccactaacaaagagccactgggagtactgcccagctactgctgatgttcacttaaggcccaagggctcattagtcagctggtggtgaatgctgccagatctgggactaacctttcaagacattgggctcccctctggcccaaggcatgtccagaaataamatccgaggcccaaagcctgtaatcagggacccaagatcctgcttggtgctgtaccctactgtggccaacctgacacctaaggtgtgagataaagtcccttttactttccctgttttctcaacagaataagtctctcaccatagccaccacagctggaaatgtgttgggtcgcacctgaagccaccatgtcttagagtcttatgcaaagcctacagtatactacctgggcatcactgcgaattatttagagcccccaggctcttttgtcagcagatgatgaattctgctaggactgggtccttccattcaaggcactggtttcctttctggcccagtgtttgtctagaaatgtctgggaggtagtgcctgaactgggggcctcatgaatctgacaggtccc

SEQ ID NO: 264127 - DNA, 566 bp, Homo sapiens
aggccaccactaacaaagagccactgggagtactgcccagctactgctgatgttcacttaaggcccaagggctcattagtcagctggtggtgaatgctgccagatctgggactaacctttcaagacattgggctcccctctggcccaaggcatgtccagaaataacatccgaggcccaaagcctgtaatcagggacccaagatcctgcttggtgctgtaccctactgtggccaacctgacacctaaggtgtgagataaagtcccttttactttccctgttttctcaacagaataagtctctcaccatagccaccacagctggaaatgtgttgggtcgcacctgaagccaccatgtcttagagtcttatgcaaagcctacagtatactacctgggcatcactgygaattatttagagcccccaggctcttttgtcagcagatgatgaattctgctaggactgggtccttccattcaaggcactggtttcctttctggcccagtgtttgtctagaaatgtctgggaggtagtgcctgaactgggggcctcatgaatctgacaggtccc

SEQ ID NO: 264128 - DNA, 560 bp, Homo sapiens
tcaacgaaatgaatctatccataactttataattggataagtctagaaaaagctattttaatttccactttcaggtaggtattgtgttgttttgaaaaataagatttttcttctcttaatgtcttttatttcttttccttttctaagaaattgctagctaggtaaaagtaaaatgtcatttataattgcacatggtggggctcatacttggggcttctaatggtcatagataactacaatctttcagaattatttataatcccttcaatgtaatgttctcgcaactctacaacttgtttttacatgcggcataaatgtccctcttcaaattatccacctagaaaactccaactcatccaaaatttaggaattcctcatttaattccataaacccatttactcttgtgttagatagtgtgtcagttatcaatttgatgcttctcaacttkaagtgtgctcttcatcaccctgtgatttttatatctgggccctgtaaatattttttgccacctggcatgatgttcgtctttgtcaatggaggacactggagggagattgca

SEQ ID NO: 264129 - DNA, 612 bp, Homo sapiens
tggccactttttccttcttattgtgattctaatccagactctttgtctctgttcactcattcaataacaatttttgttgtctattatattccagaaactatgttaatcactcacaattttaggttcctaaaagagggagactgagagagaaaatccctgtatgattggaattgacatttgacattttagacccaggttctaggcagaataggtgctattctgaagggataaatgaattcatctttgcactaaactttcttattcagtgatacattagaagtgctgccaggtgagtgggcaaaagcctactgataacatacagaacatattactgaagggagtaggaagagggtgggcaataagccatacaagagaggattcctaaaaccagtgcctgcaggccttatagaagggtgcagcagcaacaagagctatatttatttcattgtaagtctacttttttattgaataaattgaaagacacccayaatattttccctggaaacttgggatcttaaaaatagacacagaaatttgggtttttcagcttttccatcagatcaagttattgcaaagagtacaacttccaccccctgcctaagaactacacaa

SEQ ID NO: 264130 - DNA, 525 bp, Homo sapiens
attaatatattaaccttatgcttacaatataaaggtatttcttctattataactctacaaccactctgagagcctcattttttataaagaagagaaaaataaaaataaagacatgaaggaaaaatgaaaagaagagaaagaaagaaaagaaaggaagaaagagaaaacagaaaaagaaacctaaacatggacattagcagcattaagtacaaagcaaaggaactacaaagtaaacttccacactttggcgtaagagccctagctgtactctgcagaggaaatgaaagaagtttgagagactgccacaggagccagaagttgagaattcaattctgaccacatgggaattccatacagtgactgctaagtggatggaagagctcaagacctgggatcttatctgaagaaccatttatgacagtaattgacttgcatgccggggggaagtatctatctgttgttagttttctgtttcaamatatgccccagtgcctccaattgaaaagcagattagccaccaccaga

SEQ ID NO: 264131 - DNA, 500 bp, Homo sapiens
gatgagccatttccctatatgacatcaaaaaattgtattcattaatatctaacttatattgtcagaaaagactttaagtactaggaagttcatggtttgggtgcagatttttcaaaattctcattttcagttgtgtatcagtcagggttctccagagatacataagcagtagaatacatggaaggggatttattagggggaatttgctcacaggatcacagaaggaaagtcccttcataggccatctgcaagctggagaagcacagaagctggtagcatggctcaagctagtagtatggtttagtccaagtccaggagcctcagcaccaggaaagtaaacagtgcagcccctactcaggycctagagcccccaggaggctgctcgagtaagtcccaaagttcaaaagccaaagaacctgaagtcttatgtccaaaggcagaaggagaaaaagtgtcctcctctggaagggagagagagagtaaagagagcatgagaatcc

SEQ ID NO: 264132 - DNA, 500 bp, Homo sapiens
gatgagccatttccctatatgacatcaaaaaattgtattcattaatatctaacttatattgtcagaaaagactttaagtactaggaagttcatggtttgggtgcagatttttcaaaattctcattttcagttgtgtatcagtcagggttctccagagatacataagcagtagaatacatggaaggggatttattagggggaatttgctcacaggatcacagaaggaaagtcccttcataggccatctgcaagctggagaagcacagaagctggtagcatggctcaagctagtagtatggtttagtccaagtccaggagcctcagcaccaggaaagtaaacagtgcagcccctactcaggccctagagcccccaggaggctgctcgagtaagtcccaragttcaaaagccaaagaacctgaagtcttatgtccaaaggcagaaggagaaaaagtgtcctcctctggaagggagagagagagtaaagagagcatgagaatcc

SEQ ID NO: 264133 - DNA, 500 bp, Homo sapiens
gggatggagagatggagaggagaccaggaaggaggagctgggaagagtgtttcaaaccagtagctacyggtactgaaacctatccaattgttccatagaactgatgtttattgtttctttttgataaacatagaaattgaccctcccagttttgaaacctgagaaagttatatttgtcttatctgggttcctttctcaggaaagcaaccaccgggattcccagatagtattaaggaactgaaacttaccagatcaccacatgtggacaatgaggtacccctcacctgtcacaattgcctaagcaacgacttgcttcctattgatcaactcctcttccttagttctccttaattctcttgccctgcacatagttacatttttgttctataaaccccttattttagttagggagatggatttgagactgatctcccatctcctctcctcagctgtagcacccaaatagaaccttttccctgactatcttcattttctcagtg

SEQ ID NO: 264134 - DNA, 494 bp, Homo sapiens
atttgtttttgcttctaattttcatttatttgctgtttgttttcctttgggatatatatatatccttccattagaaatagaaatccttccattagaaactaagaaacacgtatatataaaatattatataacatatataaaaacatatgtatgttttttagtttctaatggaaggattttttatttagttctatgaatagtcactttgtttcctatgcatttccaacaatttatcatttgctttatttatctaaaattcctaatctgtcttgccaaacctccaaaaattgatagagtttcccagctatttaaaacttaattcattttgctggccaggcatggtggctcacgcctgtaatcycagcactctgggtggccgaggtgggcaaatcacctaaggtcaggagttcgagaccagtctggccaacatggcaaaaccctgtctctactgaaaatacaaaaattagccaggtgtggtggcatgcacctgtaat

SEQ ID NO: 264135 - DNA, 300 bp, Homo sapiens
cctttgcaattaaattcacgcacattgggtcagcartgccctgccagtacagagagtaccagagtcagccaacagtaaaagagaactaggtggccacttgggttggcttctgaatccattgctgaaggggggccactgaaccatgggcaggtagccacaagggcaatcccagatgagctcccaaattggtaactgcccaaggggtccacattgcccactgcatagacagagctgattcatcaaggcagaggaattgcaatagagaaagagtaattctttcagagccagctgtgtgggaga

SEQ ID NO: 264136 - DNA, 580 bp, Homo sapiens
tcctttgcagttgtatgaccatggtccccatttttctcctggctgttagctggtgataactctcagctctaagaagctgcatgaaattccttgccattggccttctcatgacatggcaacttacttcttcaaagccagcgagggagagtcttttgctctagtctgcttaagtggacttctacataacatactgagaacacagaaatgacatcctttgccatatcctattggttagaagcaagtcacagtctctgcctgcactcaaaaggaaaggattggacaaaggcatggacacaggaagcataaaatcgctgggtgtgatcctgtggtctttatggcacagtcagcctcaggaccaagactacactagaggaaaatcccaaatacattcaactaggtgatctgggaatatcatgttcacttcggcagcacagagagtatccagcaaggcagggttcctgggtgccccctgctgtacatctcacscagaatccctggaaggatcccaaccctcaggcacaggataggcacttaaattacttttggagtgaatatacatagtacaggatgaggtgactga

SEQ ID NO: 264137 - DNA, 565 bp, Homo sapiens
tgtaacaaacctacacatcctgcrcatataccctgaaacttaaaataaaataaataaaacaaaataaaataaaaatactccagagcattctgggttttttttttaaacaacatctaccctctggaaaaactatttaaccaacacataacttctgggagattttatcagagactaactgatctgggggaagggagatacccagctccagctggctctagcccgccccatgggactgagggctgagacacatcaacaccctgaaaacaaaatcacatgatcatatcaatatatgtacaaagagtatttgacaatatccaatacctgtttgtgataaatactctcaacaaactactaatgaggggaacttcctcaacttgataaagaacacctatgaaaacctacagctaacatcctcttgatgagaaactagaagcttttctgccaacatcaggaaaaagacaaggatgttccttctcaccactgcttttcaacatcatactggaagtcctaacttatgcaataagacaaagaaaggaaataaaatatattcagattgagaagaaag

SEQ ID NO: 264138 - DNA, 565 bp, Homo sapiens
tgtaacaaacctacacatcctgcgcatataccctgaaacttaaaataaaataaataaaacaaaataaaataaaaatactccagagcattctgggttttttttttaaacaacatctaccctctggaaaaactatttaaccaacacataacttctgggagattttatcagagactaactgatctgggggaagggagatacccagctccagctggctctagcccgccccatgggactgagggctgrgacacatcaacaccctgaaaacaaaatcacatgatcatatcaatatatgtacaaagagtatttgacaatatccaatacctgtttgtgataaatactctcaacaaactactaatgaggggaacttcctcaacttgataaagaacacctatgaaaacctacagctaacatcctcttgatgagaaactagaagcttttctgccaacatcaggaaaaagacaaggatgttccttctcaccactgcttttcaacatcatactggaagtcctaacttatgcaataagacaaagaaaggaaataaaatatattcagattgagaagaaag

SEQ ID NO: 264139 - DNA, 564 bp, Homo sapiens
tctgatgattatgtgtcttggggttgattttcatgaagtatcttactggagttctctggattccctgaatttgaatgttgacctgtcttgctagctgagtaagttctcttggatcacatcctgaagtatgttttccaatttggttccatttcccaccccacatctctttcatataccctaatcagtcacagrttgggtctttttacataataccatagttcttggagattttgttcatttctttttattcttttttctctatcctgtctgcctggcttattttagatagatagtctttaagctctgatattctttcctctgctttgtctattctgctattgatacttgtgattacacttgaagatctctagttgtgttttgtcagctccatcaggtgggttatattcctgtctaaactggctattctggttatcagatccggtattgttttatcatgattcttagcttctttgcattgggttacaacatgcttctttagctcattgaagttcgttattactcaccttctgaagcctacttctgtcaattcagccatctcagcct

SEQ ID NO: 264140 - DNA, 584 bp, Homo sapiens
taagtacaagatttacaaacttggaatgaagaaaactgcaaaactctgatgaaattaaatagctaaagaaattgaaagatattccatgtccatgcataagatgrcccaatattgtcaagatgtcagttcttcttaagttgatctatagattcacagcaatctcaactaaaatctcagcaagtaattttgtggatattgacaaactgattctaaagtttatatgaagaggcaaaacttccaaaatacccaacctagttttgaagaagaagaacaaagatggaggactgatactattcaacttcaaaacttactataaagctacagaaatcaaggtggtatggtattgataaaagaacaaacaaacagataaatggagctgaaaagagtccagaaacaggcctaagtaaatatagtcaactgatctttgacaaaaagacaaaggcattacaataaacaaaagatagtcctttcaaaaaatagtactacaactggacaactacatgtaaaaatcattctagacacagacattacaccattcacaaaaattacctcaaaatgaaacagacttaaatgtaaaatgcaaa

SEQ ID NO: 264141 - DNA, 522 bp, Homo sapiens
gacatactctgtatgtccctgtgtaccattgtttagctcccaactggagtgctgtaagatgatatttcactgtgaatttagtttgcatttctctgataattggtagtgttgagcattttttcatatgttttttggccacttgtatgtattcttgtgaagtgtgtctctttatatcctttgtcttctttttgacgggttttttttttctcattgagttgtttaaattttttatagattctggatatcagtcccttgtcagatgcatagcttgcaaatattgtctctcattctgcaagttgtttactctgttgatttcttttgctgtgcagaaactttttggtttaatgaartcgcatttgtctatttttgtttttgttgtgtttgcttttggggtcttagtcataaattatttgtctaaaccaatgttcagtagagttttccccagattttcttctagaaattttataatttcaggttttacatgtaagtgttcaatccatcttcagttaattgttgtatatg

SEQ ID NO: 264142 - DNA, 522 bp, Homo sapiens
gacatactctgtatgtccctgtgtaccattgtttagctcccaactggagtgctgtaagatgatatttcactgtgaatttagtttgcatttctctgataattggtagtgttgagcattttttcatatgttttttggccacttgtatgtattcttgtgaagtgtgtctctttatatcctttgtcttctttttgacgggttttttttttctcattgagttgtttaaattttttatagattctggatatcagtcccttgtcagatgcatagcttgcaaatattgtctctcattctgcaagttgtttactctgttgatttcttttgctgtgcagaaactttttggtttaatgaagtcgcatttgtckatttttgtttttgttgtgtttgcttttggggtcttagtcataaattatttgtctaaaccaatgttcagtagagttttccccagattttcttctagaaattttataatttcaggttttacatgtaagtgttcaatccatcttcagttaattgttgtatatg

SEQ ID NO: 264143 - DNA, 522 bp, Homo sapiens
gacatactctgtatgtccctgtgtaccattgtttagctcccaactggagtgctgtaagatgatatttcactgtgaatttagtttgcatttctctgataattggtagtgttgagcattttttcatatgttttttggccacttgtatgtattcttgtgaagtgtgtctctttatatcctttgtcttctttttgacgggttttttttttctcattgagttgtttaaattttttatagattctggatatcagtcccttgtcagatgcatagcttgcaaatattgtctctcattctgcaagttgtttactctgttgatttcttttgctgtgcagaaactttttggtttaatgaagtcgcatttgtctatttttgtttttgttgtgtttgcttttggggtcttagtcataaattatttgtctaaaccaatgttcagtagagttttccccagmttttcttctagaaattttataatttcaggttttacatgtaagtgttcaatccatcttcagttaattgttgtatatg

SEQ ID NO: 264144 - DNA, 522 bp, Homo sapiens
gacatactctgtatgtccctgtgtaccattgtttagctcccaactggagtgctgtaagatgatatttcactgtgaatttagtttgcatttctctgataattggtagtgttgagcattttttcatatgttttttggccacttgtatgtattcttgtgaagtgtgtctctttatatcctttgtcttctttttgacgggttttttttttctcattgagttgtttaaattttttatagattctggatatcagtcccttgtcagatgcatagcttgcaaatattgtctctcattctgcaagttgtttactctgttgatttcttttgctgtgcagaaactttttggtttaatgaagtcgcatttgtctatttttgtttttgttgtgtttgcttttggggtcttagtcataaattatttgtctaaaccaatgttcagtagagttttccccagattttcttctagaaattttataatttcargttttacatgtaagtgttcaatccatcttcagttaattgttgtatatg

SEQ ID NO: 264145 - DNA, 575 bp, Homo sapiens
ttggattttaaaaagatacagacttttttatgacagcacattttaaataattattaactgcagatgtcattggatccttcaaaattgcatagttccacctccaggaaataaaaaggcaaacagttcatatctttatcaacagatttattacattctacacttcccattcctcccaaataaaacaaactggaaaactaaattctactttcttatwggcttgtaactgacaaacatcactttgataagtttctcctttcattcttcaacaaaaagggagaagacaacaaaattgctcttgagattgtggtggctgagaaacactatagtcctgagtctaccaaggtctgaaatcagaaatgtctactgagatctcacattctttggctatctgcccttacaaagtttgtccttttctttcatccatttaacattacataaaagagaaaccaggtctaaagagatgttttttggctttaagcaaaacaaaagctgtgaaatatctaaaattaaactaggacatgcatgcagtttgtcaagtgtcaaagaagcccagatagaggcagaacaaatttatt

SEQ ID NO: 264146 - DNA, 559 bp, Homo sapiens
ctgtacccattccaaatctcatctttctcctttcctgtcacactccttgcaccttaacccttaacttgaactcagtgtcagtcattcccacttattgtagtgcttaacatctataagtaaaatcctaaacaattgattattaattttatttgttttgaactttggaaaaatgagctgatgctacacagatatgacctaattttgtcatttaggaacttgtttgtgaatttcatataggatgatttatttcagtcaatgactgctattacattttgtggcaacacaaatacttatctggtccactgctgtgtggaaatttgagttgcttacagttttgctaatactagtaacatagctctcaacattttttgtgctgagccctgggtatataagtcctagagatactttaggatatatatgtaggagtggaattactggctcatatggcatgcatatattcaactttaccaaatcataaaaaattatttttaaaatgattgtactcatttaccayacccactagcaattcatgaaagtttctttcctccactcactggcc

SEQ ID NO: 264147 - DNA, 523 bp, Homo sapiens
gtggggggcattattcaccctaccacaatgggtcagaaggcagaatctagctgtggaatgagaaagctgcagtcatttttcatgagctaatgtaatttttacccaaggtgacaatgtttgtgtagacataggataaaaatcctaagagaaaatagaacatggtgccattcaatctctttggtggtggtggaaagggtgggtttttaggatgacaaactaattaagaaaaacataacttatagatgcttaggaaatgccagaayatcatctaaaattcccacacccacattgcaagttagagagtattattcccaatatagaggtgagctgacagtctcggggaggacacagcttgggagaggctgagcggataagtctgactctcacctccctcctcttgctttcacattgtgctgcctttcacacaggcaagtggcatgttagctgattctgcagacaggaattgttccatgaactagctcttgaagggggcggaagaatttgccagggggacaaagggaag

SEQ ID NO: 264148 - DNA, 523 bp, Homo sapiens
gtggggggcattattcaccctaccacaatgggtcagaaggcagaatctagctgtggaatgagaaagctgcagtcatttttcatgagctaatgtaatttttacccaaggtgacaatgtttgtgtagacataggataaaaatcctaagagaaaatagaacatggtgccattcaatctctttggtggtggtggaaagggtgggtttttaggatgacaaactaattaagaaaaacataacttatagatgcttaggaaatgccagaacatcatctaaaattcccacacccacattgcaagttagagagtattattcccaatatagaggtgagctgacagtctcggggaggacacagcttgggagaggctgagcggataagtctgactctcamctccctcctcttgctttcacattgtgctgcctttcacacaggcaagtggcatgttagctgattctgcagacaggaattgttccatgaactagctcttgaagggggcggaagaatttgccagggggacaaagggaag

SEQ ID NO: 264149 - DNA, 557 bp, Homo sapiens
gctactatgaatgcccatgtcatgtcaactgtctagaggcctgagaacctgcccacctattgatctaccattgccactactggcctccaagcatgctgcctagaggcccaagaattaacacactggtaaaaaccaagacatgtagcagtgtgcacttccctagggcataaagataggcatactcagccaactgctaccaccgctgtggcctaaagactggcccacaaaacatactagtccacagcaaaatttcaccaatctccattaatgactgcaccctaactcacsaaggaaatcacaaatactactaatgttgtttacagccaaataaatcacccagagactatgctactgtgtacccagaatcacagccaaagtgccctacccactgaataccatagatacatctccagaaaacagtcctcctctactaaaagtaaatgtcaaaatggaagaagcaactgttatactacatgtgtggacatcaatgtaggcacgctggaaacacaaaaagcaagaaaatatgacacctccagaggaacacattaattatccag

SEQ ID NO: 264150 - DNA, 557 bp, Homo sapiens
gctactatgaatgcccatgtcatgtcaactgtctagaggcctgagaacctgcccacctattgatctaccattgccactactggcctccaagcatgctgcctagaggcccaagaattaacacactggtaaaaaccaagacatgtagcagtgtgcacttccctagggcataaagataggcatactcagccaactgctaccaccgctgtggcctaaagactggcccacaaaacatactagtccacagcaaaatttcaccaatctccattaatgactgcaccctaactcaccaaggaaatcacaaatactactaatgttgtttacagccaaataaatcacccagagactatgctactgtgtacccagaatcacagccaaagtgccctacccactgaataccatagatacatctccagaaaacagtcctcctctactaaaagtaaatgtcaaaatggaagaagcaactgttrtactacatgtgtggacatcaatgtaggcacgctggaaacacaaaaagcaagaaaatatgacacctccagaggaacacattaattatccag

SEQ ID NO: 264151 - DNA, 578 bp, Homo sapiens
taaagcctacttgatcatggtgtataagctttttgatgtgtgctggatttggtttgccagtattttgttgaggatttctgtatcaatgttcatcaaggatattggcctgaagtttctttttttgttgtgtctctgtcaggttttggtatccaaatgatgctggcctcatagaatgagctagagaggagctccyccctcagtatttttcgaataattttggtagaaatggtaacagctcttctttatacacatggtagaattctgctgtgagtctgttgggtcctgactttttttgattggttgactttttattactgatttgattttgaaacttattattggcctgtttagggattaaaatctttcctggtttagtcttgggagggtgtatgtgtccaggaatttatccatttcttctagattttctagtttgtatgcatagaggtgttcatagcagtgtttgatttttctttctgtatttctgcagggtcagtggtaatgtaccctttgttaactctaattgtgtttatttgggtctcctatcttttcttctttattactctacctagtggtgtatc

SEQ ID NO: 264152 - DNA, 506 bp, Homo sapiens
cccagtggtcggggagcctcctctggctccatgccactgtcaggtaggcattaatctattcttgctcctctgtgttctccttgggttgagttgtttgtttgatgaatccctgrgtttgtgcccacctgggtgtttcaattgaagatgtagtatttattcaccactttttcttctctttgtgaaagtagtgcacactaactgcttccagtcagccattttggccatcatgtaaactaaaactttttaaaaatattttcgctccctcttaacattgagaaatggcagattaactgaatggatttgatctccttgacaggcaatactgtcatagatgtgaattctatatccattcacctaagtacatctgtggttttttagatccctttaaaattagagagaaaaaagaaagtaaacaagactcatggagacctgacatctcacagtaatactgtggattatttcaattactgcacttctaaactctatgtattatacttattcttcat

SEQ ID NO: 264153 - DNA, 578 bp, Homo sapiens
atctcatggcttgaaggctcactttctgaaataagatagtcagaaaagaatagagaaaaaataatgaaaaggaacaaacaaaatctctgagaaatatgggattatgtaaagagacccaatctgtgaactcattggtgtcccttaaagagatggagagaatagaaccaacttgaaaaatatatttctggatataatccataagaacatccccaayatagctagagaagacaacagtcaaattcatgaagtgcaaagaacctcagtaagatacttcacaaaaagatgatccccaagacacatagtcatcagattcttcaaagtcaaaatgaaacaaaaaatgttcaaagcagctagagagaaaggtcagatcacctacaaagggaagtccatcagactaacagtggacatgtcagcagaaaccatacaagccaaaagagactgagggtcaatattcaacattttcaaagaaaagaaattttaacccagaattttatacctggctaaactgagcttcgtaagtgaaggagaaataaaattcttttcagacaagcaaattctgagggaattcattaccacca

SEQ ID NO: 264154 - DNA, 552 bp, Homo sapiens
tgagactggcagcctcaatacttcaaatcaaattctggatcatcccaagaagctgggmaaatagaggtcataagcaacaagaaacaaactctgtgagcttttctcacaactaaaaaagttaaaaacaagaatctcttcataattccaacattattagttaattatgaatgagatgaggaagaagaatatttgtaaactatacataagcaaataaatgcaaaccatttgagaaactccataaatggtagcattcactccctaaccccaagttagaggacactggaaaatgtttacaagtagcatccaagggttcaataaaaccactccttacacctaagacaagtccttaccctcaaacattggagcttgctgtactggctacctagctctggctaatatggaacagggaacataaaaaggacaaaagagatgcttttattcacatggtggttaaagacagatttcaaaggatcagattgactttggtgtaaattccagctctgtcactgtgatcttgggcaagtttctttacttcactcaacctcattttcc

SEQ ID NO: 264155 - DNA, 568 bp, Homo sapiens
gtgtgaggggagccttctcttgccctgttcatgtctgactagctacctactataacagtttaaccatcttgatttgaaaaaaagaagaaaagcttggtaaaataagttacctgtattgaacaattgtatcactacaaattatcatgtctgtctagcacattgtaatggaataaatgccaaaagcactgttaagtcttctgaagaactctaaaataatattttttaagtcattgcacatagagtcagccttagactaacattagcctgctataatatagattcagtgagcacygagcattgctctgattctcatctgcattctctctttctaattggtgattatgacatctctttatgttagttacataaacatccttccattagggccagtgatttttctcttgaaaagatgttggaacaaggtgtagaacaaactagtttgaccatctccttctgccttgttctaaattcaacagctctaaatgtgatttcttcttcttgaggaagtccatgctttatcatgctgtttctggtcttctgagatggaacctctacaacttcttccagg

SEQ ID NO: 264156 - DNA, 557 bp, Homo sapiens
agtcaccattttattttgacacatgaccatcaatttgggctaggcaatacaacaacctgggcttggctcaggtagttcttctgatggtgtctcctggagtcaccaggtgacacttggtgaccgagtgcagctgcctcactcacatgtctggttttttgcactagtcattgcctgggcctcatgagcttggctatcctcatatggtggcagctgcattttaacagagcaggggtagaaactcctaggcttcttaccttgttggcctggaacatctacatcatcacttttaacacttcctattggccaaagcaagtcatgaggtgagcatagagtcaagggggttgggatacagaytctgtctcttaaagtgaggagctgctaagaatgtaaggctatttttaatctttcactgctgtattacttcctaatatttgattttcttgtttatgacatagaaataccccttgtaaagtttccagaaaacttacaaaaattcatagaggaatgttagcacaaatgtttattggagtacaataaacaattattattattatatt

SEQ ID NO: 264157 - DNA, 585 bp, Homo sapiens
ccctgcaagaaaaaaaaaaatcagaggcaagcccttccatggccccagagtaccacatagagagcatttccagaaatcatcattgaaagacaaagttcagagttctatgttgttgttgtttgttttgttttgctttgaattatttttttaaatttttactttaagttcaagtgtacaagtgtacatttggtacatggctaaacttttgtcatacagattatttcatcacccaggtattaagcctagtacctattaattaattttcctgatcctctccctcctctcaccctccatcctccaacaggacccagtgtgtgttgttcccctctgtgtgtccataagttcttatcatttagctctacttataagtgagaacatgcagtattgggttttcagttcctgtgttagtttgctgaggataatggcctccaagctccaaccatgtccctgcaaaggacatgatctcattgttttttatggctgcctagtattccatggtgtttatataycacattttctttatccagtctatctttgatgggtatttaggttgattctatgtctttgctattgtaaatagtgctg

SEQ ID NO: 264158 - DNA, 560 bp, Homo sapiens
atgctgtaggacgcaaggtctattttcccattactcgtactcttggaaaaattgcagaagtaatatttgaatgcattctttttgtaaaagcttagtgcctggctgtttcttcattgtttccatcctgaataacagtccagaagagaggacaagaagagtttgccaggccatgtctcccagtgcctgctgtgtcttcagccagtgctagtgacagggtgagatgagctgcactgttggtggggagcagtgatgctctctgcaggaggattcaaggcatctgggagttgaatgtgagaatgatgggaggtgacggtggaggggatgcwatagaatcccacataggaaaggggaagagatccatatggacagtcttcccttctctgagaaagaatgactttggctcttgattagggcaaggtacacccttaacccaaagccagaggttctctatcacacttattaacagtggtaaagggtgtcaggagcccactgcatggaaagctgatattctaatatgtggtaggactggacttctatagaaatatgcaatttaattgttg

SEQ ID NO: 264159 - DNA, 553 bp, Homo sapiens
ctgcacccaaacggaagtcatataagtccctccccgtgactttttcttttctcagaccatgagaattaaatctgtagtcatttttctaattagtggctggatccaaaagaataataaaatatatctaatctcccccaagaaagcccaaakgttacatccaggacttggtccctaggttaagccctaaggtgctggggagagtggaatgctatcttcctaattatttacatatcaaaagagatgaagcccacagaacctaaagacatcagtaggacacataaattgaagaccagagggctcttaggttccaggggaaaggtatttacatcccaaagagttggagttagggctctagctcattgtgtttccatgaagaccctttcaggagggtagtgggacaaattcttccttctcctttacaagcagaaggaatcatcttttcctgtccttaccctatggagtgtgtgtcccagtgtgtgagacaatagatgtgactttcactgcatcaactcaggggggaggcccaaggcaagcaggaagctgaacacactta

SEQ ID NO: 264160 - DNA, 521 bp, Homo sapiens
tctgggtggaaaactttgagagggtccctggatcaatgtttatctttggtactctagcccactgtcatttatatcaatgtattattggagcaagtcgtaatagcaaaagtgagtaccacattaaattctctgtgaaaatttggagtgcaagcagacctccatttaggtcatcaaggtagcgggtggcagatagggttatttgagggaatggtcaccagatgatgagggcagaaaacagatgttctctgtattcaaagatcagtcttagaacagtgtgacacagcatgacctgtgactttgagaggcagacaacaatgtcaacwgtacctgagacttttggggcaaataaactacaagagaaaaagaggaatgatggatgaccccactctgttattacgattccttatttgagaattatcctgaaatctcctgttagagatttccagaaactggtgggatgtgagagatacagagatggagcttctgcaatagccagtttgggcaatgtttcctctgctgga

SEQ ID NO: 264161 - DNA, 540 bp, Homo sapiens
accacactgtgaatggccacagctgtgaagctaggaaagccctgtcaaagcaagaggtggctagtgcttcctctagccaaagaggcgaagtggttctggaaactttggtggtggtcatggaggtggtttcggtggaaatgacaactttggtcatggagaaaacttcaggggtcatagtagctttggtggcagccacggtggtagtggwtatggtggcagtggggatgactatagtggatttggtaatgatggaagcaattttggaggtggtggaagctacaatgattttggcaattacagcaatcagtcttcaaattttggacccatgaagggaggaaactttggaggtggaagctctgacccctatgggggtggaggccaatacttggccaaaccacaaaaccaaggtggctatggcggttccagtagcagcagtagctatggcaatggcagaagattttaattagggaacaaagcttagctggagaggagagccagagaagtgacagggaagcttcaggttataacagatttgtgaac

SEQ ID NO: 264162 - DNA, 580 bp, Homo sapiens
atcttctaactctcttgttggtgtcttttgatgcacaaagtttttaattttgatgaagttccatttacctatttttttcttttcttgcctgtgtttttaatgtcatatccaagaaatcattgccaacaccaatgtcatgaatctccccccgccacgttttcttgcaagagttttttagttcttacatttagccatctgatcctttgtgaattaactttttatatatgatgtaagggaagaatccaacttcattttattytttttttatgtggacatccagttctctgagcaccattcattaaaaagaataccttttactattgaatgatcttggcattcttattgaaaatcatttgaccatatatgtgagggtttatgtctagactctgcattggtctaaatgtctgtttttatgccagtaccacactgtttttatcactgtagctttgcagtaagttttgaaattgggaagtgtgagtcctccaattttgttctatttcaagactccttttgctattcaaaatcccttgagattccacataaacttttggatttctttttctattccttcaaaagatat

SEQ ID NO: 264163 - DNA, 572 bp, Homo sapiens
taacatttataaaagagagttcagaatgtagaatggaactactatgtagattttgacagatatcttacacacagatattctgaatattccgcatatgtagtgtattagtccattctgtggctgctgtaaggayatacctgagactgtgcgatttataaaggaaagaggtttaattgactcacagttctgcagggctgggtaggcttcaggaaacttaccttcaggtggagcgggaagcaaacatgtccttcttcacatggtggtaggaagaagaaggagtgccgatcaaagggggaagccccttataaaaccatcagatcacatctcaaaagaactaactgactatgatgagaacccaattggctaaactgcccccatgattcaactgtcttcatgtagtccttcccacgatatggagggattatgggaactaaaattcaagatgagatttgggtcggtatgcagccaaatgatattataccacccctggcccctcgaaatctcatgtcctcacttttcaaaacacaatcatgcccttccaacagtcccccaaagtcttaactcattccagc

SEQ ID NO: 264164 - DNA, 285 bp, Homo sapiens
atttgacattgactccaaaattttataggggtcaaaaagtacaattgtaaggtaaagtttaggagatgctaaatgactactcacttgtcttagttctcttaagctccacatttacaaagacatctatatttcacaataagaggctgattcagtaatttggttaatattttattttagtgaagaattrtgcttataaaataacaagacaaatatagaatagcatataaaaatcgcctaaatatagtttcattatattattcactaaataattttatgaattgcctt

SEQ ID NO: 264165 - DNA, 593 bp, Homo sapiens
tacaattgtaaggtaaagtttaggagatgctaaatgactactcacttgtcttagttctcttaagctccacatttacaaagacatctatatttcacaataagaggctgattcagtaatttggttaatattttattttagtgaagaattgtgcttataaaataacaagacaaatatagaatagcatataaaaatcgcctaaatatagtttcattatattattcactaaataattttatgaattgccttatttgttcattatctttctgcttgtgttatttaatgtgtctatcttagggatatgaatcctgtgktttaaattttttataagttacaagataattcctcattcagtgtttcatttccaaatcctctgaagaagatttgaaagaatggctttagagacagccaaatgaatgtatatgtctggtagttccagcggtagaaatcaaatcatccagaagacacaattcaataaaataataaaataattccataaaataattcagttttctcagaataatttttactgtcatggtgtgggttatttttagtaaagtgattatttggaaattagattgtttaaactggtacgc

SEQ ID NO: 264166 - DNA, 593 bp, Homo sapiens
tacaattgtaaggtaaagtttaggagatgctaaatgactactcacttgtcttagttctcttaagctccacatttacaaagacatctatatttcacaataagaggctgattcagtaatttggttaatattttattttagtgaagaattgtgcttataaaataacaagacaaatatagaatagcatataaaaatcgcctaaatatagtttcattatattattcactaaataattttatgaattgccttatttgttcattatctttctgcttgtgttatttaatgtgtctatcttagggatatgaatcctgtggtttaaattttttataagttacaagataattcctcattcagtgtttcatttccaaatcctctgaagaagatttgaaagaatggctttagagacagccaaatgaatgtatatgtctggtagttccagcggtagaaatcaaatcatccagaagacacaattcaataaaataataaaataattccataaaataattcarttttctcagaataatttttactgtcatggtgtgggttatttttagtaaagtgattatttggaaattagattgtttaaactggtacgc

SEQ ID NO: 264167 - DNA, 593 bp, Homo sapiens
cagaaaataaagaggaaacactcggaaatgcattatgtctattttttctgatacccaaatgagaaaataacattataaggaaaataaactatgtacgaatattcttcataaaagtagaaacaaaaatcattcataaaacrttagcaaaatcaaatctaacaatacataaaaagatgccacacatggccatgtgtagtttgtcccaaaaatgcaaggttaatttaacagtcacacacacaaaatcagtcaatacagtttaatattttaacaaaataaaaaaagttatttgcctatctcaatagataaggaaaaagcatttgaaaatattcaactaccaatcatgatttttcaaaaaattcctatagaacttaggaatcaagaggggcagaggaggagcttccaaaacctaacaaaggccatctatttaaaagaaaaaaacctgcagctaacatcatacctgacactaaaacttggaaatattttccctaagattgggaacaggtgtctactcttaccatttatatttaacattttattgaagatgctattctatgatataaggtaaggaggggaaaaaaagcataaagattata

SEQ ID NO: 264168 - DNA, 593 bp, Homo sapiens
cagaaaataaagaggaaacactcggaaatgcattatgtctattttttctgatacccaaatgagaaaataacattataaggaaaataaactatgtacgaatattcttcataaaagtagaaacaaaaatcattcataaaacattagcaaaatcaaatctaacaatacataaaaagatgccacacatggccatgtgtagtttgtcccaaaaatgcaaggttaatttaacagtcacacacacaaaatcagtcaatacagtttaatattttaacaaaataaaaaaagttatttgcytatctcaatagataaggaaaaagcatttgaaaatattcaactaccaatcatgatttttcaaaaaattcctatagaacttaggaatcaagaggggcagaggaggagcttccaaaacctaacaaaggccatctatttaaaagaaaaaaacctgcagctaacatcatacctgacactaaaacttggaaatattttccctaagattgggaacaggtgtctactcttaccatttatatttaacattttattgaagatgctattctatgatataaggtaaggaggggaaaaaaagcataaagattata

SEQ ID NO: 264169 - DNA, 593 bp, Homo sapiens
cagaaaataaagaggaaacactcggaaatgcattatgtctattttttctgatacccaaatgagaaaataacattataaggaaaataaactatgtacgaatattcttcataaaagtagaaacaaaaatcattcataaaacattagcaaaatcaaatctaacaatacataaaaagatgccacacatggccatgtgtagtttgtcccaaaaatgcaaggttaatttaacagtcacacacacaaaatcagtcaatacagtttaatattttaacaaaataaaaaaagttatttgcctatctcaatagataargaaaaagcatttgaaaatattcaactaccaatcatgatttttcaaaaaattcctatagaacttaggaatcaagaggggcagaggaggagcttccaaaacctaacaaaggccatctatttaaaagaaaaaaacctgcagctaacatcatacctgacactaaaacttggaaatattttccctaagattgggaacaggtgtctactcttaccatttatatttaacattttattgaagatgctattctatgatataaggtaaggaggggaaaaaaagcataaagattata

SEQ ID NO: 264170 - DNA, 602 bp, Homo sapiens
tatcagttttctgacacatggtttcagatgtctagaacccagtacatatccaagagaatctttgccatcatatgaatagaattatatcagtctggtaccatcaggcttccaaattatgtccagatatactgaacatcctattaatgtacagataaagctaagttcaaacaagattcctgttacattcagaattgtgggtaggatgcagtttaaattatcccatttattaaagccatcctgttaatttatcattttattctattttgggctatgatgaaacagtaatgcttaagttcactttatctccaaaagaatgatcagagtctgaatggtttgtgtacatcatcagctagctacatttgaagtacagttgtgaagcactgagacatggctttcagagtagtaaaaaggccatgtataccatcagtcagttaaaaaataatacattcaaaatatgagactgttttatctgtgttgattttttcctacaagtcaaatagtagctttagttaaatctatttyatactgaactgtttttgcaaggtttatgtgacctaactgaaggaagaaaagaaagcaaagatgcttttgataatggggag

SEQ ID NO: 264171 - DNA, 569 bp, Homo sapiens
atcataaaatgttggactaaataaaatatttttatccaacctaattatgagattagtagtgcttcttgtttaaatactggagtactctaataaatattttacattaataagggtttatggtttttaagcaataacatccaactccagatgatgccaagttctgaaaaaggagttttatacaagtgtatttgcccagcgacttcacggctaggtaccgtctcgaaagatatgaaagcatatgtccacaaaaagatgtgtatgaatcttcaaagtagatcaattcataatagccccaaattggaaagaaataaaatgtctatcacaggatagtgaatcaacaaattgtaacctattcatrtgaaggtgcacttcttagcaataacatgagtgaaaaatcccagaaatattaggttgatcaacaaaggccagacactaaagatatataagatattgttccattcatatgaagcttaagttgccaagattaatctgtagggataaaaatatcagaacagtgcttcccccaggggaggcggtactgtggagaaaagggcatgagaaacactctg

SEQ ID NO: 264172 - DNA, 644 bp, Homo sapiens
tggcccaatcttcaaataagaccacattctgagcaactggggttgggattcaacatgtgaatttgagggagtggggacacaattcaatccatgacttgtaggcagcagcaaacataaagtatagtacatcttacagtgtctctctgcagcaaattaaaatatttggctctgaaatcattggcagaacttgtcacatggctctatcttcagtgtgtatggaaaattgaaatcctgctctataccaggaagacagggagccgaaagtattcggtgaatagcgttaatgatcacttgccctagtatttgattcttttaataaatatatcagtatttttagagtaaacaaaggagggattaacaactcatatggcttggctgtgtccctacccatatctcctcttgaactgtagttcccataatcccwggcatctaataaaaatgtatcaggatgaaaagaaacagaaattacaacctacaatatgaaaaaaaaatcattagaaaatgactcagaaatgacacatgttaacagaatttatagttaatgacattaaaatagttattttggctgcaacctgttagtttaagaagctaaaggaaaaattgagcatgtgatgtgaaggcatgagagatgtaaaaattaccca

SEQ ID NO: 264173 - DNA, 645 bp, Homo sapiens
gtttaagaagctaaaggaaaaattgagcatgtgatgtgaaggcatgagagatgtaaaaattacccagatctatctggagttgaaaaatacaatatcttagatttctaaaaatacattggatatgtttgatgatagattagacaatgcataaggaagattagtgaacttgaatccataacaatggaaactatccaaaataaaactctgtgagaaaagtatataaaaatgaacatataaacagtascaacaacaccaacaaaagcccagggcatcagtgagatgtgaaacaatttaaggtggctaaatatatgtgcaattggaatcctcaaaggaaagcagagaggggaaggataaaaaaaaaacattgaaaaataacagctgaagaatgtccaaaattgatgaaacatatgaacgcataattccaaaaactcaacaaaccccaaacagaagaaacatgaaggaaactacaccaaagcacagtataatcaaatgcttaaagctagtgatatagagaaaatcttaaaagcaacaatgtaaaaaaagatacctttttatatagagaaaaaaggatcaggttgactgcagttttctcatcagaaacaatgaattctagaagacagtagaacaacatcttatagtactgaa

SEQ ID NO: 264174 - DNA, 565 bp, Homo sapiens
atgagatttagagaggacaaacctccaaatcacattaatagtttaaaagaattatcctatataaaacctggtattagatttttgatttttaccaatttagtaggtctgattatgatctttatacacatttaactttgtacaaacatctttttgtttattgactatatgttccttcttctaatgtccatttgtgttctttgcacatttttctattgctttgtttgactttaattatttctatcttataaaactagcttttgaaggttatgtatgtgactatttctgttttaagaggtctattagcccataatagtttttaattttatrtagaaaatttgctgatttttaatgaaatgttggtatcttgcttgtaaaataattttatatcccaagagcataaaaatgttctttatttctttctaaacatttgaaaatatgggcatcccttgcttttcaggattctaatatgaacaaactttagttaccacagttcagttaagtaacaccagtgccccaacaacatagtttaaattttagtcaccatggtttactaactatgtacaat

SEQ ID NO: 264175 - DNA, 565 bp, Homo sapiens
atgagatttagagaggacaaacctccaaatcacattaatagtttaaaagaattatcctatataaaacctggtattagatttttgatttttaccaatttagtaggtctgattatgatctttatacacatttaactttgtacaaacatctttttgtttattgactatatgttccttcttctaatgtccatttgtgttctttgcacatttttctattgctttgtttgactttaattatttctatcttataaaactagcttttgaaggttatgtatgtgactatttctgttttaagaggtctattagcccataatagtttttaattttatatagaaaatttgctgatttttaatgaaatrttggtatcttgcttgtaaaataattttatatcccaagagcataaaaatgttctttatttctttctaaacatttgaaaatatgggcatcccttgcttttcaggattctaatatgaacaaactttagttaccacagttcagttaagtaacaccagtgccccaacaacatagtttaaattttagtcaccatggtttactaactatgtacaat

SEQ ID NO: 264176 - DNA, 538 bp, Homo sapiens
caatgcacttaagtggtcattgtctacccctgtcttactaccataatattttaattaagttgtatgcactaaatgttgatattttagagggaagtcactctgctttatcatgtttcaggagtatcttggctcttcttcgccctttggttggccacgtaaatctaataataggataataaattctttcatatttgcactatatagagtgagactaatttataacacggatacatacttcaaatctcatttttaagttgaactaaagatttaatatatatgtgtgtgtatatacacacacacrtatgttttgaataaagaggctaatatatataatatatatatgcacacactgttgtgaataaagaggctaatatatattgccatatgtgtatatatgtgtgcctttattcatgtgtgtgtatatatatatataatatgtattatatatgttagtctctttattcacaacaatgttttttgccttaactctgttttgtctgatgatattaattaatcatttacaggttttcttgggttg

SEQ ID NO: 264177 - DNA, 543 bp, Homo sapiens
agactaatttataacacggatacatacttcaaatctcatttttaagttgaactaaagatttaatatatatgtgtgtgtatatacacacacacatatgttttgaataaagaggctaatatatataatatatatatgcacacactgttgtgaataaagaggctaatatatattgccatatgtgtatatatgtgtgcctttattcatgygtgtgtatatatatatataatatgtattatatatgttagtctctttattcacaacaatgttttttgccttaactctgttttgtctgatgatattaattaatcatttacaggttttcttgggttggccttttttcttatacatctttttctattttaaagtttcgtgtatttattttatgctttatatgtctttttagaacaccataagactagattttgtaaacacctttgcttgaacatgatagttcctattcttttaaccaataattttaaatcatttacatttatgtaactatgatatatttgaattgcttttactatcttactttttatattt

SEQ ID NO: 264178 - DNA, 605 bp, Homo sapiens
gaaaaatgaatattaggccatcaatgtaattactctatcacacttcaccctctggccayatccctcttacatgcaaaatatgccccacttcacccaggatctctaaaacttccttcagtcctgcactaggcttggagtccaggatattatcatttgcatcaggtccagatggagctcttcagatgtggttcctctagatgtgaagataaactaaaaggaaaatctatccaattcccacacaccaaactatgagacaagggtaggaagactgcaataaatgccattatttgaaaagaggtatttaaaaaagaaacatagtagtcactggtttataaccattctcaaattctgctgctgagcccatgttgcaagattcttctgatctggatgcagggaatgtttcctgttcaagctttatttatgctttttggaagtgtctctccagcccaatgttctctatgattcttggttccacgttctgggatgcccttcgtttttcaatttctgtagccacttttgagactttattagaagttatacccttggaacaatattctaagactacttcctgtttgtagaaatgttggggccccagagaccattat

SEQ ID NO: 264179 - DNA, 605 bp, Homo sapiens
gaaaaatgaatattaggccatcaatgtaattactctatcacacttcaccctctggccacatccctcttacatgcaaaatatgccccacttcacccaggatctctaaaacttccttcagtcctgcactaggcttggagtccaggatattatcatttgcatcaggtccagatggagctcttcagatgtggttcctctagatgtgaagataaactaaaaggaaaatctatccaattcccacacaccaaactatgagacaagggtaggaagactgcaataaatgccattatttgaaaagaggtatttaaaaaagaaacataktagtcactggtttataaccattctcaaattctgctgctgagcccatgttgcaagattcttctgatctggatgcagggaatgtttcctgttcaagctttatttatgctttttggaagtgtctctccagcccaatgttctctatgattcttggttccacgttctgggatgcccttcgtttttcaatttctgtagccacttttgagactttattagaagttatacccttggaacaatattctaagactacttcctgtttgtagaaatgttggggccccagagaccattat

SEQ ID NO: 264180 - DNA, 576 bp, Homo sapiens
ttatttttgtgaaaaccaaaagctggcagattgtcaaatactgcctatattttgattattaaagaattctgaacaaatcaggacatgaggctyttttatcttacaaacttaaagtaaacataagtttgattttgcagtcaacttctgttttccagaattgatttgatcatatttatgtcatgtccatattacttttatgagagtaccttataagggtcctacttcacttttctatatgctttaatgtagatttgactttgcaattctttttgaggaattgaatatattgcatcaaaaaatggtctatgtcccccaatttcagttatttgggcttaaaatttttattacaagtcataaagaaatttgttttatttcctcccccccaaaaaacaatgaaaggtatggaaatgacctgtgttggataagcatagattcttcaagaatgacatttgtaatctgcaacagaaaatatctagttctagaaaatgatattctgttaagtatagtaaattccatcaaccaaccatacagaatcatttcaaatagtcattcagcaacatccccaaaataactgct

SEQ ID NO: 264181 - DNA, 576 bp, Homo sapiens
ttatttttgtgaaaaccaaaagctggcagattgtcaaatactgcctatattttgattattaaagaattctgaacaaatcaggacatgaggcttttttatcttacaaacttaaagtaaacataagtttgattttgcagtcaacttctgttttccagaattgatttgatcatatttatgtcatgtccatattacttttatgagagtaccttataagggtcctacttcacttttctatatgctttaatgtagatttgactttgcaattctttttgaggaattgaatatattgcatcaaaaaatggtctatgtcccccaatttcagttatttgggcttaaaatttttattacaagtcataaagaaatttgttttatttcctcccccccaaaaaacartgaaaggtatggaaatgacctgtgttggataagcatagattcttcaagaatgacatttgtaatctgcaacagaaaatatctagttctagaaaatgatattctgttaagtatagtaaattccatcaaccaaccatacagaatcatttcaaatagtcattcagcaacatccccaaaataactgct

SEQ ID NO: 264182 - DNA, 555 bp, Homo sapiens
cagaaacagaagtaaatccttccctacagggaagtaagctgattaaagatgattactagatgcaaacagggagcaaaaatgcatagattatataaggtcatagcagaaactgtaagcagcaagtcagcagtccagccaatatgtagtccttagaggtgcagacccatgtttaaaggtccacgtttgaattattgggtccacccctctagttatttaagttataatatcctcrtgtcatgcatacatattacgtgacaaatccaaacaataaaaacacattcaaaatacactaggtggattttgtcgcagacttttaggcatttcaaaactgagacacagtttaggtttttacatctggcaattcagtcacttgtcaaactattccataaggtccataatctctatactataaaaatcttaaaagttaagcagatccttaatttttaaaaatacagtctaagcataaatttgtcacactgaatagaacaaagtaaaaactacagggaaggaaacagaggaagttaatatgaaatgaagtctaaattgaaagtcttt

SEQ ID NO: 264183 - DNA, 555 bp, Homo sapiens
cagaaacagaagtaaatccttccctacagggaagtaagctgattaaagatgattactagatgcaaacagggagcaaaaatgcatagattatataaggtcatagcagaaactgtaagcagcaagtcagcagtccagccaatatgtagtccttagaggtgcagacccatgtttaaaggtccacgtttgaattattgggtccacccctctagttatttaagttataatatcctcatgtcatgcatacatattacgtgacaaatccaaacaataaaaacacattcaaaatacactaggtggattttgtcgcagacttttaggcatttcaaaactgagacacagtttaggtttttacatctggcaattcagtcacttgtcaaactaytccataaggtccataatctctatactataaaaatcttaaaagttaagcagatccttaatttttaaaaatacagtctaagcataaatttgtcacactgaatagaacaaagtaaaaactacagggaaggaaacagaggaagttaatatgaaatgaagtctaaattgaaagtcttt

SEQ ID NO: 264184 - DNA, 588 bp, Homo sapiens
cctgattggacccagagctatgtccaaccatttagcatgaggaagtgtaatgtacgaatttagtaaaatgggtgaagtagaaagtacatctattctccttccaacctcaaacagaggactaagaattaaaatgctctctgaagctaacatctggtggtcagatactcagtagtccacattgtgtctacttcgttagaagcaatcgaacctgagacatctgctttaactagtactctcagcagcacccatcgtatgacctccttctttcactccttcatacgtaatctattcctgagtacaatttatttcattctaaagctctctccaatattcaatttatcctatcagctgtaccwttctagatcaaactattatctgggattgggacaaaagaaatctttccccagtttttcttttacccctttcatgcttctctcttcactgaaaccaatgtgatattttgaagattcagatcagatcagagtaattccccttcagtggcttctcactgctgggagaagaccatgatctttaatgtcacttgtaacgtgatacatgaatctgccctgctagtctccccggttgcaa

SEQ ID NO: 264185 - DNA, 588 bp, Homo sapiens
cctgattggacccagagctatgtccaaccatttagcatgaggaagtgtaatgtacgaatttagtaaaatgggtgaagtagaaagtacatctattctccttccaacctcaaacagaggactaagaattaaaatgctctctgaagctaacatctggtggtcagatactcagtagtccacattgtgtctacttcgttagaagcaatcgaacctgagacatctgctttaactagtactctcagcagcacccatcgtatgacctccttctttcactccttcatacgtaatctattcctgagtacaatttatttcattctaaagctctctccaatattcaatttatcctatcagctgtaccattctagatcaaactattatctgggattgggacaaaagaaatctttccccagtttttcttttacccctttcatgcttctctcttcactgaaaccaatgtgatattttgaagattcagatcagatcagagtaattccccttcagtggcttctcactgctgggagaagaccatgatctttaatgkcacttgtaacgtgatacatgaatctgccctgctagtctccccggttgcaa

SEQ ID NO: 264186 - DNA, 536 bp, Homo sapiens
agattcattaagaattccccatgtgatttcctttcccccaagcatccttgatttatgaaagataaacaaaactgacaaattttagctgcactatttaagaaaaaaagacataagattcagataaataaaatgaaactcacgcctgtaatcttaacactttgagaggctgaggcaggaggattkcttgaagccagaagttcaagaccagtctggtcaacatggcaaagatccatttctcaaataaataaaattgtaaatgaaagagaagacattacagctgatgccacaggaataagaaaaatcataataaactactatgaacaattatacacaaacaaattgaataacctggaagaaactgataaattcctagaaacataaaacataccaagactttattacgaagtactacaaaggctgaacagacctgggtagagatcatatcagtaagcaaaatctcccaaaaaaaaaaaaaaaaaaagcccaggctttgatggcttcttgggtgacttctgtccaacatgtgaagaagaatg

SEQ ID NO: 264187 - DNA, 532 bp, Homo sapiens
acaagccagatgattgttgtaggaatcatacaatccagctctactctgccccgttgagattatccctaccatctggggattgtcacaatacatgacaatcatggagaaatgttcatggagaaatgtttttgtttgaatttttaattccaaatacaaccagtgctggatgcgactgtgagttacacttgcgtgcatacagtcaggctgacatgttacctagttccattactaggactaatccagtggttgtttctttctttttctttttttttatgcttcaagttcagtggttgtttctttgtcctaccactcttactgagcagttggaagacaactaactcacagaaaatgaacaaaaggttcacaaggattgctccaaagaataaacagattaaagataatgctaatcttttaaaagcaagcaaaggatcaaatagtggagttctcatttcacctccatggagtatgagctctcartcaaactgagacgtaaaaaaaacaatgacccattaagtactcaaaaaaaaaaaaa

SEQ ID NO: 264188 - DNA, 652 bp, Homo sapiens
gtgactgacctgacgttttccatgttttgtacagtctttgttaagtacggatatcaaactaaatttactagtcttgtaaaatgactcgggagaatgttgtttccttatatacccaggactgtttgtttaaaattaaaattatttgttcctttaatgtttgataaagctcacctgtaaaattgtgttggttttcttccacattcagaatgacattttaaatgactgctgattttatcgagttaccaccttctagagttttattttaaattactctttttctattttttgtctggcatttttagatttttttttctatggaagagtctgtcagagtatatagtctgccctacttctaggaatagaagttctctctcatccattgtgatatctattcttattcatattttatatggagaactctgctgtgaggggagggtaaggaaagtttcctatatggaaaaattttttcttctttcttgtcttcctcttgcatgaagacagaaaaataatatattcaaagtaaaaccacaacacattcaagggcccagaagtgagagacacatagcttacatagaaaagggaratcaagtcactgtgaatgggcctggcagaggatattatcagattcattcctgagatttaggaatgtaca

SEQ ID NO: 264189 - DNA, 589 bp, Homo sapiens
tctgctcagcttctagtgaggcctcaggtagcttttactcatggcagaaggtgaaggaggagcaggtgtctcatccggtgagaggaggagcaataccagggaggtgccacatacttttaaactctcatattttacaagaactcactcactgtcacaagggcagcaccaagtcatgagagatctgtgcccaggtcatgagagatctgcgcccaaacacttgccaccagatcctacctccaacagtgtgggttacctttcaacatgagatttgttgaggacaaatacccaaactattggaccaagtatttcatggacagagcaatagtcaggccatctcaaatatgaaagaacctatatgtcacctgttaaccactggtaagaaaaackgaaacaaactgcatattaaaatttaactgataacaatcctcatcgtgacaattcaacatataatgcaatgcagccttataaagaactcacaaatggtgccttggtattggagtagtgattatctgtgactccagttaaatgtagaattgctataagaaaccctgttaaactggtgacaattatcactgactccacttaaatc

SEQ ID NO: 264190 - DNA, 566 bp, Homo sapiens
ctggcttgctggagactgttgttattatcttcttgtttatcaggttgcttatttgtttgaaatttcaataggttttgggggaacaggtggtgtctggttacatgaataagttcttcagtgatgaaatctgagattctgtttcacccatcacctgagcagtgtacacattacccattgtgtactcttttaccctctcctccctcccaccctttgagtccccaaagttcattgtatcattttatccctttgcgtcctcatagcttagcttccatttatgagtgagaacatacgacgtttggttttccattcttgagttacttcacttcgaataatggtctccacctccatccaggttgctgtgaatgtcattaattcattcctttttatggctgagtagtattctgtggtacatatataccacattttctttatctgcttgttgattaatgggcatttacttttcaaggccagctaggtgcctggaacttcccttgaaggkactcaagattttttaaaaattgccatgtttcagcggcccagaagtagctaagaggggtccctactcc

SEQ ID NO: 264191 - DNA, 572 bp, Homo sapiens
tttgaattcttgccttggcaccttaaacatttattttggcattcagataaagagggccagagtacaattgcaaataatgacctaaaaaacatggctatcaggaggggaaaaatagtgagcagagcagaaggtgctgccaaagaagagggctttttgtgttttttgtttatttttgtgataggagagaagtgaacacgcttasatttcataaaaggttgtgatatataaaaagaaattacaaacaaagaggagagagaaaaaaatgataaacccagcaagtatctaaacatggaagaaggaattggacacagaacacaactggttggattactcttgggcaagagacaagttattttctgtatttgaacagaaagaaatgaggaaatcatagaggagagtggaggtttggggattttaaagtttagtgatttcttatcatatggcatttattttacctacatgataggaggctgctgaaagtaagaagagatggagtagaatgcttaagaattgttcaggaaaaactacaatagttgtgaagaatggctgaagttactgactaggagaacaca

SEQ ID NO: 264192 - DNA, 561 bp, Homo sapiens
ttgttttaatttcttttttcatttagttctatatattaagaataaatagataaagcaattaagaattcagaaagtcaactaaacgaagacatgagccaaagggaaacttccaagaaccatgtaaagtaacttttatgaaaggcaatacatagacatgaacacctctcttactttttatccaactacaatgcatccacagtccgtttttcaaattctattgtggtctagcagcaggcaggaaggrgaagactaccacattccacaaagaaggtaatttagccagaggaatgtggaatcatggcagaattatgttgatgagaaggaaacacaaaatttcaactttcttctatgcatttgcacagagggccagacggcgcacttcgttatgtcttggacctgccctagttatttccaagtcttccctcaattgtcattgaccttcattcacacatggtttgttggccacattagcaagaactctgtgaacagcagtgatggatgtttctttactgatccccttcctctcctccaattctcaaggatgagtctcaatggcttatt

SEQ ID NO: 264193 - DNA, 402 bp, Homo sapiens
ttatgtagacaaggaatcacatttaataaattttggtaacaataaactaaggtcatcaaaggaacatgtacacctgcagaaaatagcctttgtgatagatgatatcaatacctaaacagggacacatatgtagattacaatattaaagaaaaggaaaagaggaagatagctttgggtcattgaattatgtgttgttatggtagtagcaaaaataagaaaaaccaaataaatagagattttgtcctggaattaaatatacaggataataaaatttaatagtaagaaaaagaaatttccacagagcattaaccatatggtatgtgttagttttaaayggtgttttttagcatgcacattacattactcatgatattatggagaaaagagtttttaatttattta

SEQ ID NO: 264194 - DNA, 583 bp, Homo sapiens
ctatctggggactatactgtctttgcaggacaaataaattagctacaaaattagaatttatggtttaagagtcatacagctagaggctttaagattctgaacctcctcaaattgctcctgggaataacttctctattataaaactgactacgagtgcttgaggtattttgcagaacctgtacttgatgcatcagcttgcaccacccagatagataactggctcatctggttttgtggccccraccaaggaaacaactcagtgcaaaaggacagcttcaactttctatgatttcatctctgacccaaccaatcaacactcctgactcactggcccctatccaccaaattatcttaagaaaaaaaaatccctgaattctcggggagactgattggggtaataataaaactctatctcccatacagttgactctgcatgaattactctttctctattgcaatttccctgtcttgataaattggctctgtctaggcagtggacaaagagaacccactggttacattttgaataggtttcttcctcagcctcaaattccttcctcaaatgcatcttttgatacaacac

SEQ ID NO: 264195 - DNA, 484 bp, Homo sapiens
ctaacccttacatgatgttgtatatgtcaggccctaaggccagtgcttaacattatcattgcctttaatgctgacaacaatgttagatgataaattcttccatcaccccattttaaagatgaagctaagaaaattttaagtaaatcaaaggtcatataagtagtacttgtggagttgggttttgaatttatgtagtttggctccagagttcattctcttaactgttagactatattcattctcagagtggtttgttcctattgctgatattaatgtcgtakaaatatttatatagtaggatagaaatgggggtcaaattagtatagaaaggaaaaggaagtcagaaaaagtggaatgttgctgcgaataccactcaaaataacacctcaagtcagatttggaagacccccccaaacaaacttccatatattttaggctaatcactgtttatagattgtaatcaagaatggaatatcagccttcc

SEQ ID NO: 264196 - DNA, 484 bp, Homo sapiens
ctaacccttacatgatgttgtatatgtcaggccctaaggccagtgcttaacattatcattgcctttaatgctgacaacaatgttagatgataaattcttccatcaccccattttaaagatgaagctaagaaaattttaagtaaatcaaaggtcatataagtagtacttgtggagttgggttttgaatttatgtagtttggctccagagttcattctcttaactgttagactatattcattctcagagtggtttgttcctattgctgatattaatgtcgtataaatatttatatagtaggatagaaatgggggtcaaattagtatagaaaggaaaaggaagtcagaaaaagtggaatgttgctgcgaataccactcaaaataacacctcaagtcagatttrgaagacccccccaaacaaacttccatatattttaggctaatcactgtttatagattgtaatcaagaatggaatatcagccttcc

SEQ ID NO: 264197 - DNA, 565 bp, Homo sapiens
tgattccaagtatggcctgggtgtgatggctagctgattgggggtgggatgggatgggatggccgggtttaaaggccagcatcttcctgcctgcaaacccccatccagccttgattccaggtcagcaggctggggaggatagccctatactggactacttggagctcccaggcactgcttgtggccagccctgccaaagcgaatcacttaatctcctggagctggaaacccggttagrcccaagtctggtctggaatggaacaggcacccagtctgggcctcttactcctccatcaggtagaaataattcagtggctaacagaggaactctgtgtctcatgctcagcactgcacttggaacagaagacccccaagacccatgcctgaatcatctgtgttctccatagcctctgccaagccaggtctgaactaggacaagggctcaggtaaatttgtggcagtgagctctggaaggccagaggaccaaggaaggaatgtacccaatgaatctgccctctgctacagtctcctaaatggagttaggttattgctttcaccaggtgac

SEQ ID NO: 264198 - DNA, 473 bp, Homo sapiens
ctcaaggctccaaaacccaccttattcctcctgaggttccttggagtgcagcttgtggggatrttgtcatgcaagctgctctgctggacctcagtagcccttcttcaggagccaggctttgcgctgctggtcaaagtagcccttgacctgcagggtacctgtcaactctttggcctgggtaatgcatgtctttgccagcagtggactcagaaaatcttccacattcttctgcggggcccaaatatggtcctccgcgctcccgaccggttgtagacagggatgttgtatatctgagagtgctgcactaagtagggcaggttggatgggggtctttgagaggctgccagttactaagactgagataatgttcatgctttgggggcattaagacgctggtagggaataatagacactccacaaattggtattcatacatatactctacaaacctggggtaatctggagacccctga

SEQ ID NO: 264199 - DNA, 473 bp, Homo sapiens
ctcaaggctccaaaacccaccttattcctcctgaggttccttggagtgcagcttgtggggatattgtcatgcaagctgctctgctggacctcagtagcccttcttcaggagccaggctttgcgctgctggtcaaagtagcccttgacctgcagggtacctgtcaactctttggcctgggtaatgcatgtctttgccagcagtggactcagaaaatcttccacattcttctgcggggcccaaatatggtcctccgcgytcccgaccggttgtagacagggatgttgtatatctgagagtgctgcactaagtagggcaggttggatgggggtctttgagaggctgccagttactaagactgagataatgttcatgctttgggggcattaagacgctggtagggaataatagacactccacaaattggtattcatacatatactctacaaacctggggtaatctggagacccctga

SEQ ID NO: 264200 - DNA, 510 bp, Homo sapiens
aatatatttcttttacctactttgaaatggtcctgctaagctgtcttttctgggaaaaatctacattcagtagagaacgtagattctctacatgtagaccctttacaggatgtttcttgatccaggagagattaagtgtttggtacctttttagatctgattggaaacatttcccacgtattctctctgaagcctaatacttggagatttcatttgcgtaataagcaccttggtctccacagctcctcatctcaacccggacactcctttctattgattccaagtctttagataataacttaactctctcaactaattgccagtcagaaaatctttgaatccacctctgactggaacccaccctcccccacgacccccgcccccccaaccttcgagttgtcccacctttctagaacaaaccartgtataccttacatgtatcgatggctatgttatgtctccctaaaatgtataaaaccaaactatagtgcaatcatgttggacacatgt

SEQ ID NO: 264201 - DNA, 593 bp, Homo sapiens
tgatacctccagattttttctgtttgcttaggattattttggctattgaggctctttatttggttctatatgaaatttargattgttttttctaattctttcaaaaatgttgttggtattttgataggaattgtgttgaatctgtagattgctttgaggcagtatggtcattttcataatactgattcttcaacccataagcttgggatatatttccatttgattgtgtcatcggtgatttctttcagcagtgctttgtagttcttcttgtagagattgttcatctgttggttaagtatattcctaggtattttattttatgttttgcagctatcataaaagggattgagttcttaatttgattctcagcttggtcattgttgctgtatagcagtgctactgatttgtgtacattgattttgtaacctgagacttcattgaattaatgtattaaatctagaagtcttttggagaagtcttgaggagtttctagttatataattatataatcaaagagagatagttttatttcttcatttctaatttggatgctttttatttattttctctagtttcattgctttggctaggaa

SEQ ID NO: 264202 - DNA, 593 bp, Homo sapiens
tgatacctccagattttttctgtttgcttaggattattttggctattgaggctctttatttggttctatatgaaatttaggattgttttttctaattctttcaaaaatgttgttggtattttgataggaattgtgttgaatctgtagattgctttgaggcagtatggtcattttcataatactgattcttcaacccataagcttgggatatatttccatttgattgtgtcatcggtgatttctttcagcagtgctttgtagttcttcttgtagagattgttcatctgttgrttaagtatattcctaggtattttattttatgttttgcagctatcataaaagggattgagttcttaatttgattctcagcttggtcattgttgctgtatagcagtgctactgatttgtgtacattgattttgtaacctgagacttcattgaattaatgtattaaatctagaagtcttttggagaagtcttgaggagtttctagttatataattatataatcaaagagagatagttttatttcttcatttctaatttggatgctttttatttattttctctagtttcattgctttggctaggaa

SEQ ID NO: 264203 - DNA, 544 bp, Homo sapiens
gggtatccatcccctcaagcatacaccagacttgatgtgggcagatagataaatacacttttgctggtagatgccacagcaatgtaaaaacgttatacctcttgtacctggagagttgtaacatttttcttcttgtctgaaataaacacttttacacagcccagcagagatgtaagcaaaattaaccaaatacttcacaaacactctcctttgaggtacaaacaatccaattacattctgtaagttattaaaaaatatacaattaagttatcactgactatggtcaccctataatgctatcaaatagtagatcttattcattctttttattttgtttgtgytcattaaccatccctaccgccattctagctcccaactacacttcccagcctctggtaaccatccttccagtctctatctccattagttcaattgttttgatttttagatcccacacataaatgagaacatgtgatgtttgtctttctgggcctggcttatttcacttaacataatgatttccagttccatccatgtttgttgc

SEQ ID NO: 264204 - DNA, 596 bp, Homo sapiens
taagtgttggctgttagggctattatttcactttcactgcatagaaaaagttcaatgaatattctctccatgtatattttgatttagaataaattattttcttaagaatatattccacatactgcatttgctcagtcaagagaagacaaattttgtaacttttggcctatagccaaattgctttccaaaaagattatgctaatttgtaatatatattaaaacactagttttgaagtttgacaaaattgttaaccatttttattttgttgttgattaatattaaataaaatattttatttttatttctctgattattcacaagtataagggttttttacagtatgtttgctaaataattcattatgtttttttctaagtaaaatgtgctgtttatttaatattgtgtgaagtctttcataatattctgagcaattgtaaaatcaatgcatcccacttttgataatacagaagtaaatctacaattcaagaaatgtaagattggcagactcattcaaaacggtatttttcttggtatytaaaatagaattacatgatatacaatcttccaaggtgcccagtgaaagtaagcacttgta

SEQ ID NO: 264205 - DNA, 574 bp, Homo sapiens
tttctttgagctgtctttgggtggttctggatcttgtgaggactactttgtatttctttgtggataccacatgcatccttgcagaaatcataaccttggttaagtctggttggttttggtgagtcatttgggatgctaagttcgaaagccagaaatatcaactgtttgtcctgactaaaataaaatataaagagatttgaaaaaaaaaatttaaatatctctatgctcagaaagcttaattttgatctttttgtttgcctcctttcttgttggtataattttgcwgagagaaatgtaaaattggctgggcacggtggctcacgcctgtaatcccagcactttgggaggctgaggcgggcggatcgcctgaggtcgggagttcaagaccaacctggtcaacatggtgaaactctgtctctactaaaaatacaaaaattagctgggcatggtggcaggtgcctgtaatcccagctacttgggaagctgaggcaagagaattgcttgaacccgggaggcggaggttgcagtgagcccaaatcatgcccttgcactccagcctgggcaacaaaaccag

SEQ ID NO: 264206 - DNA, 607 bp, Homo sapiens
aagaattagttgaggttgtgtaccttaaaataattactaaytgataaaatcttgttcaaatactaatagtaataagtgaattagcgctgacgtttccatatctcttctgcatattcttcactgtacaaattttataattacctataataaaacctgataaaagtagccagaaagtgcactatctaggttgaaggctcttccaccattttcttttgtagggacaaagggaaagcttcccctttcccctcggaagttctgttgaaaaatcaactcacaaagaggcagattgataaaagctttaaaattttattaatactgtgcacatggggagaatcagagtgattgttcaatatcctaatgtgatacagaagcttatgtaccttaattcttagggataaaggggatggggaaatgtagataattttagggggataggaaatgatttttaagggaattaaaggaacttgaagaacacacaatggtctggggcaaagacagttgggcccacagagtggatgatgatttgtgacaaaagtctgtccaggtttgttaacagacttcagtcttctttcctgcgatatgatttcaattaatctcaggaaaggga

SEQ ID NO: 264207 - DNA, 538 bp, Homo sapiens
atttttttaaaaccataggtttgtaagaatgcaatatgattactacatatcagcataagaatgtattctgcaatcaaaaagaggagtgttcctgattagcagaaaactttactgatatacccaaccttctgctcattatccccagaacttgaaaccggaatgccacyggatccatttgggaaagtattttactgaggaaagggaaacaggatgctaccaaactgctagagagaacaattgttaggataataataataataatacttctcagtgcatgcagtgtgctaactaatttacatgctttgtttaacttaatcctcaccacagtaggaacaattattatgccaatctatgaccaagacaacgaaggccatgtgtggccaatatgtgcctctcaatatttgccagtcaagtcagtagtttactgtatccacctgtagccttgcctggcagatattgagaggcaagcattggccacgcatggaagtggggtgagggaagtgtctgggagaaaaagaagctgtctcaaatctccctt

SEQ ID NO: 264208 - DNA, 596 bp, Homo sapiens
ggactcatgaggccatgccacaggaaggagggagcagttccaaagacatgtggtcttttagatgagaagacaaaygaaagtacttgaggaattgtagcaggaggagccacagacaaaacctcccagacaccgagttgtagaaggagggctttattcagctgggagcatcggcaagctactgccttaaaatccgagctccctgagtgcacaatctctgtcccttttaagggctcacaacactaaagatttcacatgaaagggtcgtgattgatttgagcaagcaggggggacgtgacaggggctgcatgcaccggtggtcagagagagacagaacagagcagggagtttcacaatgttcttctatacaatgtctggaatctatgaataacattggtttctaagtcatgagttgatttttaactactgggtttaggccaggcaggcccaggcctgctttcgggcctggcgccgggctgcctgtctttggttttacttccttgttgttttttcttgaaacaggtactgagtataaaacaatataaaataatatgagagggtctttctcttccttcagaataggagaaagatggtggacc

SEQ ID NO: 264209 - DNA, 596 bp, Homo sapiens
ggactcatgaggccatgccacaggaaggagggagcagttccaaagacatgtggtcttttagatgagaagacaaacgaaagtacttgaggaattgtagcaggaggagccacagacaaaacctcccagacaccragttgtagaaggagggctttattcagctgggagcatcggcaagctactgccttaaaatccgagctccctgagtgcacaatctctgtcccttttaagggctcacaacactaaagatttcacatgaaagggtcgtgattgatttgagcaagcaggggggacgtgacaggggctgcatgcaccggtggtcagagagagacagaacagagcagggagtttcacaatgttcttctatacaatgtctggaatctatgaataacattggtttctaagtcatgagttgatttttaactactgggtttaggccaggcaggcccaggcctgctttcgggcctggcgccgggctgcctgtctttggttttacttccttgttgttttttcttgaaacaggtactgagtataaaacaatataaaataatatgagagggtctttctcttccttcagaataggagaaagatggtggacc

SEQ ID NO: 264210 - DNA, 597 bp, Homo sapiens
gagctcagtcaagcctttccagattattcagatgattagggttccttgggtctgacaaaggtcattttttatttgtgtctttacttacagagtagagagatcttgagaacggccagcagcctcttgcaggtctttgcaaccttttcacttygaagtatatttgtaaaagcctgattttgctactacaaatctgggagacttggagaaagggagaggtaaagccctccctttcctgctgagaatgattctataggaaagcgactggggacagactatactggcatgtccatgcctctgcccaacctctttccttgtcttggatgctctttgattgctggaggaacctcctttagactgagctcactgccatggagctttccccagaccccagccgagctaagggctgtggtccttttgcccactgtgcacacatgcatcctaaccctttttattttgtattcttactctcatcctcaccatcaacaaccaccatgagattttgagttgcttgaatagcattcaggaaaagtttgttgaatggaagtttagcagtagtaggtctttgaaaataaaaacttgactagaatgacaaaagga

SEQ ID NO: 264211 - DNA, 577 bp, Homo sapiens
aatggaaaatatacaaaaaagtctaatggagattctggaaatgaaaatcataaaaatagaggaagaatgtatttgacagagccaaaaggtgaaaaagtaaaaagcagaaaagaaaaaaggggcgtccaagaactatgagaaaatatcaaagtctaatatataggtaatggaattctacagtagaagagagagagatttgggtagaagaaatacccrcagagaaaggtcagagaattttccagaacttcaaatcacaaatccaagaagctcatagaaccccagatatgataaagacaacacacagaacacctatacatatcaactttaaactgatggaaacggaagatagaataaatctttaagtcagccagagaggaaataaaagacatattacataaagaaggataaaggtgataaatacggtacacatcttgtcatgaattatgcgacccagaagataacatcttcaaagtgcctaaaacaaaaacagaaacaaaagcctataaatccagaattcaataacagtgaaaagaaatatttctcagacaaacaaaactaagaaaatttattaccagca

SEQ ID NO: 264212 - DNA, 581 bp, Homo sapiens
attttatttcttatcctgaataaaaaaaaatattactgtaatagaccccatggctttctcctagacatataaaaaagtttgaatttaagacataaagtggttcaagtggttttctagggctgccataacaaattactacaaatttggtttaaaacaacagaaatgtattgtcctacagttacggagaccagaatctaacatgaaggtgtctatactctaaagaagaatctgtaccttgacttttacagctctggtcactgcaggtatttcttggtgttccttggcttgtgaccacattacttcagtctctacctctgtcttcacttcacttgtatgtgtgtgtcttgtttgtgtgtgtgtcaccctttgcctctctctcctaaggacactactatggcatttagggtccagaatgatccaaaatattatcttcatctcaagattcttaacttaatcatatttgtaaygagcctttttccaaataagataacattactattttgacacataagattatattcaggggtttcagggattagaaggtgactatatatttgggaggccatttttttcagactacc

SEQ ID NO: 264213 - DNA, 629 bp, Homo sapiens
aatcctgtgaggcaggtgtctattttactaatgggaaaactgggacatagttccttgcccaaggtaacaaagctaatggtgaagtttttactstaactatgatatcagaaggacttaatgagcttctaagtatgacatgaaacttagtatggccaacaacaaaagaaacacaattttaaaagctttaaagcagtttctaagaagacaatgttagcatagaattgtagactataggggcttgaagggactttaaaaagatgtaatccaactcctacatcttgtagattcaaaaaacacttcagattctgataggtcctttgacttgcctacatattataactaatatgtataaaacttgagctccctcccaccaatagctaatgcttacactgtgttctgaatttcatttcttcttgacttcctcaaaaactttgtttcatttctctttgcatcatccatctatccttctgttttggttacttttcaacagcagaaatatactcaaatagttctcatccttaaaagtccctctagctatggcttcacatatatatgaagtatatatatttgcaacacactacaccaagaattgcaagcccagtgccttagtatctatggttaaactgaaa

SEQ ID NO: 264214 - DNA, 612 bp, Homo sapiens
tatatatataatctttctctttgttgttccattttgatggtcttttatttttatttatttatttttttgagacggagtctcactctgtcacccaggctggagtacagtggtgtgatctcggctcactgcaagctccacctcccgggttcacaccattctcctgcctcagcctcccaagaagctgggaccgccaccacgtaggtggtgtccgccacyatgccccgctaatatttttttttgtatttttagtagagacggggtttcaccgtgttagccaggatggtcttgatctcctgacctcgggatccacccgccttggcctcccaaagtgttgggattacaggcgtgagccaccgcacccagccttgatggtctttgtttcaagaccctacacctccacagtcatacttcttgaaatgcatatgcactagagattgctgccttctcaaccctccgttcttccacaactcattccatccagtttccaaccccatcaatcctccaaaattgttctcatcattttaaatccttccatgttatcaattccaataggcccttcttgtccttaccttatccaacatctaaacggcttttagtactatagatcacact

SEQ ID NO: 264215 - DNA, 612 bp, Homo sapiens
tatatatataatctttctctttgttgttccattttgatggtcttttatttttatttatttatttttttgagacggagtctcactctgtcacccaggctggagtacagtggtgtgatctcggctcactgcaagctccacctcccgggttcacaccattctcctgcctcagcctcccaagaagctgggaccgccaccacgtaggtggtgtccgccactatgccccgctaatatttttttttgtatttttagtagagacggggtttcaccrtgttagccaggatggtcttgatctcctgacctcgggatccacccgccttggcctcccaaagtgttgggattacaggcgtgagccaccgcacccagccttgatggtctttgtttcaagaccctacacctccacagtcatacttcttgaaatgcatatgcactagagattgctgccttctcaaccctccgttcttccacaactcattccatccagtttccaaccccatcaatcctccaaaattgttctcatcattttaaatccttccatgttatcaattccaataggcccttcttgtccttaccttatccaacatctaaacggcttttagtactatagatcacact

SEQ ID NO: 264216 - DNA, 561 bp, Homo sapiens
ctatttaatctctctgagacttgatttcctaattcatagaagagatctaaaaatacccctatttcactcaatttctctagaaacatacagtataatttttggaatttttttctccatttatgaattaaattcagcaggcattatagttctgcattaactgtatgcatctgcaagaagatccaaaagctatactataaatgtaagattattgcatttaatatgactattattagtttctttatgttcaacagactcaggttytgattagttcacatttgttcacagtaaacagcagtgtttatatgagaaaggcaggactccccacaaaaaattttgataaaggatatttagcaaataatgaaattgtcataagtgctataaactactaaatacttagtcaaagcttacttagcattatgaccaaactttcaaagccgtggaaagctactataacattaaatactacaaagcttgcttcttccactctcaagagaaaagcaattataatttgtaaatggccaactcagttggttttgaaaagtcactttgtaattacattca

SEQ ID NO: 264217 - DNA, 623 bp, Homo sapiens
aaccatgagagttaccactcagagaccagcataagcagtcagagaatctcatcacattcctatgagtatgtatttggttaagtctctcctgcattgttttgytgcgtttcataatgtttttccaattgaaagtggctataattgtggtactatgaaaataatttaggtttcactatgagcataaaacttcagctaaactgcccactcaataatttgtatgcaaataaaaagattaatcagcaattatttgcaatgcacttaccacctgtaatgtactaggccagttgttctaacaaatagatggatattactgtgaatgaaacatatgtctaatttaactatcatattcatgtgctgcagaatcacttaacctatatattcagaagccattatccttataatttcagggcatcatttacaatccagatggcaagaaaaagtagagatactttattacctttaaaactttgctggattttaaaaatggtttcttctatcatagcacagtattagcactgcatttcaaagacttataaatgcaaagaaaatacatttaaaaatgggaaagattcaaaataactgctgcttttaaaatatatcaacacagaaatgagcattacatc

SEQ ID NO: 264218 - DNA, 531 bp, Homo sapiens
ttacctgcatcttcccactgttagaattacttgtaatgaggtagaaatagaaaaaatatcagcaagttttcaggtccatattgtctttgatatatttcacaaagctgaaattgatcaatcaaaatagttcccaaatttgtcaaagcataaatatttgcatgcatatacaaacakgtacacacatacacacaatgtttacttgcttaaagtaggctgcatacagagttattacatatgtattctcttttccaaggacagcacagtaaggcagattttgtgacgtccttattaacaagcctaaactgaaatcctcaccttttttttctttgcatttacaactcattcaaaaatagaaaatgtccacttgagggcaagatatgaatgatggtacttgcagcaatggcagattcttctttccacatcttttaaatgtcttcatccctacatgtacccagcgtattatgtccaccattctcaaacatggcaacacattagagtcatgggcagaggtttttgaaagtagtgatacac

SEQ ID NO: 264219 - DNA, 531 bp, Homo sapiens
ttacctgcatcttcccactgttagaattacttgtaatgaggtagaaatagaaaaaatatcagcaagttttcaggtccatattgtctttgatatatttcacaaagctgaaattgatcaatcaaaatagttcccaaatttgtcaaagcataaatatttgcatgcatatacaaacatgtacacacatacacacaatgtttacttgcttaaagtaggctgcatacagagttattacatatgtattctcttttccaaggacagcacagtaaggcagattttgtgacgtccttattaacaagcctaaactgaaatcctcaccttttttttctttgcatttacaactcattcaaaaatagaaaatgtccacttgagggcaagatatgaatgatggtacttgcagcaatggcagattcttctttccacatcttttaaatgtcttcatmcctacatgtacccagcgtattatgtccaccattctcaaacatggcaacacattagagtcatgggcagaggtttttgaaagtagtgatacac

SEQ ID NO: 264220 - DNA, 581 bp, Homo sapiens
aaggatctgaatatagtagtctcagaatttagtaagagttccttgaggcattggggtattgggagattacatcaatagaaatattaaaggatattaaaagggtaactaccagggttactctcacaaatagatctaaggaaacacttgcaatttcctgaagasataaaaggattgcaaaagggaaggatgttttctggccacttttccagtgaaataaaatgaatgggaatttagtggcagataatacctcagctaaaataatgatagctttcacaaataaatcctaaaacatcaggggttcacataattcaatttttgttcttgttcatgtgatggtccaaggcaggtattcctggtgagcaggtaacttttatccagatagtgattcagggggcaaggcattttccatgttgtaacttgggattctttgcatgtagcccagaaagggaaggcacacctatttaagtgctttggtccagaagcaatccaattttggttgcatgatttcacaagatgcaaggagctggaaaatagagctcctggccaggcagctgcttagagcaaaatctctacactgcaga

SEQ ID NO: 264221 - DNA, 592 bp, Homo sapiens
atttagatgttattttttaatcagttgcatggattctttatcacaaaagcaaacttaagaacaaacccttttctgcagcctccctagtcctgtctgtctctgccttttgtcacaattaccccacaaaaagcccaggaaaaggagctgggaaagaaagaacactacttgagttacaaaaaaaaaaaaaaaaacaaaaaacaaaaaaacactagaaaggcaacttgggaatgctgacatattaaaattatcatgtcctcaaataaaaaattacaaaggaattttttttttgctggagttatcagtgctgaracggggaggaagcggggcacaccaggcagagatggttccccagaggaggagatgcctgagttgaacctgaacaaatgagttaacccatggaaagcaaagtcagaaaagcctcacatttcaggcaggtaacaggataaacccagaagtcaaacaatggcaggacttgagccacaaggctgggaatatggaacatagttgcaggtctggagccacagagcggcttaaaaaagagaaagcagcagaactcctggcctgcacatggattcggtattgaaagaggact

SEQ ID NO: 264222 - DNA, 510 bp, Homo sapiens
attttcaatttcctgttttcctgtgtcttcgcccagttggttctggaccacctaatttcccctctcctttagtcacaacacacattaacgaacacaaatagatgtttaggcagctgctgccagatttacacattcagtatcwgatctgatggagctctgctggaatgctccactacgtttaagtgtgtgtaagttctggacagctgtggagaaaatgaatgatcagagtaagcagggcttccttggtactgttgtctagttcttgcactgcgtaaagatgcctggctgaggaggtgcaagtggactgaagcccagtccctccgtcactcctcatgctgtgtgcaccagcaggagctgcttcagaaggagtgctattttcttctcacaaagatgttgtccgcttgttaggctgtggtccccaggggccgcgtctgctcaaaggagggcacttgtgtctaacttgtccacatagaaggagcattcctcattcattcaaggcacatacacttc

SEQ ID NO: 264223 - DNA, 510 bp, Homo sapiens
attttcaatttcctgttttcctgtgtcttcgcccagttggttctggaccacctaatttcccctctcctttagtcacaacacacattaacgaacacaaatagatgtttaggcagctgctgccagatttacacattcagtatctgatctgatggagctctgctggaatgctccactacgtttaagtgtgtgtaagttctggacagctgtggagaaaatgaatgatcagagtaagyagggcttccttggtactgttgtctagttcttgcactgcgtaaagatgcctggctgaggaggtgcaagtggactgaagcccagtccctccgtcactcctcatgctgtgtgcaccagcaggagctgcttcagaaggagtgctattttcttctcacaaagatgttgtccgcttgttaggctgtggtccccaggggccgcgtctgctcaaaggagggcacttgtgtctaacttgtccacatagaaggagcattcctcattcattcaaggcacatacacttc

SEQ ID NO: 264224 - DNA, 592 bp, Homo sapiens
cacaatggcatatttatccattctcctgttgatgggcatttgcttatttccagggttttgctgctataacattccagtacctgaatcctagaaaatatctrggatcacaattgctttagcagaaggtatgtgaacattaaacttaataagctaatggcagtatttcagcattttctactttgattacttttatattggccatcatttttcttaatatctaagagatcacttgttatttttaaaaaattaattcttatttattatttatttatttattgacagaatcttgctctgttgcccaggctggagtgtagtggctagatctcggctcactgcaacttccgcctcctgggttcaagtgattctcgtgcctcagcctcccaagtagctgggatcacaggcatgccccaccacgcctggctaattttttgtatttttagtagagactgggtttcaccatgttggccgggctggtctcgaactcccaacctcaagtgatttgcctgcctcagcctcccaaagtgctgggattacagatgtgagcccctgtgcccagccaaatactttttttttaaatataacagtttttgat

SEQ ID NO: 264225 - DNA, 592 bp, Homo sapiens
cacaatggcatatttatccattctcctgttgatgggcatttgcttatttccagggttttgctgctataacattccagtacctgaatcctagaaaatatctaggatcacaattgctttagcagaaggtatgtgaacattaaacttaataagctaatggcagtatttcagcattttctactttgattacttttatattggccatcatttttcttaatatctaagagatcacttgttatttttaaaaaattaattcttatttattatttatttatttattgacagaatcttgctctgttgcccaggctggagtgtagtggctagwtctcggctcactgcaacttccgcctcctgggttcaagtgattctcgtgcctcagcctcccaagtagctgggatcacaggcatgccccaccacgcctggctaattttttgtatttttagtagagactgggtttcaccatgttggccgggctggtctcgaactcccaacctcaagtgatttgcctgcctcagcctcccaaagtgctgggattacagatgtgagcccctgtgcccagccaaatactttttttttaaatataacagtttttgat

SEQ ID NO: 264226 - DNA, 501 bp, Homo sapiens
aaactaacccttttataaaaaacccactcccatgataatagcattaatccaatcacgataatggtgccctcataacccaagtaactcccattaggccccacccccaacactactgcattggagattaagtttatcacacatggactttggggaacacattccaatcacagcgcatagtaaatgctttgtgagcatttgaaaagaatgtatattctactgttactgagtgaagtgttctataaactactgagttgttctacatattttctgattttctgtctagatgttctagcagttgatgagagagaggtgttgaagcctccractacaataatagatttacctatttctttttttggttctatcagtttttgcttcacatattgatacagaagggggcagagaagtgctgagaagggaagggcatgctcccaggtgagggctccacccccaagcctgtgcccatggacctaggtgaggacaggcatttccgttttcctg

SEQ ID NO: 264227 - DNA, 543 bp, Homo sapiens
agtagagctgcaggtattgcgatggatcagatgtgcagtgtaagcgtccacgacgatgctgagagttttggcctcaataaccattttttgatcatcttatgatcatcacgcccacatgtcagtagaggcaccattaatcatacatggagaaatacaaacctggagagatggaatcatgtttccgagatcacaaacgtggcaggtccagggatctggacacacccytgtgatccacattcccctgaccccagatctcctgcgtcccatttctccccataactgcatcctcttggaggccatcggaagcagaatgagaagcaagtcattatgaccaagaaaagtccttgccagatgtctgtcttcattctctctgaaagcccacacgccacccaatcggcttctgaattacacgggatctaaaggagtgtttccttttgttatttgcaaaataagaaggggtcacttctaagctttttctatgcacatcctcttaccatgaatcactatttcatgttcagtgtgtgggcgcgaaatattggaagc

SEQ ID NO: 264228 - DNA, 513 bp, Homo sapiens
ggttgtggagcccagagctgctgctcccaccgctacggtatcacagtgtctcttagcactagagatggtctcattcctcttccttattttaaaagcatcttgttcttcgctgaatttctttttgcctcctcttgtccggtgcctcctcaggaagctcttgagaaaacaggtaagtgataaaataagcagctggagaggcggctgccaagtgagctatgtaggaaggaccatcacccctggggtacctcccagaggaaccctactcccagcaacacgctgttgacatctcaggaccctgttggggagcagagccagccagcctgctgctggagaagcctctagaaatgtcctcgcctctagaagtccccttcatttcgtggataattgaactgtggtgtgaggcagtctgggcctgtctggaaaaggttttctttcagccagtatgctggggagcaggcagcttgttcactaacyggagtgaaccctctcccccttcccttgctcaggtgctga

SEQ ID NO: 264229 - DNA, 607 bp, Homo sapiens
aaatgctgttgatgttaagagtggacgaatgggccaggcacggtggctcatgcctgtaatcccagaactttgggaggccggggcaggtggattgtttgaggtcaggagttcaagaccatcctgggcaacatggcgaaaccccatctctactaaaaatacaaaaattagccgggcagtggtggcgcatgcctgtaatcccagctacttggaaggctgaagtgggagaatcgcttgagcctgggaggcagaggttgcagtgagytgagattgcgccactgcattccagggtgggcggcagaggaagaccccgtcacaaaaaaaaaaaaaagtagatgaatgggtgaacctggtaagctttgaagaaataagcacaggatataaaaatgaacattagcactaacacactgctatagactgaatgtctgtgtccatcctgtgccgagaagagggatttaaggtgctgcctggggaggcgggaatggggtggcctggaaggtgacttctgagtgaagactgggggaaaggagactccttgagggactgtccaggtagagaaacagcacacacaaggaccaaggggtggcggaggcgttcctggagctgcaag

SEQ ID NO: 264230 - DNA, 607 bp, Homo sapiens
aaatgctgttgatgttaagagtggacgaatgggccaggcacggtggctcatgcctgtaatcccagaactttgggaggccggggcaggtggattgtttgaggtcaggagttcaagaccatcctgggcaacatggcgaaaccccatctctactaaaaatacaaaaattagccgggcagtggtggcgcatgcctgtaatcccagctacttggaaggctgaagtgggagaatcgcttgagcctgggaggcagaggttgcagtgagttgagattgcgccactgcattccagggtgggcggcagaggaagaccccgtcacaaaaaaaaaaaaaagtagatgaatgggtgaacctggtaagctttgaagaaataagcacaggatataaaaatgaacattagcactaacacactgctatagactgaatgtctgtgtccatcctgtgccgagaagagggatttaaggtgctgcctggggaggcgggaatggggtggcctggaaggtgacttctgagtgaagactgggggaaaggrgactccttgagggactgtccaggtagagaaacagcacacacaaggaccaaggggtggcggaggcgttcctggagctgcaag

SEQ ID NO: 264231 - DNA, 559 bp, Homo sapiens
tgtgtgtgtgtgtgtgtgtgtgtgtgtgtgtgtgttggcctgtttgtgcacatgtagaggatggcagtgatgagaaagaaagtagtcaacatctcttactcaaagtctgacacagtccactaaactgatcattcacctaattttcaatattttccgtgttctaaggacagtggtctaattgattgtctttatagtttttgaagtgtaacattgtatcctttcaggctggacataaaatcatccccatcctaattctctagtctcgattctagggctatggacttgaggaagcctttctaagtacatgtgttgagactgcctgagacctggcaaacttcttaaaggaaatccaatttgcaaggaaaccattgcccaactgaagtgagaccgaacaaacatgatttgatatttccatgaagaaattcattaacgyggcttttcatgatatgaccttgctgtgaacaccaaaatgaagtttggtgaaaaggtctctggcagggagcgtgaggcttctccttagatagcctggaacaggtatcaccctggtgaggcctggtac

SEQ ID NO: 264232 - DNA, 573 bp, Homo sapiens
gaaaccattgcccaactgaagtgagaccgaacaaacatgatttgatatttccatgaagaaattcattaacgtggcttttcatgatatgaccttgctgtgaacaccaaaatgaagtttggtgaaaaggtctctggcagggagcgtgaggcttctccttagatagcctggaacaggtatcaccctggtgaggcctggtacagccgcaagtgtggagctggcccctcatcagtcactcttgagaatcacccagttctgtgrgtagagaagggagctttccctgtccactcatgatgggagaatccacaggcccccaggtcctgaaggaggaaagtccgcaggaacttccctgagtcctcagcccatcttagtcagttcccttttgtctccaacttccaaaatgtacattgcattcatcctcccaactctttatttaaatagttctacgaggttataaattgaagagttctttagaaacacagcagtgcacgcaggcagcattctgttcctaggatttggtgtgggaactgtccattccaacccctgtagcactttcaggcaggaatgagccttggg

SEQ ID NO: 264233 - DNA, 593 bp, Homo sapiens
gccatctatattttccttctaggagtttataattctgtgctttacttttaggcacgtgatccattttgagttaaatggatctgagtttgtgaacagtgtgaggtctgtgtctacattctttttttgcatgcgaatgctgtcccagcaccatttkttgaaaagatggtcttttctccattatattactgttgctcctttgtccaagatcagttaagtatatttacgtgagtcccttcctggactctctattctttccattgatccatttgtctattcttttgccaataccacacgtgtcttaatcactgtagcttcatagtaagccttgaagttgggtagtgtcagtcttccaacattgttcttctccctcaatattgtgttggctgttctgggtctgttgcatctccagatagactttagagtcagtttgccaatatccacagaataacttaatgggattttgattggaattgcactgaatctatggatcaagttgggagatgcccatctcttcatcaattcctactttctgtgtggtgatgatcacatcattaacctctctgagtctctgttttctcatctgtagaatgtag

SEQ ID NO: 264234 - DNA, 557 bp, Homo sapiens
ttgatattaacccagtcttgcgggtgttgttgctgtgttatttcaccccagtcttcacatctgcaagcactcactctcatctgtcaattacgcaactgcaattttgatcaaaatgaaacactccgcactgagataaaaacagggcgtggtattcttttttggactaggagatttgrataaaacgtgataacaccgtggttgaactctgcaaacactcccgatcattcacacaatttcggcttcactctgtggtttggatgcagattgtggaaatcacagcctggacccggagaacttgtcgcagcagcagcagggtttccggacccagcatctcccttccctttgctctcctgacagctgcctgcatctggaaaacattaaataacctcatcctttatgtggattcattatgctcttcaaattcattatcaattatcaactgactgtgaagaatgtttgaaatcaaaatgaagaggaagtaattaatgatgaagagtaggatctagaaggaaaggtgagccctcctggggttaggacacggagctgaatgctgcagc

SEQ ID NO: 264235 - DNA, 515 bp, Homo sapiens
tgcgatgagccccgctacatgaaggttttgcatgcatatgaagacaaactgcgggaaaacatagaaaaataaaaaagaatagtgtatttttttwaaaaaaattgctgtaaacatttttacaatattatttgcccaaaattaagattgacttggttgaatatgcaaaacacagtcttgatattgcaccattatgacatgaaacccattctccttcacccctatgcccattcccacttcattcccacccattcctgcatggtagatgtaatcttccttaaagaccttcttttccgctgtagcatgctccatgatgccaaccacaacgactgattcaccttaaacccacgaaattgaatttaccttgagaactcagttcactttgaaaacccctagaaacataattctatagtttttaaccctgtactcaagtcgctcacagcctcagggcagagttcttataatacaaaaatctgcctttaataacagtctgaactattgagccccaaggaatcaga

SEQ ID NO: 264236 - DNA, 608 bp, Homo sapiens
cgcgtctgcgggtgcaaaacagtggaaatggggtagaaggccagcacagcttggcattcctgaagtgtgatgtggaaggaaaagtgcagaggaagacaaacaaagatgtaagtaggcttgactcagtgcagctaagaacccagatgttatcttgatgttatctatcagctaattttttgtattttagtagagaaggggttttaccacgttggccaggatggtctcgatctcctgacctcatgatccacgcacctcagcctcccaaagtgatgggattagaggcatgagccacaaagtgctcaaaaaatctattaattaaaaaatgtrtatgtagccgtctttaatctaccatgtccattagcagataaatactataagcaaaataacaacaatgaaagaaacatagacttagagtagatactctgatttatttaataaaaatttgaaaatagaccaaattactctgataaaaaaaatctgttgctattgaggatgagggttagtgtttggaaaggggcaggagaagtatcactatttttagtaatattctattttcatacatggttataagcaaatacatgtgtttcattaatgaagctatccatatt

SEQ ID NO: 264237 - DNA, 477 bp, Homo sapiens
cctaacgtatgcaactttcccctaaaaaactggacactttgttgcttactcattgtctttacacattttaaaatgttgctttatgcccccaatccctaactacattttcaatgttttgcaagtggagtccatgtgttcttgatttacatgaagctcaaaataatggttatagtaactagtacttcataattaagcaaaaagctcttattgaaaaatgacagaactatacatagggatgacaacatggagagatatttcgtgagatcacaaatttatggtatggcagaagtagaacgctgagtagagactctgtgttcccaatcattatttctaccaccagctttctatttggaygttaataatgttcttatgtggacaaccctacatatttgccaatgtttagttcattgacaaagaaatataaagagcttcaagaacactctaatctttaaaaaataaaatatctataattggcca

SEQ ID NO: 264238 - DNA, 521 bp, Homo sapiens
tttgcacatccatgtttgcagcagcattattggcaatagctaaaacgtagaagcaattgaactgtccaacaacagatgaatggatgagcaaaacatgatatatacatacaatggaaaattattcagccttaaacgagggaaatattctgacatatgttgcaacttggatgaaacttgaggatattatgccaagtgaaataagttagtcagtgaaggacaaatacagtataattccatatgtataagggacttgaagtggacagaatcatagagatagtacaatgatggttgccagaagctggggggaggaagaaatgggraagtattgtttaatgggtatagtttcagttttacaagatgaaacgaattatggagatggatggtagggatggctgcacaatgttatgactatatttagtaccactgaactgtacacttaaaatgtttaacagagtacattttatgttttatgtatcttaccacaataaaaaaataaaataccttaggaacattttcctgaa

SEQ ID NO: 264239 - DNA, 532 bp, Homo sapiens
cacaatcatggcgcaagctgaaaggcacgtctcacatggcagcagacaagacaagagagcttgtgcagggaaactcctctttataaaaccatcagatcttgtgagacttattcactatcagaagaacagcatgggaaagacctgcccccatgattcaattacctcccacctgytccctcccacaacatgtgggaattcaagatgagatttggctggggacacagctaaaccctcttctcagctaccctcttctctctggatctgtgagtaataaacctacttctgtgatttcccatgtttggttctgtggcctccatgtgtctgagctgacctacactggaacctaactctcctcctggccagggtctctgagagtggctcttgtcagaaatacacaggacacaggtcaggcaacagtcaccaggcatctcctagtctcaacagatgttctgtgagagggaggcctggtcgtgggatgcacacctggccactgctggggtaaggaagtgtcctgtgaaaagcacatgttaag

SEQ ID NO: 264240 - DNA, 532 bp, Homo sapiens
cacaatcatggcgcaagctgaaaggcacgtctcacatggcagcagacaagacaagagagcttgtgcagggaaactcctctttataaaaccatcagatcttgtgagacttattcactatcagaagaacagcatgggaaagacctgcccccatgattcaattacctcccacctgttccctcccacaacatgtgggaattcaagatgagatttggctggggacacagctaaaccctcttctcagctaccctcytctctctggatctgtgagtaataaacctacttctgtgatttcccatgtttggttctgtggcctccatgtgtctgagctgacctacactggaacctaactctcctcctggccagggtctctgagagtggctcttgtcagaaatacacaggacacaggtcaggcaacagtcaccaggcatctcctagtctcaacagatgttctgtgagagggaggcctggtcgtgggatgcacacctggccactgctggggtaaggaagtgtcctgtgaaaagcacatgttaag

SEQ ID NO: 264241 - DNA, 532 bp, Homo sapiens
cacaatcatggcgcaagctgaaaggcacgtctcacatggcagcagacaagacaagagagcttgtgcagggaaactcctctttataaaaccatcagatcttgtgagacttattcactatcagaagaacagcatgggaaagacctgcccccatgattcaattacctcccacctgttccctcccacaacatgtgggaattcaagatgagatttggctggggacacagctaaaccctcttctcagctaccctcttctctctggatctgtgagtaataaacctacttctgtgatttcccatgtttggttctgtggcctccatgtgtctgagctgacctacactggaacmtaactctcctcctggccagggtctctgagagtggctcttgtcagaaatacacaggacacaggtcaggcaacagtcaccaggcatctcctagtctcaacagatgttctgtgagagggaggcctggtcgtgggatgcacacctggccactgctggggtaaggaagtgtcctgtgaaaagcacatgttaag

SEQ ID NO: 264242 - DNA, 532 bp, Homo sapiens
cacaatcatggcgcaagctgaaaggcacgtctcacatggcagcagacaagacaagagagcttgtgcagggaaactcctctttataaaaccatcagatcttgtgagacttattcactatcagaagaacagcatgggaaagacctgcccccatgattcaattacctcccacctgttccctcccacaacatgtgggaattcaagatgagatttggctggggacacagctaaaccctcttctcagctaccctcttctctctggatctgtgagtaataaacctacttctgtgatttcccatgtttggttctgtggcctccatgtgtctgagctgacctacactggaacctaactctcctcctggccagggtctctgagagtggctcttgtcagaaatacacaggacacaggtcaggcaacagtcaccaggcatctcctagtctcaacagatgttctgtgagagggaggcctggtcgtgggatgcacacctggccactgctggrgtaaggaagtgtcctgtgaaaagcacatgttaag

SEQ ID NO: 264243 - DNA, 350 bp, Homo sapiens
ggctcttgtcagaaatacacaggacacaggtcaggcaacagtcaccaggcatctcctagtctcaacagatgttctgtgagagggaggcctggtcgtgggatgcacacctggccactgctggggtaaggaagtgtcctgtgaaargcacatgttaagcatccacaaccccctgatcagaaccccagaaaggcagggctccaattgacggtcactctccagaggcaaacctcaagccctaactggaggaaaagaaaacaatgtaaaagttgaatttatcttactatttcaatgatccagtaaagacattctatgcctgtacaccacatattttcttcgattgtggatttatt

SEQ ID NO: 264244 - DNA, 350 bp, Homo sapiens
ggctcttgtcagaaatacacaggacacaggtcaggcaacagtcaccaggcatctcctagtctcaacagatgttctgtgagagggaggcctggtcgtgggatgcacacctggccactgctggggtaaggaagtgtcctgtgaaaagcacatgttaagcatccacaaccccctgatcagaaccccagaaaggcagggctccaattgacrgtcactctccagaggcaaacctcaagccctaactggaggaaaagaaaacaatgtaaaagttgaatttatcttactatttcaatgatccagtaaagacattctatgcctgtacaccacatattttcttcgattgtggatttatt

SEQ ID NO: 264245 - DNA, 350 bp, Homo sapiens
ggctcttgtcagaaatacacaggacacaggtcaggcaacagtcaccaggcatctcctagtctcaacagatgttctgtgagagggaggcctggtcgtgggatgcacacctggccactgctggggtaaggaagtgtcctgtgaaaagcacatgttaagcatccacaaccccctgatcagaaccccagaaaggcagggctccaattgacgrtcactctccagaggcaaacctcaagccctaactggaggaaaagaaaacaatgtaaaagttgaatttatcttactatttcaatgatccagtaaagacattctatgcctgtacaccacatattttcttcgattgtggatttatt

SEQ ID NO: 264246 - DNA, 350 bp, Homo sapiens
ggctcttgtcagaaatacacaggacacaggtcaggcaacagtcaccaggcatctcctagtctcaacagatgttctgtgagagggaggcctggtcgtgggatgcacacctggccactgctggggtaaggaagtgtcctgtgaaaagcacatgttaagcatccacaaccccctgatcagaaccccagaaaggcagggctccaattgacggtcactctccagagrcaaacctcaagccctaactggaggaaaagaaaacaatgtaaaagttgaatttatcttactatttcaatgatccagtaaagacattctatgcctgtacaccacatattttcttcgattgtggatttatt

SEQ ID NO: 264247 - DNA, 296 bp, Homo sapiens
atgtatataaaagtgttgatatagactaaaamattgaataagcaagaaggtagttagttgtcacagtaggagtgaagtgaaaagcttcgcctttcaccctctgaagattacccgaaatgaactgaccatacacagattaataaaagaaagggtatacaaacttacataacctgcaaaaacatgagagctatacacaaagtataagacttgaagatggctcagatctgaaatgctctcctcataggcaatagatatatagacccaggatgcagacattattttgtaaataatttcct

SEQ ID NO: 264248 - DNA, 296 bp, Homo sapiens
atgtatataaaagtgttgatatagactaaaacattgaataagcaagaaggtagttagttgtcacagtaggagtgaagtgaaaagcttcgcctttcaccctctgaagattacccgaaatgaactgaccatacacagattaataaaagaaagggtatacaaacttacataacctgcaaaaacatgagagctatacacaaagtataagacttgaagatggctcagatctgaaaygctctcctcataggcaatagatatatagacccaggatgcagacattattttgtaaataatttcct

SEQ ID NO: 264249 - DNA, 551 bp, Homo sapiens
atacccagctccattagtagcgtttttaacaattgtgggccactgagtaagaataattttttttaaattaaaggttattttttaaaaagcacatttgtagaaaattactagcataatctgcctaaaataaatatacatattgaaaaaatctttgctctgaacaaaaakaagtatattcaccacacatacatacatacacacacacacacgcacacacgcacacacgcacacacacacacacattatggaagatttcaagaccaggcaataatttccactcaatccaaaaacaatgcaatcccagagctgaatatttaggtgaaaaatatatcaggaatgggaggcattcaggtttaattttcatgttttggtagagttaggatgtgagttttcatttaaaaatattctttattttttttgctactattgtggtttctgtattgttactatacaatctgtaaactaaatagtaaaggagagaaaagtgattttcaaagaagctggcttgggaacaggcactattctgggaagatgaaaggtttcacttaatg

SEQ ID NO: 264250 - DNA, 551 bp, Homo sapiens
atacccagctccattagtagcgtttttaacaattgtgggccactgagtaagaataattttttttaaattaaaggttattttttaaaaagcacatttgtagaaaattactagcataatctgcctaaaataaatatacatattgaaaaaatctttgctctgaacaaaaagaartatattcaccacacatacatacatacacacacacacacgcacacacgcacacacgcacacacacacacacattatggaagatttcaagaccaggcaataatttccactcaatccaaaaacaatgcaatcccagagctgaatatttaggtgaaaaatatatcaggaatgggaggcattcaggtttaattttcatgttttggtagagttaggatgtgagttttcatttaaaaatattctttattttttttgctactattgtggtttctgtattgttactatacaatctgtaaactaaatagtaaaggagagaaaagtgattttcaaagaagctggcttgggaacaggcactattctgggaagatgaaaggtttcacttaatg

SEQ ID NO: 264251 - DNA, 526 bp, Homo sapiens
ataaggtaatcactctagatggtaaagtaataattactaaaatgtattgttggctttgtaactttaatagatgtaatgtgtaaagtgataatactttaaaatggaggaaakaaaagagatttatataagaatgatgtttctatgtattactaaaagtttactagtataaattggaagatgatttgaataattaattttccatatacctatatggtaaacttacaacaacaacaaacattcccaaaaatatataataaaataattcattagtaatctaaagttccctattttagaaaatattctttcattgcaaaataaagcaataaagaaaaatatttgagaaatatataaaacaaacggtaaaatggcagacataaatagaattataccaattataatcttaaatgtgagcagattaaaatccattccagaggcagagattgtcagactggattaaaacaagtgatcccaatatacgctgagatgcaaggatactaatggattgaaagtaaaaagatgacaaaaa

SEQ ID NO: 264252 - DNA, 526 bp, Homo sapiens
ataaggtaatcactctagatggtaaagtaataattactaaaatgtattgttggctttgtaactttaatagatgtaatgtgtaaagtgataatactttaaaatggaggaaataaaagagatttatataagaatgatgtttctatgtattactaaaagtttactagtataaattggaagatgrtttgaataattaattttccatatacctatatggtaaacttacaacaacaacaaacattcccaaaaatatataataaaataattcattagtaatctaaagttccctattttagaaaatattctttcattgcaaaataaagcaataaagaaaaatatttgagaaatatataaaacaaacggtaaaatggcagacataaatagaattataccaattataatcttaaatgtgagcagattaaaatccattccagaggcagagattgtcagactggattaaaacaagtgatcccaatatacgctgagatgcaaggatactaatggattgaaagtaaaaagatgacaaaaa

SEQ ID NO: 264253 - DNA, 526 bp, Homo sapiens
ataaggtaatcactctagatggtaaagtaataattactaaaatgtattgttggctttgtaactttaatagatgtaatgtgtaaagtgataatactttaaaatggaggaaataaaagagatttatataagaatgatgtttctatgtattactaaaagtttactagtataaattggaagatgatttgaataattaattttccatatacctatatggtaaacttacaacaacaacaaacattcccaaaaatatataataaaataattcattagtaatctaaagttccctattttagaaaatattctttcattgcaaaataaagcaataaagaaaawtatttgagaaatatataaaacaaacggtaaaatggcagacataaatagaattataccaattataatcttaaatgtgagcagattaaaatccattccagaggcagagattgtcagactggattaaaacaagtgatcccaatatacgctgagatgcaaggatactaatggattgaaagtaaaaagatgacaaaaa

SEQ ID NO: 264254 - DNA, 563 bp, Homo sapiens
tgctgcaattctaaccactgaatatgacctcattaggaaatargttctttgcagctgatcaagttaagatacaatcagatgagcctgaattcagtatgactgatgtccttattaaaagaagaactttgagtagagggagacatacacacagggagagtaccatgtgattatgagggcagagattagccaaggaatgccaaagactgccactaaaccatcagaagcgagaaacaaggcatagaacaggctttctctcatagccctggaagggaccatccctgctgacacctcaatctcagacttttagcttccaggactataagactataaatgtatgttgttcatggcacccagtttgtgttacttggttatggcagccctagaaaactaatacatgaactaataacaaagcataataacatgaagcaaaaattgacaaaagaggagcatcagcaaaatggcagtggagacagctgcaatctttcatttccccacagaaacatcacacaactaagagaaactgtccgaataaactttgccaaaactctggaaaatagtcaaaa

SEQ ID NO: 264255 - DNA, 524 bp, Homo sapiens
agagtcttccattcttaacgaaacacccaaatatcttaataattgggcaaaatctaaatatcagagagataattttatcttgaagattgttaaattataatggtgattcactaccttgccacgtctctgagtcaaaaattaggtctttgtttaggaatcaatggtactctgcaacttggaaataggaagattttagaagactcaaacactgactttcttgtgcgcaaaaaaaaaagacrtattgagataagacaagtccttccttgcaaggatacctctaatgctcatacaccacctcccctaacgttaatatagccttccaggtcagtaaccagtgtcagagagcagccccatgcaaactacaaattcaatagatgtcgaacacagggtcaagcctagaataagaagtcttagctaattaagtatgcttttttccccaaattcatattaacaaaaacttggatatgtcagagaatgcattctaagttcgctcaacctaggagggagaaacataattttaaatt

SEQ ID NO: 264256 - DNA, 579 bp, Homo sapiens
aggtctttgtttaggaatcaatggtactctgcaacttggaaataggaagattttagaagactcaaacactgactttcttgtgcgcaaaaaaaaaagacgtattgagataagacaagtccttccttgcaaggatacctctaatgctcatacaccacctcccctaacgttaatatagccttccaggtcagtaaccagtgtcagagagcagccccatgcaaactacaaattcaatagatgtcgaacacagggtcaagcctagaataagaagtcttagctaattaagtatgcttttttccccaaattcatattaacraaaacttggatatgtcagagaatgcattctaagttcgctcaacctaggagggagaaacataattttaaattaagagctgaagcattcttgtcctaacaaaaagcaaggaaaacgaaatatcacaccacaggagggatttcacaaattagtgtcaacatcaaaaccttaaaataggcaaggagaatgcagattcacaatgaactcttgtacttgttttgttcagagaagagatggttctgagagaatgacagtgaactaaccccagc

SEQ ID NO: 264257 - DNA, 573 bp, Homo sapiens
caggacttgattagtgattgacttggggaaggaggggaagatagagttcaggatgactccgagactgtctggtgtcggtggctaatgactgaagctattaatagaggtaggwaatgcagaccaaaagcaggcccggggtgagagatgataaatttgaattttaacatgttgagtttggacatccaggatgaaataaccacaaaacatttaaatatacgaatctgaaaaggtaagcatcataagcatatgagctattggtaaaattctgatacttaatgaagtctcgcagggaggcagtacagaggcaagcaatgggctggggataaaacatagggaaatattatttaaataaagatgaaagaaaaggagcccacaaaggaagctgaaaaggcatagtcaaaaaaagaggcttgccaaagtgccacctttgaagctctgctgttacactttataaggaaacttttggttacctgagattgcatgcatttataaaagtttctattattaggaagacaataataatgataaggctctttctcattgttgtcagtgtaatttatctatttaattata

SEQ ID NO: 264258 - DNA, 573 bp, Homo sapiens
caggacttgattagtgattgacttggggaaggaggggaagatagagttcaggatgactccgagactgtctggtgtcggtggctaatgactgaagctattaatagaggtaggaaatgcagaccaaaagcaggcccggggtgagagatgataaatttgaattttaacatgttgagtttggacatccaggatgaaataaccacaaaacatttaaatatacgaatctgaaaaggtaagcatcataagcatatgagctattggtaaaattctgatacttaatgaagtctcgcagggaggcagtacagaggcaagcaatgggctggggataaaacatagggaaatattatttaaataaagatgaaagaaaaggagcccacaaasgaagctgaaaaggcatagtcaaaaaaagaggcttgccaaagtgccacctttgaagctctgctgttacactttataaggaaacttttggttacctgagattgcatgcatttataaaagtttctattattaggaagacaataataatgataaggctctttctcattgttgtcagtgtaatttatctatttaattata

SEQ ID NO: 264259 - DNA, 602 bp, Homo sapiens
aacatctgggaggagacaccagggtgcggagtagtggggaacctgctctgtgctctgagactgaaagcccagccttgcctctcaccgctgccttgactgtgtccccatctgctgtgaagtgaatggtgtcttctaaattcatgctgagccctaattgctgaaaagtgtaagacatgcaatggggggattatgtgcatcttcccgacaccaacatgatgctcaggaaggagacttcttgttttctcttaggattcttttactaaccaagattttgcctctactacatatttccctttgctgattgtccctcccttttgacagaagatggcccagggcattcactactaagtctcaacctcttacccaaagccctcagtctagtgttgctctttccttcatgctatttttgtttgtttcttttcttgtaatcatcttggcaataaaataatcacttttttctttctacctattaaagatgttaccttagttaattacagtggtttccttcagaatgataaatggtctttcaaaatgatgtaaagagatctaaatccgtgtgctccagaagttgaatgaagmtctgtctagcacgggtgccagtg

SEQ ID NO: 264260 - DNA, 341 bp, Homo sapiens
tgacatattcataagtaatgatcatagattccaratattacgacaatgatgtctttagtgggtgtattattcattccacaaacaaccctcgtcatccacacaatggtcttcccctaagatagaataaaaatatcacaaggcagatttacgaggcgatcgacctagaaaaaacctgagactctaggactgtctgatgtgtggatgtcaaatcctgggagattctgagtctctgctctatgtggactctatgttgtgtagccatttgtggaaggcttctgtgattttgtgacctagagaaaatgaatctctgctaaaatcaaatctaagaaagattggcaaag

SEQ ID NO: 264261 - DNA, 341 bp, Homo sapiens
tgacatattcataagtaatgatcatagattccaaatattacgacaatgatgtctttagtgggtgtattattcattccacaaacaaccctcrtcatccacacaatggtcttcccctaagatagaataaaaatatcacaaggcagatttacgaggcgatcgacctagaaaaaacctgagactctaggactgtctgatgtgtggatgtcaaatcctgggagattctgagtctctgctctatgtggactctatgttgtgtagccatttgtggaaggcttctgtgattttgtgacctagagaaaatgaatctctgctaaaatcaaatctaagaaagattggcaaag

SEQ ID NO: 264262 - DNA, 468 bp, Homo sapiens
taacatgattaattgcaagaatatttgtttttatgtttctaacttcaggtgccagatgtgacatccagatgacccagtctccatccyccctgtctgcatctgtaggaggcagagtcaccatcacttgccgggcgagtcagggcattagcaataatttaaattggtatcagcagaaaccagggaaaactcctaagctcctgatctatgctgcatccagtctgcaaagtgggattccctctcggttcagtgacagtggatctgggacagattacactctcaccatcagcagcctgcagcctgaagattttgcagcttattactgtcaacagagtgacagtacccctcccacagtgttacaagtcataacataaaccccaaggaagcagatgtgtgaggctgggctgccccagtgctccttctggtgcctctatctgctgagggaagttctcaaactcagtcaggtttgga

SEQ ID NO: 264263 - DNA, 323 bp, Homo sapiens
attttctgagaaatgaaattattaacacacctgcgaggcggatggaagagaaaaaaaagaataatcagcttgagttcttctccttgataagacaactcactaaaaacataaagagaaaaatacaagtttaaaataattaaccagaagaagacgactctagagtttttaaattgctgataagattttaatttgctccaagttgaaaataattatattgcttgtgttttaagrcacataatgagcaattatatcacacatgatagtttcagcagtaaaatagtatccgttaacagctggaactcataaaagcatagcacaatgtg

SEQ ID NO: 264264 - DNA, 323 bp, Homo sapiens
attttctgagaaatgaaattattaacacacctgcgaggcggatggaagagaaaaaaaagaataatcagcttgagttcttctccttgataagacaactcactaaaaacataaagagaaaaatacaagtttaaaataattaaccagaagaagacgactctagagtttttaaattgctgataagattttaatttgctccaagttgaaaataattatattgcttgtgttttaagacacataatgagcaattatatcacacrtgatagtttcagcagtaaaatagtatccgttaacagctggaactcataaaagcatagcacaatgtg

SEQ ID NO: 264265 - DNA, 323 bp, Homo sapiens
attttctgagaaatgaaattattaacacacctgcgaggcggatggaagagaaaaaaaagaataatcagcttgagttcttctccttgataagacaactcactaaaaacataaagagaaaaatacaagtttaaaataattaaccagaagaagacgactctagagtttttaaattgctgataagattttaatttgctccaagttgaaaataattatattgcttgtgttttaagacacataatgagcaattatatcacacatgatartttcagcagtaaaatagtatccgttaacagctggaactcataaaagcatagcacaatgtg

SEQ ID NO: 264266 - DNA, 323 bp, Homo sapiens
attttctgagaaatgaaattattaacacacctgcgaggcggatggaagagaaaaaaaagaataatcagcttgagttcttctccttgataagacaactcactaaaaacataaagagaaaaatacaagtttaaaataattaaccagaagaagacgactctagagtttttaaattgctgataagattttaatttgctccaagttgaaaataattatattgcttgtgttttaagacacataatgagcaattatatcacacatgatagtttcagcagtaaaatagtatccgttaacagctggmactcataaaagcatagcacaatgtg

SEQ ID NO: 264267 - DNA, 569 bp, Homo sapiens
cccacgtatccttggatatgaactccctttggagctttgcaacaagcagtttcttaaaggcaaaaaagggtccagaagtgggatgatccaaagaggtttgtcacaaattctcattggcttatggaaataacatttattagtgactggctatacactgttacactattattgggtgtgkattatagtgtctggagtggcgttattggttaatttatagctactgtggcaactgcaagcagcctagatgaacacacagctcaaagaggagcaggacagaactgctgtctcatttgaatatctctctgggcctgattatttaaaaggacttgcatttctcacatgaaagttattttcttttctcaatgtccataaacgagaataaatatagatcttttcgaggatgaagtaaatggaatgaaaaacaaaacccaagctgaccagaaatcatagagggaagaaaaggttataaatatatggatttttcaaagtgattttaagctattaggaatcagttaaatgttgggggattttgtctgagaatgggctaaaggagaatgtcccttttgcct

SEQ ID NO: 264268 - DNA, 569 bp, Homo sapiens
cccacgtatccttggatatgaactccctttggagctttgcaacaagcagtttcttaaaggcaaaaaagggtccagaagtgggatgatccaaagaggtttgtcacaaattctcattggcttatggaaataacatttattagtgactggctatacactgttacactattattgggtgtgtattatagtgtctggwgtggcgttattggttaatttatagctactgtggcaactgcaagcagcctagatgaacacacagctcaaagaggagcaggacagaactgctgtctcatttgaatatctctctgggcctgattatttaaaaggacttgcatttctcacatgaaagttattttcttttctcaatgtccataaacgagaataaatatagatcttttcgaggatgaagtaaatggaatgaaaaacaaaacccaagctgaccagaaatcatagagggaagaaaaggttataaatatatggatttttcaaagtgattttaagctattaggaatcagttaaatgttgggggattttgtctgagaatgggctaaaggagaatgtcccttttgcct

SEQ ID NO: 264269 - DNA, 569 bp, Homo sapiens
cccacgtatccttggatatgaactccctttggagctttgcaacaagcagtttcttaaaggcaaaaaagggtccagaagtgggatgatccaaagaggtttgtcacaaattctcattggcttatggaaataacatttattagtgactggctatacactgttacactattattgggtgtgtattatagtgtctggagtggcgttattggttaatttatagctactgtggcaacwgcaagcagcctagatgaacacacagctcaaagaggagcaggacagaactgctgtctcatttgaatatctctctgggcctgattatttaaaaggacttgcatttctcacatgaaagttattttcttttctcaatgtccataaacgagaataaatatagatcttttcgaggatgaagtaaatggaatgaaaaacaaaacccaagctgaccagaaatcatagagggaagaaaaggttataaatatatggatttttcaaagtgattttaagctattaggaatcagttaaatgttgggggattttgtctgagaatgggctaaaggagaatgtcccttttgcct

SEQ ID NO: 264270 - DNA, 408 bp, Homo sapiens
ttaaaaataaataggggattctcagtacatgctaaaatatatttgttaaaaggcaatattcatgtctttaaagattttaaatgctataaagagtctgatattctatacgcaaacatgtgtatgtccattagaagaakagaggcctgattttcatatgttactacatagagatagagaagtggatagattaatttgcatatgcatagagaaagcataaaatagaaatttactatcatattaaaggaattttaattcaacaataaaataattcaaaggtaaaattttaaatatttttaacaggtacattattaatattagataatatttataataattgtgaaaatattcaatgctaaaataagatacaatgtctaaacatcagtattaaaactagtataaatatttgct

SEQ ID NO: 264271 - DNA, 408 bp, Homo sapiens
ttaaaaataaataggggattctcagtacatgctaaaatatatttgttaaaaggcaatattcatgtctttaaagattttaaatgctataaagagtctgatattctatacgcaaacatgtgtatgtccattagaagaatagaggcctgattttcatatgttactacatagagatagagaagtggatagattaatttgcatatgcatagagaaagcataaaatagaaatttactatcatattaaaggaattttaattcaacaataaaataattcaaaggtaaaattttaaatatttttaacaggtacattattartattagataatatttataataattgtgaaaatattcaatgctaaaataagatacaatgtctaaacatcagtattaaaactagtataaatatttgct

SEQ ID NO: 264272 - DNA, 408 bp, Homo sapiens
ttaaaaataaataggggattctcagtacatgctaaaatatatttgttaaaaggcaatattcatgtctttaaagattttaaatgctataaagagtctgatattctatacgcaaacatgtgtatgtccattagaagaatagaggcctgattttcatatgttactacatagagatagagaagtggatagattaatttgcatatgcatagagaaagcataaaatagaaatttactatcatattaaaggaattttaattcaacaataaaataattcaaaggtaaaattttaaatatttttaacaggtacattattaatattagataatatttataataattgtgaaaatattcaaygctaaaataagatacaatgtctaaacatcagtattaaaactagtataaatatttgct

SEQ ID NO: 264273 - DNA, 475 bp, Homo sapiens
gccctactgaccaaagtcatggaggtataatccatgccagcttgagcacctgggaagaggcccactaaacatggtccccactgtgggcccagcagcagttgtaactcagctctgactccacttgactgcaatctcagaagtaatcccattagcctagggacccaacagaaggtcttgaccttctgtctaacagcagtagcatacttactcttctccagaggcacatggaacattctttaagatagatcatatgctgggatataagacaattcttagcaaatttaagagtgttgaaatcatatcaagtatcttttctgaccacagttgtatgaaattagaaatcaataacacaaragattttgggaaattcacaaatatgtacaaattaaacagcatactcctgaaatcaatggctcaaataagaaatcaaaagagaaattttaaagtatcttgagacaagtaaaaatagaaacac

SEQ ID NO: 264274 - DNA, 523 bp, Homo sapiens
tacaagctacttagcccaaaaaaaaccagaaaagcagcacaaactcagtccaaagtcagaaaattaaaaaatatatattagaataaaaagaaataaaatagagactagaaacacaataggaaatatcaacaaaactaaagtcgcrtttttgaaaagataagcaaagttgagaaaactgtagttagagtaaccaagaacaaaaaagatggctcacaataaagaaaacgtaacgaaagaggaggcattaccactgataccacagaaatacaaaggatcataagagaccactatgaacaactatacaccaacaaattgaataacctagaagaaatgaataaattcctagaaatgtacaacctgcaaaaagttaatcatgaagaaagagaaaatatgaacagaacaataatgagaaaggagattaaacctgtaatctaaaacctcaaagaaaagaaaatctcaggactagatggcttcaaggtgaattctatcaaatatttgaagaagaattcatggcaattctcct

SEQ ID NO: 264275 - DNA, 523 bp, Homo sapiens
tacaagctacttagcccaaaaaaaaccagaaaagcagcacaaactcagtccaaagtcagaaaattaaaaaatatatattagaataaaaagaaataaaatagagactagaaacacaataggaaatatcaacaaaactaaagtcgcgtttttgaaaagataagcaaagttgagaaaactgtagttagagtaaccaagaacaaaaaaratggctcacaataaagaaaacgtaacgaaagaggaggcattaccactgataccacagaaatacaaaggatcataagagaccactatgaacaactatacaccaacaaattgaataacctagaagaaatgaataaattcctagaaatgtacaacctgcaaaaagttaatcatgaagaaagagaaaatatgaacagaacaataatgagaaaggagattaaacctgtaatctaaaacctcaaagaaaagaaaatctcaggactagatggcttcaaggtgaattctatcaaatatttgaagaagaattcatggcaattctcct

SEQ ID NO: 264276 - DNA, 523 bp, Homo sapiens
tacaagctacttagcccaaaaaaaaccagaaaagcagcacaaactcagtccaaagtcagaaaattaaaaaatatatattagaataaaaagaaataaaatagagactagaaacacaataggaaatatcaacaaaactaaagtcgcgtttttgaaaagataagcaaagttgagaaaactgtagttagagtaaccaagaacaaaaaagatggctcacaataaagaaaacgtaacgaaagaggaggcattaccactgataccacagaaatacaaaggatcataagagaccactatgaacaactatacaccaacaaattgaataacctagaagaaatgaataaattcctagaaatgtacaacctgcaaaaagttaatcatgaagaaagagaaaayatgaacagaacaataatgagaaaggagattaaacctgtaatctaaaacctcaaagaaaagaaaatctcaggactagatggcttcaaggtgaattctatcaaatatttgaagaagaattcatggcaattctcct

SEQ ID NO: 264277 - DNA, 572 bp, Homo sapiens
cctcaaaatcttccaaaaagttgaagagtgggaaggacttccaaactaattttatcaggccagcattatctttataccaaagctaactaagaacactacaagaaaagaacattacaggacaaaatcactgatgaacatagatgcaaaactcctcaacaaaatgttagcaaaccaaattcaacaacacatttaaaggatcatacactataatcaagtaggatttatcctgggatgcaaggatgtttcataatgtgcaaaacaataattgcgatataccacattaacagaataaaggataacaatcatatgatcacctccatagattcaataaaagcattttacaaaattcaacataaattcatgatacaaacttcacaaatkacatatggaagaactgtgcctcaatacaagaaaggccgtatatgaccatcccacagctaacatcatactcagtgatgatagctgaaagcttttcttttaaactcaggtacaagaaaaagatgcccactcttgccacttctgttcaacatagtactggaagtcttagccacagcaattaagagagaaaagta

SEQ ID NO: 264278 - DNA, 504 bp, Homo sapiens
aatgtataaaacactgatgaaagaaattaaaggagacacacataactggaaagatagctcatgttcactaattgaaagaattaayatcgcaaatagatccatactacccaaagtgatatacagatttgatgtaatccctatcaaaaatccaatgacatttttcacagaaatagaagaaacaatcttaaaatttgtacagaatcacaaaagactctgaataggcaaagcaattttgagaaagagcaacaaagctgttaagaattatacttcctgatttcaaactatattgccaaggtacagtaaataaaaacagtatgatactagcataaaaacaggctcttagaacagaatagagagccccaaattaaatgcctttgagaagagtcctaagaatacacgatgggtaaaggatactctctttaataaatgatgggaaaactccataaccacatgcaaaagaataaaattgaaccattattttataccaaatgcaaaagttaactt

SEQ ID NO: 264279 - DNA, 565 bp, Homo sapiens
taaatgatgggaaaactccataaccacatgcaaaagaataaaattgaaccattattttataccaaatgcaaaagttaacttgaaataggattaacaacttatatgggccaggcgcagtggctcatgcctgtaatcccagcatcttgggaggccgaggcaggtggataacctgaggttgggagttcgagactagcctgaccaacatggtgaaaccccatctctactaaaagaaaaaaaaaaattagccaggcgtggtggtgcatgcctgtaatgcctgtaatcccagctactcaggaggctaaggcaggagaatcacttgaacctaggaggcagaggttgtggtgagctgagatcacaccatggcactccagcctgggcaacaagagggaaacttcatctcaaaaaaaaaaaaaagaaaacttacatgtaagacttgaaaccrtgaaattcctagaagaaaaaagagagaaaaagtttctgtacattggccttggcaatattttttggatataacaccaaaagcacatagcatgaaagcaaaaataaataaatgggaatacatcac

SEQ ID NO: 264280 - DNA, 597 bp, Homo sapiens
atttgtgctcttcctcattcagtataaggcagctttcagtttgcttagaaggcaacattggaatgttagagttcatcagaaacayagaattttaaactgtgagttccactgaatacattttgatttctgtaggaagaatcaaaatacctatttaaagatggcaatgtataataatcattttaaaagtatttgattaaacctgataattttccagaaatgaaaaaaaaaatcagctctaaaaccaaagctgattttagaaaatttgaaaatgtaaatcagccctatccataatatagtttctctaaaactttattttaaagagtcattttaaaataactattaaaaaatgtaactgctatcttaatgttctgaaataatttaaaacattttaaaatatgaatactgtagtataaaagaaagaaatgggtgggaacgaaaagcagagaaagaaatgccaattccagtccaaagttttatttgccaagttttcttacaatgaattttaccagtttatgaattattgtaaagagaatgtgtcgaggaaatactgaaagattttccctacagtggccttatggggggcgggtgtgatgccac

SEQ ID NO: 264281 - DNA, 597 bp, Homo sapiens
atttgtgctcttcctcattcagtataaggcagctttcagtttgcttagaaggcaacattggaatgttagagttcatcagaaacatagaattttaaactgtgagttccactgaatacattttratttctgtaggaagaatcaaaatacctatttaaagatggcaatgtataataatcattttaaaagtatttgattaaacctgataattttccagaaatgaaaaaaaaaatcagctctaaaaccaaagctgattttagaaaatttgaaaatgtaaatcagccctatccataatatagtttctctaaaactttattttaaagagtcattttaaaataactattaaaaaatgtaactgctatcttaatgttctgaaataatttaaaacattttaaaatatgaatactgtagtataaaagaaagaaatgggtgggaacgaaaagcagagaaagaaatgccaattccagtccaaagttttatttgccaagttttcttacaatgaattttaccagtttatgaattattgtaaagagaatgtgtcgaggaaatactgaaagattttccctacagtggccttatggggggcgggtgtgatgccac

SEQ ID NO: 264282 - DNA, 469 bp, Homo sapiens
gaaaaaaaaaatcagctctaaaaccaaagctgattttagaaaatttgaaaatgtaaatcagccctatccataatatagtttctctaaaactttattttaaagagtcattttaaaataactattaaaawatgtaactgctatcttaatgttctgaaataatttaaaacattttaaaatatgaatactgtagtataaaagaaagaaatgggtgggaacgaaaagcagagaaagaaatgccaattccagtccaaagttttatttgccaagttttcttacaatgaattttaccagtttatgaattattgtaaagagaatgtgtcgaggaaatactgaaagattttccctacagtggccttatggggggcgggtgtgatgccactgtaatgtaataaattattaagttgtttcaatggtgttgtttttgtcttaaaattttattttgcgtttcttgaaaactatagtattaaag

SEQ ID NO: 264283 - DNA, 469 bp, Homo sapiens
gaaaaaaaaaatcagctctaaaaccaaagctgattttagaaaatttgaaaatgtaaatcagccctatccataatatagtttctctaaaactttattttaaagagtcattttaaaataactattaaaaaatgtaactgctatcttaatgttctgaaataatttaaaacattttaaaatatgaatactgtagtataaaagaaagaaatgggtgggaacgaaaagcagagaaagaaatgccaattccagtccaaagttttatttgccaagttttcttasaatgaattttaccagtttatgaattattgtaaagagaatgtgtcgaggaaatactgaaagattttccctacagtggccttatggggggcgggtgtgatgccactgtaatgtaataaattattaagttgtttcaatggtgttgtttttgtcttaaaattttattttgcgtttcttgaaaactatagtattaaag

SEQ ID NO: 264284 - DNA, 469 bp, Homo sapiens
gaaaaaaaaaatcagctctaaaaccaaagctgattttagaaaatttgaaaatgtaaatcagccctatccataatatagtttctctaaaactttattttaaagagtcattttaaaataactattaaaaaatgtaactgctatcttaatgttctgaaataatttaaaacattttaaaatatgaatactgtagtataaaagaaagaaatgggtgggaacgaaaagcagagaaagaaatgccaattccagtccaaagttttatttgccaagttttcttacaatgaattttaccagtttatgaattattgtaaasagaatgtgtcgaggaaatactgaaagattttccctacagtggccttatggggggcgggtgtgatgccactgtaatgtaataaattattaagttgtttcaatggtgttgtttttgtcttaaaattttattttgcgtttcttgaaaactatagtattaaag

SEQ ID NO: 264285 - DNA, 592 bp, Homo sapiens
tgtaaataatctgtaattcatttgtgccagctgttgacatttctcagctgagtctgggctgccctgtcctcttgtgagtggggaggttcctgtagatctgggcaagttttcctgtagagtgggtggggggcctcctcccttccgttcatagagctggttgaatttccaccatttatggcaggtgtaggtgcacagggttggggacaasaaggaaggattgggattctattggcgggaccaggacatttgagaacgggactaggtggttcatgactgtggagatggtgtgggagtggagatacttaagggataattattacatttctgttgagctaatgaaaatcttatttacggtgaaagtcagaaatttttacataccttaaactttttttttttaacaaattatattttaagctgttaaactcaatttggggaaaattattcattgtggctagagtagaatctatgatttgaagtaaatttaaaatatatttaggtttaaataaaccagctaagggtttatatcagtcaacttaattagtgataaaaacaaccaaaaaaacctgtgtagaaggacgtttttgaaagacca

SEQ ID NO: 264286 - DNA, 580 bp, Homo sapiens
aaaatcttatttacggtgaaagtcagaaatttttacataccttaaactttttttttttaacaaattatattttaagctgttaaactcaatttggggaaaattattcattgtggctagagtagaatctatgatttgaagtaaatttaaaatatatttaggtttaaataaaccagctaagggtttatatcagtcaacttaattagtgataaaaacaaccaaaaaaacctgtgtagaaggacgtttttgaaagaccaaagtgaagcaaaatattaatagtgctttcagtgccaagtaggtctatttatgcaaacctagagaattattattgggaaatactatttcctttttcttctttgagttacttaggaaattatatttacaatttctttgtctaaagattgagatcagcaaaaacatgttagcaaaaaattttagggagtatcacatttcctagattttgccctttttttatagggattwggaggtaggaatttcaggtgattttagctatcatgttatcctcgttatttttttacagtaatttcattggaactttttaataactgtgtggtttgtgctt

SEQ ID NO: 264287 - DNA, 605 bp, Homo sapiens
attaagacattatacagatacttcatactccctttcctctctcttcccctcctttaactacttagtattgcaagatgcagtattattaaatatatcaatgtaattcctttaggaactttatatcattaatttacatcacagaaaatatagagtgtagtatactcaccccttaaaataactcatctatactttatgttacgtgaagagaaaaaaaataaataatttccttttttttatctatgcattcccagatgaagrcagcctagtaaaatatatatatatgaactgggaaattcattaacctgaccataagtctgcattaaatggtacacgtaactgcaggctgtttttaaacaaaggctctgctttcctaagttctgttctaacagtaatagcaaatgatatcaccactatagttgggtctccatatcttcaattttatgaaatgtctcaatgaggtggtttaattgttaataaatctaaagtattctaccaggatgcttcattaattaagacagggaaatttcattttacaatgtttcttacactgcatctcatgaaacatatgctgtccaaattgttttagaagtgaaccataaataaaa

SEQ ID NO: 264288 - DNA, 618 bp, Homo sapiens
agtacacagcagtatttcctagacctgtgagcagatctaggtatcacttagatagtgatatctaagagattacttcttgggtgtttttaagtttttaaataatgagttatgtggcaagaattacacattcttacatatatttttatacaggtgatcaaacataatcattaggatatagagtttagaagtaacataaaatacaagcagttaaaacagtctaataagttgtttgcacagaggcctacagatacagttgatcactgcttagttttaagtgaataaataggaatgctttattctcttctagtcatttaacaaacatttattgagtatccactgtgaacagaaaatgttttacatactgcagataaagcagtgaaaaagataggcaaggactctgttttagctgagcttatattccaaatgtgtgtgttgaggtagggagaaggttgccaagaactgtgaagagcctgagattttgccatacttgcaagctaacaaattggccagctacagtttcatgacctctggattagmgacaaagtatagtttattattaacagccatgcagtagccaagtagccattattttccttgtgctggttccatgaaccccaa

SEQ ID NO: 264289 - DNA, 615 bp, Homo sapiens
taattgcgtgatttcagtacttttttgtcttcttgtatagagcatatacaccattccataataatatactctaataatggtacagtcacgatttattaacacttacatgttgtacttgctttatctccattttattcttaccacatccctatgggagaatatgttttttcagttgaaaagaagtagaacttatatggaattttaagcagttcacccaggctcagaaacacaattttgtctaataaaaataactaagtttttttttttttaactatgccttaacatacttaaggaaaccctaaaagcttgtgtatttgtgctacacatatttaagaatgccattaattgggaacatytaaatatataagtggatttgaaaatctttattaaaatgtcattctgattttttcattactaaataaaagcgatacactagagttattacctcaaatgtgtatcaaatttataatgatcacaaagtagcagttatcattgaattaaggaaatatctgcttcagatcatttactgagtaatagaattttagagttgtttaaattaactaggataactaacatatgtaaatgtgcaatacaaatatgaaatatgtaagtttg

SEQ ID NO: 264290 - DNA, 590 bp, Homo sapiens
ttgaatacatgcatctaattttatttcttttgaaacctcagtgaaaaatacaataaagagatttgtaaaaaatataaccaacaagatggagggatgagagtaggcagagtctgtgtgaatgttasaaagcaaacagatgagggacaactgacttacaccagaggaagccaaatcttactcaaaatatggaagctcagacccagttacaggtagaattcccaaaaggctcagaaatgctcagtgctgggtataaggtggaaataacagggcgtagagagctaaagtaagaatttactgaacactgtttaagaagtagattcgaagatgcctttttctgccctttgctgctgggtaactgttcattttcaactcccagaattctagtagtccaggtgtcacccctcaggcaggaggttggaagagtctttgctggagaaccagagcagccccagaggaaagaccttaaagatcctacgtaacagggtgtctccaaaatggaccagcaaatcactccagagtaaagctcataaatgacaagtggcacccaccgaacagtgcttattaagtctccacactttttttttaacctt

SEQ ID NO: 264291 - DNA, 590 bp, Homo sapiens
ttgaatacatgcatctaattttatttcttttgaaacctcagtgaaaaatacaataaagagatttgtaaaaaatataaccaacaagatggagggatgagagtaggcagagtctgtgtgaatgttacaaagcaaacagatgagggacaactgacttacaccagaggaagccaaatcttactcaaaatatggaagctcagacccagttacaggtagaattcccaaaaggctcagaaatgctcagtgctgggtataaggtggaaataacagggcgtagagagctaaagtaagaatttactgaacactgtttaagaagtagattcgaagatgcctttttctgccctttgctgctgggtaactgttcattttcarctcccagaattctagtagtccaggtgtcacccctcaggcaggaggttggaagagtctttgctggagaaccagagcagccccagaggaaagaccttaaagatcctacgtaacagggtgtctccaaaatggaccagcaaatcactccagagtaaagctcataaatgacaagtggcacccaccgaacagtgcttattaagtctccacactttttttttaacctt

SEQ ID NO: 264292 - DNA, 590 bp, Homo sapiens
ttgaatacatgcatctaattttatttcttttgaaacctcagtgaaaaatacaataaagagatttgtaaaaaatataaccaacaagatggagggatgagagtaggcagagtctgtgtgaatgttacaaagcaaacagatgagggacaactgacttacaccagaggaagccaaatcttactcaaaatatggaagctcagacccagttacaggtagaattcccaaaaggctcagaaatgctcagtgctgggtataaggtggaaataacagggcgtagagagctaaagtaagaatttactgaacactgtttaagaagtagattcgaagatgcctttttctgccctttgctgctgggtaactgttcattttcaactcccagaattctagtagtccaggtgtcacccctcaggcaggaggttggaagagtctttgctggagaaccagagcagcccsagaggaaagaccttaaagatcctacgtaacagggtgtctccaaaatggaccagcaaatcactccagagtaaagctcataaatgacaagtggcacccaccgaacagtgcttattaagtctccacactttttttttaacctt

SEQ ID NO: 264293 - DNA, 608 bp, Homo sapiens
tgggctgcttcagctctttttggaagaaagggaataaagtgaagaatgttcaattgtcagttatttacactcaaaagaccggaggaagaactgtgtgtggtcagaaaattaatccttagcccttstcagaggaaattcatttcaaatcttgatctccttaattctaatttagttgtacccactaactattagatggttcaatgcagaagttccgtagttacttcaaatacaacagtagcaaatctgaatccatcattatctcacttaataatctcttcctgtcaataacccctcactccctgggctgcatggctcaactattgggatactgttaattctctcctctttttcacatctcacacattatgattatcttacatatgcatcaggctttagagttttaaaaacaccatcatatataaattgtctcatttaatctttgcagtaaacctgctcaagattttttttttaaatgaacattggaaaaattggccaggtcagtaagttaataataatgatacatccaagactcagatctcagtcttctgactccaaatttaggtctcaccttcaagcacttataaagcctatttcattttatttgaaac

SEQ ID NO: 264294 - DNA, 558 bp, Homo sapiens
catgggcatatcacagcgtatgagcttttctaatgacatccatttatagagatttttctagacataaaactaaaatgcaagtacattttaaggattatatacatattacaatgaaaggaaaaagttttgattatttgacagaattgaaattcaaatatataaggtaactgaaaggttattttggtattaatcttcattttgtagaacaacattgctgtataccatttagagtgttactcactgcttctgtttatattagaaaagtggttcaacaatcaaaggaatccagggtgtgtgagtcattttttttttcttttttaaaaatgtagctatgcttggagaatcaattaaaaaaaatcaatgtatgtaraaatgctgtttttcttcaacacgtattttgaaccagttatgagaatttactaaatttttattatttttaattatgtttattttggaattaatactacattagtacttggggcaatttttaaaaaatgaataatagtattaatgataaattcattgaaaatgatttattttaattaatttaaaataatt

SEQ ID NO: 264295 - DNA, 535 bp, Homo sapiens
attctgcttccttcatttttgttttcatttttggtcaagtgtttgaccttgtagcagttaaagctgcagtctgcgccttatctctcagcaagcctcataaaatcagccatgcgttcatcctctctgatgccccacaaatgacctcagacctcacttcaagaggaccaacatgtcctgtgaagaaatgggcgggttagcttttgtgttggcacctccctagctctgtttcttttctttttttttttttgagacggagtctcactgtcaccaggctggagtgcagtggcatgatctcrgctcactgcaacctctgcctcctgggttcaagcgattctcctgcctcagtctcccaagtagctgggattacaggcgtgcaccaccacgcccggctaatttttgtatttttaatagagacggggttttgccatgttgtccaggctggtcttgaactcctgacctcagggtgatctgcctgctttggcctcccaaaatgctgggattacaggtgtgagccactgtgcccagcccttagctc

SEQ ID NO: 264296 - DNA, 595 bp, Homo sapiens
aacattggctcttcttggatctcgagtctgccagctttcagctctcctggtaattcagactctgactgaaacttttaccattggctctcctcctgcatgcccagcttgccaactgcagatctttttggttgttgttatagacaacagactggtcttgaatgcctgagctcaagcgatcctcttgcctcagcctcctgagtaggtgtgtatcactgcccctagccctaaactatagctcttaaagacttcatagcctccataatcatgtgagccaattccttattataaatgtgtatgtatatatacttatatatgtatacacactcatgcgtgcacacacacacattctgttggttctgcttcccttggaaaaccctaatatacataccttaattaacgtttagcaaaatatatgtactacttctccaataaggttataagccctttgaggctggaaccattcttatacttcttargatattaattagctcagtgttattcatacatttggcaccaaaaaaaaaaaaaccaaatacattgatttacaatgagaatttcaacagctgatatgtcaaaataaaagggattaaaaagc

SEQ ID NO: 264297 - DNA, 412 bp, Homo sapiens
acatttggcaccaaaaaaaaaaaaaccaaatacattgatttacaatgagaatttcaacagctgatatgtcaaaataaaagggattaaaaagcttttagatgggaaaaagcaaaggctaattttagataaagttggcagttgatattagaatcctataaagaggggttaaaaatattctaatttggcttccgacccagtcgaccataagaagtgctatcctagtaaaatgcttctaagactataataacatttcctgtttgaaatgggtaagaaggaaatgtgcctgggaaaattttgacccttttaytttctattatacctagaataagtacatcaagcagttacagacatatctcaaagatattgcaggttcagttctacatcaccataataaagtgaacactgggtaata

SEQ ID NO: 264298 - DNA, 412 bp, Homo sapiens
acatttggcaccaaaaaaaaaaaaaccaaatacattgatttacaatgagaatttcaacagctgatatgtcaaaataaaagggattaaaaagcttttagatgggaaaaagcaaaggctaattttagataaagttggcagttgatattagaatcctataaagaggggttaaaaatattctaatttggcttccgacccagtcgaccataagaagtgctatcctagtaaaatgcttctaagactataataacatttcctgtttgaaatgggtaagaaggaaatgtgcctgggaaaattttgacccttttactttctattatacctagaataagtacatcaagcagttacagacrtatctcaaagatattgcaggttcagttctacatcaccataataaagtgaacactgggtaata

SEQ ID NO: 264299 - DNA, 569 bp, Homo sapiens
tatttaatatgtttacagctgggtaatagtgtacagcataggatggaaataggaaattttatcctatgcttttagacaagcactttgaagccagaatccattcattcaagcaccgtaaaatgataaacccaatatatcaatgcatcttagagatggacagtgggagctccayatcctgggagtatcctcagctcctggagagattcagatgtgttcccatctgcagccaactttcaaatacctggggcagacatctaagccactttatttattaaggtgtaactgacctggactaaggaaccaaaataggcttccctgaagaagtgatagtcacgatgtcaacaatgagtaggagttaaaagtaaaagatgacaaaggagtggtggggatttccagatacagagaacaagatctgcaaaagtcctgtagtgagcaggaacatggcacattcttagagtctgagaggaagccggaccacaaagaagaaaagtgaaagtttcaagaagatactacagatacagatagtggccaatgcatggctttgctggccatctgctccctgggaatga

SEQ ID NO: 264300 - DNA, 520 bp, Homo sapiens
caattttgtttcatattctatgttgtttgtttttcacttaaattagagcctctgttcccaggggtgttatatcttcagtaatctcatacctcaaaatggctacctctgaccatctcagcttcagcaaatctcttgaactctttcttgaatgatcgatcttcagcaaatgcataacacctgctaagaagacctttttcttctaatatttaaatccaaatattcaatttatttaaaagagaactttatatgtgcctaattatttaccttcaaattatcaaagagaaaaaatggtaaaggttatttactyatcaggaaagcttttgagtcaccaatacattttcagaaaacttttaatgatgtttaatacaggaaaatgctttttttctgaaacttcaaaacccggttcacatgaaactaccctatgattaaaataatctctaaacttgtaagcaagaatctatttaacccacaagtctatttcttttctccctattttctaatcaaattctaaaatgttgtg

SEQ ID NO: 264301 - DNA, 539 bp, Homo sapiens
tttttcaaactatacatctaacaaaggtctaatatccagcatctataagaaacttaaacaactctacaagaaaaacaaaacaaaacaaaacaaaacaaaacataaaaatgtggtcaaggacatgaacagacacttttcaaaagaagacatacatgtggccaaccagcatatgaaagaaagtgcaagatcactgatcattaaataaatgcaaatcaaaatcacaataagataccaactcacaccagtcaaaatggctattattaaaaagtcaaaaaataacagrtgcctgcaaggttgtgggagaaaaaagaatgcttatactctgttggtgcaagtgtaaattaggacaaaccattatggaaaagagtatggcaattcctcaaagacctaaaaacagaaatgtcatttgacctagcaattccattgctaagtatatacccaaagggatataaattttcctgtcataaagacccatacacaagtatgttcaatgcagcactattcacaatagtaaagacatggaatcaacctaaacaccc

SEQ ID NO: 264302 - DNA, 445 bp, Homo sapiens
tacaccatggaatactatgcagccttaaaaaaagaatgagatcatgtccttttcaggaacattaatggagctggaggtcattatccttatcagacttacacaggaacagaaaccaaatactgcatgttctcacttacaagtgggagctaaatgatgagaacacatggactcatagaggggaacaacacacactgaggcccactactggggggtggagggtggaaggagggagaggatcatgaaaaataattaatgcatactagacttaatacctgagtggcaaaataatctgtacaacaaacccctgttatgtgaattttccatacacyacaaacctgcacatgtacccctgagcttaaaataaaagttaaaaaaattaaaaggagaatcttcaacatggagtaaaaagattgtaatttttgtaatttgcaattcaaatgaaacc

SEQ ID NO: 264303 - DNA, 599 bp, Homo sapiens
tatactgtactatctcatttaagaatatatctgaagccatcatgtgtatggtccactctccccatgaattgatcaaatgtggtcatacattcgctttaaagagtcctcccttaaacccccaaaaggcacagaagtgtgcctaatacatcttaaacacatcagtgtggcaactaaagaatatcacttaaagagcacaaagcaatcaagtctgtactggayttcctttctattcccctgtaggtttggaaattccctatttgatgaaaaactcagagtatggtttctactgggaatctagaatttctgcccttagggatcctttcaaacatattgcaatctagcctatcctaaaaatttaaacctctatcaggacacttttaagtaatttcaacttgttttgagatatagggactccatatactacttttcataaattatcctggatgatgctagatacattattgatctaatctgtttttaataacatcaatgaatacttaatgatatttgaatcctgagtttacagagctcttttctttcctagagtcttattttctcaaaaggtcattgtgttttacataaaacaccactgtaagcta

SEQ ID NO: 264304 - DNA, 572 bp, Homo sapiens
atcttcttgatctaaaacttagttataggaaagttctttactcatttttgatgctgattcacttagctgtcatacattcatctgatagatatttaaggctacatacttatttgtcaagcactatgctaggttaaaagagaagtctataatggtgaatagcacagtcgtacttccaaggacctcaaaatacaatgtgtatgtggagagtgaggagcaataattaataaaataaatagcaagcataatataatgcaatgcacaataatytatgggaagtataaagtgctttggaaactcgaatgagggatagcttacttagtctttggaagtggatcagataaagatggcttctcggagaaaatgacatttaaattgagccctgaaagggttctgctgtgcaagagaatgaggagttagagctgtagagcaggttatattcagaggaaggcatttgcacaaaggcttaagggtgggggagcaaaaaagaatatcagcaatgtgcttatgaagctggagggaattcagcatggaaaacacatcatagagaagggtgggggtatagcaggagacaa

SEQ ID NO: 264305 - DNA, 572 bp, Homo sapiens
atcttcttgatctaaaacttagttataggaaagttctttactcatttttgatgctgattcacttagctgtcatacattcatctgatagatatttaaggctacatacttatttgtcaagcactatgctaggttaaaagagaagtctataatggtgaatagcacagtcgtacttccaaggacctcaaaatacaatgtgtatgtggagagtgaggagcaataattaataaaataaatagcaagcataatataatgcaatgcacaataatttatgggaagtataaagtgctttggaaactcgaatgagggatagcttacttagtctttggaagtggakcagataaagatggcttctcggagaaaatgacatttaaattgagccctgaaagggttctgctgtgcaagagaatgaggagttagagctgtagagcaggttatattcagaggaaggcatttgcacaaaggcttaagggtgggggagcaaaaaagaatatcagcaatgtgcttatgaagctggagggaattcagcatggaaaacacatcatagagaagggtgggggtatagcaggagacaa

SEQ ID NO: 264306 - DNA, 504 bp, Homo sapiens
cttgggccccctctgtgaacacctcagcaggccagagaggagctgcttgctgctttttctaacctgggcactaactgagttgagcctcctatccagattggggctggcatttgcagcctcaccaggagcagagaaagaagagccaactcccttgcaggcagataggaaggagctgaggctccacaggacactatcagtcaggattttctcrttgcctggctggtgttcaaatgggttcatatgccccacagtttctgtccatacccttggatgaccttgtgactctcagcttttgttttattgcttcataaaatacttggactttctagaaaatgtgcaaactcctcctttgtcggaagaggacatcttggccattcttgcgaggactataggcccctggaggagggacctgtcaagcacagaaagattcagagctacaaagggaaacggcttggctttctgtctcagggcccttctgagctctggtagacagaagaaacacat

SEQ ID NO: 264307 - DNA, 504 bp, Homo sapiens
cttgggccccctctgtgaacacctcagcaggccagagaggagctgcttgctgctttttctaacctgggcactaactgagttgagcctcctatccagattggggctggcatttgcagcctcaccaggagcagagaaagaagagccaactcccttgcaggcagataggaaggagctgaggctccacaggacactatcagtcaggattttctcattgcctggctggtgttcaaatgggttcatatgccccacagtttctgtccatacccttggatgaccttgtgactctcagcttttgttttrttgcttcataaaatacttggactttctagaaaatgtgcaaactcctcctttgtcggaagaggacatcttggccattcttgcgaggactataggcccctggaggagggacctgtcaagcacagaaagattcagagctacaaagggaaacggcttggctttctgtctcagggcccttctgagctctggtagacagaagaaacacat

SEQ ID NO: 264308 - DNA, 468 bp, Homo sapiens
aagcaggtagtgcacagactaggaactgaaaagaaaaacagacagaaaaagacccatttctaaagtgcaagtagcctttgaatctgatgtttttgttccacctggttcacgggtgtgtggtgactttctgtggacctgtttgtctgtcgctaggagataaagaatcaaagctctgcccacggctactctccttaaaactacaccttactgaagtttttatatgtcagctgctgctgtagtgtgtttgggatggaaattgttaaaacgaaawtataacagagagtctacaggctgaggcagcattggaaattgtccagccatcctgcagagcatgcacaaaagagatgtttaaagcaagacttcattttgaaagcaaacccttaagggaacatgttttaaaatactttaaaaagtctttgtttggcacatgaaagtgaaaacgaccagagggaagatgaagttagaggc

SEQ ID NO: 264309 - DNA, 505 bp, Homo sapiens
tggttccctcctacatcccaaagatgtgcatatctggttaattggcatgtctgaattgtcccagtttgagcgagtgagtgtgacagagtgtgacagtgcatcctgtgatgggatggcatcttgtacagagttggctcctgcctaggaccctgaccttccaggatagattctggccacccgagactctgaactagaataagtacaatgaataatgaataatataataaatacaagttattgtaaaatgaaaattcataaagtatatgataatcatacaaatgcacagcaataaatgatgcagtaaggaaatgctcagtgagtcrtcatatttgttattatttacttttgaactgcaaggagataagaggtaatcctgacaattttcactttgcaaacatttattctttgaattaactcaccatcactacaactgtcatcactcactaattcaccaaaaatttggtaaatgattatctgatttgtttttattaatctttcttaactg

SEQ ID NO: 264310 - DNA, 578 bp, Homo sapiens
atgtgctcacactgctctatgaactctagggtaattgaatgaatttaaaacttagttcaattgagaaaaaaacagtgatgctttctttgggtatgaattgttttcacaatagggatttaggaaggaggagaagacagaaagtggttctagttagagaaatcttcactgagtatgtgacacatgagttagactccaaaagttaggcaaggtaagggcatcccaatagaaggatgggagaaagtaacattagaaaataaayggagatgacaccaaccatctccactgaggaagtaagtggagggggtttactgatacaaacaacactgctatggcacatcaccatggtatttagacttaaggctatggctaacatgaataagttgttttgagaaattaccatggagtgtgtgcagaatgaatcctcatgccctaaaattatcacctctctggagcattctagatgttcctagatggaattaaagtgtccattgcatgttcttcttccatgtattttataagtgttggattgcaattaagatggtgtttgtcaaaaaaacctaaaatatgtgagcctgagg

SEQ ID NO: 264311 - DNA, 578 bp, Homo sapiens
atgtgctcacactgctctatgaactctagggtaattgaatgaatttaaaacttagttcaattgagaaaaaaacagtgatgctttctttgggtatgaattgttttcacaatagggatttaggaaggaggagaagacagaaagtggttctagttagagaaatcttcactgagtatgtgacacatgagttagactccaaaagttaggcaaggtaagggcatcccaatagaaggatgggagaaagtaacattagaaaataaatggagatgacaccaaccatctccactgaggaagtaagtggagggggtttactgatacaaacaacactgctatggcacatcaccatggtatttagacttaaggctatggctaacatgaataagttgttttgagaaattaccatggagtgtgtgcagaatgaatcctcatgccctaaaattatcacctctctggagcattctagatgttcctagatggaattaaagtgtccattgcatgttcttcttccatgtrttttataagtgttggattgcaattaagatggtgtttgtcaaaaaaacctaaaatatgtgagcctgagg

SEQ ID NO: 264312 - DNA, 594 bp, Homo sapiens
aactatccacacatgaaaatacctttacaaaaaagcaaagaaaaccagrcgagggataacagcacctaagtgtagcaaggaaataagaaaagatatattaaacagggtagaatgtgcacttttacattacctatgtcacccctcccctaatctcaggccccacagcactgggggagacactctctgcttaaagaaaagatacagaagtgaacactggactttgcctcaggcttcaacactgggcccacagcagtaaaaccctacaatgagcagactccaatagccctagacctcaagtttacagggtctttcttctgattggtcattttcactattgatgctctgtattgcacttttcatcttgtgcatagtaattttcagcttcagggtttctgtttgattttaaaataattttaatcttgttaaatttcccattttggtcttttattgttttcctcatttaaaaaattatttccctgtatattcttttacttcctatacttgtggtaaccacaaaacaaaaacctatgttagataaacaaaaaataaaaagtaaggaatcaaagcttattgctagagaaatttccttaatca

SEQ ID NO: 264313 - DNA, 534 bp, Homo sapiens
cagaaactgtaaaactctttgaagaaaacaaaaacagaagggtagagacagatggcagaacaggattttccagtgcctgtgtccctgcagaagcatcattgaccaactatccacacatgaaaatacctttacaaaaaagcaaagaaaaccaggygagggataacagcacctaagtgtagcaaggaaataagaaaagatatattaaacagggtagaatgtgcacttttacattacctatgtcacccctcccctaatctcaggccccacagcactgggggagacactctctgcttaaagaaaagatacagaagtgaacactggactttgcctcaggcttcaacactgggcccacagcagtaaaaccctacaatgagcagactccaatagccctagacctcaagtttacagggtctttcttctgattggtcattttcactattgatgctctgtattgcacttttcatcttgtgcatagtaattttcagcttcagggtttctgtttgattttaaaataattttaatcttgttaaattt

SEQ ID NO: 264314 - DNA, 596 bp, Homo sapiens
actccaatagccctagacctcaagtttacagggtctttcttctgattggtcattttcactattgatgctctgtattgcacttttcatcttgtgcatagtaattttcagcttcagggtttctgtttgattttaaaataattttaatcttgttaaatttcccattttggtcttttattgttttcctcatttaaaaaattatttccctgtatattcttttacttcctatacttgtggtaaccacaaaacaaaaacctatgttagataaacaaaaaataaaaagtaaggaatcaaagcttattgctagagaaatttccttaatcacaaaggaagaaaggaagaaagtaacaaaacatctacaaatcaactagaaagcaactaacaaaatggcaatagtgactacttacctatcamtaattaccttgaatataaatagattaaattctccaatcaaaaaacacagagtgcctgaatgaaaacaagttccagttatatgttccagttatatgttgcctacaagatactaacttcacttgtgaggacacatatacatagacaaaagtaatgggacagaaaaaggtatttcatgcaaatgaaaa

SEQ ID NO: 264315 - DNA, 532 bp, Homo sapiens
ataactaaaaatagaattatgacatgatccagaaagcctgctactgggtgtatatcccaaggaaytgaaatacatatattaaagagatgtctgcaccccatgttcattgcagcattattcatgatagccaaaatatgaaaacaactgatgtactcattaatgtatggatgtgttaaaaatgtgttatataaatacagcaaaatatgattcagccttaaaaaggtaagaaattctgccatttgtgacattgattaatttagaagaaatcatggtaaatgaaataatttaggcacagaaagacaaattcgacatgatctcacttacatgtggaatctacaagagttgaactcatagaagtagagtagattagtggttactagaggttgagtgagtgagcataggaaacaaggaaagaagagatatttgtcaaacagcacaaagttttagttagacaaaaggataatttctggtaatctattgcacatgactatatttaacagtaatgtattttatattttaaaattgctataag

SEQ ID NO: 264316 - DNA, 551 bp, Homo sapiens
tctatatagaaaatctgaatgactgacaaaacattctcctggaactaataagggattatagatatgttccagaatatagggtgaatataacaaagttaactgcctttctgtgtaacagcattgaacaaatggaatttaaaaataaaaacacaataccattactctagtaccaaaaaagagagaaacacttagatataaatctatcaaaatatgtgtaaggcctgtatgaggaaaactacaaacctcaaatgaaggaaataaaagaagactgaaataaataaataaataaataaattaattaatagatatcccataaccatggatagttagactcaatattgtcaaactgtcatttctttccaacttgatgtatagattcaaagcaatctcaaaacaaattccaataatttagtttgtggatattgacaaattacttctaaggtttatatgaaatgacaaaagacccagaatagcyaacacaatattgtaggagaaaaacaaaattggaagactgacacaaaagtaaacatacttttataatatgattcagc

SEQ ID NO: 264317 - DNA, 585 bp, Homo sapiens
aatgtaatggagtaaagatagtcttttcagcagattgtggtgttcttctcaaacatacatggcacaatctccaggacaggtcacytgttggggcacaaaacaagccttaaatttaagaagactggaattgtatcgaatatattttctgattatcatggtttgaaactagaaatcaataacaggaggaatttcaaaaaattcacaaatgggtggaaattaaacaacactctcctgaacaatcagtgcatcaatgaagaatttaaaggggaaataaaaaacatcttaagacaaacaaaaatggaaacacaacataccaaaagcttatgaaatacagcaaaagcagtaagatcaatgtttgcagcaataaatgcctatatcaaaaagaagaaagagctcaaataacataatgttgctcctcaaggaactaagaagagaacaaactaagaccaaagttagtagaagggaggaaataataaagattagagcagaaataaataaaatggagagtaaaagaaatagaagaaataaaaaaactgagttttttttttagagttaaacaaaatcaacaaatgtttagctagacca

SEQ ID NO: 264318 - DNA, 585 bp, Homo sapiens
aatgtaatggagtaaagatagtcttttcagcagattgtggtgttcttctcaaacatacatggcacaatctccaggacaggtcacctgttggggcacaaaacaagccttaaatttaagaagactggaattgtatcgaatatattttctgattatcatggtttgaaactagaaatcaataacaggaggaatttcaaaaaattcacaaatgggtggaaattaaacaacactctcctgaacaatcagtgcatcaatgaagaatttaaaggggaaataaaaaacatcttaagacaaacaaaaatggaaacacaacataccaaaagcttatgaaatacagcaaaagcagtaagatcaatgtttgcagcaataaatgcctatatcaaaaagaagaaagagctcaaataasataatgttgctcctcaaggaactaagaagagaacaaactaagaccaaagttagtagaagggaggaaataataaagattagagcagaaataaataaaatggagagtaaaagaaatagaagaaataaaaaaactgagttttttttttagagttaaacaaaatcaacaaatgtttagctagacca

SEQ ID NO: 264319 - DNA, 635 bp, Homo sapiens
agaacctctactatggcagtgtgaaggggaaatgtagggttggagctcctacaccaagtccccactggggcactgcctagtggagctgtaagaagagggccactgtcctctagaccccagaatggtagatccactgacatcttgcactatgtgcctggaaaagacgcagacactcaacaccagctcgtgaaagtagccatgggggctgtaacctgcagagccacaggggagcttcccaaggccttggcagcacagcccttgcatcagtgtggtctggatgtgaggcatggagtcaaaggagattmgtttggagctttgagatttaatgactaccctgctgggttttgaacttgcatagggcctgtagcccctttgttttggccagtttctcccttttggaatggaggcatttaaccaatgtcataccccagttttatcttggaactaacttgttttttatttttttaggctcataagcagaagggacttgccttgtctcagataagactttggacttggacttttgagttaatgctggaataagttaagactttggaggactgttgggaaggcatgattgtgttttgaaacgtgagaaggacctgagatttgggaggggccaggggcagaatgat

SEQ ID NO: 264320 - DNA, 528 bp, Homo sapiens
gatagcatgctttttttttttttttttttttttttgtatttgctaaaccttggaagcaaccaagatatccttcagtaggtaagtagataaactgtggtacctccaggcaatggaatactttttagcgataaaaagtatcastagttgaaaaaagaaatctgaaaagactacatgctgtatgactctaactatatgacattctgaaaaaggaaaaagtatggctacagtaaaaagattagtggttgccagggattgggggtgggaggtgggggagagggaggaatagatagagcacagatgtttaagtcagtgaaattactttatgtgatagtgtaattatggatacaagtcattgtatatttgtccgaactcagagaatgtgcaacaccaagaattaacactgatgtaaactatggactttgggttataatgtgccagtgaaggtttatcagttgtaacaaatgtaccactccggtgggggaggcttataatgggggaggctttgcaagtgtgcagcagagggtatat

SEQ ID NO: 264321 - DNA, 378 bp, Homo sapiens
acagataaagcacctccctgtttcagcatwaaaaaagctggcagtaaacatcgttttcccatcacattgtagagccctgttactgctttcaggggagcacccctctcaaatggcagctttttggctccatatttgcccctgaaaggcccactgacaccatgaaagttgttactttttataatcccagatgatcagattctgttaaaatctaaccaatagggaattccggcattagaacaaattcagttctcagagttgctagattctttatttctagtccacttcattctccagctcaggagcaatcatctttgtaaagtgtcttaagagccttagagtaaataaaaatgataaatgttgaccttcctggtctctttc

SEQ ID NO: 264322 - DNA, 378 bp, Homo sapiens
acagataaagcacctccctgtttcagcataaaaaaagctggcagtaaacatcgttttcccatcacattgtagagccctgttactgctttcaggggagcacccctctcaaatggcagctttttggctccatatttgcccctgaaaggcccactgacaccatgaaagttgttactttttataatcccagatgatcagattctgttaaaatctaaccaataggkaattccggcattagaacaaattcagttctcagagttgctagattctttatttctagtccacttcattctccagctcaggagcaatcatctttgtaaagtgtcttaagagccttagagtaaataaaaatgataaatgttgaccttcctggtctctttc

SEQ ID NO: 264323 - DNA, 574 bp, Homo sapiens
tgggtatctaaagcacagcatggtgactatagttcacaagttttatatacttgacatttgctaggagattagatcttaagtgtttcaccacaccaaaaagaataagaaaaaaaggtaactgtgaggtgacagatgtgttaactaactggattatrgtaataatgtcacaatatataagtatagcaaatcatcacattgtataccatatatatatatatatatatatgcaactttatttgtcaattatacctcaataaagatggaaaaaagtaaaaatgcaaataaaaagtagttgcccacattaaaaaaaaaacaaaacttgacacagactactttgtaccaccttcctctggctgtgggccattttctcaatttacaacacccacattgctggggaatatggaacactcttactctgaacggaatatgctgtatatcctataggatgtattaggcgaaggcagagactgaagtggagcacaacacgagggtgaaattcacgaaggaaatgggttaactaacagggaagtgagacgatggatgaagcagttttcctctcccactgaaatgactc

SEQ ID NO: 264324 - DNA, 574 bp, Homo sapiens
tgggtatctaaagcacagcatggtgactatagttcacaagttttatatacttgacatttgctaggagattagatcttaagtgtttcaccacaccaaaaagaataagaaaaaaaggtaactgtgaggtgacagatgtgttaactaactggattatagtaataatgtcacaatatataagtatagcaaatcatcacattgtataccatatatatatatatatatatatgcaactttrtttgtcaattatacctcaataaagatggaaaaaagtaaaaatgcaaataaaaagtagttgcccacattaaaaaaaaaacaaaacttgacacagactactttgtaccaccttcctctggctgtgggccattttctcaatttacaacacccacattgctggggaatatggaacactcttactctgaacggaatatgctgtatatcctataggatgtattaggcgaaggcagagactgaagtggagcacaacacgagggtgaaattcacgaaggaaatgggttaactaacagggaagtgagacgatggatgaagcagttttcctctcccactgaaatgactc

SEQ ID NO: 264325 - DNA, 574 bp, Homo sapiens
tgggtatctaaagcacagcatggtgactatagttcacaagttttatatacttgacatttgctaggagattagatcttaagtgtttcaccacaccaaaaagaataagaaaaaaaggtaactgtgaggtgacagatgtgttaactaactggattatagtaataatgtcacaatatataagtatagcaaatcatcacattgtataccatatatatatatatatatatatgcaactttatttgtcaattatacctcaataaagatggaaaaaagtaaaaatgcaaataaaaagtagttgcccacattaaaaaaaaaacaaaacttgacacagactactttgtaccaccttcctctggctgtgggccattttctcaatttacaacacccacattgctggggaatatggaacactcttactctgaacggaatatgctgtatatcctataggatgtattaggcgaaggcagagactgaagtggagcacaacacragggtgaaattcacgaaggaaatgggttaactaacagggaagtgagacgatggatgaagcagttttcctctcccactgaaatgactc

SEQ ID NO: 264326 - DNA, 565 bp, Homo sapiens
gtgaaatgatctgacttacattttaaaagcaacaatccagttgctggattgaatggcaaaagggaaggataaaaaaggggaagataattgagaggttatcaccctggtcctgtattacaggcagaggctggctgcatgggggtagcaacagaaatgaagacaagtaaatgcagtgaagagagggagggaggwtttacagatgcctcttaagatttctgcattaccaggatgcttgtgcatgtcactgagatagggaacactgggaaacaaccagcttcgaggtggagaaaatcatgagaggtcagagcgtaactgagcgtaactgaggtggagtgagacttccttcctccgtgcccgtctttcagtggcagatggacaatagcatgttaatgtcctatatattacaggtatggagactttcattttccatgtacctcataaacaaaggaaagttccaggacacatggtagaatcacccaatttgctccatgggaggtggggtttactgtaattttcacctcatgtttggaaaagaaggagatatttaccatttcttgtaagtata

SEQ ID NO: 264327 - DNA, 470 bp, Homo sapiens
cattctgtttttgaaattgtgtccttgagtctttgamgccttgctctggcaatccagaaatagaaagaacatctgaatgacacactccttctaatgacccttaatacctagggtagtcattttgcctgtattttttggccctaatttttgaataatatttggtaagagcactcatatcctgaggtaagcaagatgctcagtgatataagaaaatcaagtacaggtcttatctcctaggaatcctctcatctcattcctgtaagtatgtgatctgtggttggtgcaaaatgcgagagggccttcagggaccctggctgtggtctgggtggcatgtggaggtcagggtgtgtgttcagcatgtggggtggtatgcagctgaacagtatggttgctgtgttgcagttagaaaacctcaaagtcgctcctctcagctgctgctggcaggacttctgtgactctgtttactcttg

SEQ ID NO: 264328 - DNA, 470 bp, Homo sapiens
cattctgtttttgaaattgtgtccttgagtctttgacgccttgctctggcaatccagaaatagaaagaacatctgaatgacacactccttctaatgacccttaatacctagggtagtcattttgcctgtattttttggccctaatttttgaataatatttggtaagagcactcatatcctgaggtaagcaagatgctcagtgatataagaaaatcaagtacaggtcttatctcctaggaatcctctcatctcattcctgtaagtwtgtgatctgtggttggtgcaaaatgcgagagggccttcagggaccctggctgtggtctgggtggcatgtggaggtcagggtgtgtgttcagcatgtggggtggtatgcagctgaacagtatggttgctgtgttgcagttagaaaacctcaaagtcgctcctctcagctgctgctggcaggacttctgtgactctgtttactcttg

SEQ ID NO: 264329 - DNA, 522 bp, Homo sapiens
tctcattcctgtaagtatgtgatctgtggttggtgcaaaatgcgagagggccttcagggaccctggctgtggtytgggtggcatgtggaggtcagggtgtgtgttcagcatgtggggtggtatgcagctgaacagtatggttgctgtgttgcagttagaaaacctcaaagtcgctcctctcagctgctgctggcaggacttctgtgactctgtttactcttgggtttgcttttgtccatggacaggcccccaggacttaagtttctgccccacgtttttgacagaagactatcttaattgtgaattcccttttcaataaggaactggcacaaacttctaaaagtgtggagttaaaagaataccatagctcatgtttgttgagtgcttacggtgtactggcatttgtttgcattttctcctttctttttctgaggcacagagaggataagtgatttgcacaaggtcacagaaccattgagaagtggagctgggatccacccccatcaacctaacctcagaacc

SEQ ID NO: 264330 - DNA, 522 bp, Homo sapiens
tctcattcctgtaagtatgtgatctgtggttggtgcaaaatgcgagagggccttcagggaccctggctgtggtctgggtggcatgtggaggtcagggtgtgtgttcagcatgtggggtggtatgcagctgaacagtatggttgctgtgttgcagttagaaaacctcaaagtcgctcctctcagctgctgctggcaggacttctgtgactctgtttactcttgggtttgcttttgtccatggacaggcccccaggacttaagtttctgccccacgtttttgacagaagactatcttaattgtgaattcccttttcaataaggaactggcacaaacttctaaaagtgtggagttaaaagaataccatagctcatgtttgttgagtgcttacggtgtactggcatttgtttgcattttctcctttctttttctgaggcacagagaggataagtgatttgcacaaggtcacagaaccattgagaagtggagctgggatcyacccccatcaacctaacctcagaacc

SEQ ID NO: 264331 - DNA, 525 bp, Homo sapiens
gaaaattcaacacatccctgctttcccttctagctctaaaaatctgattctatgccttacttasattcccagtagatattcaattaaaacatctcctctgctctccagaaggcaatttgagaaacacaggatgtgggctttttatacatgtaacacagtaagaggataacatgaaactattcttgttcaagcattgaggtatgtgtcacacattgaaatcttgtaaacataatgtgaattcaaacaaagaaggtgtcatcaaaggtcccattagtcaaagagagtccatagactcagaaaatttactgacccttaattgttcacattattttatttaatcttatattaatcctgagcagtaaatatcacattcattttttttttttttttttgaagatcaggaagctgagcctcagagttttaaaaaattggccccaggtccatggttagtcttataggttttgttgccacattagaggttgtagcacaagattgaactgtttggagatgggttctctgtgtgga

SEQ ID NO: 264332 - DNA, 526 bp, Homo sapiens
gcttgctcaatcactgagtgactcacactactcatagcttcctaaagattgaaattcatacctcagcacagttaacaatccacactgggccatgggacaatctcagattttagttagtcctatgaatcctatgaataataatmcaggaattccaaggtttagcaagcaaatttatagccaaaatgagaggggcaagtaatatgtgaaaggagctcagagatgagacttcaccaagtcctcttctgtatgacttgcctgctttctcttacctgctgataagatttacacatctgcctgtaaggctgaattaagcccctacggactctttttgccttcctttcaggcttcagggcttttcatcaaaggggtgttgggctccaagaaaccacacacagagcattttataccttttaccaaggctgggcagagggagatcagttactgttaattacagatgctttctgtcataatgggccagattttcaaaagagtctcaactgcaaagctcccaaatgccatgcacaaa

SEQ ID NO: 264333 - DNA, 454 bp, Homo sapiens
ccaaataattacttcagctattgtccagcttgtttaagcactgactgagctgtgggtaccaatcgattcagtgcagattgttaataatggactattttgaaaacttatagctgtttctccatacctcccatacacaggaagacactaatttctttcctacactgcacacctaattaaagatgagtcagggcattattttatggccaagctttttataccctggatacagagagctgggttctgttctatcaaatgtctcctggaaatattgtgataaaatgcacttatccacagctacytacaaagataataagttgtaaaacctgttaagacattagaaagatcagactgctcaatgtcatgccctccctggatttccagtttggatgctccctgcacccacgcctggggctcttcatttcctcagttgctcagtagtttccagaatccagtc

SEQ ID NO: 264334 - DNA, 515 bp, Homo sapiens
aaccatccactccaactctttcctcatgatggctcctagactgctaaatcatgagtgatttctgctaaaaggatctccttccattaaacaatagtacgagaagccatcactgtgggtcagggatgctcaatctctgctgaatttcctggggaattttttaaaagaagataactaaaaaacaaacaaacaaacaaaactatcaatgtccaggtctcatctcaggataatcagagccactggggcaggaagaggggtgggcatcagttctttatacaaggtcctccaacgtaccaccacagttaaggagcattgctttacrgaatgtaaacagccaacataatacaactttaggcaccctatgacctcaagagaactgtgacatcaaaacatcttccaggcatcactttgctacgtagagacagattcatagttctttcaggcattgattagttctgtaagtactagaagtaatatacctctccagaagccattagtgaatcctgtcaagttgcaaa

SEQ ID NO: 264335 - DNA, 515 bp, Homo sapiens
aaccatccactccaactctttcctcatgatggctcctagactgctaaatcatgagtgatttctgctaaaaggatctccttccattaaacaatagtacgagaagccatcactgtgggtcagggatgctcaatctctgctgaatttcctggggaattttttaaaagaagataactaaaaaacaaacaaacaaacaaaactatcaatgtccaggtctcatctcaggataatcagagccactggggcaggaagaggggtgggcatcagttctttatacaaggtcctccaacgtaccaccacagttaaggagcattgctttacagaatgtaaacagccaacataatacaactttaggcaccctatgacctcaagagaactgtgacatcaaaacatcttccaggcatcactttgctaygtagagacagattcatagttctttcaggcattgattagttctgtaagtactagaagtaatatacctctccagaagccattagtgaatcctgtcaagttgcaaa

SEQ ID NO: 264336 - DNA, 606 bp, Homo sapiens
tttttaagtgtctgcagcttaattaaaccctaagcaaattaaacacatcaccctcttctgcaggtaaagcagaacgttcatatacccactgttggggcagttcaatgcatctgtacacaaagagcctggcctcttccctggaacactggtcaaaggaaagcattgtacaagctaaagcccatccycattcagcacctgggggtttgtccacaccaaccaggcaggattgctcagctctctagggaaatgtggcattcacacatacaatatagtactggctggaggcctagcaaacagtcacagaagtgcggaggatttatagactgaaaatgagcacatagacagcagctccgagttctctcagaaaacatgtgtgcggcgactgaactgtgggaggcctatgtggggcccccagagcttggcagaacctctagtggggacccagtgtgtatgtgaacatatcagagctataaatctggtaacaaacactcctttgtgaccttatgaagattgtgaaagacaaaggcattttaagattgcaatgtcaggaaagagggaggccatttggaaagctgactttcatattgctgattctcaactgcttct

SEQ ID NO: 264337 - DNA, 390 bp, Homo sapiens
tataattgggattgctttcttgatttctttttcagattgctcattgttggcatatagaaatactactgatttttctatgtaaattttgtatcctgcaaccttactgaatttatcagttctaatagttatttttttttgaaagaatctttaggwttttccaaatgtaagatcatataatccataaatgaagataatttgatttctttctttccagtttggatgccctttatttcattctctagtctaattcctgtatcaagaacttcttgaagaatgcttttgataggcttattggtagactagataaggctgagaaaagaatctctgagcttgaatatatatcagtacaaacctccaaaactgaaaagcaaagaaaataatgactaaaaa

SEQ ID NO: 264338 - DNA, 626 bp, Homo sapiens
ggggaaacggcccccatgattcatttatctcccaccaggtgcctcccacaacatgtgggaattatgggagctacaattcaagatgagacttgggtggggacacagccaaaccatatcacaggcagaggcaggagtgtgaacaaaatcactaaaccaaataatatatgctcttttcagcaagctgtgagtaattcagtagagctacagcacaacacragagggatgggagatacagataatagaataggctaagttatggagaaccttgaatgctgtactgaagggtttgtcctttatcgtgctaatgctgaggaattatagagtgacaccatcaaatctctgctttggtttagcatatgcagcttggattggagaaatggggttggaaggaggactttggaagtagctatgagtgtgctataatttgctcaagtgaaaggtaaagagggactgaacctgtcatagcaccgtggtggtgataaaaaagaacatgaacaagagtgataaaaacatacatttattatgtaaaaggcactgttccaagtgctttcaggcataaatttaattcttacatcaaccctgagcaataggtacagtagtccccttgtctgcggttttactttact

SEQ ID NO: 264339 - DNA, 624 bp, Homo sapiens
ggggttgtattgtctgaataacaaatggcaaatggacaaaaacaaaagagatcatagtctaagttactcaaagactttctataaggaaaatggtggtaattatggtccctaagtccacttatctaccaaagcttaatataagacatccaagaaatatatatagatacatatataatctatatatgtatgattgtgtgtgtatacatatatgtatagatatgtatatgtgtgtgtatatatatatatayacacacacacacatttcctaaagcaggaattttttttttaaatcagatattctgtgagacatacttgctttattcagtatcagtttagggtttctcactcagttgttctttctagaaaggatatttgtaaagtccaggatttattctcaaggagtaaaagcaaaaccaaacatttgtgtccctttcatttgaatctcatgtcgagtctgtaagtgcaaaagcacttacatatcagtcaaccaaattcttactgtcaaatctagatgtacagagcttgcaatagagaaatgtagatactttctagtttctctgcattctaccatcttaccccaggagctcaaaaatgactctacccttttctggaaaatagtacaaa

SEQ ID NO: 264340 - DNA, 580 bp, Homo sapiens
taataaggtttcagctctgaggtatgtccaagagggcagacttttcagctgctaaaagaattaacattttagctgaggatgaccctttattgctagatgtgctttcatagcccaagtctgtgaccatttaagaatgtcacagtaacatatggagatttttacatcttcacatagatcagttttgcaagtcagagtaaccaagggtgagtaacaatctatgccagctgtgtagttaagaatgccaatttatttttaaaatggctctgtgcagtcagctcgattgtttaggaaaatgggagaaaggagtgactatgataatcaaagttcacgtgcaatttcaaacctcatttaaacragctgtttaacctgctctctgtctgctagtgggaaggagaaaaagcaaatgagtcagacagtggacccactagatactcaggatattgagattcttgggtgtgagagaaaatgtttcttagttttataaatgtttactgagttgtttacactgatttgataagtatatctgggacttggtgcaggtaggtgtttcaaaaatttgaatttacttcaccctcaatgg

SEQ ID NO: 264341 - DNA, 589 bp, Homo sapiens
attgtggatgtatgtcgccatccaccagaataattctattatttttttgtcatctttataaccaagtatggaagtactggcatgctttgacctctcctggcttgattattacattaatcaagatgtaataattgtctgataggcatccaaggttgggctcccatagttgtggtaggggttgtgttcttactacttccagcacatcagtttggcatatcagttatctgcttcctctaccctgctaaccacagtacactgtagtccttatatgtgaaaccaagagaaatgacttgaaatgaaaatgaatattagtaacctatcgcatgggtggccatgggcygtagttcattctgaatagtgctagttaagactctgaacacatgtctgagaaacttcagataactggttttatcacacacaatcatccatgagaaactgcaccccagaaagcttccatgtgtgttgtttacatttttataggcacataagcattatagtctaaatagctcacttaaggtcaccctactagtatttaataataaattaagtttaatcaagaaaggaaccagattgctcttaggtgtatgca

SEQ ID NO: 264342 - DNA, 558 bp, Homo sapiens
aaaaagtggtgcctgatcctaccccacaaatattttataattcatgctgggatgtgacttgggattwttgaaagcttctcatgtgattctaatgtggtaaccaaggttgagaatgcttgctctgaagtacagattcttctttaaacaccatttgattttatcatttaattgaatcataatttgtgagcattatatttgttgactgataacttgttttatctgtccctctcagaagaatgtagactctgtcaaggcacaaaccatttctatcttattcgcttttgtatcctcggagcctggtatagtgctggataaatgaaaataagtaatattgtttgtctttgaaaacagttcattaccaaggagaagtacaggcttcagttttcctaggcagcatttagcacttttactggaatagtaatttacttaaaatgtgagggtgatagcaatttctgtggataagtgaccacataagagagtcaagtggaggaggagatggggaggaagagaaagaacaggtcagtggcgtggagctgtgctcctgaggggagcgttctt

SEQ ID NO: 264343 - DNA, 558 bp, Homo sapiens
aaaaagtggtgcctgatcctaccccacaaatattttataattcatgctgggatgtgacttgggattattgaaagcttctcatgtgattctaatgtggtaaccaaggttgagaatgcttgctctgaagtacagattcttctttaaacaccatttgattttatcatttaattgaatcataatttgtgagcattatatttgttgactgataacttgttttatctgtccctctcagaagaatgtagrctctgtcaaggcacaaaccatttctatcttattcgcttttgtatcctcggagcctggtatagtgctggataaatgaaaataagtaatattgtttgtctttgaaaacagttcattaccaaggagaagtacaggcttcagttttcctaggcagcatttagcacttttactggaatagtaatttacttaaaatgtgagggtgatagcaatttctgtggataagtgaccacataagagagtcaagtggaggaggagatggggaggaagagaaagaacaggtcagtggcgtggagctgtgctcctgaggggagcgttctt

SEQ ID NO: 264344 - DNA, 557 bp, Homo sapiens
tttaattattagtagagtgtttacatcatatatcacaactgatgggataccatccacttgaaaatatatctgttgctgggctcagtggctcacgcttgtaaacccagcaggttgagaggccaaggctggcatatcgcttgagcccaggaattcaagaccagtctgagcaacatggggaaactccacctctgcaatgagcacaaaaattagccgggcatggtagcacgccctgggaggctgaaaatgggaggatcagttgagcctgggaggatcaattgagcctgggaggcagaggttgaagtgagctgaaattgcaccactgaactccagcctgggtaccagagggagtcgcaaaaagtaaaaataaagaaagaaagaaaaataacgagaaaagaaataggatgtgtgtaattagcaatgtaaagtcaacatatgaaatctacattttggcaatatgctaaaaaaaattgactagttaaatgattgagaagtatgtgtttcrtcatattgcatcccaaacaaatttatttgcatttttataagcttgagcacttgtg

SEQ ID NO: 264345 - DNA, 596 bp, Homo sapiens
cgcttttgcttgatagtaaatttagctaattctctatttatgaactggcatacttttgtggatcttgatttctttttcccccaacttctagttttatagactcacagatggagaggaaccagatctaaagagcctcacctgcacctggatcttatttagattttgaaattctgaattcaagcacacattgcagtgggatgagactcttaggaaccttaagaggggtgaatatattttcatgtgggagaggcatgaatcactgggaatcagggcagactgtggcagattgattctaaaaatgacctcygtaatccctgcctcctggatttaatcccttcccttgagtgtaggtgggacctgtgacttgattcaatccacagaatacagcctgcatgacagaatatgtgtgattacatgtacgtgattacattacatatgattgtaacatcaaactttccaggagactctactttgctggctttgagaaaacaaatgattctggaaagattaatatggcaaggacctaaggaactccttcagctaatacccagcaagaaacagaggcctttagtccaatggtccacaaagaaacaaat

SEQ ID NO: 264346 - DNA, 596 bp, Homo sapiens
cgcttttgcttgatagtaaatttagctaattctctatttatgaactggcatacttttgtggatcttgatttctttttcccccaacttctagttttatagactcacagatggagaggaaccagatctaaagagcctcacctgcacctggatcttatttagattttgaaattctgaattcaagcacacattgcagtgggatgagactcttaggaaccttaagaggggtgaatatattttcatgtgggagaggcatgaatcactgggaatcagggcagactgtggcagattgattctaaaaatgacctccgtaatccctgcctcctggatttaatcccttcccttgagtgtaggtgggacctgtgacttgattcaatccacagaatacagcctgcatgacagaatatgtgtgattacatgtacgtgattacattacatatgattgtaacatcaaacttyccaggagactctactttgctggctttgagaaaacaaatgattctggaaagattaatatggcaaggacctaaggaactccttcagctaatacccagcaagaaacagaggcctttagtccaatggtccacaaagaaacaaat

SEQ ID NO: 264347 - DNA, 537 bp, Homo sapiens
cagctcactgcaacctccacctcccaggttcaagcsattctcctgccttagccgcctgagtagctgggattacaggcacatgccaccacacctggctaatttttgtatttttagtagagacgggatttcaccatgttggccaggctggtctcgaactgctgacctcatgatccactcaccttggcctcccaaagtgctggggttacaggcgtgagccaccgcgcccggcctaatctctcattttctttcttggaagaggcccatcattttgctgaaggaaactcactcctcaaagaattgtttctttgattctaataacaatgaatttttcaacataccacacatcattaaaacaaataaagatgatttttctgtagacttacagaagttaaatgaggttgttaaacaattactccatgaaactaaaacaaataaaaatataaattagcaaactgacagtatctactgtgttggacactgcagaaccatctgcttgaagagatctagtaggtactttcctaataaaattataatttt

SEQ ID NO: 264348 - DNA, 621 bp, Homo sapiens
taagccatatactttagatctatacccaatcagtgtggtagctcctagccagaagtagccacttaaacttagactaattaaaataaaatttaaaaattagctcctcagttgcacaagtcatgttttaagtgatcaaaagccacatatggctagtagtattggatggtgcaaatatacaacattcctatcatcacagaaaattctactggacaacactatagataattaagttttgttttttgaaggtaagattatgataagaattcattacttattttttaacatattaattttatgtatttattttttgaatgagtaataggtttctttggttcaaaacttcaagtggtaacagggtggggggaggggggagggataggattaggagagatacctaatgttaaatgacgagttaataggtgcagcacrccaacatggcacatatatacatatgtaacaaacctacacgttgtgcacatgtaccctaaaccttaaagtagaataaaaaaaaaaaaaaggaaaaagaaattcaagtggtacgaaagggttcaaaaaaaaatccatcctctcacctttgttccttggctacccaatgccctaccccataaggaatgaagctat

SEQ ID NO: 264349 - DNA, 621 bp, Homo sapiens
taagccatatactttagatctatacccaatcagtgtggtagctcctagccagaagtagccacttaaacttagactaattaaaataaaatttaaaaattagctcctcagttgcacaagtcatgttttaagtgatcaaaagccacatatggctagtagtattggatggtgcaaatatacaacattcctatcatcacagaaaattctactggacaacactatagataattaagttttgttttttgaaggtaagattatgataagaattcattacttattttttaacatattaattttatgtatttattttttgaatgagtaataggtttctttggttcaaaacttcaagtggtaacagggtggggggaggggggagggataggattaggagagatacctaatgttaaatgacgagttaataggtgcagcacgccaacatggcacatrtatacatatgtaacaaacctacacgttgtgcacatgtaccctaaaccttaaagtagaataaaaaaaaaaaaaaggaaaaagaaattcaagtggtacgaaagggttcaaaaaaaaatccatcctctcacctttgttccttggctacccaatgccctaccccataaggaatgaagctat

SEQ ID NO: 264350 - DNA, 588 bp, Homo sapiens
cttcggctcaaatgtgtggggttttgttgctactgttgtttttatcttatccatgattaacagacttttcacagaaacaggggtgataggggatgcgtaggaacagtctccctaggcaatggtaattaaaacaggaaatagaataaaaattaaacattctaataaagcttaaaattcattttcagagggcactgggctctttataagctattaccacagaacagctggagtcttttttctgcatttaagttagtcaccacctttgttgactcttatgagtattcattaaagatagggaaacttcattaggcttaactaaataaattgaccttctctggatttgaacaagtggataattacctatggtaaattaccttcattgtatatatatctataaaaaggtaatatcaactcaggaggctgaggtgggaggatcgctgagcccaggaattcaaagctgcagtgagccatgatagcaccactgcactccagcctgggtgacagagcgagaccgtcttrtctctttacagaaacaaacaaacaaaaaacaggtactttcaaacagactttctgtggtttggggtcagg

SEQ ID NO: 264351 - DNA, 574 bp, Homo sapiens
acagggcaggcagaatctggaggggtccgtgcataggctccctatgttctccctcttgggagaggccacgccaagggagccctgtttgggagttcgaggtttttacttgaggatggttgcataggcacaaacaatcagctgtagctgatgaaattccagactcccagaaagaaggtagatgtgcagtgacacaggcgggcaaaccaactttatcagtggatcagactttctgaaggttgaatgttccaatgccagccaaaagcccaacccacaagaaaacgttctataggtaactgctacaggcctgctatggtaaggttttttttttctgaagcacagctgctgagatagggatgggaccgagcgtcagagagaaggacattcagaagtgtagaagttgattccctaaaagtagaagtgccccattttttttcctacaaawtcaaataaaaatcaagcccatctcagtcttcatcctctacatattcatccttcattctctgccttcattttctcattgaactctattccttgaaaccctgcagctactatttgtattaccattaggatattt

SEQ ID NO: 264352 - DNA, 570 bp, Homo sapiens
acaattcacatagaaatacagacaattataagagactaccatgagcaactatacaccaaaaattggataacctagaagaaatgaataatttcctagacacatgcaactaccaagattgaattataaataaatagaaaatttgaacagacaaactattagttaggagatggaattagtaataaaacaccttctatcaaataaaagctcagaacctatgacttcactgctttattataccaaacatttcaaaaaagactaacatcaatttttctcaatctcttgcaaaaaattgaagaacagagaatacttctaaattcattttaatatgccagcattaccctgataccaaagccagaaaaagacattacaggaaaaaaaatacaggccaatatctctgatgaacakagatgcaaaaatcctcatcagaatattagcaaatttaattgaacagaatatcaaaagaatcattaaccacaataaagtaggattgatctcagaaatatatgaatggttcaacatatgcaaatctataaatgtgatatgccacattaacaaattttaggacagaaa

SEQ ID NO: 264353 - DNA, 548 bp, Homo sapiens
ttttttttctcatggtctattgtatttctttattttaaatgcagtattatggatagttgagctcctaataatatttgacatttmtaaattttgtgtcgaaggctatgaagaaaataaataaaatcaaaatttatgtagtgttctaaaagtgctattactactcaaaaggtaaggtaaatttctcttcaactatcattccccttttgtgaattattgtaattagagtgtcttagtccatttgggctgccgtaacagaatagcataaattgggtgccttaaacatcagacatttatttctcacagttctggaggttggaagcatgaagtcagggttccagcatgatttgactcttgcagaaggagctctttctgtttcgtggatggctgttctctcattgtaccctcacatgttggatagcagaaaaagggagagcaagctctcttgcatgtgcccttctaagggcaataatcccactcctaagggtttcacactcatgacctaattaccccccaaaagattccatctccatataccatcacacttggaa

SEQ ID NO: 264354 - DNA, 548 bp, Homo sapiens
ttttttttctcatggtctattgtatttctttattttaaatgcagtattatggatagttgagctcctaataatatttgacatttataaattttgtgtcgaaggctatgaagaaaataaataaaatcaaaatttatgtagtgttctaaaagtgctattactactcaaaaggtaaggtaaatttctcttcaactatcattccccttttgtgaattattgtaattagagtgtcttagtccatttgggctgccgtaacagaatagcataaattgggtgccttaaacatcagacatttatttctcacagttctggaggttggaagcatgaagtcagggttccagcatgatttgactcttgcrgaaggagctctttctgtttcgtggatggctgttctctcattgtaccctcacatgttggatagcagaaaaagggagagcaagctctcttgcatgtgcccttctaagggcaataatcccactcctaagggtttcacactcatgacctaattaccccccaaaagattccatctccatataccatcacacttggaa

SEQ ID NO: 264355 - DNA, 488 bp, Homo sapiens
agtttgtaattatatctttttaagtgtgattgttaawgtcaatttattccactagactctcagctttatgagagcatccactttatttagacttgctcaccatcacattcgtaacattgagcacatattgaacacagtgggtactatttgctgaataaatgaaaagtaataaatataaatgtttatgtactataaattctctcaaaatatttaatacctcaatgtgattttttttaattctaagataatatttagtgccttctgagtttatatgactttcattttgtctcgtttcatcaaagggctgctagggattaatgtctactgtaccagacctaagaaaaatctggtctccatatttgacattttattcctaaattaagtcagattcttagagaaccacatactcagattacagtatattgacatttgtattagtctgttctctcattgctgtaaggaaataccagagactgggtaatttataa

SEQ ID NO: 264356 - DNA, 488 bp, Homo sapiens
agtttgtaattatatctttttaagtgtgattgttaatgtcaatttattccactagactctcagctttatgagagcatccactttatttagacttgctcaccatcacattcgtaacattgagcacatattgaacacagtgggtactatttgctgaataaatgaaaagtaataaatataaatgtttatgtactataaattctctcaaaatatttaatacctcaatgtgattttttttaattctaagataatatttagtgccttctgagtttatatgactttcattttgtctygtttcatcaaagggctgctagggattaatgtctactgtaccagacctaagaaaaatctggtctccatatttgacattttattcctaaattaagtcagattcttagagaaccacatactcagattacagtatattgacatttgtattagtctgttctctcattgctgtaaggaaataccagagactgggtaatttataa

SEQ ID NO: 264357 - DNA, 641 bp, Homo sapiens
gttgtctatttatcacccaaacaactacatagaacattttcattttaaaggcagatcagtagacagagtcaaaatgcagggacaaaatttgcacacaatattcaagtgtttaaaaatatgtttacttttgcattttattactaattttatctgcaaaatacgaattactgttagtgagtaaaaaacaaaatacccactttgtctaggattaatgaaagttatattaattgtttcctgatacgtatgtttgctgacaaaaagtctaactttctgggagggagttgagcctttatttttcttaggatttgatttgttagttaaataggatgattcaagttttacttatgttttataagctcttaggaatcactttataaacagcacctctttccaattttctatatccttttcttctggaactcatattaaatccaatttggagaggtttagtcttgcttctttatcygttaacgatttcttctttgtgctaaattgtatgtgatttccttattaactatattccaatacaataattctgttgttagttttatcttagaaattgttcaatttttctattgatgtatttatttcaataacacatttttcatttctgtaagtttttgacagtttgcacatgtaga

SEQ ID NO: 264358 - DNA, 609 bp, Homo sapiens
acttccactaaaccaaaaataagaataaagatgctaaaagtatgtaattaccctgagtggcaaatgagtttggatagctatctaaaatctataggttaactgaaaaacagtgtttctttatgagcatgatatggccttgagttaacgaaccacagtatccatgatatgcatttgtactataggttaaattttaaatgaagcttaaacaaataaggactccacatatcgccccaagcaaaactaaattgttattaggttttacacagcaggaggtaaacattcttgaaataattgaacgtgataggatattattcttactttttttttgaaagtcttacacaagacatatctcatttcctctaaattggttctgtagactgaaaaaggacaatgatctgatttgtgggatggaacagagccacctctttgtaaaggatattaattatcataataaaatactattgaagtagaggcagaggaaattacaawggatttttaacttgataaaggtagaacttactcttttgaattattcatgaatattaacttaatcagtaaatgttataatgcatgtaccaataagaaaaacattttaaattaaaaaatata

SEQ ID NO: 264359 - DNA, 508 bp, Homo sapiens
agcaggattgtggagcaccattgaggcaaagggacccactcagggaaagagtcatggtagggatcaaatccacagaaggccatgtagaattcagttcagtcctaggcagcttagtattaacagttaatatggagaacccagccatctttacttgagaatatttagagatgtcttcaaagatttaggatgctaaaagtggaaaaaaattattagataaacctrtaagagcaagaaataaacaaacaaaaacaaaaatgctgaaaggaaaggatgcaggaaacaaccagtgagaaaacagtgacaacaggaatcagacagggaacaaggctgtggtggtggtggtggtggtggtggtggtggtggtggtgctggtggtggtagttagctattctggggaaaggaagcagatattacattagtacaaaagacacagacaaaagattaacctcataggaggcactgacttttcccagaattactcattaggactgtccctccattagattag

SEQ ID NO: 264360 - DNA, 595 bp, Homo sapiens
tgctcatagtagccactaatgatcctttgaattcctgtggtatcagttttaatgtctcatttttcaactctgattttatttatttctgtcttctctcttttttctttcttagtctaccgaaaggtttgtcaattttgttttctttcaaaaaaatcagctttttgttttgttgaccttttgtattattttcttcatttcaaattcatttacttctgctctaatctttgtcagttcttttcctctaataattctgggttcaatttgctcttctttttctagttctttaagatgcattcttaggttatttattggacgttttacttcttttctgatacaggccattatagctataaatctccctcttartactgcttttgctgtatctcataggtttggatatgttgtgttttcattatcactcgtttcaagaaatttttcaattattttttactttgttattgacccactagtcattcaggctcatattgtttaatttccatgtgttagtatagttcccaaaattcctctagctgtttatatctagttttattccattgtggtcagaagatgcttgataaaatttcaatatttttgt

SEQ ID NO: 264361 - DNA, 595 bp, Homo sapiens
tgctcatagtagccactaatgatcctttgaattcctgtggtatcagttttaatgtctcatttttcaactctgattttatttatttctgtcttctctcttttttctttcttagtctaccgaaaggtttgtcaattttgttttctttcaaaaaaatcagctttttgttttgttgaccttttgtattattttcttcatttcaaattcatttacttctgctctaatctttgtcagttcttttcctctaataattctgggttcaatttgctcttctttttctagttctttaagatgcattcttaggttatttattggacgttttacttcttttctgatacaggccattatagctataaatctccctcttagtactgcttttgctgtatctcataggtttggatatgttgtgttttcattatcactcgtttcaagaaatttttcaattattttttactttgttattgacccactagtcattcaggctcatattgtttaatttccatgtgttagtatagttcccaaaattcctctagctgttkatatctagttttattccattgtggtcagaagatgcttgataaaatttcaatatttttgt

SEQ ID NO: 264362 - DNA, 576 bp, Homo sapiens
aggagcctcatcagttaagtggaactgataaactcacaaacctgttattcgttcgttcatycattcattcattcattgagcaactgtttactgactgatgaccatgccaggctctgctgcaagggctgagggtgtagcagtgaataatacaaataaaaactcctgccatcgtgcagcctacactctagtgagcattaaatgcgacaacacatagaagcatacaaccaagtacctgacacatggtatttcttcaacaatctgaattggaacaggctgcagaagacaggaacataccggtgtttctcaggcactccgggttctggttaaaagcatctgtgtgtacagggaagtgaaatttcaaacagacccttggcattcataagggttatatcccagggcctgtgagagtctccagattcacaaccaccattactgcatatagcttttcccagcctttaactcatccccctaaagtttctccaattttttattaaaaactgtcattttctaagttatccttcactttctgttcccttctaccacctaccacgagatgtcagttgactttcttatggg

SEQ ID NO: 264363 - DNA, 576 bp, Homo sapiens
aggagcctcatcagttaagtggaactgataaactcacaaacctgttattcgttcgttcatccattcattcattcattgagcaactgtttactgactgatgaccatgccaggctctgctgcaagggctgagggtgtagcagtgaataatacaaataaaaactcctgccatcgtgcagcctacactctagtgagcattaaatgcgacaacacatagaagcatacaaccaagtacctgacacatggtatttcttcaacaatctgaattggaacaggctgcagaagacaggaacataccggtgtttctcaggcactccgggttctggttaaaagcatctgtgtgtacagggaagtgaaatttcaaacagacccttggcattcataagggttatatcccagggcctgtgagagtctccagattcacaaccaccattactgcatatagcttttcccagcctttaactcatccccctaaagtttctccaatttttyattaaaaactgtcattttctaagttatccttcactttctgttcccttctaccacctaccacgagatgtcagttgactttcttatggg

SEQ ID NO: 264364 - DNA, 611 bp, Homo sapiens
gggtatttaggaatggagtgagtaaggatcagaaatgtgtgttgcatagattcagattcaaaactgctgcttcagagcaactatgtccaaatgttctttcccatgttttcctcccctgacggctaaaccaaagtagaaggatagttttgtgttgatgagcaagcccttttgccagcagaatctgggaaaaacaaacaaatggcaatagagatttcactgtctacctaaatcatttttacctaaatgatgaaattaggtaaatgaaayttacctaaatcacaaaacatgtgactccttaaaaagaaaacaggaaggccagatttttctccatgcctttgccccgtggtagaaggaaagctaagttttgcagagtcttaatggacttagccataaactttcctaagagctatgttctatgttctatgaaacctttcagattggggaataagttagactccgttagtaaaatggaatgagccccacttagaaataacatgatcatatagtggtctcatcagcaagctttgtggttgcactatggcttcctggctgagtaaaatttggcagtggctgtgactaggaaggttgtggggagtagggacaaaaatgaa

SEQ ID NO: 264365 - DNA, 584 bp, Homo sapiens
ctgtcacattttgatgattctcacaatatttccaacttttcactattatatctattatggtgatctgtgatcagtgatcttcgatgttactattgtaattgttttggggtgccatgaactatgcccttgtaagacagcaaacttaatgttgcatgtgttctcaccattccaccaactgttcctccatctccctccttctcctcaggcsttcctattccctgagacataacagtattgaagttaggtcagttaatttccctacagtggcctccaagtgttcaagtgaaaggaagagtcacacatctcccactttaaatcaaaagctggaaatgattaagcttagtaaggaaggcatgttgaaagctaagacaggccaaaggctaggccccttgcactaaacagccaagctatgcaaagaaaaagttattaaaggacattaaaagggctgcctcagtgagcatatgaatgataagaaagcaaaacaccctcattactgaaatggggacagtgcgagtggtctggataaaaggtcaaaccagccacaacattctcataagccacaatctaatctagagcagggctct

SEQ ID NO: 264366 - DNA, 551 bp, Homo sapiens
cctatgatttaggtagtggagtccaccagtaacatctttacccatataatctcctggacatgaaaacaatggctaagctaaagggaactattaatccaacactggtatttactttcctggacaaaggaatcartgtccttctgcaggaccaaggaagaaaagttactgcttcttcctgtctcacagatgaactaagatcaaaattataaatatcttgggtgctaattggtgttcctctattacccattagccctaaaatattgttaaccataaggtaatttttcaatgagttttacttggtaaatctgaattaagggaaggaaaggtttcaaaaaaatctcctcccttacctccctagaggtgcgcagagggaaagtgtcacaacgtgaaggccactgatggaaactgaagttcggcctgttattccacaggtgaatctagacttcattcagacaggctacttacttcttggtgactaaacaaagtcaattttaagtagtaaccccaaatcacccacataagatgtagccattccaattacatatctaaag

SEQ ID NO: 264367 - DNA, 551 bp, Homo sapiens
cctatgatttaggtagtggagtccaccagtaacatctttacccatataatctcctggacatgaaaacaatggctaagctaaagggaactattaatccaacactggtatttactttcctggacaaaggaatcagtgtccttctgcaggaccaaggaagaaaagttactgcttcttcctgtctcacagatgaactaagatcaaaattataaatatcttgggtgctaattggtgttcctctattacccattagccctaaaatattgttaaccataaggtaatttttcaatgagttttacttggtaaatctgaattaagggaaggaaaggtttcaaaaaaatctcctcccttacctccctagaggtgcgcagagggaaagtgtcacaacgtgarggccactgatggaaactgaagttcggcctgttattccacaggtgaatctagacttcattcagacaggctacttacttcttggtgactaaacaaagtcaattttaagtagtaaccccaaatcacccacataagatgtagccattccaattacatatctaaag

SEQ ID NO: 264368 - DNA, 513 bp, Homo sapiens
gcagtgaaggttgccagaagttatcagattctgggtctgttttgaaggtagagcccttggaatttccaaattgggaatgagagaaaagagaggagtcaaaaatgattccaggaattttgcctgagtacatggaagaatggcctttttagcaattgaggaagactgtggatacatcagatttggccaaggttggagtgaggttrttgaggggaagatcaggagatcactttcagacgtgttgaaatttagttgcctattcaatagaaaagtgaaaatgttgaatggacaattgcatataagattcagagttcaagggagaggtctggtgtagacatatgaatttgggagtaatcgacacatttaaggactgtgagactagatgagataagtaaaggattgaggaagagacagaagagttcctcagtactaagaggtcaggtagaagaagaggaacagcaaatgagactgagagggagaaaccaacgagacagtaggaaagccaacagaatgttg

SEQ ID NO: 264369 - DNA, 513 bp, Homo sapiens
gcagtgaaggttgccagaagttatcagattctgggtctgttttgaaggtagagcccttggaatttccaaattgggaatgagagaaaagagaggagtcaaaaatgattccaggaattttgcctgagtacatggaagaatggcctttttagcaattgaggaagactgtggatacatcagatttggccaaggttggagtgaggttgttgaggggaagatcaggagatcactttcagacgtgttgaaatttagttgcctattcaatagaaaagtgaaaatgttgaatggrcaattgcatataagattcagagttcaagggagaggtctggtgtagacatatgaatttgggagtaatcgacacatttaaggactgtgagactagatgagataagtaaaggattgaggaagagacagaagagttcctcagtactaagaggtcaggtagaagaagaggaacagcaaatgagactgagagggagaaaccaacgagacagtaggaaagccaacagaatgttg

SEQ ID NO: 264370 - DNA, 562 bp, Homo sapiens
ataatctgaacttttggccaatccccttcttgaaactggcagtgtcrtctgggcagacatttgccactcctgtcactcaatgacactgtgtcaggagaaagggagagagcagttaacatccaggaagaaacctgaatcacacaatcccagaggggctagccactggacagtctgaggaaaacattgctcacctcttcaggaaatgcagagaacaatttagaatgaagccaatattggtcacccactattatctacagtaagttgcaactggctaaagtcttctgtaaagatctagttaaaagaacagggaaatgagctttaagaaaagttgtgggataaacaacttttttttttttgagacagcgtctcaccctgtcaccaggctggactgcaatggtgtgatctcggctcactgcaacctctgcctcccaggttacagcaattctcctgcctcagcctcccgagtagctgggattacaggcacccgccaccacgcccagctaatttttgtatttttagtagagacggggtttcaccatgttggccaggatggtctccaatt

SEQ ID NO: 264371 - DNA, 580 bp, Homo sapiens
gatcctttggaggagaagagacattctggtttttggaattttttagsctttttgtgctgttttccccatcttcgtggatttatctaccttcgatctttgatgttggtgacctttggatggagcttttgcatgggtgtcgtttttgttgatgttgatgctattgctttctgtttgttagttttccttctaacagtcaggtccctctgctgcaggtctgctggagtttgctggaggtccactccagaccctgtttgcctgggtatcaccagcggaggctgcagaacagcaaagattgctgctttctccttcctctggaagctttgtctcagaggggaacctgacagatgccagctggagctctcctctatgaggtgtctgtcgacccctgctgggaggtttctccccatcaggaggcacggggctcagggacccacttgaggaggcagtctgtcccttagcagagcttgagtgctgtgctgggagatccgctgctatgttcagagccggcaggcaggaacttttaagtctgctaaagctgcgcccacagccgccccttcccccaggtgctctgtcccaggga

SEQ ID NO: 264372 - DNA, 580 bp, Homo sapiens
gatcctttggaggagaagagacattctggtttttggaattttttagcctttttgtgctgttttccccatcttcgtggatttatctaccttcgatctttgatgttggtgacctttggatggagcttttgcatgggtgtcgtttttgttgatgttgatgctattrctttctgtttgttagttttccttctaacagtcaggtccctctgctgcaggtctgctggagtttgctggaggtccactccagaccctgtttgcctgggtatcaccagcggaggctgcagaacagcaaagattgctgctttctccttcctctggaagctttgtctcagaggggaacctgacagatgccagctggagctctcctctatgaggtgtctgtcgacccctgctgggaggtttctccccatcaggaggcacggggctcagggacccacttgaggaggcagtctgtcccttagcagagcttgagtgctgtgctgggagatccgctgctatgttcagagccggcaggcaggaacttttaagtctgctaaagctgcgcccacagccgccccttcccccaggtgctctgtcccaggga

SEQ ID NO: 264373 - DNA, 568 bp, Homo sapiens
gctatttatatttctgtgggatcagtggtaacatactctatgttgtttctaattgtatttatttggatcttgtttcttttcttccttattagtctcgctagtggcctatcttattaatttctttaaaaaaccarctcctggatttattgatctttcacatgattttcctgttttgatcttcttcagcatagctctgattggggttatttcttgtcttgtgctagctttggggttagtttgcttttgcttctctatttcttttagttgtgatattaggctattaatttgaaaattttctaactttttgatatgggcacataaacaatacttctaagcacattttaataattgtatattaaattaaaccaaaaaaattaagagagatgatagacagatacagattctgcaatatatccactgcggatatcccagtggatgaaaaaagttttgcctctcattcttgagtatgaagacagataatatccaagtaaatatataagttaataatacatacataattcaaaatctctgttactggacatataagctgctgctcattctttgttat

SEQ ID NO: 264374 - DNA, 588 bp, Homo sapiens
ttgatataagataagtgaaacctctcaaattagtcagataaagatgggcttggtgttgtgacaattggataaccatttgggtaaaaaagttatcttcagtaaactcacaatgtaggagagaagacattcattaaagwatataattgccataagtatagtaactgcaataaaagagagatagtctaggtacatggaggcacaaaggaattagtaatcagttatggtcttagacacagtgctggcagagagtaggttattattagaaagatgacctttaatgggatccattccgagtctgagaatctatcattaatttcctctgacccgttgttacctttaacagtgaaaacaaggtgatatcagttgtccttacttcatctaaaaatccagtacaagtccaacagttacacaagatggagttgagtggaacacagaaggcatgctgggccagaagtggacaagatgatgaaggatcttgtttgctctaagacacacatatttaaacagttttaacatctctgaaataagaatgataggcgagaaggaagtagagctccttcagagagaatctgcccatcactatgggca

SEQ ID NO: 264375 - DNA, 495 bp, Homo sapiens
tcttgaggggaaactcggaatgttcttgtcataagctcatgggtcagatataactcagaaaaacgaccattgaactccgagtttcagcctaaggtgggcgttctaaggacagcattcagctaagtagtgactcatttccacttggtttggcttgtgggagtaacaagacatcactcccttgactgtagacaggaggtrtaaatggctcaagcaccctccccaatttgcagactcaagggtccattctaaagccagaaagcatggcaaaccaaaatatgcccagtattattcactggcttcctagttcttgctatatttttgagccccagtttgagtgactaatagcatatggattttcgataaaaaatacacctaaaagcagttcataaattcaggcatatttggaaagaatttaaacaatatgtattttctcaggctagacacgaaatagatctgtttgtttgccaagcagggttttggttggtaaactcaaac

SEQ ID NO: 264376 - DNA, 595 bp, Homo sapiens
aacaattgaatattacccaatagatttatttagaaaatacaagaacagctcaatattagagaacttaataatataatctagaacattaatttattttagaattaaataatggatttgagggaaatatatgatcacaaataaagatgcttaaagaagcaattgtacaaaatccaatgctcattcctgatttaagaaaaaayagtatgttaagaataggaaaaactgttattttctttttataactgtcttttttttgaagatgtaatatataaatatggcctaaaattctaaagatataaaagggtaaaccgtggaaagtaagtttcttccaccctattggcaggttagttactcagtttacacaatctgtagcttcctaatcacatgattctgcagcttcctgctttcacctattaatatatctgggtaaccaaaacatatcagtgtatataaaatgaccgcatttttaaatggctgtaatagttcagtgtttggaagagcaagaatttatttaatcagtcttctaagagtagggttatttttttgcattattttttgctagttcacataagacttaagtaaatatctttgaaat

SEQ ID NO: 264377 - DNA, 581 bp, Homo sapiens
tcagtttacacaatctgtagcttcctaatcacatgattctgcagcttcctgctttcacctattaatatatctgggtaaccaaaacatatcagtgtatataaaatgaccgcatttttaaatggctgtaatagttcagtgtttggaagagcaagaatttatttaatcagtcttctaagagtagggttatttttttgcattattttttgctagttcacrtaagacttaagtaaatatctttgaaatgagtatttgtgcacttggatgacctttctaaatgtaagattggtaacccaaaaacttaggaacacttctacttttgagagattttaccaaatttttcttcttgatgttattgtactaatttgtaattcttccatcaataaatgatactggacttctgaattttcttggtaacgtggctaactaggtttccttacccgcactctcaacaaaaaactatataaaatggtagataaaatatcagaaaacattttaaatgcactggtaaactaacaaggaagcaagagggaatatctctcctttttgttaatcataattttttacctaaattcaaattaccc

SEQ ID NO: 264378 - DNA, 591 bp, Homo sapiens
tagatctggcattcaaggacttgcttaaggaggactggggccagaatcctaactggggccaagtgaatggcaccggtcgacaggcttaaagaagggcaggagcaacaagacaaggtcattatatttactcttaccttctattaatcttcaattatttccatttttgctcaactaattttctggaaatatcagtaaggcctagaatggtaatacagccagtatatctaaagatgggaggcaaagtgtcaccagttgggttctctagaagcagacacttgagatggagtttgagtttccaagatttattgggattccaagggaggacgtaggattgaacagagggagaagtcaaactgcagcacatccctgacaaaamcttagccaatgtgaaggggagctctggaggaaatattgttgatcataattgttcatgtcaggtcaaagtggccaagcttctatacccctgtcttgctctgtcaccatatgcagcctatcctataaaggtatgacctcagaaaacttggctctctatagatgagcccaacccttcaggagttgatggcaggaagtttatgctgaccacctcacaac

SEQ ID NO: 264379 - DNA, 598 bp, Homo sapiens
tcaggcatatttggaaagaatttaaacaatatgtattttctcaggctagacacgaaatagatctgtttgtttgccaagcagggttttggttggtaaactcaaacattgcttccattgacataaagcaagatgcaacaaaactatgaacattatccataataccatgttttcccagttgccagcacatgtctatgttaagatgtaccctgagatacaggaggcctttctaggacaagaattctaagacagaatcagcctttggcaagggtgtgatgacaccacacatgatcttcaggctccccgcccctcatctgtctgtctttttctgagmactttcctcctcatggatgctcattgccccaggtcctcatgtgctctcacatctctaaaatatgccagtaggaaagagatgtgctaaggcatgatcaggaaggcttcgtctgcaacctcttctgaattatttatattttaccctgggaatcaacttctctctccaccttaaaaacaaatcaaacaaaacattgtctgtttgctggtggtttggcaatccctagacttttggattttataaatgagtaaattttatataaaggattcc

SEQ ID NO: 264380 - DNA, 491 bp, Homo sapiens
ggttggacatgatcctccatacaggtcacagttctagtaaaacagtgacrggtgtgctgggggtcagtttgcttgcatcctctcgtcctactcattctggtcccagatatacaagttccatgttacaaaaaattatcgttgagaccacccgacctatggcctggtgggtccgacagggcacaattcatgaggagcagttccagccttgtagtcatatggtggctcatggtcaagcagtctgtctttaccagagcttagtggcacaacagaagttgctttttgaaagacatataattttctgctatagatgacatagctttgctccagaaatccaggggctgtgttatgattctcctactggagcttgtcacaaactccacagagcatcttttcctatcaccaatatctccatctccaacatcatagggtctgctgaactgtcgagctgaaaggtgcagcgcccttttcagctctggggcctattaaatcta

SEQ ID NO: 264381 - DNA, 491 bp, Homo sapiens
ggttggacatgatcctccatacaggtcacagttctagtaaaacagtgacgggtgtgctgggggtcagtttgcttgcatcctctcgtcctactcattctggtcccagatatacaagttccatgttacaaaaaattatcgttgagaccacccgacctatggcctggtgggtccgacagggcacaattcatgaggagcagttccagccttgtagtcatatggtggcycatggtcaagcagtctgtctttaccagagcttagtggcacaacagaagttgctttttgaaagacatataattttctgctatagatgacatagctttgctccagaaatccaggggctgtgttatgattctcctactggagcttgtcacaaactccacagagcatcttttcctatcaccaatatctccatctccaacatcatagggtctgctgaactgtcgagctgaaaggtgcagcgcccttttcagctctggggcctattaaatcta

SEQ ID NO: 264382 - DNA, 542 bp, Homo sapiens
tctggaaactaggaagtgaacataactttttattggagcaatcaccttcagccttctaattatccatctttgatttatgctgctagtacaagctaagtagtacctttgtcagatgtccattcgtttaacctcttaggacaccatattcaattcaccatctccataaccctctgtggagcacgtcctcttggcttccactctaaccttactggttgttgcaatgactgtaattcccccatattttggagactaagcacctcaacctgactacagctcttttacggtcctatcatccccattgccatcrgtgagtcaaattttataacatcttttatcatcggctccagcctataggggatagctaccactgaacatcttagtgatgccaaaggccctctcaccaatgcatttctttttttttttttttaacttttgttttaggttcagggatacatgtgcaggtttgttatacaggtaaatcgtgtgttgcaaggggttggtgtacagattatttcatcacccaggttaaaagcatagtactt

SEQ ID NO: 264383 - DNA, 356 bp, Homo sapiens
atttctttttttttttttttaacttttgttttaggttcagggatacatgtgcaggtttgttatacaggtaaatcgtgtgttgcaaggggttggtgtacagattatttcatcacccaggttaaaagcatagtacttgactggtagytttttaatcctcaccctcctcccaccctccaccctcaggtaggcccctcaccagcacatttcttttgctgttcttaaatgatgtggcctcatttaagaagaccaaaaagaatatgctggaacatagccatttggctagccttccagctgtgcaaagtatacctattctagcatgcccactttcctgagctgtttaatccctttatccacca

SEQ ID NO: 264384 - DNA, 513 bp, Homo sapiens
tgggtggttcatgcccaggtctactgcacaaagattttcagttactactcgtcaatatccatgttccctttttttcataatactaaaaccataatttttacttgagcagagtaatcgctaagaataaacactatgttttccagcctcccttgcaggagtcatggccatgtggccaagctctaatcaatgaattgtgggcagatgtttcacataacattcccaggaacctaatcttcctaaatagatgactgctacttatcctttatccttttcttcatcccttcctcattaatgaccagaatgcaacatgatgtcagagtctgctatagccctcctgggacatgaggtgattgtgcaaataaggccacatgtgtgaccaacaggatggaggtggccaggtctctgaggactttgtgaagcagagctacrtaccttcccttgattccctgtctctggaccctcaagagacacaaataaattctgtcttatttggatcattgctattttgggtct

SEQ ID NO: 264385 - DNA, 435 bp, Homo sapiens
cagaagccacctttcgcttgcaatgtcctggctttcagatgctgctctggtaacagcctcttcccctagattgttaagattttcttcaccagtggtggagtcccaggatgtcctttctaggcacgcatgagaataagcaaaatatttagtcttcactttcttttttctcttttgtttgtttcttttttttttccttttttgccagcgatatgactatttttcatctactacaaattctttaagttctgatgcctaaatttgattttctgttttacggtagcatttgtaattaagtttcaaactttgartcagcttccagatgcaaacctaccactcatcttttgtgtgatcttgaaaaaacaatttgccctccctgagactcagtttcctcatctgttaaatgagtgccagttttagccgatcatctgcaactta

SEQ ID NO: 264386 - DNA, 600 bp, Homo sapiens
atgcttcaaatatctggctctgatttctcctgccacatttctctgacttccattttggccttcctcttgtgccaccagccaaagaaagttctctgcttttagggactcatatgattaaattagactcaattagataatccaggataatctcccctattttaaggtccattgattgataaccttaattatgtttcaccccatggcataacaccagagtctgaaagccaggggccaacattctgctcaccacacccttccatgcctggattcctgtgactcttagcccagggaacccaggttgagccttatttgctaataaccatttccttcttgactttctccatgaaaacaaggacaatgtttgtcttgtgcatcactatatccctgcaccaacacaatgcccagcacatagtagatactcaacaaacaccttctggctgaatggctgactgatcctaacaatcatcatcagtaatctaccaactgtcatttgcttttggtgactgagagaaaaaaaataatttacctccatmcatcaacttttgcatcttctccctttcccatagtagaatgaacagatttatttcttcaaaaaaatca

SEQ ID NO: 264387 - DNA, 583 bp, Homo sapiens
tgcactaagggctggggctatggaaattattaaggtacaatttttgtcctcagatatgtgtaattatttataaatggtatacagtcatgcattgaataacaacgttttggttaatgatgaactgcacttatgatggtaggccctagagataataatagagctgaaaaacttttattgcctagtgacattgcagccatcataacatcatagcataatgcattacttgcgtgtttatggtgatactggtgtaaacaaagctactgcactgccagtcatataasagtatacagcacataacgattatatacaaacaatacatactacttgatagtgaaaataaatgactatgttactactcttacatatttactatactatgctttttattgttggggtgtactccttctacttactacaaatagttcactgtaaaacagccccaggcaggtacttcaggaggaattccagaaggctatattgttatcacaggaaatgacagctccatgagtgttattgctcctgaagaccttccagtgggacaagatgtggaagtgaaagacaatgatattgattattctgaccc

SEQ ID NO: 264388 - DNA, 605 bp, Homo sapiens
aaagaagacaagaggtaaataaagacaaaatgttaacaatagtatctcttacaggaatctatgctttgttggcttgaggaatatttttccttttatttatttattattagaacttgcttttttagaacagttttacgttcacagcaaaactgagaggaaggtagacatattttccatatacactgtgctcctatatcctacacattaagagcctctcccattatcaacatcccccacagagtggtacatttcttgctattgacaaaccttcattgacacatcattatcatccacagtgcatagtttactttagggtttactcttggtgttgtgcactctatgagtctggacacatgtataatgacaaatgtgtaatatatccaccatcatagcatcatacagtggtttcactgccctaaaaaccccctgtgctccacctattcatccctcctttgggtttttttgtaaattttttattctctcacttttatattaccrtttatattacttttgtgaaaataaaaaaataaacatagtaacttaaagaaaacctttgtgaaagaaaatgcaggttggagtcttagttgtcctcatgactcaaaaac

SEQ ID NO: 264389 - DNA, 620 bp, Homo sapiens
aatcataaatgaagcatcaacaccaagattttacgcatggaaggtrataacacacaaaaatatgtgtgagacatatggaaagatttggttctttccaaatcaacctagaaggcttggacatggagatagtgtgtttagaagcttttaaaagaacaatgtcaaagcatgtccactttggagaagagttgagttggagcacttccaccacagaggtgcctaagaagtgacaactcaacgaaacaagcaattttgtatcaaaactactttggcagccacagcagattgtcttcagaattaccagattgtcttcaagcattaaaattttttaatgtaagtagaacctgaagacaattctatctttctacaaattccagaaataactcatcttcctcccaaactgttcttcatcttgagtttcctaatggtaccaccattcaccagtcactcaagtcagaaatctgggagattactcttgctctctcaaccttcatatccaacccacaatctacatcctgtagatttcatcttctaaacacgttgtccatttattctctcccctccatctccattggcaatgtgtgatcccagagcctcatctctctcttgcctctccctgccac

SEQ ID NO: 264390 - DNA, 477 bp, Homo sapiens
tcttatctgcagagttataaaaactcctccaacagggatcaccattctgttgctggagttgaaatggtaacagattacatgaatctgcataccatcatcaaactaatctctaaatcatagcaccaactgtgccacttaatgattcactcgctgtccacccaattcagcaccttacacagtataacctcaacctgcttttccatctttatctcctacaccaaatmctccaaacaattaaattcttccctgcgtcctgtaaagtccctgattcacacctttgctcacagtcttccagccttccagccatctgaagttccccccaacccccagtcacatcacacctgaagtccctggtgggtggcagtgaaagggggctgcccaattaaaaaaaataggtctcccctctgttttccttcttgccaagctgtacaaggactttagtaaaatgttgtttgtgattatattatgctttgggag

SEQ ID NO: 264391 - DNA, 563 bp, Homo sapiens
gaaatggtaacagattacatgaatctgcataccatcatcaaactaatctctaaatcatagcaccaactgtgccacttaatgattcactcgctgtccacccaattcagcaccttacacagtataacctcaacctgcttttccatctttatctcctacaccaaatcctccaaacaattaaattcttccctgcgtcctgtaaagtccctgattcacacctttgctcacagtcttccagccttccagccatctgaagttccccccaacycccagtcacatcacacctgaagtccctggtgggtggcagtgaaagggggctgcccaattaaaaaaaataggtctcccctctgttttccttcttgccaagctgtacaaggactttagtaaaatgttgtttgtgattatattatgctttgggagataaagaggcccattgtgtgggctaattatcgtgaacaaacataggagcaaatgtagcacgctttcactgggcatcaagtacttacatgagaatactttcagtgtcttaccaaacttactaaggaatataaagaagtggagccaat

SEQ ID NO: 264392 - DNA, 557 bp, Homo sapiens
aacagatttcctcagcccttaactcttctagataaccccagcaaatagcttcattgaccctaccttctccttcttccagggagcttagcacttggactacagtatataagagctacaaacatgctaattcagtcccctcgaatctgcctttccacacacagtctggatgcttcttaggatgagacatatttgaaagcacatttgaagaataatgttttccagttaggatatagaatgacatctgcacatcacacctaactgcccagagttatggaggcttaaccagtccacagccatctgctctgcctttcactatacaaggggcaactgaagtagaggaatatgggcaacagggagagacaggagccagtgcaagcrgtcggaaaaagtagtgtgttcctacagtgacagaggaaagcagtgacagaggaaagcacctgaacagaggaggacagggaaggcttctccaagaagcaggtgcctcagctgagctctgacggagagactgggtctcctggggacatgccttcagcccagatatgggcaagatatggctg

SEQ ID NO: 264393 - DNA, 619 bp, Homo sapiens
atcgatagccattcttctttccttcttagatttggcatccccccaaaatcctgcccctgaagcctcctcacatgtgtacatctaatgacaaagcaccaaatgaacccataaataattcaatctaaagccaaagacaattctgaatgatttgcctcaacagaattaactgaatttgtcaaatgctctgatgttctataagcataattgcacttcataatttgttgccacacagtcactaggagacagaagtgctgaattaattgtaccattttgtgacctcttgactttttacattaagaccaagtttatttctcaacatgggaagattcatttatttgtatagaataatttcaataataaayccagagcataagtgagcggtgtgcacaaacagccgctgtcaaatggctttgtgatcacaccatagttcagcttaaaggcaatttgtgtcaaatgcattaatggaggatgtgatgagtgtttgatttgttttggctttgtggccaaatagcatcatttctcaaggatttggatatgtgtttgtgactaggtgaaactagtaagtcatgttcacctggagggtcatttatggggtctggatgcactctgggaagagaca

SEQ ID NO: 264394 - DNA, 608 bp, Homo sapiens
tttttttccattgatgatcttgagtatgaatgctagttaatcctaagacattacactgtgataaaatttatgttatttctacttataaattctatttagctagtttgttccaatgaattattaattaaaatgatatataagtagtaatatggctttaaaagtgattaaaatatacattaccaagaaattaatcatttgaaaattactatatcagacgttcttaagaaacttgggacagattcgcaatcagtacagtgttctttcttatttcccctgaaaaatgggaaaattaagctaaatatctggtacacggaaaagatctgacattaccattacccagaggtttctgggaatggtagggcagcatccagcaacagcagcctggagggtggagaacacacaaatrtttagggggaggacaggatgctggcaccagggagcctcagaataagcagcaagccgttaaatctcaggcttgaaaaacggtgccttttgatgagccatgctctgaccgagaaatatctttcctcttttaaaatgtagagtttcatgtctgatgagcaaatttgcatgtatgtactcagaagccagaaggaaatatggaaaca

SEQ ID NO: 264395 - DNA, 608 bp, Homo sapiens
tttttttccattgatgatcttgagtatgaatgctagttaatcctaagacattacactgtgataaaatttatgttatttctacttataaattctatttagctagtttgttccaatgaattattaattaaaatgatatataagtagtaatatggctttaaaagtgattaaaatatacattaccaagaaattaatcatttgaaaattactatatcagacgttcttaagaaacttgggacagattcgcaatcagtacagtgttctttcttatttcccctgaaaaatgggaaaattaagctaaatatctggtacacggaaaagatctgacattaccattacccagaggtttctgggaatggtagggcagcatccagcaacagcagcctggagggtggagaacacacaaatatttagggggaggacaggatgctggcacyagggagcctcagaataagcagcaagccgttaaatctcaggcttgaaaaacggtgccttttgatgagccatgctctgaccgagaaatatctttcctcttttaaaatgtagagtttcatgtctgatgagcaaatttgcatgtatgtactcagaagccagaaggaaatatggaaaca

SEQ ID NO: 264396 - DNA, 608 bp, Homo sapiens
tttttttccattgatgatcttgagtatgaatgctagttaatcctaagacattacactgtgataaaatttatgttatttctacttataaattctatttagctagtttgttccaatgaattattaattaaaatgatatataagtagtaatatggctttaaaagtgattaaaatatacattaccaagaaattaatcatttgaaaattactatatcagacgttcttaagaaacttgggacagattcgcaatcagtacagtgttctttcttatttcccctgaaaaatgggaaaattaagctaaatatctggtacacggaaaagatctgacattaccattacccagaggtttctgggaatggtagggcagcatccagcaacagcagcctggagggtggagaacacacaaatatttagggggaggacaggatgctggcaccagggagcctcagaataagcagcaagccgttaaatctcaggcttgaaaaacrgtgccttttgatgagccatgctctgaccgagaaatatctttcctcttttaaaatgtagagtttcatgtctgatgagcaaatttgcatgtatgtactcagaagccagaaggaaatatggaaaca

SEQ ID NO: 264397 - DNA, 377 bp, Homo sapiens
gacaattgtgtgtgtggtggtggagaaaagagctgggaatttttagggtctagaggttccaatcaggactattttatggagctctgctcaccaactttagtgagcaccagggttgtgaaagcgattcttgggttcagagaagcagtggaaggtgttagttgttatcctgatactggccaacttcggactcttattttaactggttattctcagttaatgatgtcagtgttgttctgtgctgttgaaggaatgcatgtkgcaatgtaatgagctttagaatcgcacaattaaaaagaaatagtttataattcttgttccttagtaatgaagtcctggtttctctgacccaattatagcacaaggaaggaaaattctgt

SEQ ID NO: 264398 - DNA, 551 bp, Homo sapiens
agctttagaatcgcacaattaaaaagaaatagtttataattcttgttccttagtaatgaagtcctggtttctctgacccaattatagcacaaggaaggaaaattctgtctaaggaaatggaaggcgatggcagtaatgaaatcttgagtctgtactatggaccagaccctgtccaagtaactcagacaaaacttacggcccctccttgcaaggaagagatgtactatggcaatatatttttccttttttaaaaagtaaataaaatatgtcccctgttactgtttatttctccaaagtacctttaacttttatgcttatacaatatgttaactgtagaagaatagaaaatttgggaaataaacctaagcaaaaaatcaaatcaaatcaaattacctatgaccagtgttgaagatttcatgtaataccttctactattatatttcttattaaagttagatcccttgagcatctgattggcccatagccacaggacagatgagctgtgtgttatccttctkgtgtgaattgtagccagggtcaggggaaaggac

SEQ ID NO: 264399 - DNA, 546 bp, Homo sapiens
gtgtgcacaataagctttcttgagcccaaaatggaaagctcatgtcagcataaagagctcatcttctccctaaaagcaggctctaaytggagacccggtgataatcagagtctgcttgagcagtgaagacccttaaggcagttatgtagacagatcaaatggcctctccctcgtcgggtaccaaaggtcccttaaccagttaaactaagagggggagtatttataaggaactgcggtatctctaaggtagatagtacagcctggcttcattaggaataaaactgaaaagcctcaggatcccaagctctgcctctaccatctctctcccaaccctagtgtctctacttctcatttaatatccctttttcatctttctctttctttctgctgagtcatttttactaattaagcatgctcctgaccaaacacaatcacctcaaggctactgaattttatatccacaactgaaggggtcagttgagactatctagaatcaccatccaaatttgcaggagccaaattccaatgagatgaacttggatcaga

SEQ ID NO: 264400 - DNA, 585 bp, Homo sapiens
ttgctttcattgtgggaaattcagtgctcatcaaaaatgctgaagtcactacccgcggccaagtggctgatgtgttggatttgtcatctaactttctgagaagctcaaggagtttagaaaacttaggtgtcagggaaaaaatgctgagcataatcttcaggttttacagtgaycctgagaaattatgtgagacttactccggctttgggcatcacacattccacacacatgtcccaggtaggtcagatacgatattttcttaaagctgtccagagcggaacatctcatgacttcccccagtcacccattcttgtaccaaattcacctctattgctttgcccatgctgttccctctgcccagaatcccttccttcctctcttcatctaactcttactcaattcttctcaacttggttttgaccaacaccatgccctccaactccaagactggatgaggtgcaccttctcccttaggcctctaccttagtcctatccgatgatttatcaggttatagagaaagtatttcctactccactgggagctttctgcctcattgcacctcacagcactaatgacatatacca

SEQ ID NO: 264401 - DNA, 591 bp, Homo sapiens
ccctacccagaatcaacatgcataattcctcaaaggtccacccttgggtatcaggtacaatcagtattatcatgaamtgaagtcgattttcatgagactatctgaattccttagtagatctggaaataaattcaggaacaataattctaaaaatataggtagataaagatcaatcaagttatttttattaaaatttttatcattttccccaaaattgataccaaagtatcctattttgagattacatacataatattaaaatatataatataattttatatttatatatttataataaaattttatattcatatatttatataaaattttatatttatataatatataaaatatattatattttatatatagaacagaagggctagatatattcaaaatgttaaagtgattattgctggatgaattaggtggcttctgtgtacaagagtgaaaacagtaaaagttaattttagatagcatccagcactaaatcacaagtaaaggtaaaacatttcttagaaaaggtctcttttccagttattctacaaggatatatactagctattcagagaaatatatcacacccaaaga

SEQ ID NO: 264402 - DNA, 591 bp, Homo sapiens
ccctacccagaatcaacatgcataattcctcaaaggtccacccttgggtatcaggtacaatcagtattatcatgaaatgaagtcgattttcatgagactatctgaattccttagtagatctggaaataaattcaggaacaataattctaaaaatataggtagataaagatcaatcaagttatttttattaaaatttttatcattttccccaaaattgataccaaagtatcctattttgagattacatacataatattaaaatatataatataattttatatttatatatttataataaaattttatattcatatatttatataaaattttatatttatataatatataaaatatattatattttatatatagaacagaagggctagatatattcaaaatgttaaagtgattattgctggatgaattakgtggcttctgtgtacaagagtgaaaacagtaaaagttaattttagatagcatccagcactaaatcacaagtaaaggtaaaacatttcttagaaaaggtctcttttccagttattctacaaggatatatactagctattcagagaaatatatcacacccaaaga

SEQ ID NO: 264403 - DNA, 558 bp, Homo sapiens
cagttattctacaaggatatatactagctattcagagaaatatatcacacccaaagagctccagagttagtgcagtacctgcttacattccaacaatgatttttctgtggccmtgaacaaaccattgcttcctaggagtctgggtggggaggtcaaagcaaaatggatttgggaaacaagaagataccctttcccagcgtgtacccctagcaggactctccagatagagagaaacccaggcaggtgtccagctactttctataaaaggaataagccaccacatatagagagagagtacctgggtagatcatttccacaaatcctggaaaatcctaaagatgatgaaaaaaataagtttcccagcatagtgcctacaattttgtaagacctcaataaagggtaactctatttttatgggcaataataataactatgataacaaaaacaatatagctaacattatttatgtaataatagctaatacttagtgagtactaatcattactaggagaactgcctttaggtctgtatatttcatatcaaaataattcctaccac

SEQ ID NO: 264404 - DNA, 570 bp, Homo sapiens
tacttgttttaacaaatatttctatagtagtgactatgggccaggcactagtctgcaaatatttactcatgtaatcctcgtaacaaccttaaaaattaccaactattatcatccctattttataaaagatgaaaccaaagtacagaaagattaaataacttgcccaactttgtatgggtagataagaacagattcaggatttaaacaaaagcagtctagttccaggctcactaggtacagtggcatgatcacatcagagtcagaggacaaaacagttcaagtgaactcaggcagcctccattcatggttctcatgatgccctcagtctaggtatgctgccaagtcagactactgcagacccaggtgccagccctcattctttatgctaatctcatcactctggaaagaaatgctacagttgttcatgctgaagctctttttttttttttttaaacggagtctcactctgttgcccaggctgtagtggcaccatcttggctcactgcaacctscacctcccatgttcaagccattcttctggctcagcctcctgagtagctgggattacag

SEQ ID NO: 264405 - DNA, 550 bp, Homo sapiens
tggcagaatacactttaaaaaaaaaataagctaatttagcaggacaaggggagaggaatcatttggttttgattgtcaaggcctgcaaataaagtcaaataaaaacatttattaagcaaccaagccgaaggcactaagcttggaattgcacaactgcatcttaagactaaggtataactttggatctccaggaactcaaaattaagatgtttatgaatagcaagatttaggaaataggcactaaatatatagtggtgkttgtagttgtagtggtaatggtaattgtactaatgaccaaaacatatgtagcactttctatacttgtttctaaattttatctaaaatgcttaaagaagaaatattattgttcccaaacaagaaatataatcttcagttttctaaatttttttatttctattgttgagaaataaactgatatatctataaaggtactcagtgaaaaatttccctcccatcctgtacccagtcttctcagtatccaacaaccctcataggcaactagtgttggcgtcccatgtatttgtacaaa

SEQ ID NO: 264406 - DNA, 541 bp, Homo sapiens
tactagctggtcctttacagaaaaagtttgccaatgcttattctagatgatcatagatttcaaattacacagcaaagatggaagtactcagttttcaaattgtaattctayatactgtttggaaggaacagacctaaaaatctgccaaagtgccaaagggaggtttagaagatggattaaaaaatttgctgtttgcaactgcccacaattaaatacctacctcacaaaggcccattttacacaataacgttttgagaatagagctctctgtggctcctagatgatgtgtggctaaaaagagaaaaatgacattctctgcaatgggaaagaatgagaaagcaaacgacgccctcgaagctggagaatgaagaaccacaatcacctgagacagagtggcatgtttcttgttccaaaactttggtagcatgctaaaatataattaacagtattgagatcaagctgctccagacaatatgaaataaaagcctctctataacacaagctgggaaggtaaataatcacctgcgtttcacattcccac

SEQ ID NO: 264407 - DNA, 541 bp, Homo sapiens
tactagctggtcctttacagaaaaagtttgccaatgcttattctagatgatcatagatttcaaattacacagcaaagatggaagtactcagttttcaaattgtaattctatatactgtttggaaggaacagacctaaaaatctgccaaagtgccaaagggaggtttagaagatggattaaaaaatttgctgtttgcaactgcccacaattaaatacctacctcacaaaggcccattttacacaataaygttttgagaatagagctctctgtggctcctagatgatgtgtggctaaaaagagaaaaatgacattctctgcaatgggaaagaatgagaaagcaaacgacgccctcgaagctggagaatgaagaaccacaatcacctgagacagagtggcatgtttcttgttccaaaactttggtagcatgctaaaatataattaacagtattgagatcaagctgctccagacaatatgaaataaaagcctctctataacacaagctgggaaggtaaataatcacctgcgtttcacattcccac

SEQ ID NO: 264408 - DNA, 541 bp, Homo sapiens
tactagctggtcctttacagaaaaagtttgccaatgcttattctagatgatcatagatttcaaattacacagcaaagatggaagtactcagttttcaaattgtaattctatatactgtttggaaggaacagacctaaaaatctgccaaagtgccaaagggaggtttagaagatggattaaaaaatttgctgtttgcaactgcccacaattaaatacctacctcacaaaggcccattttacacaataacgttttgagaakagagctctctgtggctcctagatgatgtgtggctaaaaagagaaaaatgacattctctgcaatgggaaagaatgagaaagcaaacgacgccctcgaagctggagaatgaagaaccacaatcacctgagacagagtggcatgtttcttgttccaaaactttggtagcatgctaaaatataattaacagtattgagatcaagctgctccagacaatatgaaataaaagcctctctataacacaagctgggaaggtaaataatcacctgcgtttcacattcccac

SEQ ID NO: 264409 - DNA, 598 bp, Homo sapiens
gttttcaatagttataatttaaattattatacttaaatgaactaagtctacacataatatccttgattttgcctcttggcttgcaaggcccaaaatttactagctggtcctttacagaaaaagtttgccaatgcttattctagatgatcatagatttcaaattacacagcaaagatggaagtactcagttttcaaattgtaattctatatactgtttggaaggaacagacctaaaaatctgccaaagtgccaaagggaggtttagaagatggattaaaaaatttgctgtttgcaactgcccacaattaaatacctacctcacaaaggcccattttacacaataacgttttgagaatagagctctctgtggctcctagatgatgtgtggctaaaaagagaaaaatracattctctgcaatgggaaagaatgagaaagcaaacgacgccctcgaagctggagaatgaagaaccacaatcacctgagacagagtggcatgtttcttgttccaaaactttggtagcatgctaaaatataattaacagtattgagatcaagctgctccagacaatatgaaataaaagcctctctataacacaa

SEQ ID NO: 264410 - DNA, 590 bp, Homo sapiens
atctgttcctaacaatagctattttgccccttccgattactggcaattattcttacatccaaaatgcattagcttataagagcagtggctctgaccatagatcatcttacagtgttactactttaatagccaataggaaaattccttttccactcccatggaatctacagtgatacatattgcctcttgcttccaagcatttttcaagtaaacattatgatacagcttaatagcatcaaagacaggaatggttatgtttactattggtagtcctattttgagtaagaataaaacatttttgtagtaacatatagcagatgccgaggctaaaaatgtttccattataacatatcactccaaattccagataggacagaaaaagaaatgaaacatcacaaatgaaatttagatacctacttttgcagtcatcttggccaaaagctcttgtaaatccattattccttgcaccaggcttaagaaatcactgcaggttgggcaagctcaataaagaaaatataaaacrtatatatttatattgtgctaatataagaaataaaattttaaaacagtagatacgtgactatgtagaa

SEQ ID NO: 264411 - DNA, 592 bp, Homo sapiens
aaaaggataggatccatacctgttcatcagaagaccctagattatttttatttttatcatccatggaaaagggtacccagaatcctggagcacatgtgtcatggtgttaaatacctttccaaaaccaaactgaaaactcattttaaaataataccccatcccgctaatcctaaagcaagaaaatacagcacacagcagttttccttttccttttcaagtgatcttactcattttagtgacattatgatttacaaatcacctgctctcacacctttcctctatgkgcatctctccttacttccctgtctttccacttttaatctgtggtacctgcgtgtgtatgttacatagatcattaggtgaaggtcaatgatgttgacttgaacaaaaaacagaaataaaagctgacagcttcccaatgctcattaacacaaaaacccaaagcacttggtattttttataaggaaaggtcatagaggtgagcccacatactggcatgaaaatgtgttcttaccaaatgaatcaagatgggaatgttaatttatttgaatggttgtaagtcaatgctggattaaaagaaaagtggtgatac

SEQ ID NO: 264412 - DNA, 599 bp, Homo sapiens
acatttacaatatattctccctgaagcctgctatttagaggcttcatctgcatgataaaagcttcttctccacaaccccttatcagaacccagacattctttactactgataacgctttcaaccaatagccgatcagaaaaattttaaatctacctatgacctggaagctgccacccttctkgttgtcctacccttccagatcaaaccaatgtaaatcttacatgtactgatggaggtattatgtctccctaagatgtataaagcaaggtatacatgaggaccaccttgggcacatgtcctcaggacctcttgaagttgtgtcatgggtgcatccttaaccttggcaaaataaacttttttaaattgattgagacttgtttatcattagctagagacagatccagacacttttcgattaacactccaaaaccagtgctgggtcactacaatatgctgtaggtaaaaatatataatttaagggatccccttaacatgaaccaacaacatgttgctacaaagaggtcttgttatcaaaatgagattttatcttgattgccttaatagatagataccaatcaaacatgcaaaactatttgta

SEQ ID NO: 264413 - DNA, 599 bp, Homo sapiens
acatttacaatatattctccctgaagcctgctatttagaggcttcatctgcatgataaaagcttcttctccacaaccccttatcagaacccagacattctttactactgataacgctttcaaccaatagccgatcagaaaaattttaaatctacctatgacctggaagctgccacccttctggttgtcctacccttccagatcaaaccaatgtaaatcttacatgtactgatggaggtattatgtctccctaagatgtataaagcaaggtatacatgaggaccaccttgggcacatgtcctcaggacctcytgaagttgtgtcatgggtgcatccttaaccttggcaaaataaacttttttaaattgattgagacttgtttatcattagctagagacagatccagacacttttcgattaacactccaaaaccagtgctgggtcactacaatatgctgtaggtaaaaatatataatttaagggatccccttaacatgaaccaacaacatgttgctacaaagaggtcttgttatcaaaatgagattttatcttgattgccttaatagatagataccaatcaaacatgcaaaactatttgta

SEQ ID NO: 264414 - DNA, 599 bp, Homo sapiens
acatttacaatatattctccctgaagcctgctatttagaggcttcatctgcatgataaaagcttcttctccacaaccccttatcagaacccagacattctttactactgataacgctttcaaccaatagccgatcagaaaaattttaaatctacctatgacctggaagctgccacccttctggttgtcctacccttccagatcaaaccaatgtaaatcttacatgtactgatggaggtattatgtctccctaagatgtataaagcaaggtatacatgaggaccaccttgggcacatgtcctcaggacctcttgaagttgtgtcatgggtgcatccttaaccttggcaaaataaacttttytaaattgattgagacttgtttatcattagctagagacagatccagacacttttcgattaacactccaaaaccagtgctgggtcactacaatatgctgtaggtaaaaatatataatttaagggatccccttaacatgaaccaacaacatgttgctacaaagaggtcttgttatcaaaatgagattttatcttgattgccttaatagatagataccaatcaaacatgcaaaactatttgta

SEQ ID NO: 264415 - DNA, 591 bp, Homo sapiens
gtcatgggtgcatccttaaccttggcaaaataaacttttttaaattgattgagacttgtttatcattagctagagacagatccagacacttttcgattaacactccaaaaccagtgctgggtcactacaatatgctgtaggtaaaaatatataatttaagggatccccttaacatgaaccaacaacwtgttgctacaaagaggtcttgttatcaaaatgagattttatcttgattgccttaatagatagataccaatcaaacatgcaaaactatttgtattagataataataatttgctaagacagtttttcagtgctagaaaacagaagtctttttaggtagcctaatattcttccccccatccccccgccccccgtaatcttatttacactattaatttgctaaacaatccattttcttattgttagtgtaatgatgaacctcagctgatctgaggccttaaataaatccctaaggtgcagagcccaaaattaataagcttactatttagtacggatggacggcagaaaaatggattttttttccttttgtttaatccacctgttgccaccctgtacctcctgctgtca

SEQ ID NO: 264416 - DNA, 591 bp, Homo sapiens
gtcatgggtgcatccttaaccttggcaaaataaacttttttaaattgattgagacttgtttatcattagctagagacagatccagacacttttcgattaacactccaaaaccagtgctgggtcactacaatatgctgtaggtaaaaatatataatttaagggatccccttaacatgaaccaacaacatgttgctacaaagaggtcttgttatcaaaatgagattttatcttgattgccttaatagatagataccaatcaaacatgcaaaactatttgtattagataataataatttgctaagacagtttttcagtgctagaaaacagaagtctttttaggtagcctaatattcttccccccatccccccgccccccgtaatcttatttacactattaatttgctaaacaatccattttcttattgttagtgtaatgatgaacctcagctgatctgaggccytaaataaatccctaaggtgcagagcccaaaattaataagcttactatttagtacggatggacggcagaaaaatggattttttttccttttgtttaatccacctgttgccaccctgtacctcctgctgtca

SEQ ID NO: 264417 - DNA, 561 bp, Homo sapiens
tccctcaagaatgccatgtcgcatccctactcattagagtsgattaatctgagggtgtcacttttctgacagcaaatttcacacatttgaactaacaagcttcaagttgtggccatcagctggcttctttgggacacctagaatgcctgtattacccagaatggaattttattatcattggaggtaaacagccgtaggctgtgattagtcctggtatatcctcagcaaagcagttgactgactaatccttccatgtacttttgctaatatctgctttccaggtctgatgctgtttttggctgaagtacaagcaagaaagaggctggggaaatgctgattcaaatttcttgtattctttgacattttagcctcagaagcataacaccacgctaaggaaaatgtagaatttttgcttaatcattagtgagttgaggttagtgtcttatgtttctctagagatgattgatacattcacttgatctttatagctctgtgagatggatgtgattgcatcttatagatgggaggttttgagatgctaagtgtaaggtacatggatgt

SEQ ID NO: 264418 - DNA, 561 bp, Homo sapiens
tccctcaagaatgccatgtcgcatccctactcattagagtggattartctgagggtgtcacttttctgacagcaaatttcacacatttgaactaacaagcttcaagttgtggccatcagctggcttctttgggacacctagaatgcctgtattacccagaatggaattttattatcattggaggtaaacagccgtaggctgtgattagtcctggtatatcctcagcaaagcagttgactgactaatccttccatgtacttttgctaatatctgctttccaggtctgatgctgtttttggctgaagtacaagcaagaaagaggctggggaaatgctgattcaaatttcttgtattctttgacattttagcctcagaagcataacaccacgctaaggaaaatgtagaatttttgcttaatcattagtgagttgaggttagtgtcttatgtttctctagagatgattgatacattcacttgatctttatagctctgtgagatggatgtgattgcatcttatagatgggaggttttgagatgctaagtgtaaggtacatggatgt

SEQ ID NO: 264419 - DNA, 561 bp, Homo sapiens
tccctcaagaatgccatgtcgcatccctactcattagagtggattaatctgagggtgtcacttttctgacagcaaatttcacacatttgaactaacaagcttcaagttgtggccatcagctggcttctttgggacacctagaatgcctgtattacccagaatggaattttattatcattggaggtaaacagccstaggctgtgattagtcctggtatatcctcagcaaagcagttgactgactaatccttccatgtacttttgctaatatctgctttccaggtctgatgctgtttttggctgaagtacaagcaagaaagaggctggggaaatgctgattcaaatttcttgtattctttgacattttagcctcagaagcataacaccacgctaaggaaaatgtagaatttttgcttaatcattagtgagttgaggttagtgtcttatgtttctctagagatgattgatacattcacttgatctttatagctctgtgagatggatgtgattgcatcttatagatgggaggttttgagatgctaagtgtaaggtacatggatgt

SEQ ID NO: 264420 - DNA, 440 bp, Homo sapiens
cccctgttaaccattaatttactttctgtctcaataaatttgcctatttttgatatttcatataagtggaattaaagaatagttgtccttttgtgcatggttccttcacatagcatagtttttagggcttatccacactgtagtacgtatcagaacttcattcctttcttatggatgaataatatcccactggatacatataccaagttttctttatccattcatacatgggtagacatttggcttcattccatcttttgtgtattttgaataaggctgcagtgaacactgacatacaagtgtctgtttgagtccctgttttcaattctyttacctataaacctaggagaggaattgctggattacatgtaattctgtgtttaaatttttgaggaaccaacaaactgttttccacagcagctgcgtgattttatttttta

SEQ ID NO: 264421 - DNA, 621 bp, Homo sapiens
ttcattccatcttttgtgtattttgaataaggctgcagtgaacactgacatacaagtgtctgtttgagtccctgttttcaattcttttacctataaacctaggagaggaattgctggattacatgtaattctgtgtttaaatttttgaggaaccaacaaactgttttccacagcagctgcgtgattttattttttaacttttttaatcaaaattttatttttactttaaattttatttttaaattttactttaagttccaggatacatgtgcagaatgtgcaggtttgttacataggtatacgtgtgccaygggggcttgatgtattattgacctgtcctctaaattccctcccctttcccccatcccgcaacaggccccagtgtgtgatgttcccctctctgtgcccatgtgttctcattgttcaactcccacttatgagtgagaacatgtggtgtttggttttctccttctgtgttagtttgctgaagatgatggcttccagcttcatccatgtccctgcaaagaacatgatcatgtccctttttatggctgtgtagtactccctggtgtatatgtaccacattttctttatcaaatagtctatcattgttgagaattt

SEQ ID NO: 264422 - DNA, 621 bp, Homo sapiens
ttcattccatcttttgtgtattttgaataaggctgcagtgaacactgacatacaagtgtctgtttgagtccctgttttcaattcttttacctataaacctaggagaggaattgctggattacatgtaattctgtgtttaaatttttgaggaaccaacaaactgttttccacagcagctgcgtgattttattttttaacttttttaatcaaaattttatttttactttaaattttatttttaaattttactttaagttccaggatacatgtgcagaatgtgcaggtttgttacataggtatacgtgtgccatgggggcttgatgtattattgacctgtcctctaaattccctcccctttcccccatcccgcaacaggccccagtgtgtgatgttcccctctctgtgcccatgtgttctcattgttcaactcccacttatgagtgagaacatgtggtgtttggttttctccttctgtgttagtttgctgaagatgatggcttccagcttcatccatgtccctgcaaagaacatgatcrtgtccctttttatggctgtgtagtactccctggtgtatatgtaccacattttctttatcaaatagtctatcattgttgagaattt

SEQ ID NO: 264423 - DNA, 621 bp, Homo sapiens
ttcattccatcttttgtgtattttgaataaggctgcagtgaacactgacatacaagtgtctgtttgagtccctgttttcaattcttttacctataaacctaggagaggaattgctggattacatgtaattctgtgtttaaatttttgaggaaccaacaaactgttttccacagcagctgcgtgattttattttttaacttttttaatcaaaattttatttttactttaaattttatttttaaattttactttaagttccaggatacatgtgcagaatgtgcaggtttgttacataggtatacgtgtgccatgggggcttgatgtattattgacctgtcctctaaattccctcccctttcccccatcccgcaacaggccccagtgtgtgatgttcccctctctgtgcccatgtgttctcattgttcaactcccacttatgagtgagaacatgtggtgtttggttttctccttctgtgttagtttgctgaagatgatggcttccagcttcatccatgtccctgcaaagaacatgatcatgtcccttttyatggctgtgtagtactccctggtgtatatgtaccacattttctttatcaaatagtctatcattgttgagaattt

SEQ ID NO: 264424 - DNA, 453 bp, Homo sapiens
tatgaagtgatatattattggaggtttaatttgaattttcctaatgactaaagatgttgagtatcttttcatgtgcttattggccatttgtatatcttctttggagaaatgtgtattcagatcatttgcccatttttcagttgggttgtcattttgttcagttataggagtactttgtatactctggacattaaatttttataagatacataatttaaaaatactttcttcctttttttggttttgttttcacatccttaataatctcttttgatgaagaaattttttttttttttttttgagatggagtcacagaatccrttgtaaaatgcaagcccatagatatttacctctactttttattctaagatttagtggttgtagctattatatttagaatgttagttgattttgagatcatttttatatgtggtgtgaagtagggggtctaac

SEQ ID NO: 264425 - DNA, 593 bp, Homo sapiens
tgttgaatactacagtagtccatttctttagtggcttaccaaactatttttgcagagactgtatttctagtcatgtgtagtaactgaaatctctgttcctaatcttatgttataaagtattttgggccaggcaaggtggctcacacctgtaatcccaacactctgataggctgtggaaagaggattgctggaggccaggagtttgagacctgcctgggcaacacagtgagactttgtctctgtgaaaaaaaaaaaaaaaaattaaaaattagccaggcatggtcacatgtgcctgtagtcctagcttcttaggaagctaaaatgggatgattacacgagcccaggaggtcaaggctgcagtgagccatgatcatatcattgtcctccagcttgggcaacagaatgagaccctgtctcaaaagaagaaaaaagaaagaaagaaaaaaaaacttaaaaaaaaattttgacagggatttccttgaatgtcagcaaccaaaaacaagaaagagagagagactcctccaacctttgcagattttctccgtgctgggacmctccttcaacacttagccaggcttacactgatcctaggg

SEQ ID NO: 264426 - DNA, 611 bp, Homo sapiens
aattttcatggatggcaatttttcatggacattaggttgatacataatgacttaacrctgcaaacctggtcatcctattccctacccactccaacacacaattacgcttgtttaatagcctctgataagctttaggataaaggtcacaatccttaatatagcttacaaaaattgtgtatagtctagtccacgtttccttctgtagtttctccttgcattggtttctgcctttttctgattttgagttctttagaggtatcatattcacttaagccacagaacctctcttcacaatgctgtttctaggatgtcaagttcactcttatacatccttaattttcaggctaaaagaaaggggcctcttgtgttttacacttttaccataaaatagtgtttgcttttcaacacagtaatttttgatcatttgattgatgtctgcctttcctatgggctgtaagcaccctatgagctcaccattgtttcacaaatgccaatcatagagctgccacctaataggtaatcagcaaatatttgcaaatacctgaatgaatgaataaatggcaaagcttctctaggggtctggattcctagcttgtggccactgatcctca

SEQ ID NO: 264427 - DNA, 495 bp, Homo sapiens
cttgggcttaagacttgttctagtggatacaagcagtcacagttcaaggstacctggcgtcttggagcacctgcactacctgggtgaagagaaaaaaaatgtggagttgcagtcttcagaaatagttaccagtgtgcatctgcacagtaaacttatgaaaatacaacatacgcttcaagctttttgcattctgcttttcttgagaataccagggttcattttcttgaggaatgtcagaaatattttgtagtctcagcttaatcttagatttgtttgtaaagctccacaaacaaacccacaacttgggaagtttggcaaatgctcagtccaggagatctaaatcttgactcagttcttcaagttttagcgaaggaatgactttaaaatgtcttcttgcttttacatattttgaaacaaactctgggagaaaatgtatttggaagggatcttggaagctagctggttttgcatgtgtgataaaacaagatgcttata

SEQ ID NO: 264428 - DNA, 495 bp, Homo sapiens
cttgggcttaagacttgttctagtggatacaagcagtcacagttcaaggctacctggcgtcttggagcacctgcactacctgggtgaagagaaaaaaaatgtggagttgcagtcttcagaaatagttaccagtgtgcatctgcacagtaaacttatgaaaatacaacataygcttcaagctttttgcattctgcttttcttgagaataccagggttcattttcttgaggaatgtcagaaatattttgtagtctcagcttaatcttagatttgtttgtaaagctccacaaacaaacccacaacttgggaagtttggcaaatgctcagtccaggagatctaaatcttgactcagttcttcaagttttagcgaaggaatgactttaaaatgtcttcttgcttttacatattttgaaacaaactctgggagaaaatgtatttggaagggatcttggaagctagctggttttgcatgtgtgataaaacaagatgcttata

SEQ ID NO: 264429 - DNA, 555 bp, Homo sapiens
tcagtccaggagatctaaatcttgactcagttcttcaagttttagcgaaggaatgactttaaaatgtcttcttgcttttacatattttgaaacaaactctgggagaaaatgtatttggaagggatcttggaagctagctggttttgcatgtgtgataaaacaagatgcttataggtttgctttaaaaaaataaaacctcgaaacttgaagtctgatatccctggggccatttgataaatgttgatggttttgcagagccacacattatttccttttccttttcacatttatttctttgaaagacatacgagagtctgaactttgaarggacctggtagcctttgctaaaaaaggaaacttctcgggagagaaccttgtgagtgccttaaatatctttccaggtgggcaccatcacatgagtgatttttccgatgtaaagaggcgcactttgtggattagtctgtggtctgaccgtgtctcttagagtcaattgtttgatgtgttgtttcaagccaggttcatatggagcagagtgccctttggttttttatttgt

SEQ ID NO: 264430 - DNA, 514 bp, Homo sapiens
tggacacctggcaaatcatacccactcttcaagactcacctacatcatccacatgaaggactgtaagaactaccttgctacccctgacactggtgaactgtcaaaatctgccaaaaatcaagctccacaattttcattttaaacagatgaatctattaaaacatctctgaggtgtttcacccacccacacctgcaggccctgggcatacctgccccaagaatgactcttgctctacaaaaggcttcctgtctccgaagaaaaaaaaagtttgtcgyattcattcaaccaaaatatactaggcatttatgctatatcaagccctgccaggaaatgaaggtagaaaatttgatcatctgattgctaatggcttccatctgctataccatctatttgatttctttctgtgaggacttaatgtctattacccaagtgctctctgagtcctgattatgccagtttaccaagccattcccttgagcttacctcttcaacttctgcgtgtctcctggagtc

SEQ ID NO: 264431 - DNA, 561 bp, Homo sapiens
ctattaaaacatctctgaggtgtttcacccacccacacctgcaggccctgggcatacctgccccaagaatgactcttgctctacaaaaggcttcctgtctccgaagaaaaaaaaagtttgtcgcattcattcaaccaaaatatactaggcatttatgctatatcaagccctgccaggraatgaaggtagaaaatttgatcatctgattgctaatggcttccatctgctataccatctatttgatttctttctgtgaggacttaatgtctattacccaagtgctctctgagtcctgattatgccagtttaccaagccattcccttgagcttacctcttcaacttctgcgtgtctcctggagtctgtctgcctggtttccaacctactattttgcctatgagtcattctcgtatatgccccctgaccctcagtctactcttcactgctagttatcatctgctcctgtccactcctagactgacttggggacactcagggacccagtatgaacttaactaaacacagtggcctgattaagcactttaatatccttggtagaagc

SEQ ID NO: 264432 - DNA, 607 bp, Homo sapiens
cctgccacattaatattcctcagagcaatggaattatctgggaaatttcttctcgattttagagttctcatggtccctgaaccttctgtagtatctctcccttgggaagactccctggtgtggttgtgaccttgtctttggcagtacatgtcattagcacactatggaggtgacctggagggtgggttagactaaggttttggagatagtttcagactcaaagtttgggttatatgcttattatattatgtgattgacacctagttatttatcttgagcttttctatttccaaatmtgcaaaatgcatctagtaaaactgtccccatatggttatcctaaggaatactattactagaacattacctggcctatagtagaggctcaataaatgtatatcccttctccagcaccaaagtaaagggttccatcaattagatttcacatctttccaagcagctcccaggattagcaatataagacatgtggcagggaaatattagaaaggaacaaactgctcacattgaatcttggccttccctcatgtaccaaataaagtgtcaatggtccccactattgggctaaatagcttagtagtagctagatgca

SEQ ID NO: 264433 - DNA, 606 bp, Homo sapiens
aaaaggttgaagctagtcacataggaattagtatttcaaattatcagagaatgaaatatgcaattaagttttttcttttccaggattatgatcctgtttttcaaasccataagaaattcttagccttaccactgtggtctgcacttcagtcataaaatgctacaagcaactttgggacactcctcaggcacacaacagggctagtactttcacaggtgccaaaactattttgtttcctatgcctctcttctgaaatgtgtcattgtcatcaacgttgggcctgatctcactgccagggcttgcactaggtatttcacatatactaatttatcactcaaaaaacctgagactggtattatcttttttaaaaaacttaaaaactgagattaaggattaaacatacccaaaccagacttaaacttagatctaaatttgacagtgtatgcactttctgccagtttgttgcccatcccagaggcatgatgacaaagtggtgaggatagcctcaccaggcactaactccaacaactcattcatatggtcaactccagagcgattagcctagacaggtaactaggcttaacccctagatttggaagggcctgc

SEQ ID NO: 264434 - DNA, 606 bp, Homo sapiens
aaaaggttgaagctagtcacataggaattagtatttcaaattatcagagaatgaaatatgcaattaagttttttcttttccaggattatgatcctgtttttcaaacccataagaaattcttagccttaccactgtggtctgcacttcagtcataaaatgctacaagcaactttgggacactcctcaggcacacaacagggctagtactttcacaggtgccaaaactattttgtttcctatgcctctcttctgaaatgtgtcattgtcatcaacgttgggcctgatctsactgccagggcttgcactaggtatttcacatatactaatttatcactcaaaaaacctgagactggtattatcttttttaaaaaacttaaaaactgagattaaggattaaacatacccaaaccagacttaaacttagatctaaatttgacagtgtatgcactttctgccagtttgttgcccatcccagaggcatgatgacaaagtggtgaggatagcctcaccaggcactaactccaacaactcattcatatggtcaactccagagcgattagcctagacaggtaactaggcttaacccctagatttggaagggcctgc

SEQ ID NO: 264435 - DNA, 606 bp, Homo sapiens
aaaaggttgaagctagtcacataggaattagtatttcaaattatcagagaatgaaatatgcaattaagttttttcttttccaggattatgatcctgtttttcaaacccataagaaattcttagccttaccactgtggtctgcacttcagtcataaaatgctacaagcaactttgggacactcctcaggcacacaacagggctagtactttcacaggtgccaaaactattttgtttcctatgcctctcttctgaaatgtgtcattgtcatcaacgttgggcctgatctcactgccagggcttgcactaggtatttcacatatactaatttatcactcaaaaaacctgagactggtattatcttttttaaaaaacttaaaaactgagattaaggattaaacatacccaaaccagayttaaacttagatctaaatttgacagtgtatgcactttctgccagtttgttgcccatcccagaggcatgatgacaaagtggtgaggatagcctcaccaggcactaactccaacaactcattcatatggtcaactccagagcgattagcctagacaggtaactaggcttaacccctagatttggaagggcctgc

SEQ ID NO: 264436 - DNA, 606 bp, Homo sapiens
aaaaggttgaagctagtcacataggaattagtatttcaaattatcagagaatgaaatatgcaattaagttttttcttttccaggattatgatcctgtttttcaaacccataagaaattcttagccttaccactgtggtctgcacttcagtcataaaatgctacaagcaactttgggacactcctcaggcacacaacagggctagtactttcacaggtgccaaaactattttgtttcctatgcctctcttctgaaatgtgtcattgtcatcaacgttgggcctgatctcactgccagggcttgcactaggtatttcacatatactaatttatcactcaaaaaacctgagactggtattatcttttttaaaaaacttaaaaactgagattaaggattaaacatacccaaaccagacttaaacttagatctaaatttgacagtgtatgcactttctgccagtttgttgcccatcccagaggcatgatgacaaagtggtgaggatagcctcaccaggcactaactccaacaactcattcatatggkcaactccagagcgattagcctagacaggtaactaggcttaacccctagatttggaagggcctgc

SEQ ID NO: 264437 - DNA, 543 bp, Homo sapiens
acagtggtgtgatcccagatcactgcaacctctgcctcctgggttcaagtgactctcctgctctgcctcagcctcagcctcccaagtagctgggattacaggcaactgctaccacgtccggctaatttttgtactttttctttagtagagacatgttgcctagggtggtcgtgaactccccaacctcaggtgayctgcctgccttggcctcccaaagtgctgagattactggcatgagccaccatgcctggcctatttgtttgtagaaaaaaaattcaacaaactaggaacataagaaaaatacataaacataataaaagttatgtatggaaaacccacagcaaatatactcaatgttgaaagagtaaaagcttttcccctaagatcagaaacaaggcacggatgccacttttgccacttctatttgacataatattggaagtcctagtcagagaaattaggaaaaaaaagaaacaaaagccatccaaactggggaaagcaaaaagtaaacatctctgtttgccaatgatatgatattatatg

SEQ ID NO: 264438 - DNA, 417 bp, Homo sapiens
ctacaccaaacagacaaaaacacccttaccctcaggtgttttctatgctaatgaccaataaaatgaattcatcatcccacatgatgacaaatgctgtgaacaaaaacccagcagggtgagggaatacacagggactttgaagaccccaggacacagcagcgccttctgaagctgtaccgggaggaaagcaagacaatgttgggagagtctgagaagtgttttcaaaccgcagtctgtaaccaattggtgagctatgaatcaatttaggggcccataatcagcatttttaaaacgaatgagaatataataggagatatcaatgtgcattgcatataraaaggatgctccttatttcctgaggtttttgcttcagttctgttctatatacatgtgtaggtgttgggttttaatgtccat

SEQ ID NO: 264439 - DNA, 417 bp, Homo sapiens
ctacaccaaacagacaaaaacacccttaccctcaggtgttttctatgctaatgaccaataaaatgaattcatcatcccacatgatgacaaatgctgtgaacaaaaacccagcagggtgagggaatacacagggactttgaagaccccaggacacagcagcgccttctgaagctgtaccgggaggaaagcaagacaatgttgggagagtctgagaagtgttttcaaaccgcagtctgtaaccaattggtgagctatgaatcaatttaggggcccataatcagcatttttaaaacgaatgagaatataataggagatatcaatgtgcattgcatatagaaaggatgctccttrtttcctgaggtttttgcttcagttctgttctatatacatgtgtaggtgttgggttttaatgtccat

SEQ ID NO: 264440 - DNA, 571 bp, Homo sapiens
cttgttatagtccttattttaatactctctctgacttagtaaaaatgtaacttcttctagaaaatgcaagccagaaaatagaaattctttcaatttattatcttttaaaacatttacttagatgcatcaatgtctttcttattccttgctttctgcctgttcaaaattcctccttccgtgttcttaaccagattccttctgcctcctctaaggtatttttctataacttatttttttttaacatatcgtgaatttctccctatctacaaattctttcatatcataagaatacacaattttctgtatcttaaaaataggaaatgctttaaactctgtctagctactaattgttaacagatttttcaaatcctagcccatacccactttgtttcctttgcaacgtctccatactcaactgactcgctaatgctattaacttggctcttgttgcactttcatttgcaaccctacctagcaaaatcctcctaatttgacttctgcatctaamcttcaatgtttagagaaaattcttcctaaaatacaaacttaattacacctgcccaccaatatc

SEQ ID NO: 264441 - DNA, 597 bp, Homo sapiens
gacatataggccaaaggaatagaagaaagagtccagaaataaaacccaaattattttcaaaaaagttgtcaaggccatttaatgggaaaaacacagtctttacaacaaatggtgctgggaagctggatatccacatgcaaaataataaaattggatctttaccgaacgtcatatacaaaaattaacttgaaatggatccattacctaaatgtaaaagctaaaactataaaactcttacaagaaagcatggcaataacttcaagacattggatctggcaatgattccaaaggtacaaacaaattttaaaaaatataattaataatactgaaatatacacttaaaatggataagatagtaaatgttatgttatgtaagatttacaacaataaaaataatttggagaaaatacctctaagtaacccacagatcaaaggggaartcataagagaaatagggagacattttgttaaaaatgtgtagattgtattttttagaaaagttttacatgaaaaaaaaatgagcacttagaattcccatatatcccctgccaaagtttcacttattattaatgttttacatttggatggtacattcat

SEQ ID NO: 264442 - DNA, 440 bp, Homo sapiens
gtataccttttcttagatttactcctaaacaccttaagtggcacaattgtaaatgtaatgtcatagagcagaccttttatttgatacacactgctcaatccacaaaccacatgtttttacatctagyatttttgtgtacattccattctaaatactttaaacttccattatgatttcttctttgactaatgagtttgttagtgtttgcttggtgtatgtttaatttttactttaaaatcacaggaaaatgtccacctaagattccttctcattaaactatgtagctacaatacacgaaatgaaatgagcttcacagaattgaactagttttgaaatcagcactgattggcaaatccctaaaaattaatttcaggataattaaaattgaaatgtagaaagtgtggctccagtgggatggaggaaaagaagtgggacacatg

SEQ ID NO: 264443 - DNA, 594 bp, Homo sapiens
cttcattagtaacacaaaactagtgcctgtaaaatttccagagtagcattagaaaatgcaattcattagaaactttgcaaaaarttccactctttcaaatccccattttggtcactgtcaacactacagtgacaaaaaattaagaaatcattttggtgagaaccaaatagatacccatttcccagagagcatagtcagcaatttaggtattagccaaaattagtagagatccctctccttttagtcttacctttgatctaggtgtgttttcctgacttgatgaaggcaaagcctccctgaaattcaggtcttctgcttcagagtcatttccctcataatcgtttactgaacaaaggcggggggaaaaactgatcaaatagaaaacactatacagaaggaaaaatggagccttaatgagaaaaaacaagctacatgaggggaattttcatctacttttcctgttttccaaacaccccatctttatctcctatggtaatcatctctttctcccctgctttgaaaaaatcaacatagcaaagctgatccttcttctaggattatcctcagggagttgacttttgagcggttcccttg

SEQ ID NO: 264444 - DNA, 594 bp, Homo sapiens
cttcattagtaacacaaaactagtgcctgtaaaatttccagagtagcattagaaaatgcaattcattagaaactttgcaaaaagttccactctttcaaatccccattttggtcactgtcaacactacagtgacaaaaaattaagaaatcattttggtgagaaccaaatagatacccatttcccagagagcatagtcagcaatttaggtattagccaaaattagtagagatccctctccttttagtcttacctttgatctaggtgtgttttcctgacttgatgaaggcaaagyctccctgaaattcaggtcttctgcttcagagtcatttccctcataatcgtttactgaacaaaggcggggggaaaaactgatcaaatagaaaacactatacagaaggaaaaatggagccttaatgagaaaaaacaagctacatgaggggaattttcatctacttttcctgttttccaaacaccccatctttatctcctatggtaatcatctctttctcccctgctttgaaaaaatcaacatagcaaagctgatccttcttctaggattatcctcagggagttgacttttgagcggttcccttg

SEQ ID NO: 264445 - DNA, 594 bp, Homo sapiens
cttcattagtaacacaaaactagtgcctgtaaaatttccagagtagcattagaaaatgcaattcattagaaactttgcaaaaagttccactctttcaaatccccattttggtcactgtcaacactacagtgacaaaaaattaagaaatcattttggtgagaaccaaatagatacccatttcccagagagcatagtcagcaatttaggtattagccaaaattagtagagatccctctccttttagtcttacctttgatctaggtgtgttttcctgacttgatgaaggcaaagcctccctgaaattcargtcttctgcttcagagtcatttccctcataatcgtttactgaacaaaggcggggggaaaaactgatcaaatagaaaacactatacagaaggaaaaatggagccttaatgagaaaaaacaagctacatgaggggaattttcatctacttttcctgttttccaaacaccccatctttatctcctatggtaatcatctctttctcccctgctttgaaaaaatcaacatagcaaagctgatccttcttctaggattatcctcagggagttgacttttgagcggttcccttg

SEQ ID NO: 264446 - DNA, 594 bp, Homo sapiens
cttcattagtaacacaaaactagtgcctgtaaaatttccagagtagcattagaaaatgcaattcattagaaactttgcaaaaagttccactctttcaaatccccattttggtcactgtcaacactacagtgacaaaaaattaagaaatcattttggtgagaaccaaatagatacccatttcccagagagcatagtcagcaatttaggtattagccaaaattagtagagatccctctccttttagtcttacctttgatctaggtgtgttttcctgacttgatgaaggcaaagcctccctgaaattcaggtcttctgcttcagagtcatttccctcataatcgtttactgaacaaaggcggggggaaaaactgatcaaatagaaaacactatacagaaggaaaaatggagccttaatgagaaaaaacaagctacatgaggggmattttcatctacttttcctgttttccaaacaccccatctttatctcctatggtaatcatctctttctcccctgctttgaaaaaatcaacatagcaaagctgatccttcttctaggattatcctcagggagttgacttttgagcggttcccttg

SEQ ID NO: 264447 - DNA, 556 bp, Homo sapiens
ggttcccttgttcctcattgccatattattcaagaaagtactcttcaagtaaatcctagatatttacaacctgcagaacctatgcattgggatctacagaatacagtcttctgtgtttcagagtctatttcttgaataaagaatactgtgttacaaatgtcgcactgtaacttcttgtattatttataattcataagttagtaatatgttaaattatacagaaaattgttttcggctttgttgaataatgtaatatgaatcatcccaaggaaactctgggtttcttatatgattattcctaattactgtgttaattttactgcacagactctttcagataagaagccragagaaaattttctctgatctcagtactgagcactcagagtactgtttctcataccatgggagccttaaatattatgatttagaaattctgtggcatggcatattacaaaatcaataaaaatatagtaaacaagtactatggaaatgaaaaagtgtgttcctgaatgtgtgttaaaaaggaaatctaatagaaattatgaacctttat

SEQ ID NO: 264448 - DNA, 556 bp, Homo sapiens
ggttcccttgttcctcattgccatattattcaagaaagtactcttcaagtaaatcctagatatttacaacctgcagaacctatgcattgggatctacagaatacagtcttctgtgtttcagagtctatttcttgaataaagaatactgtgttacaaatgtcgcactgtaacttcttgtattatttataattcataagttagtaatatgttaaattatacagaaaattgttttcggctttgttgaataatgtaatatgaatcatcccaaggaaactctgggtttcttatatgattattcctaattactgtgttaattttactgcacagactctttcagataagaagccgagagaaaattttctctgatctcagtactgagcactcagagtactgtttctcataccatgggagccttaaatattatgatttagaaattctrtggcatggcatattacaaaatcaataaaaatatagtaaacaagtactatggaaatgaaaaagtgtgttcctgaatgtgtgttaaaaaggaaatctaatagaaattatgaacctttat

SEQ ID NO: 264449 - DNA, 616 bp, Homo sapiens
aatgagcacttagaattcccatatatcccctgccaaagtttcacttattattaatgttttacatttggatggtacattcattagtattgaaccaatattgatacatttttgttaactaaagtccatcctgtattttggttttcttagatttccttaatatctttttactgtttcaggagcccatctaggataaaacattacatttagttgtcaagtctccttgggcaacttttggctatgatrgcttctcagattttccttgtttttgatgaccttgataggtttgaagagtactggccaggtgtattcttcaatgccttactattgaaatttgtctaattttttctcatgattaagactggggttatgggttttcaggaataagatcacagaggtagagtgccatatttatccatagtatcaagggtatattatatcaacatgatgtatgacagttgatggtgaccttgatcacatggctgcagtagtgtttattaggtttctctactatgcagttattctttgtactcctctggccatactgtactctttgaaagaaagtcaatatgtgcaacccacacttaagaggtgggaaattatgatccacttcctttaa

SEQ ID NO: 264450 - DNA, 522 bp, Homo sapiens
aaactgggacaacatcaagtgaactaaaattcctgtaactggaatgccaaaacaaatatgaagaaataatagctgaartgttacctaactagatgaaaactataaaccaacagaccaaagaaggtcaataaaatacaagtgtaatatatgagcttatagaaaaatcacattcatgtatgtcatattcaaattactgaaaagaaaaaatgccagagaaaacagacacattaaatatagaaaaacaaagataagaatgatggatttctcatcagaaatcatgcatgctagaagataatggtgagacattttaaagtattgaaagaacatagaattcttatagaatgtcaatatagaattctataccctgaaaatatatatttcaaaaaataagacttctgtagaccaataaaaactaagattatatccagcctgcactaaacaacaacaacaaaagttaaaggaagtttttcaggcacaaggaaaaggataaaatatgaaaatgtagacctatccaaaggaatg

SEQ ID NO: 264451 - DNA, 522 bp, Homo sapiens
aaactgggacaacatcaagtgaactaaaattcctgtaactggaatgccaaaacaaatatgaagaaataatagctgaaatgttaccwaactagatgaaaactataaaccaacagaccaaagaaggtcaataaaatacaagtgtaatatatgagcttatagaaaaatcacattcatgtatgtcatattcaaattactgaaaagaaaaaatgccagagaaaacagacacattaaatatagaaaaacaaagataagaatgatggatttctcatcagaaatcatgcatgctagaagataatggtgagacattttaaagtattgaaagaacatagaattcttatagaatgtcaatatagaattctataccctgaaaatatatatttcaaaaaataagacttctgtagaccaataaaaactaagattatatccagcctgcactaaacaacaacaacaaaagttaaaggaagtttttcaggcacaaggaaaaggataaaatatgaaaatgtagacctatccaaaggaatg

SEQ ID NO: 264452 - DNA, 522 bp, Homo sapiens
aaactgggacaacatcaagtgaactaaaattcctgtaactggaatgccaaaacaaatatgaagaaataatagctgaaatgttacctaactagatgaaaactataaaccaacagaccaaagaaggtcaataaaatacaartgtaatatatgagcttatagaaaaatcacattcatgtatgtcatattcaaattactgaaaagaaaaaatgccagagaaaacagacacattaaatatagaaaaacaaagataagaatgatggatttctcatcagaaatcatgcatgctagaagataatggtgagacattttaaagtattgaaagaacatagaattcttatagaatgtcaatatagaattctataccctgaaaatatatatttcaaaaaataagacttctgtagaccaataaaaactaagattatatccagcctgcactaaacaacaacaacaaaagttaaaggaagtttttcaggcacaaggaaaaggataaaatatgaaaatgtagacctatccaaaggaatg

SEQ ID NO: 264453 - DNA, 522 bp, Homo sapiens
aaactgggacaacatcaagtgaactaaaattcctgtaactggaatgccaaaacaaatatgaagaaataatagctgaaatgttacctaactagatgaaaactataaaccaacagaccaaagaaggtcaataaaatacaagtgtaatatatgagcttatagaaaaatcacattcatgtatgtcatattcaaaytactgaaaagaaaaaatgccagagaaaacagacacattaaatatagaaaaacaaagataagaatgatggatttctcatcagaaatcatgcatgctagaagataatggtgagacattttaaagtattgaaagaacatagaattcttatagaatgtcaatatagaattctataccctgaaaatatatatttcaaaaaataagacttctgtagaccaataaaaactaagattatatccagcctgcactaaacaacaacaacaaaagttaaaggaagtttttcaggcacaaggaaaaggataaaatatgaaaatgtagacctatccaaaggaatg

SEQ ID NO: 264454 - DNA, 596 bp, Homo sapiens
gaagataatggtgagacattttaaagtattgaaagaacatagaattcttatagaatgtcaatatagaattctataccctgaaaatatatatttcaaaaaataagacttctgtagaccaataaaaactaagattatatccagcctgcactaaacaacaacaacaaaagttaaaggaagtttttcaggcacaaggaaaaggataaaatatgaaaatgtagamctatccaaaggaatgaagagtggcaaaactggaaaatacatgagcacataaaacatactctttcacatgttctaatttctttaaaagataactcaattataaggaaaaataataatctattgtagggtatacaacactcacaataaaattggtatcaataatagcatgaaaggcaaatgggaggaaatggaagtatcttatgttcctacaactatatgtgaaatggtaaagcagttcccgcttacccacagggaatgcctagttccaagacccccagtggatgccgaaaacttaggatagtacttcctgcactgaagtcttaaatccctcaaagtcatccatgagggttaaaatcagtttttcccaaactcccatt

SEQ ID NO: 264455 - DNA, 557 bp, Homo sapiens
ggtaccaatcctactgaaactatttcaaataattaggaagagggactcctccctatctcattccataaggccagcatcgttctgataccaaaacctggcagaacacatggtctaatatccagaacttataatgaacttataaacgaacaagcaagaatcaaacaaccccgttaaaaaatgggcaaaggacatgaacagacacttttcaaaaggagacatacacatagccaagaagsatatgaaaaaatgctcaatatcactaatcatcagagaaatgcaaatgaaaaccacaatgagataccatcttacacaagccagaaaggctattattaaaaagtaaaaattaaaaaaaaaatgtttgtgaggttacagagaaaagggaacacttatacactgctgatgggaatttaagttcaaccactgtggaatgtggtttggagatttctcaatgaacataaaacagaactaccatttgattcagcaatcacattactggctatatgaagggatataaattgttccatcataaagacatatgcacatgtatgttcatcaca

SEQ ID NO: 264456 - DNA, 579 bp, Homo sapiens
taattttttctcatgattaagactggggttatgggttttcaggaataagatcacagaggtagagtgccatatttatccatagtatcaagggtatattatatcaacatgatgtatgacagttgatggtgaccttgatcacatggctgcagtagtgtttattaggtttctctactatgcagttattctttgtactcctctggccatactgtactctttgaaagaaagtcaatatgtgcaacccacacttaagaggtgggaaattatgatccacttcctttaaaattgaatattaacrtaatttatcaggaattcttctgcatgggagatttgtctcttcttccccatttattaacatatttaatcatttatttatatcagtatgaactcatggatgatgattttatacttcatactataatccactgctacattagattgttgttcaaattgttccaccttttgctacttagaatgagaaaacattataaattgaatgaaaataaaaacacctcaaaatgtgtgggatgcaactaaagcagtacttacaggaagatttgttgtattaaatacttgtactac

SEQ ID NO: 264457 - DNA, 545 bp, Homo sapiens
gtataaaaacagacacatataccagtggaatagaatagagaacccagaaataattccatatgtttatagccaactcttttatgacaaggcacaaagaacatatattggggacaagaaagtctcttctataaatggtcctggaaaaaactggatattcctatgcagaataaacttagactcctatccctcatcttacacataatctgacttacagrtggaatccaggctcacaaaagcagatagcagaatggtggtttccaggggatagaggaaggaggaaatggggagttgttggtcagatggtatcaagtaacagttacacaagatgaatacgttctgaagatctgatgtatagcaaaatacatacaatactgtattataatgatatttgctaagagggtagatcttatgtttgtaatacacacatacacacaaagaaagaaaatggtaactgtgaggtggtggatatgttagcttaattgtggtaatcatttcacagtatatagacaaatcaaaacatcaagttgcacaccttatgtatacac

SEQ ID NO: 264458 - DNA, 551 bp, Homo sapiens
aagcaattctgagccaagaaaaacaaaaacaaaataaaaacaaacaaacaacaacaacaaaaaaacaagaacaaagcttggggtattacactacctgacttcaaaatacactacaaatctatagtaaccacaaaatcatgatactggtataaaaacagacacatataccagtggaatagaatagagaacccagaaataattccatatgtttatagccaactcttttatgacaaggcacaaagaacatatattggggacaagaaagtctcttctataaatggtcctggaaaaaactggatattcctatgcagaataaacttagactcctatccctcatcttacacataatctgacttacaggtggaatccaggctcacaaaagcagatagcagaatggtggtttccagggkatagaggaaggaggaaatggggagttgttggtcagatggtatcaagtaacagttacacaagatgaatacgttctgaagatctgatgtatagcaaaatacatacaatactgtattataatgatatttgctaagagggtagat

SEQ ID NO: 264459 - DNA, 545 bp, Homo sapiens
gtataaaaacagacacatataccagtggaatagaatagagaacccagaaataattccatatgtttatagccaactcttttatgacaaggcacaaagaacatatattggggacaagaaagtctcttctataaatggtcctggaaaaaactggatattcctatgcagaataaacttagactcctatccctcatcttacacataatctgacttacaggtggaatccaggctcacaaaagcagatagcagaatggtggtttccaggggatagaggaaggaggaaatggggagttgttggtcagatggtatcaagtaacagttacacaagatgaatacgttctgaagatctgatgtatagcaaaatacatacaatactgtattrtaatgatatttgctaagagggtagatcttatgtttgtaatacacacatacacacaaagaaagaaaatggtaactgtgaggtggtggatatgttagcttaattgtggtaatcatttcacagtatatagacaaatcaaaacatcaagttgcacaccttatgtatacac

SEQ ID NO: 264460 - DNA, 604 bp, Homo sapiens
acagctttgacatattattacttatcaattcaaaatatttaaaactgcaattttaattaaagacaaaataaatttcatttgaaattttatcaaataatttcaggatattccatgagaactggagatacgcttatttattcaaataccagagcttaaatatgctataccttgcattccacaaataaatatgtgaatggcccctccactccaatgaygtatctctttatataaacacacacacacacacacacacacacacacacacaaattcaatcaatgtcactcaatggaaactcagttatttaaatgccacacctaagctaaattaggtgctgagaattcagtactgaataaataagaattaattacagagaccgtcttcaaggagttcttgttcattcaatctataaaaagttctcacacagaataaatcttttttcttttctaattcttgccataaagggcctgtaaggccatgttacattgctcccattggttaaaaccaagaatacttttatctggagacctttccattaactacctgcaaataaaatggtattactataatctgaatctaaagttaatgtgtgaaacagatttattt

SEQ ID NO: 264461 - DNA, 604 bp, Homo sapiens
acagctttgacatattattacttatcaattcaaaatatttaaaactgcaattttaattaaagacaaaataaatttcatttgaaattttatcaaataatttcaggatattccatgagaactggagatacgcttatttattcaaataccagagcttaaatatgctataccttgcattccacaaataaatatgtgaatggcccctccactccaatgatgtatctctttatataaacacacacacacacacacacacacacacacacacaaattcaatcaatgtcactcaatggaaactcagttatttaaaygccacacctaagctaaattaggtgctgagaattcagtactgaataaataagaattaattacagagaccgtcttcaaggagttcttgttcattcaatctataaaaagttctcacacagaataaatcttttttcttttctaattcttgccataaagggcctgtaaggccatgttacattgctcccattggttaaaaccaagaatacttttatctggagacctttccattaactacctgcaaataaaatggtattactataatctgaatctaaagttaatgtgtgaaacagatttattt

SEQ ID NO: 264462 - DNA, 604 bp, Homo sapiens
acagctttgacatattattacttatcaattcaaaatatttaaaactgcaattttaattaaagacaaaataaatttcatttgaaattttatcaaataatttcaggatattccatgagaactggagatacgcttatttattcaaataccagagcttaaatatgctataccttgcattccacaaataaatatgtgaatggcccctccactccaatgatgtatctctttatataaacacacacacacacacacacacacacacacacacaaattcaatcaatgtcactcaatggaaactcagttatttaaatgccacacctaagctaaattaggtgctgagaattcagtactgaataaataagaattaattacagagaccgtcttcaaggagttcttgttcattcaatctataaaaagttctcacacagaataaatcttttttcttttctaattcttgccataaagggcctgtaaggccatgttacattgctcccattggttaaaaccaagaatacttttatctggagacctttccattwactacctgcaaataaaatggtattactataatctgaatctaaagttaatgtgtgaaacagatttattt

SEQ ID NO: 264463 - DNA, 615 bp, Homo sapiens
tcaaaacgccagtgaaaaacctagatcctcaaactgttctttgaactacctttgccatcttcctggtttcttcactaattaatacattgagtaaaatgtttaacctggtttcatttcaaatttgtgagtcacatttataatttttaaaaaactctgctttgacaaggggaagaatatcttttttaaataggaggagggctaggcacagtggctcacacccgtaatcccagcactttgggaggccgaggtgggaagatcacttgagctcaagagttcgaggscagcctgagcaacccagtgagacctcatctctaccaaaaattaaaaaaaagaaaaagatagccaggtgtggtggcactcacctgtagtcccagctacttgggcggctaaggcaggaggatcacttgagcccgcaagatggaggctgcaataagctatgattgtgccactgtactccagcctatgcaacagagcaagactctgtctcaattaaaaacaaaaacaaaaggatggcagtgttcttgtgactggcagtgaggtaacagatttcagtaaggagccttccctggaagcagacatgagatcttaaggacctcagaattaactaagaacctc

SEQ ID NO: 264464 - DNA, 543 bp, Homo sapiens
gtgactggcagtgaggtaacagatttcagtaaggagccttccctggaagcagacatgagatcttaaggacctcagaattaactaagaacctctaagaatgacacctaagcttctgcctaccaactatgttattgaaaagatacaaaatagtacaattttaattaaagacaaaataaatttcgtttcgaattttatcaagtaatttcaagacactccttgataactggagacactcttactaattcaaatactagggtttaaacatgctataccttgcattccacaaataaatatgtgaatggtcctttaccccaatgacttatcctctttatataaatacacacacatattattaagacctctccagtgcacagatgaatagactaaaattcatatcaaaccataccaatagtcagttgttcaaaccttccatcagaacagctttgatcagaaatgcatgcctaatcctagtattttaataaacaacagtgcagtgagtcacagataaccctacagaarcacaagaattaaactggataaatt

SEQ ID NO: 264465 - DNA, 583 bp, Homo sapiens
gttttataatgatttctggactcatctcctcgggttggaccataagcatcttgaggacagaaactgtaacattttcacttttcaatctccagccactagactaacacaatggagacatggcaagaaatgtttgagggactaattagttaattccataaagaatgtgtatgtatcaccaggtaactaatctgcatgtccacatcaagaactctgagaagtcacagaggtaccacttgagtgataggcactcrgtccctcagggaaagattgtgaaagatattgagggaccagtggtcaggttcgtaagataaaggtttccctccaactcctggggaaggtgcaatagtatagaaaatagagaattagccctgataaaagagaaatccttaaaaaagtattacttattctgtgatagagcactgaggaaagaggaacaaaagctccaatatgaaacaaagtgatcccatctaatcataaataaaagaaaaactacaagtgtttggtttgctcaggaaacaaaagcaaaacacctttcctcaggtggcagggtgacataattggagagtcactgaatactgtacat

SEQ ID NO: 264466 - DNA, 583 bp, Homo sapiens
gttttataatgatttctggactcatctcctcgggttggaccataagcatcttgaggacagaaactgtaacattttcacttttcaatctccagccactagactaacacaatggagacatggcaagaaatgtttgagggactaattagttaattccataaagaatgtgtatgtatcaccaggtaactaatctgcatgtccacatcaagaactctgagaagtcacagaggtaccacttgagtgataggcactcagtccctyagggaaagattgtgaaagatattgagggaccagtggtcaggttcgtaagataaaggtttccctccaactcctggggaaggtgcaatagtatagaaaatagagaattagccctgataaaagagaaatccttaaaaaagtattacttattctgtgatagagcactgaggaaagaggaacaaaagctccaatatgaaacaaagtgatcccatctaatcataaataaaagaaaaactacaagtgtttggtttgctcaggaaacaaaagcaaaacacctttcctcaggtggcagggtgacataattggagagtcactgaatactgtacat

SEQ ID NO: 264467 - DNA, 629 bp, Homo sapiens
tcaaccaacaaggagacaggagtctagctcaaatctgtcttcctgtactgtttttaaggcagtatttttattagaaaatgtgtagggagtgaatttggggatagtaggagattggtagaaggaaaggggggtctgaaaaggctttgggcatttgcagtatctcttcatgctatctcatgggtcacatatgtaaattcagggggagttagtaygaaacatgcagtggaaatttgggctgtggcgtcagcaagctcattctgtgtagactctagtttgctgtattggttccaactgatttcagccagttttgttatcttaaaagcagagagaatttcagtgtttcagaaagttgtttttgttttttatttttatcaaccaatcctataaattcaagaatttctctttgccactggttaactctttggggcacagtttcattagtagaccttggcctccatactccaaagaactacttatctactgggtgcagctgaaccatttccataactgagatcatgtaagtcaggaatgtatacacattacacatgtgtgcagacaaaagttcatgacttcacctaccaggtccaagacgagtctccttaggaatgcctgcatacaagcctggccct

SEQ ID NO: 264468 - DNA, 589 bp, Homo sapiens
gaaccccatgaatccttctatccaatcgttgaacctgggagagctctgacaaaggctagcatgggaaaatacgttgtcttcctcattaacagacccttcttagttatatctcactttctaagttcctgccttccacttcctaggagagaaaaaactacacagcattacctgaacatcatcccagggtratcacagaacagccatctccgcaaaagaaggaaaaatgaactgtgtaatgttgcaatatttttaactgcaaataattttgcatacaaggcttacctacaattgaccatttttgcactaaatgcttttttaaagtaacaagctaatatcttcttaatataaaaatatacatgtccaacaaaatttaacttgttctgctatcatgaaaagaggaattccagacaaatgtctcataatgtgcagtcaatgggcttatataaataaggactaaaattacaggctcaataaaagatcatcaaaccagggaaaactccaagtaaaattataatacacagttgtccctcccacctgagactcacctgagactcatactttccttccaacatgcctgttctgtctattc

SEQ ID NO: 264469 - DNA, 536 bp, Homo sapiens
ctacacagcattacctgaacatcatcccagggtaatcacagaacagccatctccgcaaaagaaggaaaaatgaactgtgtaatgttgcaatatttttaactgcaaataattttgcatacaaggcttacctacaattgaccatttttgcactaaatgcttttttaaagtaacaagctaatatcttcttaatataaaaatatacatgtccaacaaaatttaacttgttctgctatcatgaaaagaggaattccagacaaatgtctcataatgtgcagtcartgggcttatataaataaggactaaaattacaggctcaataaaagatcatcaaaccagggaaaactccaagtaaaattataatacacagttgtccctcccacctgagactcacctgagactcatactttccttccaacatgcctgttctgtctattccctcaagactcagacttcaaatgagttccctttaagtagataagaacagtttcgcaacggattccagaaaaaccaatatgccacctaaaggacaaggaagg

SEQ ID NO: 264470 - DNA, 536 bp, Homo sapiens
ctacacagcattacctgaacatcatcccagggtaatcacagaacagccatctccgcaaaagaaggaaaaatgaactgtgtaatgttgcaatatttttaactgcaaataattttgcatacaaggcttacctacaattgaccatttttgcactaaatgcttttttaaagtaacaagctaatatcttcttaatataaaaatatacatgtccaacaaaatttaacttgttctgctatcatgaaaagaggaattccagacaaatgtctcataatgtgcagtcaatgggcttatataaataaggactaaaattacargctcaataaaagatcatcaaaccagggaaaactccaagtaaaattataatacacagttgtccctcccacctgagactcacctgagactcatactttccttccaacatgcctgttctgtctattccctcaagactcagacttcaaatgagttccctttaagtagataagaacagtttcgcaacggattccagaaaaaccaatatgccacctaaaggacaaggaagg

SEQ ID NO: 264471 - DNA, 536 bp, Homo sapiens
ctacacagcattacctgaacatcatcccagggtaatcacagaacagccatctccgcaaaagaaggaaaaatgaactgtgtaatgttgcaatatttttaactgcaaataattttgcatacaaggcttacctacaattgaccatttttgcactaaatgcttttttaaagtaacaagctaatatcttcttaatataaaaatatacatgtccaacaaaatttaacttgttctgctatcatgaaaagaggaattccagacaaatgtctcataatgtgcagtcaatgggcttatataaataaggactaaaattacaggctcaataaaagatcatcaaaccagggaaaactccaagtaaaattataatacacagttgtccctcccacctgagactcacctgagactcatactttccttccaacatgcctgttctgyctattccctcaagactcagacttcaaatgagttccctttaagtagataagaacagtttcgcaacggattccagaaaaaccaatatgccacctaaaggacaaggaagg

SEQ ID NO: 264472 - DNA, 607 bp, Homo sapiens
tcataatgtgcagtcaatgggcttatataaataaggactaaaattacaggctcaataaaagatcatcaaaccagggaaaactccaagtaaaattataatacacagttgtccctcccacctgagactcacctgagactcatactttccttccaacatgcctgttctgtctattccctcaagactcagacttcaaatgagttccctttaagtagataagaacagtttcgcaacggattccagaaaaaccaatatgccacctaaaggacaaggaaggcatctacactaagaaaatgaaaagaagtcagagagagaacttcctgacttactcagattatatayccatgggtccacatatgcctaaaggccaaccttgtccttaatctttagtcactcaatctataaaataaaagatttagaaaagggctatgggcaatatggatcttttgcaggtacaaaattttttaagtccataaactttctacttaaaacactgaagaccattagtgatggttataatattcttgtctgaactgagagctatagtcaggctccttttagaagccctgccatgaacagagaaaaaagaaaaggcatgttcctactcctc

SEQ ID NO: 264473 - DNA, 607 bp, Homo sapiens
tcataatgtgcagtcaatgggcttatataaataaggactaaaattacaggctcaataaaagatcatcaaaccagggaaaactccaagtaaaattataatacacagttgtccctcccacctgagactcacctgagactcatactttccttccaacatgcctgttctgtctattccctcaagactcagacttcaaatgagttccctttaagtagataagaacagtttcgcaacggattccagaaaaaccaatatgccacctaaaggacaaggaaggcatctacactaagaaaatgaaaagaagtcagagagagaacttcctgacttactcagattatatatccatgggtccacatatgcctaaaggccaaccttgtccttaatctttagtcactcaatctataaaataaaagatttagaaaagggctatgggcaatatggatcttttgcaggtacaaaattttttaagtccataaactttctmcttaaaacactgaagaccattagtgatggttataatattcttgtctgaactgagagctatagtcaggctccttttagaagccctgccatgaacagagaaaaaagaaaaggcatgttcctactcctc

SEQ ID NO: 264474 - DNA, 607 bp, Homo sapiens
tcataatgtgcagtcaatgggcttatataaataaggactaaaattacaggctcaataaaagatcatcaaaccagggaaaactccaagtaaaattataatacacagttgtccctcccacctgagactcacctgagactcatactttccttccaacatgcctgttctgtctattccctcaagactcagacttcaaatgagttccctttaagtagataagaacagtttcgcaacggattccagaaaaaccaatatgccacctaaaggacaaggaaggcatctacactaagaaaatgaaaagaagtcagagagagaacttcctgacttactcagattatatatccatgggtccacatatgcctaaaggccaaccttgtccttaatctttagtcactcaatctataaaataaaagatttagaaaagggctatgggcaatatggatcttttgcaggtacaaaattttttaagtccataaactttctayttaaaacactgaagaccattagtgatggttataatattcttgtctgaactgagagctatagtcaggctccttttagaagccctgccatgaacagagaaaaaagaaaaggcatgttcctactcctc

SEQ ID NO: 264475 - DNA, 511 bp, Homo sapiens
atgggcaatatggatcttttgcaggtacaaaattttttaagtccataaactttctacttaaaacactgaagaccattagtgatggttataatattcttgtctgaactgagagctatagtcaggctccttttagaagccctgccatgaacagagaaaaaagaaaaggcatgttcctactcctctatcctctgtagacatcttctccgtgataagttaataatgagaagagaaaaccaaccttctagctttctcatcatttaatggtttgaaccctgagtttctgcagcctggaaaaaaaaaaaaaagaggaagcagcagcagcagcagcagcaagttctcctcatctgaaattctwccctctcctagctcaccttccccaccttctcactcctttgtggtcctcacagtcagatatgaggtaataggtggaaaatacttccctgtgataaggcagtgatgcctgagccacccacttctggtaagaaagctgttcctaaagaatagcaaatgg

SEQ ID NO: 264476 - DNA, 233 bp, Homo sapiens
tagtcactgtatcagagatgtggatccagggatgatgcaataacttctgcctccaaggagctcatagtttagtggacatctggcaaagtactcactgattcttgacaattcatataatcatatcaatagatgcaaaaaagcatttgacaaaatccaaattccatccttgatttaaaaaaaaaaattcttrgaaaactaggactagaggcaaactttctcaacttgataaaaaa

SEQ ID NO: 264477 - DNA, 516 bp, Homo sapiens
ctgtcttttggtggttgccagaaatccctggacagcacgattcaactgtctcacacaatttaaaccacaacagtcttctctccaatcccccaaaagtcatatccttactgtatgcaaaatacattcaccccatttcaacatctccaggacccttracccattccagcatcaactctaagtcaaaattgcctctaaatatcaactgtaatgtcccaaatctcatctcctaaatcatctaaatcaagtatgtgtgagatcctgggtatggtccagcctggggcaaagtttctctcctatggacactgaaatccacaaaacaagttatctgcttccaaaatacaacaggcataggacagacagtcaccttccaaaagggagaaactggaaggaaaaagtgggtcacaggtctcaaacaagtccaaaacatggcagggaaattttcattaggtttccagggcctgagagggctgtctggatccatgagtcacacaggtaatcttttcagtgaatggttgt

SEQ ID NO: 264478 - DNA, 516 bp, Homo sapiens
ctgtcttttggtggttgccagaaatccctggacagcacgattcaactgtctcacacaatttaaaccacaacagtcttctctccaatcccccaaaagtcatatccttactgtatgcaaaatacattcaccccatttcaacatctccaggacccttaacccattccagcatcaactctaagtcaaaattgcctctaaatatcaactgtaatgtcccaaatctcatctcctaaatcayctaaatcaagtatgtgtgagatcctgggtatggtccagcctggggcaaagtttctctcctatggacactgaaatccacaaaacaagttatctgcttccaaaatacaacaggcataggacagacagtcaccttccaaaagggagaaactggaaggaaaaagtgggtcacaggtctcaaacaagtccaaaacatggcagggaaattttcattaggtttccagggcctgagagggctgtctggatccatgagtcacacaggtaatcttttcagtgaatggttgt

SEQ ID NO: 264479 - DNA, 547 bp, Homo sapiens
tgaatttctccctctgtgtccaaatttcccttgttttacagggacaccagtcattgcattaggacctcagcttaacttgtttaacatttgcaaagatcctatttctaagtaaggttggactcacaggtatctggggttaggacttcaaaatattctcttggggtataaaattcaaccacacaacaataataaaagagaaaatctatgtgaccttggttttggcaatgagattttaaatacaacaccaaaaggataatccaggaaacaaagttgataagctggactttattaaaattaaaaactycttttctgcaaaatacactgttaagagactacaaagacaagctacagaccaggagaaaatgtttgagaaagcacatatctgacagaaaatttctaataaaaaataaacaaagaactcttaaagctcaacaatgagaaaacaaacaacctcatttaaaaattggcaaaataggcatgccactgcaaattccgtgaaacaggagaaaaactgtgagttcccaaagtgtaagagggagaaaaccga

SEQ ID NO: 264480 - DNA, 571 bp, Homo sapiens
gtggtaagcaggggttcaggggttgagctagaataatgaacagaagaagcacagaagacttttagggcaatgaaactattttatatgatactataattgtggatacatgacattatacatttgtcaaaacccatagaaatgtacaatataactagtgaaccttaatgtaaactacagacttcagttaatactaatctatagatattggcttattaactatarcaaatgtaccaaacaaacacaacatattaataacagggaaaaccatggggctgagggggtatagggtaactttctgtactatctactcaattttttaataaatctaaaactgttctaaaagtagtctgtaaaataagatttttaagagcaaacagaacaagaattttaaaagataattgtctgaagcacaaataatgacaattatatggtgcactttataagatatgtagatgtaaaatgtatggcaatcataacacaaagtatgggtgggaaataatggaagcacactgttgtaaggtatatatattatactatatgtgaaatgatatattatttgaaggtagactgt

SEQ ID NO: 264481 - DNA, 574 bp, Homo sapiens
aaacaatcatgttgtctgcaaataaagacaattttatttcttcyttttttatctgtgtacatttatatcttttccttcctttatttcactgactaggacctccctataacgaacagaaattgtgaatggaacatccaatgtgatgctggtataagaatagacatatacctcagcaggaaagaacagagagattagaaataattcacacatagcaacaattgatttaggaggggaaaggtgccaagataatataatggggataggatagtgctttcaacaagtgtgtgggaaaatgagacatccacatacagaattatgaacttcaccccatactcatattatgtacaaaaatccactcaaaatagatgacagacctaaatgcaaactctaaacctataaaacttctagcttaaagcttaggggaaagcttttgtgacactggattacacaaagatttcttaagacactaagcacaaaccacaaaagaaataattgataacttgactttgaaaaaatcaaaagcttctgctcttcagaagacagcattaagaaaatgcaaagtcaagtcccagtc

SEQ ID NO: 264482 - DNA, 492 bp, Homo sapiens
caccttggcctcccaaagtgctgggattgcaggcatgagccaccrtgcctggccagagcttttcactttaaaattatttcaaaatggtaaaaggaaatctgaaaagtccagtgaaggaaaaccacttgggaaacagaaatcccaaagatcaggattgataaatgtctctatcttcgagttatagacagagagggctccaaggacaaaatttgaggaaagatggttgataatctcttgtgtaagaaagttttcatttgcaagaaacaggcagagcaacttaagctggcttaagcatgcatagactgattgccacaggagctccaagtcccgctgcatgacagggttcagttggttgattcagttataacaactgggaccccagttctcgccattcttcctgctctggcatccagagtgttgatttcgcttggcttcctttgaagacagatcccttttaaggtcatggaaaggctgtcagaagctatacagtgg

SEQ ID NO: 264483 - DNA, 492 bp, Homo sapiens
caccttggcctcccaaagtgctgggattgcaggcatgagccaccgtgcctggccagagcttttcactttaaaattatttcaaaatggtaaaaggaaatctgaaaagtccagtgaaggaaaaccacttgggaaacagaaatcccaaagatcaggattgataaatgtctctatcttcgagttatagacagagagggctccaaggacaaaatttgaggaaagatggttgataatctcttgtgtaagaaagttttcatttgcaagaaacaggcagagcaacttaagctggcttaagcatgcatagactgattgccacaggagctccaagtcccgctgcatgacagggttcagttggttgattcagttataacaactgggaccccagytctcgccattcttcctgctctggcatccagagtgttgatttcgcttggcttcctttgaagacagatcccttttaaggtcatggaaaggctgtcagaagctatacagtgg

SEQ ID NO: 264484 - DNA, 553 bp, Homo sapiens
ctcatctatgattacaaaataccttgctaggattttggtaagaattgcattggacctataaaattaatttggggagaaytgatgcctttactatgttgagtttggaagcccacttttgcactacaatttagtgctgaatatgtatatgctttagcaacctcatacaacggtgtgctgacacataataggagcttcataaatatttatggcagggaggaaggatgggaaggccaagtgaagtcttgaagagtttggatcagttgtccttaaatctggccacagaaacaaccatctgctgagcttggtaaaagtacagatttctgggcttcatctcagccctactgattcagaatctccagggatgaggccagtgaatctgtattttgaacacctgctatagttgatcctcaagcacagccaggtttgtagcatgtagcagccaacaatggaagcagtgtgcaggcgctgagctgagtctcctaggaattagctgttctttctgacatttgccctgaaacaaagcaagtggtagctgcaattgagtccacctaag

SEQ ID NO: 264485 - DNA, 553 bp, Homo sapiens
ctcatctatgattacaaaataccttgctaggattttggtaagaattgcattggacctataaaattaatttggggagaactgatgcytttactatgttgagtttggaagcccacttttgcactacaatttagtgctgaatatgtatatgctttagcaacctcatacaacggtgtgctgacacataataggagcttcataaatatttatggcagggaggaaggatgggaaggccaagtgaagtcttgaagagtttggatcagttgtccttaaatctggccacagaaacaaccatctgctgagcttggtaaaagtacagatttctgggcttcatctcagccctactgattcagaatctccagggatgaggccagtgaatctgtattttgaacacctgctatagttgatcctcaagcacagccaggtttgtagcatgtagcagccaacaatggaagcagtgtgcaggcgctgagctgagtctcctaggaattagctgttctttctgacatttgccctgaaacaaagcaagtggtagctgcaattgagtccacctaag

SEQ ID NO: 264486 - DNA, 553 bp, Homo sapiens
ctcatctatgattacaaaataccttgctaggattttggtaagaattgcattggacctataaaattaatttggggagaactgatgcctttactatgttgagtttggaagcccacttttgcactacaatttagtgctgaatatgtatatgctttagcaacctcatacaacggtgtgctgrcacataataggagcttcataaatatttatggcagggaggaaggatgggaaggccaagtgaagtcttgaagagtttggatcagttgtccttaaatctggccacagaaacaaccatctgctgagcttggtaaaagtacagatttctgggcttcatctcagccctactgattcagaatctccagggatgaggccagtgaatctgtattttgaacacctgctatagttgatcctcaagcacagccaggtttgtagcatgtagcagccaacaatggaagcagtgtgcaggcgctgagctgagtctcctaggaattagctgttctttctgacatttgccctgaaacaaagcaagtggtagctgcaattgagtccacctaag

SEQ ID NO: 264487 - DNA, 543 bp, Homo sapiens
gtgcaggcgctgagctgagtctcctaggaattagctgttctttctgacatttgccctgaaacaaagcaagtggtagctgcaattgagtccacctaagacaaattaacatgttcttcctgatatatgactcaaaatgagtatagcagcctgggagtcaagggtggtcctttcctacaaggaggaggaccagatgtattttgagcctgtatccaccaatttcttttccaaagaggaaataagcaaccaatgttcagcagaatgtgagcagttcctaaattgtaaatactgttatttaatcacttcattgcatacttgattagttccctaaccttgaggcctgtgaaactgtaatgatgcaccaggggagctggcctcagctctgagagaatttagaacaaggctgttcagatccctggaaacatctttttcattaatagcagaagaagccaaatgacccataagatttttctgtcataaggagaacagaaaaattagaaacaaaagmacatagaggagagttcatgaattagattttagagcaca

SEQ ID NO: 264488 - DNA, 452 bp, Homo sapiens
caataggaggaaagttaaggagtgggtttcaattatacttgaaacttctcaaactgttgtctcgttaagtttcagtggaccttgaaactgtgtttatgtgaaagtttttggaacattcagcatttttaaatatacactgtaagtactttaacagaatgttgrgtggttacagacctgcccagaatttaacctcccttcctcccagtgtgacagtttctgttgcccttactttttctgtgtcctcatcaatatgttctgaccctgcctggtgaccaggtcagcttctggtggctccttgcattaacagtgagactttcctgatgctggtctatactcagccacagcagtccaacaagatgggccctatgacaggacaccaagactcttctctgcagtacatccagcagaggggcaggtaggagcaggcaaaacaggaatcagcactagacatt

SEQ ID NO: 264489 - DNA, 452 bp, Homo sapiens
caataggaggaaagttaaggagtgggtttcaattatacttgaaacttctcaaactgttgtctcgttaagtttcagtggaccttgaaactgtgtttatgtgaaagtttttggaacattcagcatttttaaatatacactgtaagtactttaacagaatgttgggtggttacagacctgcccagaatttaacctcccttcytcccagtgtgacagtttctgttgcccttactttttctgtgtcctcatcaatatgttctgaccctgcctggtgaccaggtcagcttctggtggctccttgcattaacagtgagactttcctgatgctggtctatactcagccacagcagtccaacaagatgggccctatgacaggacaccaagactcttctctgcagtacatccagcagaggggcaggtaggagcaggcaaaacaggaatcagcactagacatt

SEQ ID NO: 264490 - DNA, 601 bp, Homo sapiens
gtttatgtgaaagtttttggaacattcagcatttttaaatatacactgtaagtactttaacagaatgttgggtggttacagacctgcccagaatttaacctcccttcctcccagtgtgacagtttctgttgcccttactttttctgtgtcctcatcaatatgttctgaccctgcctggtgaccaggtcagcttctggtggctccttgcattaacagtgagactttcctgatgctggtctatactcagccacagcagtccaacaagatgggccctatgacaggacaccaagactcttctctgcagtacatccagcagaggggcaggtaggagcaggcaaaacaggaatcagcactagacattcagacccccaaaagagagagacctgaggagagrgatgcacactcctgtacataggaggcagaacagatgggtgctcgacaggtgggccgtggagtggggaaccgatcaggtttgaattctagttctgtcacttacttattggataaccttgggaaagccccaaatgtgtcatgtgtgaaatgggggtgatgacagtccccatgttgtaggtcgttgtcatggtgcaagggccatggtaag

SEQ ID NO: 264491 - DNA, 318 bp, Homo sapiens
atcaaagtaaacaagttcaacggactgccagatttgaagctcagatgataaatctgagctgaagtacaatacttaggatttgtcacagtagtgtggacagatacccctgggtatctggggatacccaaggatagccctgggagcctgtaaggtgtaaagagaatcctgctagaggcagcacccaggatccagcccaggctctgcygcctccctcactcccctcagccacactccaacccaagagcaggcatgacatctccctcacctggcaactgcatccctccctaactactctgacatcacacctggcctggcccc

SEQ ID NO: 264492 - DNA, 591 bp, Homo sapiens
agtcagtgtaaattattatttcactatgatttaattttcacttccctgattcgaaattaggttggaccactttttcatattttctcttctgtgaaatgtttgttaatgtgttttgcccatttttctatttggttatcttttacttactaatatgcagtttcttatattttctaggcattaatcctttgtgagcatagacctcagtaacagaccctaggaggagcctaaccatagtcytaaactgaaactgaaaaggagggtactaagaaagaaaaaagcagtgtctatctacttttccctaggaactggccttactctaacagctaagaaatggtatttcctgtttgcaaagtaatgtgttcttatttttattttaaaaatatatttatattcaaaattccacttctgcctaaatatagaaagctagtatgagcatcactcctaccctaacaatatacataagttgaaaaaaaaacactaaatcaaaattttattgaacccattagagagctgaggttgtagggcaaccaagtagtctgaaatctaaggaaagacagactctcctaaggagtgacaggacatgaacactgg

SEQ ID NO: 264493 - DNA, 536 bp, Homo sapiens
aatagctcccccttagctgcaggggatatgttccaagacccccagtggatgcatgaaactctggatagtattgaacctgatcgtcatcaactgaaacatatttttgttcatgtcttccacccataaatttaatgccttttccatcttaagtaagcatgtatcatgcactgtggccataactttggcactctgatgtgcaacagcaaaacttggatagaagattcattcttaccataggtctacgcaactttagcatatgatttttttctttccttattaagtcaagaactttcaccttttcatgtaaagaaagcactttacagcttccctttggcatatycaaattgccagcatcactactctttggggccattactaagtaaaataagggttacttgaacacaagcactgtgaggccaaaacagtagatctgataaccaagatgactactagttgactaagagacaggtagcacatagggcatgaatatgctggacaaaggaatgattcactcccaggcaggacagagcaggaca

SEQ ID NO: 264494 - DNA, 596 bp, Homo sapiens
ctactctttggggccattactaagtaaaataagggttacttgaacacaagcactgtgaggccaaaacagtagatctgataaccaagatgactactagttgactaagagacaggtagcacatagggcatgaatatgctggacaaaggaatgattcactcccaggcaggacagagcaggacagtgtgaggtttcatcacactactcagaacagtgtgcaatttaaaacttattgtttatatctggaattgtccacttaacatttttagtctgtggttgactgcaggtaactgaaactatgaagagtgaaaccatggataagacatttttacttctatctctagactatacaatattcagttttcaaccaaaaaattatagagtacayacagaagtaagaaaaagagaaaaaagttgccaagagacaaagcaatcaacagaaccagacagagatataacatatgttaaaactgtcaagtgatgaatttaaaatagtgataatcaatgtgtgaaaaggcagtgggaaaagtagacaatatacatgaacagatggagaatttcaatggagagatggaagccataaaaataataaagtggaa

SEQ ID NO: 264495 - DNA, 596 bp, Homo sapiens
agggaggaggatgggaggagagagaggatcaggaaaaataactattgggcactatgctgagcacctaggtgatgaaatggtctgtatagcaacccctgtgayacgagtttgcctgtaataacaaacctacacatgtagccctaaacccaaaacaaaagattaacaaagaacagtgcttgtctcctccccagctgattgctatacctatacaaaatatagaaattttgtataggattctatacaaaatatagaaatcctggagccgaccctatcaacaaggactttgggtggcaataaaaaggtcctccctgccatgcaaggagagttgacagaaaaaaaaagactggttgtatccagccgtgtctaacaaaattagagtaggttactccctttcagcaagacaagcatggtaacgcccattctgcccctgaaattgcaaagcttattaatttgtgccactacactgcttctttgcaagccaacaccatgaggaaagcaatatagaagacctacgtggacttcaaggtctagtacctcacagtaatcatgtactcctgaaaacaggggagcctcttaagctcccaagagtgggttaa

SEQ ID NO: 264496 - DNA, 596 bp, Homo sapiens
agggaggaggatgggaggagagagaggatcaggaaaaataactattgggcactatgctgagcacctaggtgatgaaatggtctgtatagcaacccctgtgacacgagtttgcctgtaataacaaacctacacatgtagccctaaacccaaaacaaaagattaacaaagaacagtgcttgtctcctccccagctgattgctatacctatacaaaatatagaaattttgtataggattctatacaaaatatagaaatcctggagccgaccctatcaacaaggactttgggtggcaataaaaaggtcctccctgccatgcaaggagagttgacagaaaaaaaaagactggttgtatccagccgtgtctaacaaaattagagtaggttactccctttcagcaagacaagcatggtaaygcccattctgcccctgaaattgcaaagcttattaatttgtgccactacactgcttctttgcaagccaacaccatgaggaaagcaatatagaagacctacgtggacttcaaggtctagtacctcacagtaatcatgtactcctgaaaacaggggagcctcttaagctcccaagagtgggttaa

SEQ ID NO: 264497 - DNA, 596 bp, Homo sapiens
ctactctttggggccattactaagtaaaataagggttacttgaacacaagcactgtgaggccaaaacagtagatctgataaccaagatgactactagttgactaagagacaggtagcacatagggcatgaatatgctggacaaaggaatgattcactcccaggcaggacagagcaggacagtgtgaggtttcatcacactactcagaacagtgtgcaatttaaaacttattgtttatatctggaattgtccacttaacatttttagtctgtggttgactgcaggtaactgaaactatgaagagtgaaaccatggataagacatttttacttctatctctagactatacaatattcagttttcaaccaaaaaattatagagtacatacagaagtaagaaaaagagaaaaaagttgccaagagacaaagcaatcaacagaaccagacagagatataacatatgttaaaactgtcaagtgatgaatttaaaatagtgataatcaatgtgtgaaaaggcagtgggaaaagtagacaatatacatgaacaratggagaatttcaatggagagatggaagccataaaaataataaagtggaa

SEQ ID NO: 264498 - DNA, 459 bp, Homo sapiens
tgaacttcattgtaacagttagtgagggccattgaaggattttatgtagaaaggtgagaagcttgaatgtgctgtgaaaagattattatggttgtggtgtacactatagatgtgagtttgggttatagatgatacagcaggggctgggrgtggggttagatgatctaaagaaaggaacactagtgtaatcaaaacaagaagttacagatcgatataaggcaagggcaatgtggatgaagaggaatggctagaattaagagaggttaaggggtagactgtggagaacttggttactgagtggatgaggggactgagtgaaaaaggggagtttaccatgactcccagattactgattttagcaacttgtggaataccgaacattaattaggttcttaccttacattgttttaaaatcctactggctttagcaatagaatgatattaaacatcattctgaaa

SEQ ID NO: 264499 - DNA, 633 bp, Homo sapiens
gagtataatatatttgatttccctttatgagtctcacattgcttataattgagtagggctactacattttctgggcaggctatcaaataggatgttgttatgatttgcttgactagtagagcagatgaaaatatatcagttctgtctgtagttgttctgtttttgaatttgaaatctgcacagtttgaaaccattcattcctctatggttccctttaaaatataaaagtatttttttatggtttaaagacttaagaatattacacaaaatcagttaagtaaatggttaaaacagtgtgaacttcagagaacataagaggggtcttggwtttaattcgaaaacatcaaggaagtggcagtagtacaatgcaaagatttgggcctgataaaaagaaaacaggtttcacttgtaactggcatctcagggaatcctgaatgctctaattgttggtctgcactgctttgcagtttactgagatgttaagatattttgtgctccataaaatactacttaccaaaattattttagacacataattcctctgttttgcttacaggatacatacagactcaaaacttatcagtacacttacttcctctttaaaacagtatcatgaagacaatacaagtaaat

SEQ ID NO: 264500 - DNA, 633 bp, Homo sapiens
gagtataatatatttgatttccctttatgagtctcacattgcttataattgagtagggctactacattttctgggcaggctatcaaataggatgttgttatgatttgcttgactagtagagcagatgaaaatatatcagttctgtctgtagttgttctgtttttgaatttgaaatctgcacagtttgaaaccattcattcctctatggttccctttaaaatataaaagtatttttttatggtttaaagacttaagaatattacacaaaatcagttaagtaaatggttaaaacagtgtgaacttcagagaacataagaggggtcttggttttaattcgaaaacatcaaggaagtggcagtagtacaatgcaaagatttgggcctgataaaaagaaaacaggtttcacttgtaactggcatctcagggaatcctgaatgctcyaattgttggtctgcactgctttgcagtttactgagatgttaagatattttgtgctccataaaatactacttaccaaaattattttagacacataattcctctgttttgcttacaggatacatacagactcaaaacttatcagtacacttacttcctctttaaaacagtatcatgaagacaatacaagtaaat

SEQ ID NO: 264501 - DNA, 531 bp, Homo sapiens
gtatgaaacatcacattgtaccccataaacatataaaattattatttgtcattaaaaaataaaataattttttwaaaaaataagtaagatcagtttaaaaaattatcatcgtggattctttggattggaagttccttttcggtacactaaatttttaaaaccttgtcctctacatatcactgaaatggaatcccataattgtagcagttttattctcttatataattcagtttctttttcaacaaacatttattgagcactactaggtgccaggcatgttctgggtacttagtgcatatcgatggataatatgaaggtctctgctctcttgaagtttatttccatcagaagagacagataggaaacaataaacacaatgaatagataaatgatatagtatgttagaagttggtacacactagagagaaatgaaaaagcagagcagcgtgaagacatttatcagtgctgggctaaggaggggcaggtctatgttagagtggtcgggactactcttggtccacatgaaggatg

SEQ ID NO: 264502 - DNA, 598 bp, Homo sapiens
taattcagtttctttttcaacaaacatttattgagcactactaggtgccaggcatgttctgggtacttagtgcatatcgatggataatatgaaggtctctgctctcttgaagtttatttccatcagaagagacagayaggaaacaataaacacaatgaatagataaatgatatagtatgttagaagttggtacacactagagagaaatgaaaaagcagagcagcgtgaagacatttatcagtgctgggctaaggaggggcaggtctatgttagagtggtcgggactactcttggtccacatgaaggatgttgaccaagtggaatgtgggggaagagcattctaggcagagggaacagctagaccaaaggcctattactgaaggcctggcaaggttgggaaacagcagagagccagtgtggctggagtagagccagtggaggggagagttgtaagacagcaggtgagaggagtaatgaagctggggttacaggtagctttcgtctgaatataatggggagccattgttgaccagaagaatgacatgaaatgacttctaatttaaaaggatcactcaggctgtggggtgagaacagatgg

SEQ ID NO: 264503 - DNA, 598 bp, Homo sapiens
taattcagtttctttttcaacaaacatttattgagcactactaggtgccaggcatgttctgggtacttagtgcatatcgatggataatatgaaggtctctgctctcttgaagtttatttccatcagaagagacagataggaaacaataaacacaatgaatagataaatgatatagtatgttagaagttggtacacactagagagaaatgaaaaagcagagcagcgtgaagacatttatcagtgctgggctaaggaggggcaggtctatgttagagtggtcgggactactcttggtccacrtgaaggatgttgaccaagtggaatgtgggggaagagcattctaggcagagggaacagctagaccaaaggcctattactgaaggcctggcaaggttgggaaacagcagagagccagtgtggctggagtagagccagtggaggggagagttgtaagacagcaggtgagaggagtaatgaagctggggttacaggtagctttcgtctgaatataatggggagccattgttgaccagaagaatgacatgaaatgacttctaatttaaaaggatcactcaggctgtggggtgagaacagatgg

SEQ ID NO: 264504 - DNA, 608 bp, Homo sapiens
ttattgggagagcacattagcagaggtcaataccactcctctgcttacaactcctcgaaatgtcttcaataaacatggagtacattggtaataagaaaaaacaaccaagagctattaaaaaaagaaaatccttcactggctcctcgtggcctatgggataaagtggaagtractaaacatgaacttgagcctcacctgcacacttccagcctcatctcttgccataccctgccttcaacctaaggctgctgtaatgttcaagtgcttcttgcctctttttcttcttttttctgtgcaatatctttcctccatgcctcatgcttatgctgtcctctgtctgccttgaatccctttcctacccctcacctgctcccatgctaggtcaggggcctctctctgatgtgctcccatgaactctgagcatcgcacctcctcccatgcattactatttgttcttatatgtctgtttgttcccctcactagactctatcctcaataccagacacatagagggcaaccagtgcaagtttgtcaagtgaataaatgagtgttttggtgcatactaggggaccatcataggggattgaaaataattttaagtaatcact

SEQ ID NO: 264505 - DNA, 608 bp, Homo sapiens
ttattgggagagcacattagcagaggtcaataccactcctctgcttacaactcctcgaaatgtcttcaataaacatggagtacattggtaataagaaaaaacaaccaagagctattaaaaaaagaaaatccttcactggctcctcgtggcctatgggataaagtggaagtaactaaacatgaacttgagcctcacctgcacacttccagcctcatctcttgccataccctgccttcaacctaaggctgctgtaatgttcaagtgcttcttgcctctttttcttcttttttctgtgcaatatctttcctccatgcctcatgctyatgctgtcctctgtctgccttgaatccctttcctacccctcacctgctcccatgctaggtcaggggcctctctctgatgtgctcccatgaactctgagcatcgcacctcctcccatgcattactatttgttcttatatgtctgtttgttcccctcactagactctatcctcaataccagacacatagagggcaaccagtgcaagtttgtcaagtgaataaatgagtgttttggtgcatactaggggaccatcataggggattgaaaataattttaagtaatcact

SEQ ID NO: 264506 - DNA, 608 bp, Homo sapiens
ttattgggagagcacattagcagaggtcaataccactcctctgcttacaactcctcgaaatgtcttcaataaacatggagtacattggtaataagaaaaaacaaccaagagctattaaaaaaagaaaatccttcactggctcctcgtggcctatgggataaagtggaagtaactaaacatgaacttgagcctcacctgcacacttccagcctcatctcttgccataccctgccttcaacctaaggctgctgtaatgttcaagtgcttcttgcctctttttcttcttttttctgtgcaatatctttcctccatgcctcatgcttatgctgtcctctgtctgccttgaatcccttycctacccctcacctgctcccatgctaggtcaggggcctctctctgatgtgctcccatgaactctgagcatcgcacctcctcccatgcattactatttgttcttatatgtctgtttgttcccctcactagactctatcctcaataccagacacatagagggcaaccagtgcaagtttgtcaagtgaataaatgagtgttttggtgcatactaggggaccatcataggggattgaaaataattttaagtaatcact

SEQ ID NO: 264507 - DNA, 608 bp, Homo sapiens
ttattgggagagcacattagcagaggtcaataccactcctctgcttacaactcctcgaaatgtcttcaataaacatggagtacattggtaataagaaaaaacaaccaagagctattaaaaaaagaaaatccttcactggctcctcgtggcctatgggataaagtggaagtaactaaacatgaacttgagcctcacctgcacacttccagcctcatctcttgccataccctgccttcaacctaaggctgctgtaatgttcaagtgcttcttgcctctttttcttcttttttctgtgcaatatctttcctccatgcctcatgcttatgctgtcctctgtctgccttgaatccctttcctacccctcacctgctcccatgctaggtcaggggcctctctctgatgtgctcccatraactctgagcatcgcacctcctcccatgcattactatttgttcttatatgtctgtttgttcccctcactagactctatcctcaataccagacacatagagggcaaccagtgcaagtttgtcaagtgaataaatgagtgttttggtgcatactaggggaccatcataggggattgaaaataattttaagtaatcact

SEQ ID NO: 264508 - DNA, 573 bp, Homo sapiens
ggcaaagttctgtttgagactcagtctctggacagccttagcagagcagcaggtttggtgtccttgtcatctctgtgttacggccttctaagtctgcatcccgctgagccttagtctatgtgcagaatcaaatacactttcttctgcttggttgattttgatatttcaatacatgataaatgattgccaatcaatcagctggatcattgcacagaaaatccaatctgatcatcatgttcacatctcrttgttttattcaattaatgaacaaacaggaccaaccacaaagaattttggttcctgaacaataacttagactcataaacttcccaacagaaacctgatgaaaaccaatcaatttaaggcacatgtatacaaacatggcatatgtaatgagtaaaacataaattagtaaaaaaacaaaaacaaaaacaaaaaacttcagaaatctatatttcttattgcatcactgaaataaatcagtctctaatatattcagatttaactctcttatgcttactcttgttcactactctcagcttgtgtttctgaaaagttttatgtaaacccaag

SEQ ID NO: 264509 - DNA, 591 bp, Homo sapiens
atttactcaagctttactcaaaatattgacactatttagtatcaaaccaaactccgggagtacacagagggccttcctacaatgcatgtgatcagggacagcaatgatcttatcccataatatatcacaaaacagtggaaaaaaatcatctcatatttttagaaatcatgctcttattagctcaaatatatagtttargcagtcaacattttgtggcttccatcattttcaaagattatgctgcacaaaattgtatagagagtattttgacttacacattgacttttttaaatataggagtgattgtagcaatagcattgattgtagctttaatttacattatcaagaaaactacaccaaataaattcaaattatatttatataattttgatataaatcttgaatcagataagtctcaacatttaataaatgtttttaccacattaatttgcattttaacagtattttccgcacagaaaatctgtgatgcatatttaattatggcatggaattttttattatactttcttatgtagtttagaatatataaaattaaatataattatacttttgttcacagaataattttaa

SEQ ID NO: 264510 - DNA, 567 bp, Homo sapiens
ccatcattattccaaagtatgaatattttataacagcacagaaaaatatatggcattataaggggctttagctctgatagaagcgtgcacacatcagtttagaaatcctagttcttaagaatgcaattctgactttaaatctacaccatgtacacattccctgacaaatataactagaattactgccttatttatgacatacctaggtgtgcagactatatgtataaagtcagtggcttcratttttttatttgccactctaattaactgggataatacaagtcagaaaacaataaattcttagttggtatatagctttatttactttccttagatataatggtagcgcatacaagtggattcagttatgcttgtcattctctgcaggcataagttataaatctgtcacagatagtttggcatagctaacaagtttgcactcagagaaaactgttctgtagtaataagcagagaacagataaaaataataataaagaatcattgaataagaccctgcttgaagataatgaaagtaaaaagacatctagtagaagaacatcataaaat

SEQ ID NO: 264511 - DNA, 607 bp, Homo sapiens
gtgactctgcgatgcagatgaatgctctctaaaaaggaatataaaatggaaacctccttaagttcctaccctcaggcaggctttcttataccacaagatttactgtagagattgagctgaaaaagtttcaaaaaacctgaaacatcagtatagcagatggtagacatactttgagttccagatgtccacaaacagccctgctatagcatcagactcatgggtcacccatcccagaatcacatgttcttacagtgatcaagggctggtgtatggaatgccatgattttcccttgtaatgctaaacttaaaatgataagcacgtatttctcaaacatcccagtttcctaaataacttattgaaaagctattattcttaagctaatttaaatccttcctgaaaaccaaaatttactacagactccctacctgaatctagggaattggctggacttgaatcagaattgttttcagaattgcaggatgagaaagcccmacacagaggaatttaaagggatttcaccaaaggcaaggaaatactatccacaataattgtgtgaatctagagccattttaagaaatcaccttcaatttaatacaaacaaatttc

SEQ ID NO: 264512 - DNA, 470 bp, Homo sapiens
tccaaacttttcctttgattgctgattttaactctggaaatcagtcaaataaacacaaatacaaaatggtagctgaagaagcaagttttgaagtttttctgtatcarggaagtagtccagtaacatttcttccagatgctgtgttaattaagattcttttttctatttttcacttacggcagtacaaaatgttctcttaatctctatcctattaaagacacatatatatggaaaaactaaggattcaggtaaaataattcttggcttagtttacactttatattacaattatagttttatttctgtcaggctccttttgaaaactgatattcacacaggagacaagaatgtggttatatttttaagcatatagattcaagttggtttaactatgtttacttttacatcatttttaaatcatggcaagttaaatattcttagtaatcaggagagtcactcttatagaacct

SEQ ID NO: 264513 - DNA, 532 bp, Homo sapiens
gttttttttttttttttgtaatggcagtagagaaggcaaactattgttaaactattgctctttttgtgtatttttaaagaagtagtgagtagtttttggttagtggtttagttaccaaaacattgtctctgaaacagatagagaagactgcctctagggtatatgacagatggggttgacttcaggttgctttgtttttcttctggagagttagggggcagagagggctcactgtggttcctgcagccattgctgaggaaatggagggtgtagagccttgagctcctggagagcagttgtggaggggakcctagaatatgcattccttgctgcaattccaggtttttccagaaaatgagagagaggtaagaggtccagctggctcatttcttcagctaggtatttgcaaaacaaataatttgagtattcccgtgcaataagaatgtcagttggatgttaggttgtggggaaacaagctgctgactctgtatcaagtaattgattagcttcatacaagaaacttactcagtat

SEQ ID NO: 264514 - DNA, 532 bp, Homo sapiens
gttttttttttttttttgtaatggcagtagagaaggcaaactattgttaaactattgctctttttgtgtatttttaaagaagtagtgagtagtttttggttagtggtttagttaccaaaacattgtctctgaaacagatagagaagactgcctctagggtatatgacagatggggttgacttcaggttgctttgtttttcttctggagagttagggggcagagagggctcactgtggttcctgcagccattgctgaggaaatggagggtgtagagccttgagctcctggagagcagttgtggaggggagcctagaatatgcattccttgctgcaattccaggtttttccagaaaatgagagagaggtaagaggtccagctggctcatttcttcagctaggtatttgcaaaacaaataatttgagtattcccstgcaataagaatgtcagttggatgttaggttgtggggaaacaagctgctgactctgtatcaagtaattgattagcttcatacaagaaacttactcagtat

SEQ ID NO: 264515 - DNA, 522 bp, Homo sapiens
ttaaatgtcatttaactagaaaatattataatcaccaagtggtctgattgtaagatgatacctggggcagcatcagtggttacagaaaacaaatcgtgaaactaaacacagttcaaatgccccccaaatgcaaccacatattttctacmgcaatactttctgaagaataccatatttctgaaggcaccagcaatcaacatgtttctcatttgaagctaagcttaatctgacctagttgtttcctagttatttgccttgagcaaaccaatgcccaagaatttttcacataagagagctaaggaacaaacaggatgaaaatcgactgactgaaaaccatgaacttatcagaaatacagagctaattataaaggatggggcaatgattagattgagtcttgagttgccagagctttgtagtgctgcctcagaatcaccaagatttgcttgactgaacatatactagtctcagagctttcgtacattacttgaaggaggatataaagctgctttaagtcgctgtgt

SEQ ID NO: 264516 - DNA, 607 bp, Homo sapiens
cattatttggcatttctatcttaccagattattctgtaccactgctaagccacacagttgctggcrgaagctgtactgggttgtaaagtaacagttcctccccagtcttcacaatcagggagcagatgatgaatttgcagagtgctcagagggcggcatcccagggcttcaatggcccagagttctgtttccttttctaaatcagaggtcttttgttctgccacagagtgacctttaaaatggtttcagcacctagatctccctgctgtcatcaccacagactgctagctgacactcacactccgactcccccagcctctctctcacaacactttccgacttactgactggcctttggcaaggatttaactgttgccaaagagtaagtgaaaacgtttgcagtgatgtcagcccgtcagcaaggcctgattaagagaccaaacacagcctccctcagcgtgtggtgctgacaagaaggcaaggaggaccagttgtttgagtggaaattgttgtcttctaggagggttggtgtctcaattcagagcctgagcagatattccccatgtttgtggagtgttaatcaaggtggaggggaaaggtgggattc

SEQ ID NO: 264517 - DNA, 540 bp, Homo sapiens
gttcatagcagcattactcccaagagccaaaaggtggaggcagcccaagggtccactgacacctggatatgaatggataaacaaaatgtggtacatacatataatgggatattattcagtcttaaaaaggaaggaaatgatgatgcatgctacaatacagatgaaccttgaaggyacattatgttaagtgaaataaaccagtcagtcacaaaagaacaaatattgtatgattccacttacatgagatacctagagtagtcaaactcatggagactgaacatagaatggaggttatcaggggctgtggggagggagaaatggggaattactgtttaagagtacagattttctgtttgagaagatgaaaagttctgaagatgcagtgttgatggttgcacgacattgactttacttagggccactgaactgtatgcttaaaaaatgcttaaaaaggtaaattttatgttatgtatattttatccaagtaaaaataaaaaaaaattaaagtcccagtctgataattccaaaatttgaatgact

SEQ ID NO: 264518 - DNA, 540 bp, Homo sapiens
gttcatagcagcattactcccaagagccaaaaggtggaggcagcccaagggtccactgacacctggatatgaatggataaacaaaatgtggtacatacatataatgggatattattcagtcttaaaaaggaaggaaatgatgatgcatgctacaatacagatgaaccttgaaggcacattatgttaagtgaaataaaccagtcagtcacaaaagaacaaatattgtatgattccacttacatgagatacctagagtagtcaaactcatggagactgaacatagaatggaggttatcaggggctgtggggagggagaaatggggaattactgtttaagrgtacagattttctgtttgagaagatgaaaagttctgaagatgcagtgttgatggttgcacgacattgactttacttagggccactgaactgtatgcttaaaaaatgcttaaaaaggtaaattttatgttatgtatattttatccaagtaaaaataaaaaaaaattaaagtcccagtctgataattccaaaatttgaatgact

SEQ ID NO: 264519 - DNA, 540 bp, Homo sapiens
gttcatagcagcattactcccaagagccaaaaggtggaggcagcccaagggtccactgacacctggatatgaatggataaacaaaatgtggtacatacatataatgggatattattcagtcttaaaaaggaaggaaatgatgatgcatgctacaatacagatgaaccttgaaggcacattatgttaagtgaaataaaccagtcagtcacaaaagaacaaatattgtatgattccacttacatgagatacctagagtagtcaaactcatggagactgaacatagaatggaggttatcaggggctgtggggagggagaaatggggaattactgtttaagagtacagattttctgtttgagaagatgaaaagttctgaagatgcagtgttgatggttgcacgacattgactttacttagggccactgaactgtatgcttaaaaaatgcttaaaaaggtaaattttatgttatgtatattttayccaagtaaaaataaaaaaaaattaaagtcccagtctgataattccaaaatttgaatgact

SEQ ID NO: 264520 - DNA, 546 bp, Homo sapiens
tcactcttgggagtggacattctgggcctcaactgaagacctggggtgcttacagagcccttccacctggctggacttgaactccaacccttgcctcctcagcctcaaggggctactgaagtctctgctcatctcgatagctttccaactgctggagtttttccccctwggtttcttggagtttcctcctgctcatatgtggctcaagagttggcaaatgcctcaaggggaaattgcatatagatctttgggctctcttctcagcaatttccctcttcaccaggatctttactcctcaggtctcagccatttggcatccctgaacaccaacctacaactccctcctcagcccagacatggctttgactctttcccccaacacttcccacaagacttagcaaagcctttaagtaaaaatcctgggtgaatgtggaacttacttctctacgcttccttccctcaggtcttgtagcctctcatcagttctgccgtagctctacaatgccttcaaaagtagttttgtgtattttgcctattgtttactgt

SEQ ID NO: 264521 - DNA, 546 bp, Homo sapiens
tcactcttgggagtggacattctgggcctcaactgaagacctggggtgcttacagagcccttccacctggctggacttgaactccaacccttgcctcctcagcctcaaggggctactgaagtctctgctcatctcgatagctttccaactgctggagtttttccccctaggtttcttggagtttcctcctgctcatatgtggctcaagagttggcaaatgcctcaaggggaaattgcatatagatctttgggctctcttctcagcaatttccctcttcaccaggatctttactcctcaggtctcagccatttggcatccctgaacaccaacctacaactccctcctcagcccagacrtggctttgactctttcccccaacacttcccacaagacttagcaaagcctttaagtaaaaatcctgggtgaatgtggaacttacttctctacgcttccttccctcaggtcttgtagcctctcatcagttctgccgtagctctacaatgccttcaaaagtagttttgtgtattttgcctattgtttactgt

SEQ ID NO: 264522 - DNA, 591 bp, Homo sapiens
cataaattcttcttttttcactaagtggctactttayagctttagaaaataaatggaaaactgagaaaccaaattggttggtgacatcagttagggcactaaactattcttataatatgacctttacattttttcaaatgtttcttcaggatgccggggcactacttgatatattttggcatgggctctgtcatgcatgtttgacatatgagaaacaccaccatggtgaatagaatgttccatctttctccttaaactccaaattgctcggggccacaagatacaaaccatgggtttaagtttgacaccctcaatttccttctttcatgtttgtggatctcattctcagaatgctggcattttacctttctacatccttgtcttcactcccttcctctaccccatcatctgtcttaaatgtttaatctttttgctacacctcctcagagcatgatggcttttgatggccatctctcctccagtgatggggcattcttggggaaatccattttctttcagccttggcagggaagatcatacatttattgtatagaacaaagggagtattcattcagacctgaagattcccaa

SEQ ID NO: 264523 - DNA, 521 bp, Homo sapiens
ttgggaagcctttggcacaaacatcatccatattggatcttattagttgtagccaaagtaagacagtttwggtcaatacataggactttgcaacctagagcaggcatatgcagggaaaacttcctaaggcttctgcagaagcaaagtgggccttcaggtaggtacaggccctttgagctttctggacctggtcagtatgggaaggaaaagacatttgtgtggataaatatgggatggggaagataaactacatcatggctaaattcaagttgagttagtttataaatggaggtaaatgctctgcctataagaaactactcacaaatactgttgtatggcctttgggcgaatcagttgaacattatcaacctcagttttcttatcttaaaggaaagatgataatgatacttaccttgtccattcgttgtgcatatcagtgaccgtgtatgttaaatgaccatccatatataggtaactattactgttattacctctataataccataatgatgactactata

SEQ ID NO: 264524 - DNA, 554 bp, Homo sapiens
tgcttagaacaatgcctagcacacagtgatcccacaagaaatattctctattaagctattaatgtattgatatgtattgtattttcataactaccttgggagagaagaggcatcattatctttgtttcatggatactgaaactgaggtttctgatttgctatgtttactaacataccaaagctgggagagattcaaagagcctcctgctcttccttcttttctttcctcccttccttccacatatccttattattgggttggaatgggaagccataactcccacccagttgatttgaattagcacrtctgattattttttaaattttctttcccctccagccctacctccctgccagagcacttgtaagaaagtactcgctcacatatcttacttccattgaaataaaatcatattatgcttctgtcttttgccactagcctattactattagctgtcatatccgaagtcccaagttctttatctgaaccctcacactcgagaaatcgacaggatcaaggaaataagaaccagtgtttacataagtgtttattg

SEQ ID NO: 264525 - DNA, 554 bp, Homo sapiens
tgcttagaacaatgcctagcacacagtgatcccacaagaaatattctctattaagctattaatgtattgatatgtattgtattttcataactaccttgggagagaagaggcatcattatctttgtttcatggatactgaaactgaggtttctgatttgctatgtttactaacataccaaagctgggagagattcaaagagcctcctgctcttccttcttttctttcctcccttccttccacatatccttattattgggttggaatgggaagccataactcccacccagttgatttgaattagcacatctgattattttttaaattttctttcccctccagccctacctccctgccagagcacttgtaagaaagtactcgctcacatatcttacttccattgaaataaaatcatattatgcttctgtcttttgccactarcctattactattagctgtcatatccgaagtcccaagttctttatctgaaccctcacactcgagaaatcgacaggatcaaggaaataagaaccagtgtttacataagtgtttattg

SEQ ID NO: 264526 - DNA, 596 bp, Homo sapiens
ctaaatgctaggacttgtcccaggccggtagcttctctctgtaatggcagttatatttgcttctaaagaaagtactatttgacagataaaatgtgaacagtgaaaagcatttctgggtgaaggtcatctgaagtatgtaatattttactgcctttatatgacaaccgtaagatatgatttgtagctatattggtaaatgaggtaaatttatcaaaatgatgtaaaaactaaactttatccagtggattatgacagcacattttcatttggcattgcctaacaratctctatttaatagtcagcattttggtatgagacttcaaaatttcaagtaagctttttatatagtgcttaaagaatttattcctattactgtttgccaatgcaaaatgccatattttcaggaaactgcaggggcataatatggtcagtgcaagccagggcaatgtattaaatctattaccaagagggaaaaaaagaaaaataacaaaactttgtggggtataatatgatctagagcatttttaaaaagttaaacctgtggctgaattactgaactttctattttttcaaattggaagctcttggagtctagt

SEQ ID NO: 264527 - DNA, 497 bp, Homo sapiens
ctgaagtatgtaatattttactgcctttatatgacaaccgtaagatatgatttgtagctatattggtaaatgaggtaaatttatcaaaatgatgtaaaaactaaactttatccagtggattatgacagcacattttcatttggcattgcctaacaaatctctatttaatagtcagcattttggtatgagacttcaaaatttcaagtaagctttttayatagtgcttaaagaatttattcctattactgtttgccaatgcaaaatgccatattttcaggaaactgcaggggcataatatggtcagtgcaagccagggcaatgtattaaatctattaccaagagggaaaaaaagaaaaataacaaaactttgtggggtataatatgatctagagcatttttaaaaagttaaacctgtggctgaattactgaactttctattttttcaaattggaagctcttggagtctagtgaaaatttccatttatttgcactatatg

SEQ ID NO: 264528 - DNA, 497 bp, Homo sapiens
ctgaagtatgtaatattttactgcctttatatgacaaccgtaagatatgatttgtagctatattggtaaatgaggtaaatttatcaaaatgatgtaaaaactaaactttatccagtggattatgacagcacattttcatttggcattgcctaacaaatctctatttaatagtcagcattttggtatgagacttcaaaatttcaagtaagctttttatatagtgcttaaagaatttattcctattactgtttgccaatgcaaaatgccatattttcaggaaactgcaggggcataatatggtcartgcaagccagggcaatgtattaaatctattaccaagagggaaaaaaagaaaaataacaaaactttgtggggtataatatgatctagagcatttttaaaaagttaaacctgtggctgaattactgaactttctattttttcaaattggaagctcttggagtctagtgaaaatttccatttatttgcactatatg

SEQ ID NO: 264529 - DNA, 596 bp, Homo sapiens
tgttgaccctataggtgctcaaggagaaacaagatgggggctgtggcccgcccatcttcaggcctgcggcctcagcccagcaaatgatgccaatgcccctctcctagggagagttaagtgatgtcagcacctctgggcagagtaatatttgacccttaaactgcttcatatacaagcagctgttttcctctttccaccattccctgaaggacgcaggagggctgaaatatctgatactscttttcatcaccagagataaagtaaatttaaaccttgaattaaatgatgaccattttgttcactggtcatttagtgataagtcatgattctcaaaagcctcggcatgattttcttttctttacgttttgtggaaagggggcaaggtctcagcaagttttctccatatttacgcctggcccccaatgtgtgccttgagagctcataaaaacaaatctgcctctcagccgggcagtcagtaatgggatctggagcctctctctgcaaggtcacctgtttaaatagagactcccgcagtgctgcctgaaaggtgtttgcatcggagggttgctcgccagctcccttggtgtttaggaagt

SEQ ID NO: 264530 - DNA, 531 bp, Homo sapiens
attcactactagaaattcagacttaatgcataatatagggagtgcacacagggaccacggctggcaacagagagtcctttcttctacctattcttttcctctactgcaaatgttagtcctggaaatggtcactaaagattatgacattctacagtctgcytgtttaagcgatacaattcaagattttaaagtacactgtatgctctgtgcagggaattgcttggtatctctatttaaaggaaaatattattgttatgaataggcttcagatgctggagtcactaatagttaactaaacttggtatttttttatgcccaaaataaagtatgtaagataacctgggagccatatgtgtcacatgatttgttggggcccaatcacacctaatttcagtggctgaagaaaaagagccaagcaattaagggagagtttggtgagctcctgttcaaccgaggacggaaacctgcacagctggagacaattctgagaaaattgatcagaattcctttaccttaacaagatgctggcta

SEQ ID NO: 264531 - DNA, 499 bp, Homo sapiens
ctacagaatatctatttgataccaggcacagtgccagatactgggagtgcaaatataaatgcgacatgatctcacattttaacagagggaaccataaaaacctaacatcaaaatgtaaaacgtgcatatgatatattaatacattatagacacatacacacagagttttaaacaatgtcagagaaatgaattgttgattcactctgaagatatagaagaggagtcacagaaatagttatagtcragttgggccttgaaggatgagagacttttccccagatggagctaggtgagagtaattgtagcaaacacaagtagtgtaatagatgttaactgcttgtatttgaattctggctctctcctttctcatttcttgaactcttcaaatttcagtttcctcatctgttcaatggagataatactagtatttcctacatgggcttgttagaaagattaaagtagacaatatggtaaagaacaatgcatagacacagcaaat

SEQ ID NO: 264532 - DNA, 570 bp, Homo sapiens
aactcttttcaaacaagtaattttccattcatagaaagatcagattttttaagacctttcaaacatgacattcaaaataaagacaacaatctaatgctgttgatatgtggctgaaggcaaaagagaagaaaaaaaggctccttaagactccttaaaaccagtttcagaagagtttaaaataagttctgcttctcatctctaataatgaaytttttaaaaagcagcaaaacaaacaaaaaaattcaagagctcttcttacatgtaagctacatgaaacagcagaaaaagtttatattataagcagtatgctttagattttgctttgctcttatctagaaagttcatatggcccatgtaaattctatagcaatgaatctctgaacagtagcgtcttccttttcaaggttttacttactttaaaacccttgctgtgaaacctaatttgcggtagcagagtggaagggagtgagtagtgggacaaattaagggaagagcattaaagaaatcaacacaaaaagttttatgtagttgatcccaaaccttatttgaaaagcctgaataggatgaaaa

SEQ ID NO: 264533 - DNA, 533 bp, Homo sapiens
gggacactgttcaactcaatacaaccagtatatgtataatattcagaaatgttgaagtgaattacaatgaaatcagctaaaagtcaaaggtccttgcctctggaatggggaaccggtgggtggagaggacatggtaggggaatgatgttcatgcttataaggcttggaaaagacatacctatggcacactgacaccatgtcccttccttcaggccagcaggagtatcatatttcttctccttctggttgtttaggtgtggtcaagtggctagttcctaatgataggttgggtgaaaaggacacgtgtggtcagagctctaaccaccagggtgagaccgttcagctctattcttcctgccacagggatggggaaagcacgtgttcaaacagagcttctttcagtctgagcagagtgtcccctggctatggtctgaatgtttgtgcccctgcccccccaaatccatatggtgaaatccaaccccscaaggtgatggcatcaggagtggggcctttaggaggtcatgagggtagag

SEQ ID NO: 264534 - DNA, 526 bp, Homo sapiens
ctatggcacactgacaccatgtcccttccttcaggccagcaggagtatcatatttcttctccttctggttgtttaggtgtggtcaagtggctagttcctaatgataggttgggtgaaaaggacacgtgtggtcagagctctaaccaccagggtgagaccgttcagctctattcttcctgccacagggatggggaaagcacgtgttcaaacagagcttctttcagtctgagcagagtgtcccctggctatggtctgaatgtttgtgcccctgcccccccaaatccatatggtgaaatccaaccccccaaggtgatggcatcaggagtggggcctttaggaggtcatgagggtagagccctcaggaatgggattagtgcccttatatgagagaccstggagtgatgccttgctctttctccatgtgaggacacagcaagaaggcaccctttatgaaccaggaaacaggccgttaccagacatcaaacctgccagcaccttgagcttagacatctcagcctccagtatg

SEQ ID NO: 264535 - DNA, 526 bp, Homo sapiens
ctatggcacactgacaccatgtcccttccttcaggccagcaggagtatcatatttcttctccttctggttgtttaggtgtggtcaagtggctagttcctaatgataggttgggtgaaaaggacacgtgtggtcagagctctaaccaccagggtgagaccgttcagctctattcttcctgccacagggatggggaaagcacgtgttcaaacagagcttctttcagtctgagcagagtgtcccctggctatggtctgaatgtttgtgcccctgcccccccaaatccatatggtgaaatccaaccccccaaggtgatggcatcaggagtggggcctttaggaggtcatgagggtagagccctcaggaatgggattagtgcccttatatgagagaccgtggagtgatgccttgctctttcwccatgtgaggacacagcaagaaggcaccctttatgaaccaggaaacaggccgttaccagacatcaaacctgccagcaccttgagcttagacatctcagcctccagtatg

SEQ ID NO: 264536 - DNA, 569 bp, Homo sapiens
ggtttagtgggatccccagaaaaattgatcttgatatcaatactcaaagaatgcagaggtttagtttgtttgtttgtttgtttaaaaaaggtcttaggcaaatgaaattagattacacatgtcttctgacatgtggcaccatcattctatgagaccaaggtttggacctgtggtccttaggacagaatcatctccaaagagtagttaccagacacagtgtgaggttaagactcactgagtgaacttaactcggttatttcacctgttagagtcttggcctaactgaagttgaatttagtaataaccaggaaaacctcatgaaacatgaaataaggcatttaaccaacgttccttggatgawttgtcagatgggagtgaagaatcatcatatgatcacaatgtatgtaaagatatagtcacctaatcctagagaaaatgccagccttatacagtggcttggttttcctgctgataaacagctcattgtgtggaactcagaggaaaacaagataccaaaaaatctaacatagtcacagtctcagtgatgacaaaaaatgagataaagtgtt

SEQ ID NO: 264537 - DNA, 569 bp, Homo sapiens
ggtttagtgggatccccagaaaaattgatcttgatatcaatactcaaagaatgcagaggtttagtttgtttgtttgtttgtttaaaaaaggtcttaggcaaatgaaattagattacacatgtcttctgacatgtggcaccatcattctatgagaccaaggtttggacctgtggtccttaggacagaatcatctccaaagagtagttaccagacacagtgtgaggttaagactcactgagtgaacttaactcggttatttcacctgttagagtcttggcctaactgaagttgaatttagtaataaccaggaaaacctcatgaaacatgaaataaggcatttaaccaacgttccttggatgaattgtcagatgggagtgaagaatcatcatatgatcacaatgtatgtaaagatatagtcacctaatcctagagaaaatgccagccttatacagtggcttggttttcctgctgataaacagctcattgtgtggaactcagaggaaaacaagataccaaaaaatctaacatrgtcacagtctcagtgatgacaaaaaatgagataaagtgtt

SEQ ID NO: 264538 - DNA, 626 bp, Homo sapiens
atcctgaatttacaaattcagttctcctcatataaacttggtgactgactgtacagtcccacgttacttcagttattaatataagtttaaaataaaaaaggctccacagcaagataattttattatgacagcttggaactgaaaagatcaaaatgcttcctttgctgtttcttcaaacattcttttataagatgcatcgaatctcagaatgaagatgtcatgcctacaaatctagcaaactgttctaagaaatcgaaaatggagtctactgaattaaatttcaaaccaaattaggaacatggaaaagactctaaaatatacaacattcttttccttcgagctattttagtcacagcagaaaagatcagtgtagtctgttccaagtataaaattttagaaagatcaatacatagatatgctcaagtcatttccatgcatgtgtctttgttagtttgataaaagtgaaatagaatcttccaaacataagggactgtcagtgtagtcttaaagaaaamaaaatccttcagtggaaaacagaaatggccggtttctcaggacagtaccagagagaagctggagctgtttgtggaaagagacagtgacttgaaaatcaccaccagagtata

SEQ ID NO: 264539 - DNA, 626 bp, Homo sapiens
atcctgaatttacaaattcagttctcctcatataaacttggtgactgactgtacagtcccacgttacttcagttattaatataagtttaaaataaaaaaggctccacagcaagataattttattatgacagcttggaactgaaaagatcaaaatgcttcctttgctgtttcttcaaacattcttttataagatgcatcgaatctcagaatgaagatgtcatgcctacaaatctagcaaactgttctaagaaatcgaaaatggagtctactgaattaaatttcaaaccaaattaggaacatggaaaagactctaaaatatacaacattcttttccttcgagctattttagtcacagcagaaaagatcagtgtagtctgttccaagtataaaattttagaaagatcaatacatagatatgctcaagtcatttccatgcatgtgtctttgttagtttgataaaagtgaaatagaatcttccaaacataagggactgtcagtgtagtcttaaagaaaaamaaatccttcagtggaaaacagaaatggccggtttctcaggacagtaccagagagaagctggagctgtttgtggaaagagacagtgacttgaaaatcaccaccagagtata

SEQ ID NO: 264540 - DNA, 572 bp, Homo sapiens
tgaaatgatagcatttcatcaatttcgtgaatgaagtgacaacatttggtaatgttggttaatgtctttactcttaggagacatggtgaagtatttaggatgaggtgtcatgatgtcttcaacttagtttcaagtgattcagcaaaatattgtcatgttatgtatctgtatgtattgatagatatacagartgagaaagaggaagagaaaaatgcatggcaaatgttaaaaattgatgactctagatgagttttataaatgagatttataatatttaccttgtaggactgttttaataacaaaatagaaataaggtaggtgaagtgaatacactgactagctacctacctgattaggatcctccccctgaattgtcagctgtcatgcatgtccttgcttgacaatggacttttttaaccaaggatttctgtattatattagccaggctccaacccattgccaaatatatcttctggcaatccagtttcttccctctctggcacgatggagaagactgaatctcatgcatctgtcccctcactcaggggtccccaaaccctgggccagggagc

SEQ ID NO: 264541 - DNA, 505 bp, Homo sapiens
accaaatcctgatggaccagcctctataagtgataagggttctctctgtccctccctgtgggtctagggatgggttagaggacctcattgacttacccagacctctcagttttcaaaaataaacaaaactaggggttgggacaatgtccttctgtacctaggggactagagactctaaaccaaggttaacactcaaaagrgaaataaaagaaaattgtacatcttaaactttttagctacccattcacaggtgactgtgagtctcactggcaacaaaatgaggataaaacatataatgctttctgttttgaggtcaccaccactggtacccttgcccaggctcaactatgagtgggttccatcaggcccctataaatcttcactgttataatccctactgttaaatatattatcagtacgaatgtgtagtctatgtatacctctgcaaacctttgcccccatgctctgaaattgctgcagtttaggccattttaccaaggcatat

SEQ ID NO: 264542 - DNA, 661 bp, Homo sapiens
ttttgggggctccctcagcagtggaacaatccctaggtctgcactgatccacctgacctgygcacaagtccatgggggaaaatagaacagagaggagtagcacctgctccggttttagcttgttgctcacattatcaccataagtgattaaagacttcactgctaactttcatcatggctcctccttgctctaattgactacccctacacctggcagctcaatgctctctcttaactctacggagcccctgacccacacacttgaagagattaaagaaagaggtaaaaagatttatatactatctcaattttcaaattagtgtagagatgactgctactaattccagaaatttgagatcattaggatctaaagcagtcagagctactgtcttactgtgtttctggcattcctatgtatttcttcaaagtgtttggtgctaatccttgtaataaaatcaagatacctgtgttttggcaaaatcgatgttctactcctcagagattaatatgataattagaagtttatctgttggagacttggaaggaaagacataagctcactcaatcccactgagagaaaggaaggtaagcataaaaaattgatctgggatagagactgtgttctgtttgagtcaatatcctgacataagattttcagtaa

SEQ ID NO: 264543 - DNA, 661 bp, Homo sapiens
ttttgggggctccctcagcagtggaacaatccctaggtctgcactgatccacctgacctgcgcacaagtccatgggggaaaatagaacagagaggagtagcacctgctccggttttagcttgttgctcacattatcaccataagtgattaaagacttcactgctaactttcatcatggctcctccttgctctaattgactacccctacacctggcagctcaatgctctctcttaactctacggagcccctgacccacacacttgaagagattaaagaaagaggtaaaaagatttatatactatctcaattttcaaattagtgtagagatgactgctactaattccagaaatttgagatcattaggatctaaagcagtcagagctactgtcttactgtgtttctggcattcctatgtatttcttcaaagtgtttggtgctaatccttgtaataaaatcaagatrcctgtgttttggcaaaatcgatgttctactcctcagagattaatatgataattagaagtttatctgttggagacttggaaggaaagacataagctcactcaatcccactgagagaaaggaaggtaagcataaaaaattgatctgggatagagactgtgttctgtttgagtcaatatcctgacataagattttcagtaa

SEQ ID NO: 264544 - DNA, 625 bp, Homo sapiens
agaccatactctactcttttagtccacacatacatgattagttccagtgattccaaggaagattttagcataatgtgaaaatgccaataatctctatgttgcaaagaaaattatacaatcttaactcttccctgtgctcatgctccttgcaaagtgaattggcagctcttgccattaaaagatagaatctctttcccttcctctatgtctccttgtgactggcttgggccataagagaagagattatgggccagttctgagcctaggcctcaagagaccttgtttgcatacttagactctgtttcaacactctaccagtaactgggtgaacacactcagaaccagacttctggaaagtaaaacaccacatgaatgggaatagaattgtcttagctaatcttgtcccagcctgctgtagccagccagttgctgaccttggaaacatgagtgaaccaggactagagcaactacccatttagttagagcccaaattcctaacccatgaaattctgagacaaacatataggttctgttttaagctattaacttttggggtggtttgttatatagcaaaatataactgataaartatattaaatcatccttcccacctccacagttttgt

SEQ ID NO: 264545 - DNA, 555 bp, Homo sapiens
taatagaatactaaggtttttaagcgggaattgaaagaattaaagacctacttttttaatgtttacctcaaataaatttaaattgtataatcgaagaaacatatataattttcttcatgcaaaatgtgttgtcatcagtrtttaaaatctcatatcaatgcaggagaggatttaatgatacaggagtgagaagggacaaacagtagggctgggtccaaggcaggggaggaaacaaggtctggagctgaactgaagttggaactaaggtcttttttccactttagcactcataagcggataggtggatagaagaatgtatctgcctccctgaaaacagttgattgagactttttttttttttttggccggcgctattgatatttccattattatctgcttattttctccccacacctctagctggcctcctggtcattaggattccgctggcagttgccctgtgtccctgctattttctccgcaggagccgagcgaaaccccttttctagagacaatttactcagctcttaaaaatgctagtgtagttttgtggga

SEQ ID NO: 264546 - DNA, 555 bp, Homo sapiens
taatagaatactaaggtttttaagcgggaattgaaagaattaaagacctacttttttaatgtttacctcaaataaatttaaattgtataatcgaagaaacatatataattttcttcatgcaaaatgtgttgtcatcagtgtttaaaayctcatatcaatgcaggagaggatttaatgatacaggagtgagaagggacaaacagtagggctgggtccaaggcaggggaggaaacaaggtctggagctgaactgaagttggaactaaggtcttttttccactttagcactcataagcggataggtggatagaagaatgtatctgcctccctgaaaacagttgattgagactttttttttttttttggccggcgctattgatatttccattattatctgcttattttctccccacacctctagctggcctcctggtcattaggattccgctggcagttgccctgtgtccctgctattttctccgcaggagccgagcgaaaccccttttctagagacaatttactcagctcttaaaaatgctagtgtagttttgtggga

SEQ ID NO: 264547 - DNA, 555 bp, Homo sapiens
taatagaatactaaggtttttaagcgggaattgaaagaattaaagacctacttttttaatgtttacctcaaataaatttaaattgtataatcgaagaaacatatataattttcttcatgcaaaatgtgttgtcatcagtgtttaaaatctcatatcaatgcaggagaggatttaatgatacaggagtgagaagggacaaacagtagggctgggtccaaggcagrggaggaaacaaggtctggagctgaactgaagttggaactaaggtcttttttccactttagcactcataagcggataggtggatagaagaatgtatctgcctccctgaaaacagttgattgagactttttttttttttttggccggcgctattgatatttccattattatctgcttattttctccccacacctctagctggcctcctggtcattaggattccgctggcagttgccctgtgtccctgctattttctccgcaggagccgagcgaaaccccttttctagagacaatttactcagctcttaaaaatgctagtgtagttttgtggga

SEQ ID NO: 264548 - DNA, 555 bp, Homo sapiens
taatagaatactaaggtttttaagcgggaattgaaagaattaaagacctacttttttaatgtttacctcaaataaatttaaattgtataatcgaagaaacatatataattttcttcatgcaaaatgtgttgtcatcagtgtttaaaatctcatatcaatgcaggagaggatttaatgatacaggagtgagaagggacaaacagtagggctgggtccaaggcaggggaggaaacaaggtctggagctgaactgaagttggaactaaggtcttttttccactttagcactcataagcggataggtggatagaagaatgtatctgcctccctgaaaacagttgattgagactttttttttttttttggccggcgctattgatatttccattattatctgcttattttctccccacacctctagctggcctcctggtcattaggattccgctggcagttgccctgtgtccctgctattttctccgcaggagcsgagcgaaaccccttttctagagacaatttactcagctcttaaaaatgctagtgtagttttgtggga

SEQ ID NO: 264549 - DNA, 600 bp, Homo sapiens
ccaataggaaataatatggttctgtgaaaattgtcccccaatatctagtaaacaaagtcattcactcatatctcaaagtagaaagtccacccatcagtccatagctacctcttccagaaaccaacagagccacctcctcttttccaaatgtctccatcttcattgctctgcagcccaataagtaggaaggttgtaaccacagccacamctctaagcatcacagggaattgctaagtgggagaaaggctttcttctaaagggctctttcctggggggcttagggaaaagcaactctatgccccatgagactaattaggaaaacacttgctgacacactcccctttcatgaggtcaacacacctatgggaagctaggtttttcagtcaggctagaaatcagatgaaaagagtacttggctttccattctgtccaaggggtaaaagaatagtttaaattacaaaatctgctgagaaagggaaaggataaggaacaaaaggaatgaaactaacgcaatgtggttcaaaggcaggagaattttctctactctttggagcagtttagtgatcacacagcacaaccctgaagtgtattgcagaagat

SEQ ID NO: 264550 - DNA, 600 bp, Homo sapiens
ccaataggaaataatatggttctgtgaaaattgtcccccaatatctagtaaacaaagtcattcactcatatctcaaagtagaaagtccacccatcagtccatagctacctcttccagaaaccaacagagccacctcctcttttccaaatgtctccatcttcattgctctgcagcccaataagtaggaaggttgtaaccacagccacacctctaagcatcacagggaattgctaagtgggagaaaggctttcttctaaagggctctttcctggggggcttagggaaaagcaactctatgccccatgagactaattaggaaaacacttgctgacayactcccctttcatgaggtcaacacacctatgggaagctaggtttttcagtcaggctagaaatcagatgaaaagagtacttggctttccattctgtccaaggggtaaaagaatagtttaaattacaaaatctgctgagaaagggaaaggataaggaacaaaaggaatgaaactaacgcaatgtggttcaaaggcaggagaattttctctactctttggagcagtttagtgatcacacagcacaaccctgaagtgtattgcagaagat

SEQ ID NO: 264551 - DNA, 600 bp, Homo sapiens
ccaataggaaataatatggttctgtgaaaattgtcccccaatatctagtaaacaaagtcattcactcatatctcaaagtagaaagtccacccatcagtccatagctacctcttccagaaaccaacagagccacctcctcttttccaaatgtctccatcttcattgctctgcagcccaataagtaggaaggttgtaaccacagccacacctctaagcatcacagggaattgctaagtgggagaaaggctttcttctaaagggctctttcctggggggcttagggaaaagcaactctatgccccatgagactaattaggaaaacacttgctgacacactcccctttcatgaggtcaacacacctatgggaagstaggtttttcagtcaggctagaaatcagatgaaaagagtacttggctttccattctgtccaaggggtaaaagaatagtttaaattacaaaatctgctgagaaagggaaaggataaggaacaaaaggaatgaaactaacgcaatgtggttcaaaggcaggagaattttctctactctttggagcagtttagtgatcacacagcacaaccctgaagtgtattgcagaagat

SEQ ID NO: 264552 - DNA, 597 bp, Homo sapiens
gtcaacatttcaattccatccctccctgcccttcctgtcaacagcctccttcagactattcacctttaygtttagtcttccctgattaacacagctcatttttggccttcctaatccatcctgtaacccagttgactttctcaatagaatctatatagattttagaaatttaggtatttctaatccaaggtatatattaacatttatacatattgttcatctaaggtaaaaatcatcatttatactgataatatattgataccgtactggaccaaatatatataatttgaatattattttctaatttctcattttaatttgttttcttcttcaactttctggctaccaaagaatcaattgttttcccttctgctccctcctattcctttatgagaactcaggtctgctagcatctttcaggggcatgtaggtcagaatttagacctcttttggacactggtgagagctccagtcaaaaataagaaggttagagtaaataaaaaagccaaagaaagacaggaggcaaatctatctttctgcatttcaacttcagactgtggccacttcatcagttcttcctgccatttccccctctat

SEQ ID NO: 264553 - DNA, 573 bp, Homo sapiens
gctagtactgataaaccttaatttagtgttgagaraagctttaggaactatcactttccagtggcccccataattttggatttcactggattgttggaatatctgaaatgtattatatatttccaacagctcataaaaagaaaaaacctttaaatatcacaaaaaggaaggctaaaatagaaggataaatcatgtgtatcaaacttcatatttgtacttatgtttctaattttgattcagcccagcaaaaactcatatcttctcactcataaaggaatccatatcgccacaaatgggcatcaaccctctgcctggatttacagcactggaagcttcctgacccataagacagttctctccatttttgaaatgttttagtttacaactgtcctttccaatgaccagaaacctggctttcaccattattctttgttttgctctgtgaaacaaccctattgctctggtccagagtcatgtgttcaaacattcttttcatcaccattatagcaatttcaatgtttgccaagtgggtttctgtatttagcccagactcctttgtttgcagtgtaccct

SEQ ID NO: 264554 - DNA, 553 bp, Homo sapiens
ctaaaaaacaaaaaaaagaaaaggctagtctgactcctccacccctctccacccacacatatgtacacaacatttayaaccaggataggccagattcttctgttatagtttttcagaacactctgtattactgtattcatcccatttctaataattcattgagtatccatctttcttttgttttatttttgacacataataattgtacatatttatagggtagagtgcgatgtcttgatatatgtatacattgtgtaataatcaaatcagggtatttagcctatccttctcctcatatttgtaacatttctttatggtgaaaccattcaaaatcatctcctctagctacttggaaatatgcaatatgacattgtttaccatagtcaccctactgtgcaatagaacaccagaacttcttcctcctgtctaactgtaacttcataccctttaatcgacttcccatctttcaccctccccttttcttctctagtctctggtaaccacattctattttctatttctatgagatcagtttctttagatttcacatacg

SEQ ID NO: 264555 - DNA, 525 bp, Homo sapiens
tagccagtgagcagaagaccacctccctggatggttgcctattgcagatgtatttcttttactccctcggcatcactgaggtttgcttgctcaccaccagggctatggacagatacctggccatctgtaatcacctttgctaccccacagtcacgacaccttagctctayactcaggtgattctaggttgttgcatctgtggcttcttcacgctgctccctgagattgcttggatatccacactgccattttgtggtccaaatcaaatccacaacattttctgtgaccttgatcctatcctgaatctagcatgtgtagacactggcccagttgttttaatcaaggttgtggacattgtacatgctgtggagatcatcacagctataatgcttgtgactttggcttacgtccaaattattgcagtgatcctaagaaactgctctgctgatggatgccaaaaggcattttctacctatgctttccaccttgctattttcttaatcttttttggaagtgtagccctga

SEQ ID NO: 264556 - DNA, 583 bp, Homo sapiens
attgtttccatttcttgacttttgttaatagtgctgcgataaacataaaagtgcaaaagtgcaaatacctccttacaatcctgattttaattcttttggctgtatacccagaagtgggactgctagattgtatgataggtctatttttcatttttaggcaatgctayactgttttccacagtggctgcaccattttacatttctatcaacagtgtacaattgttccaacttcttcatattttcagcaatacttatttttctattcctttgagagtagccatcctaacagatgtgagataatatctcagtatcgctttgatttgcattttcctgatagtgatgttgagcacgttttcttatacctgttagccaattgtatgtcttctttggaaaatcatctgttcaagtcctttgctcattttctaattttcgtttttgttatagatttgaagaagctccttgtatattttggattttaacctcttgttagatgtatgcaaatattttcttccattccataagagaactttttttattctttattgttttctttgctgtgcagaagatgtttagtttgatgtag

SEQ ID NO: 264557 - DNA, 616 bp, Homo sapiens
catattcgtaatggcatgatatgaataatgcacttaaaccttcctttttcttagtttcttcatctgcaaactgagggcaccaataagatcttctccagagaatacctgtgagggttaaataattattataaacatgtaaagcatgtaaaatagtaaacactatctacaagatagacattagttgaatttttttcacatcaatttctacaatggaaattcatgcctagttttacatatacctcacattttttcatgtggatcagtagaattggcagtgctccaaatcaggcatttactttggacccaagtgaccaaagtgaccctggagcatcctgtgtatatctctgggcccttgtaaaatttactctaggacctaatatatagcttttgggaccctacttttcttcttaccctttctgtcttcctacattgcagtcatctcaacctgtttttattaagaggtggttgtggtagcaaaatcactggcaattgcttggctcacattaattgacattgttgaggttgtatagggcaatgagcctgggaarcttacaatatacgtggagacttaagtagttatataacaactcatggcaacatatacctcatgttgcct

SEQ ID NO: 264558 - DNA, 616 bp, Homo sapiens
catattcgtaatggcatgatatgaataatgcacttaaaccttcctttttcttagtttcttcatctgcaaactgagggcaccaataagatcttctccagagaatacctgtgagggttaaataattattataaacatgtaaagcatgtaaaatagtaaacactatctacaagatagacattagttgaatttttttcacatcaatttctacaatggaaattcatgcctagttttacatatacctcacattttttcatgtggatcagtagaattggcagtgctccaaatcaggcatttactttggacccaagtgaccaaagtgaccctggagcatcctgtgtatatctctgggcccttgtaaaatttactctaggacctaatatatagcttttgggaccctacttttcttcttaccctttctgtcttcctacattgcagtcatctcaacctgtttttattaagaggtggttgtggtagcaaaatcactggcaattgcttggctcacattaattgacattgttgaggttgtatagggcaatgagcctgggaagcttacaatatacrtggagacttaagtagttatataacaactcatggcaacatatacctcatgttgcct

SEQ ID NO: 264559 - DNA, 562 bp, Homo sapiens
cccacccaaaatcttatcttgaattataatccccagtgtctatggggattaagtgcccatagtgtttccatctgtaatacctccaagcagtttttaatcttattttattcagcttcctcattattttcagtgaaaagttgggtctaccacaagctattttattttgattagaagcataaatagttgtctgattttgttttaaggtaatttttttattgctaactgttgtagcactttcattttattctcagtctgctataccttctctttctggaatacgtatttcattaatattgcatttctaggattyagtttttttgtcatcaatcttgatagggcactttatttattattttttgagctttatgatactttctgaagtcaaaattctaactctctagtttagttttctggagcattccattttcttcttcttccattgcatttttatattctgtaatgtcttttattatcactaactttgccatcacaaactaatttatttcatgtattaatagtaaaagttctctatgatttcatcatatatttaaaattatttttg

SEQ ID NO: 264560 - DNA, 622 bp, Homo sapiens
attaatattgcatttctaggatttagtttttttgtcatcaatcttgatagggcactttatttattattttttgagctttatgatactttctgaagtcaaaattctaactctctagtttagttttctggagcattccattttcttcttcttccattgcatttttatattctgtaatgtyttttattatcactaactttgccatcacaaactaatttatttcatgtattaatagtaaaagttctctatgatttcatcatatatttaaaattatttttgtgactcttgcttagagtgattaatggctaaagatttggtattattaacagaacattttcattttaaaaattacattagcctgtgtccaaaggtgcatcatgtacctgaaaatgcacttttccatttccatgtagttttcatacacacacacacacacacacacacacacacacacaaatctccaaatgacaaatgctaaatacacacacaaacacacacatatatgtacaaagcatttgggaaggtgtttaggggatataaataccctcaaaacaagcaaaaagaatatatagacattaaaacctgattggtcacttctttccaaaatcatgttttcaactgatca

SEQ ID NO: 264561 - DNA, 431 bp, Homo sapiens
atatctcctttggggtaaaaatgaatgtctgaggacaagaacatttgcttatgctgtacaccagcatttctccatgaagagagcaaatatttttcctgagctaatactattttttaaattatttataaatcatgaatttaaaacttcatgttattttaataagaaataatatttgaagtttcaaattaaaacaaggcatttgaaacatagatcaaggaaataaaaacatttggtacattttggtatttgtcagatatctcattacagaacaaaatatacatcttgaacacattctatcaagaaagtttatattaacgaagtttaacaaatactactttggcagcttctgaaaaatcaagtgcctagagagaattaggacatttttattgtttttatrtatgcgcatctgtcagattttcacaaagtaagat

SEQ ID NO: 264562 - DNA, 570 bp, Homo sapiens
gacatcatattctttcagagaagtgtcccaggacatgataataagatgcaatttgaatcttcatcatacgaaggatactttctagcttgtgaaaaagagagagacctttttaaactcattttgaaaaaagaggatgaattgggggatagatctataatgttcactgttcaaaacgaagactagctattaaaatttcatgccgggcgcagtggctcacgcctgtaatcccagccctttgggaggctgaggcgggcagatcaccagaggtcaggtgttcaagaccagcctgaccaacatggtgaaacctcatctctactaaaaatacaaaaaattagctgagtgtagtgacscatgccctcaatcccagctactcaagaggctgaggcaggagaatcacttgcactccggaggtagaggttgtggtgagccgagattgcaccattgcgctctagcctgggcaacaacagcaaaactccatctcaaaaaataaaataaataaataaacaaataaaaaattcataatgtgaactgtctgaatttttatgtttagaaagattatgagattattag

SEQ ID NO: 264563 - DNA, 570 bp, Homo sapiens
gacatcatattctttcagagaagtgtcccaggacatgataataagatgcaatttgaatcttcatcatacgaaggatactttctagcttgtgaaaaagagagagacctttttaaactcattttgaaaaaagaggatgaattgggggatagatctataatgttcactgttcaaaacgaagactagctattaaaatttcatgccgggcgcagtggctcacgcctgtaatcccagccctttgggaggctgaggcgggcagatcaccagaggtcaggtgttcaagaccagcctgaccaacatggtgaaacctcatctctactaaaaatacaaaaaattagctgagtgtagtgacgcatgccctcaatcccagctactcaagaggctgaggcaggagaatcacttgcactccggaggtrgaggttgtggtgagccgagattgcaccattgcgctctagcctgggcaacaacagcaaaactccatctcaaaaaataaaataaataaataaacaaataaaaaattcataatgtgaactgtctgaatttttatgtttagaaagattatgagattattag

SEQ ID NO: 264564 - DNA, 512 bp, Homo sapiens
cttccatcttcagataagcatttttgacattttggcatataactttataatttttctttccataggaatgtaggttgaaaaataaaaacactctctatcccttcccccagacagaatctagtatacctttacaaccatccctgcaaagcttcagttgaaatatgaacaggcaaatggaggcaattttggacrggcaaaggggaaagctgagctcagactgggtgtcaaggacggaaagagctgaacggttctgcctaagcaagaagggggtgctctgagagggaggccacaaagaaagtcctaacttaaatattaaaaataaaaaaaaaatttaaaaaaccagagcctgaaacaaggacttgtgtgcaggtgtgtacgtaatttatttgagaggcgatcccagcgagcaggagtgagaaaaggtggagagtaagagagcgacggtgcaaacatcagtagaaggtggggcatcaaggttgtccctgtgcacctgatttgtccagcccctcctg

SEQ ID NO: 264565 - DNA, 571 bp, Homo sapiens
agtttaatgggaatgtaggaccgtgaaaactggggttttgagcagagtaaagtttcagagttcaagatttcaggggtggagaaattctgtatagtaagttccaagtgtggccttagtatgtggccttgtcgaagtggcatggagggggacaatcattacagtggcgatagtccaggaactgggagcctagactatggatcctgaaatcctgtctagagaatggtagagactaaaggtgctgaygctatttagtattctgcccagattcatgtaactttattctttttacttttgtttaatttttgttttttgtagagatggagtcttgctatgttgcccaggctagccttgaactcctggcctcaagccatcctcctgccttggcctcccaaagcactgtgattataggtgtgatcaaccacacccagccttcacataactttaaaaactagtatgtcttcaattaaatcattgatgaaaaaaatttaattgaagatagacctttggcatgtcatcactgtgtctgcatgctgacatggatctgttaaatggcatctaacagagtgataag

SEQ ID NO: 264566 - DNA, 299 bp, Homo sapiens
catatgttaaacaaggattagtatcttaaaccagatttgtcagactttatgacaggaaatatattgaatttgacagcaaaaaaagatttccttgtagaagtaagtaataccaagaaacagtacctagtttttgagaaaatttaaatttaattttgtatcacctattataagatttctatttcacagaattttgatattaatttrttaaaagatgacatattcagtggcacattgttaggttaattggctccaatgaatcacatttctcagcattcacatcgttggtgttgccctcccac

SEQ ID NO: 264567 - DNA, 588 bp, Homo sapiens
agctgcaaatgtaggtcatttcttatttggaaaaaaaaaaaagacatctcataggccagaactgaattctcagaggtaaaagccaataatcacagaagacaatgctttagagaatgactcccagctcccaggaacagaactaggccctgatcaaggaacattccctgctatcagtggggcttgtgcctgtctggcatttagagttgctatgatccaatgattgccatkgtcttctcttcctttctttttttgaatgggagtgtctattgctgtcattgctccctgattcattgttgtgtgttaagtatgtgaggggcaaatagcttgtttttgtaaataatgaggatttatatcaaaagagctccacccaaaatacctcagccatatccaaacctgattctttttattagatcataaactccctaattgatgctacgactggatgaagccatcagtgtttcagaggtgatgagtgtgttttgtgtatgaaagagacatgaatcactagagccagaagctggactgtggaagattgctgccaaaatggaatacagtgaatcacaccttcctgtaactacatgcttgcga

SEQ ID NO: 264568 - DNA, 674 bp, Homo sapiens
tcaagcacaatggctaataattaaatacttaatgtcagcaactattatattttatataaaacttattgatgaaatgcaatgatagacaatggcaacatgacagaacattaaactgaaaaagttactttatttcgattaattatgtgagttatttaggacacatgtaacactgcattatattgtctgtagaagatcgaggatagcaaaaggctttatgaacttactctgggtacagaaacctgagccaaactgatttagatgcagaattcatgagggacagaagggagtaaggacaacgagcctggtcacacacaggagttataaactcaaatgccagtaggaaccaggctgacaacctaaatgtgcgtgctagcctgtggcaaagaagaaagtatgtaaccagcaaagaaaatcaaacacatgacccatgagctacacttcctagtggaacgtgattcctgacttmcttccactagaaaatggtaggtcaactgacctactgtttctttgtttctgatgtagttttattatttggtaagacagttttggagagggagagcacttggatatccttttaatacaaaagagttagtggtcctgcttctgtgcttaatgttttaactgaaagagtcacttctaaatttagagtctacacttttattctaaaaataaat

SEQ ID NO: 264569 - DNA, 674 bp, Homo sapiens
tcaagcacaatggctaataattaaatacttaatgtcagcaactattatattttatataaaacttattgatgaaatgcaatgatagacaatggcaacatgacagaacattaaactgaaaaagttactttatttcgattaattatgtgagttatttaggacacatgtaacactgcattatattgtctgtagaagatcgaggatagcaaaaggctttatgaacttactctgggtacagaaacctgagccaaactgatttagatgcagaattcatgagggacagaagggagtaaggacaacgagcctggtcacacacaggagttataaactcaaatgccagtaggaaccaggctgacaacctaaatgtgcgtgctagcctgtggcaaagaagaaagtatgtaaccagcaaagaaaatcaaacacatgacccatgagctacacttcctagtggaacgtgattcctgacttacttccactagaaaatggtaggtcaactgacctactgtttctttgtttctgatgtagytttattatttggtaagacagttttggagagggagagcacttggatatccttttaatacaaaagagttagtggtcctgcttctgtgcttaatgttttaactgaaagagtcacttctaaatttagagtctacacttttattctaaaaataaat

SEQ ID NO: 264570 - DNA, 526 bp, Homo sapiens
actcaaaatacttggttgccttctcagagtagacattgactgctccctgctcatactctaccttaatgagctatttctcatctctatcattccttctcttcctaactgcctgtttagagtctctgggtttgagtcttattcaactagttgacatatggtatacagtactggacactgttgttcattcttaggtcattctgagctacactagatgattaaccagtcaatagataattggatgtaagtcactctatcttctgttcaaggtgttgaagatatggggtgtagattatatcaactctttcattaggaatgtatcataaagcatctcagtataaaacaggcattatgaggtttcccaggacaggactttttaactggcaaacaaatggcttgactattctaatcatggaggttgatgacatttcttccacatataatctgtgacaaatgacacgtscacagtccctcattctctgaatgcatttcacaactcctgatacagtgcctcatattctatactcag

SEQ ID NO: 264571 - DNA, 627 bp, Homo sapiens
taatggcttcctcatgagattattgtgagaataaagtaagataaatgtgaaagtaactggctaataatatttactcaataaatgtctatcagttgaacagactttctaatttagagacaagaaaaggcaagcagagtggttagtttacttgcacaaggtcacacagttagtgttagattaggaatcccaagactcctgattttcagcccagtgttactgaaaataggacatagtgcctaccatgtccctcagcttattcatatgagccattctgtttcttacacacaacaaaaatttattatttgttctagaaaaggggcatcatttccctgaaatgtcctcattaggctccaagatgtctaagctctgtctctctttaatcggtttacttgtgaaggagcaatttgctttacgacctctttgcagagtctgaagggtttatgactatgtggtgtcaacaagaaggtctaagatgctttcagttccatttactagcttcggagtcttcatattgtaggagcctatttattctgaaaagactggagtttgaacaytaaatctgagcactccgcatgcttttaagcttactgtcaaatggaacaatcacttctcatggtctgttctaca

SEQ ID NO: 264572 - DNA, 565 bp, Homo sapiens
tcctctcactcatcttgaagactgacccctaagtcttatcttaaaagtactttttactttctttgccttttaccacacacagtgccatgtcacatctccatacatgcactcatcattttctcttctcgttctcaccagttccacctttccattccctagagacccaggtcaaatgtctcccccattgccagccttacctaaatcccaagggcagaatcaattatactctggcctgtcccccactgtaccttcttcakactgctagtaatcacagcatttattccactggagttccactagttactttaatgaaggcctccccagtagatcatgagaagtgaaacctgtctcctctatctgtttattcctgactcactaagcacagtctctactcacaaagaagacatgcgctgcacacttattaaatgcaggagtgaataaattaccatagacaaaattactaggttcacatattccatgttctttttgaggctaaagaggctagagctaccattttcattattgctatgctggtgaaaaacaaaacacaaaaacttacaaccag

SEQ ID NO: 264573 - DNA, 588 bp, Homo sapiens
tttcataatgcaattggaagcattaatgacagaattcatcaagcttacaaaagagtctcagagcccaaagaccactcatttaaatcaatgcagggagataaaaataaagaagaaagaacttaaaaatggaacaaaacctctgagaaatgagggattacgtaaagataccaaacttgtagctcactgtcattactgacaaagatgaaaaagagcaaagaaatatggaaataattggataagtattgagaaatacttctcaactatttctcaatattcaataaatatggagaagcaaatatggaaaacatatttgagaatattgtccacgtaaattttcccaatctttgacatacaaattcaggaaattcagagaacccctgtgagatactgtacaaaatgaccaaatccaagacacatagtcatcagcttctccaaggtcaatgcaaaagaaaatattaaagacagctaaacagaagaggcaggtcrtgttcatagggaacccatcaggctaacagtggatctttcagtagaaaatttacaatccagaagagatttggggcctatgttcagtatcctagaaaagaaatt

SEQ ID NO: 264574 - DNA, 595 bp, Homo sapiens
acatttaagcatggcaggccatagagaatcccttcaagtttgtaccttctaattgagttattttacactttttgtctctaatcttccagctaccaaggtgtctttcatttattacctatgcattaaattctttacaacgtgcacatgtcagttcattggggctactataacaaaataccatacactgggtggtttataaacaacagaaagctatttcttacagttctggagagtaggaattccaagatcaaagcmtcagcagaatttggtgtctggagaggacctgcttcctcataggcagttccttctcactgtgtcctcatgtggaagaataggtgggcagctccctttggtcccttttataagagcactaattccattcatgagggttctgtctttatgacctaatcaccttggaaaggtcccacctccccattaccttgggggtgaagattttaacatattaatttagggtgggcattcagatcatagcagcacatatgaaggaaggaaggtactgggccactcagcattctgcattcacccttgtaattgctccacagcaaggaagcattcattcaataaggcaaagagt

SEQ ID NO: 264575 - DNA, 498 bp, Homo sapiens
ctcattcatctgtaattcaagactatcctcactcagattccagcttcttctcagccttagctcctgctactcctcctcaagcactcaacactcctctcagagcagactcttccttctacacttcctgtacttccatacatttgtatttgttggcaccattccctctacacagaattcctcttttctgcccctcttactaacccacatttcatggtctctgaacacttgtagaaaacgttatttctttttaactaacctagaatgattcacacgcctataaggtcaatattttttcaaggttcctttwtcctctgtgtttccctcacgctgtcactcttacctttcttacctcatgctgtcccttctactttgataactgaaagttattcttaacatgatgcttagctttgcaaaagtaagaggtcaaactgggcctcccagtgttttagtggctaagaaaatagaagattggtagctgccacaagacaatagtaaaat

SEQ ID NO: 264576 - DNA, 517 bp, Homo sapiens
tttgagtatatcaaaaccaaatatcacagatgcagaaaagtgtcgaatgtgttgactggactcagggcccctaccctcctccagccagtcttctcattccttcccttgctgccattcccttttcctgctggcatcctttttctttctcagaattaactccaaactcagtgattaaaatcagtatataccacctcttccctgctacacgtttataatttatacactgtgtatgtgcaaaattcattgagaaaatgaatgaataagaatggttcaaaatagaactaacaactccatataatagtaagttactgactactaatgtcttcaagtagatgctgaatgactgtctattagagattggtggagggtattaattactaacaaagagactggagaagataatattaactttttacttcaaaggctaatgtttygtgattgaggaaaattaagcaatgtacatttaaacacaataaatccagtagttaaactaacacttttattttagctatacccc

SEQ ID NO: 264577 - DNA, 560 bp, Homo sapiens
gcttcactcttaggtaaatactatatttctgggtctcaggataaacctctcttgaattcatcttcttctcttctcctgtagtactgggtcaatgcagaaagtttttttctcttttcctcttctacagctttgtgtgtttctacaagtagtcaaaggcttttggcctgtaggggagacagggacaagggtcctagcagtttttctttagtagccgctgttccccttccctagccagcaccatgtaccacaggggagttgcctcagtattcttccagattttccctgacaattcctggtgagatttgcaggagaaaacatctgaaagaaaacagaawcatccctttcctaaggcacctgtcctcagtaagcaagtgctcaagatctgcttcttcctggaagcaccaattcttccctaagaattggggatagttacactatcaccttagttaagtgatgagttcaagaaaagctgttactttatggtttgctcagcttgttccttgttgtaagggtgggagtgaggatctttttcactctctacatctctgaggtaaaaccag

SEQ ID NO: 264578 - DNA, 577 bp, Homo sapiens
gattataaatagatgaactattttcttggcatttttaagaaatttgattcaggaagtaagtaccccatgacgcttgtatattccacaggacttaattacttaagagttcatggcatcatttattataccaagattaaattaaaatgtcggccaggcacagtggctcacgcctttaatcccagcactttgggaggcggaggcgggtggatcacgaggtcaggagaacgagaccatcctggctaacatggtgacaccctgtctgtactaaaaatacaaaaaacttaattgggcgtggtggcgggcacctgtagtcccagctacttgggaagctgaggcaagagaatggtgtgaaccctggaggcggagcttgcagtgagccgagattgcaccactgcactccagcctgagcaacagagcaagactgcatctcaaaaaaaaaaaaaaaaaattaarttaaaatgtccatcatccttagtttttattgaacaactactaactgcgttgataattattcttaatatatcagagattatgtcaagtgctttggcatttgaatatatgacataatctttgcctt

SEQ ID NO: 264579 - DNA, 648 bp, Homo sapiens
tgttgttagttgtttttgtgaataatgaattatgtataacatttattattacactgctttatatgatgatttacctgattttattatatcttgtttcttcaagtagagtttatgctccttgaaggtggatactatattgtgaataacccagcaaaatattatacatataatttttaatctataactactttgactgaattgagaaaagaacattattccaccagccaatatcctaaattgtacaattgtagactatgttgatgttttattatggtggggactttcctctattgtatgaatatatgaaaacattccctataaagattgctttcaaaaaattccttatttgcttaaaaataaacacagtttctctgttattttagggcattgaaagagtagagaggaattttaatagaataaatcaaggcttccaaatgtcaggagaatagcacttagaataacattcwtttcagcttgatagaatgaacatttagattagtaaagacatgatttttattaaaattcagcgtcattatttataatacatcctcagtttctattaggatcattttatatataataagaggaactaggtacctctttggggtcatttcagggacattttgaaggacattttttttcagcaaa

SEQ ID NO: 264580 - DNA, 606 bp, Homo sapiens
gaggttgtgcagcagagtcacagaaatatatgggtagggtggggcagcttctacaaaaatggttatgaaaagcttagaagaggcttctcaataaccctctctttttccacttttcatcatccattccactacaatcatacagaaaaattgagaacagtttaatggcaaagaagttattagaatcctagagttgtggcagttgttagaaaattaaataagctaaattttggaagattttagatatggactcttttggggggtagatccttctgaaaaataagagaggtaaggamcactgctgcttggaactctgagcaaacctcaactaggctgtttggattggcttttctatgggcattatggatggccctcatgatctggctttttctgctatctgtgaagtaaatcaaaaaagacaaagtttctgttatagacctacaggtggtctagtggctcattttcagctatgggaagtggttctctgacttagcatgcctcagaatcacttatacactttgttaaaccctacattgctaggccccactcccagagtttttgactcagcagttctggtgtgggacaaagaatttgcacgtttaacatatt

SEQ ID NO: 264581 - DNA, 580 bp, Homo sapiens
caaaatcccttgctggctttgtgctgcactgcttcttgaccatcagtctagtaatttgcaaaatgcacataattttattctagtttaactgaagcacaaggtaaaatgtaaaccagtcactgcatgaaaagaatttaaaggacaattagaaagcttgaacaacaataatataaaaatggtaatgtgagaattcctgctagtatgaacagttcagcattgatgatgttgtaccattttataacaacattaatacaaacaatgataataatatgtacatttattgagtccttactgtgtgccaggcactattctaaaatttttgtctatcttccccatttaacctatgagttggtttttgtgatatttttatttgaaaataagaattgtgaaacaaagagagggtgtgtagttttcccaggattatacagatgaaaatagataaaaaacaatgtgtgcagtatttttcaatggttacaggtttaaattactcctatccrtagccaaatacaagcacacatgtgtgcatacacacacacacactcactcaggccaaacatccataattttgtttttgaatggc

SEQ ID NO: 264582 - DNA, 660 bp, Homo sapiens
taagaacttgatacaggtaaaccacaaattgaaaacctataatgtgaaagctaaaaatccaagattattcattatatataataatacatataaacaaatgaaatatatgaggatctggcatcaaagatttgagcaaggacaattgcaacagaaaagagcaaatttctactcaacttattttgagtcgtgccaaaacaatagctaagacttaagaatgctcgaagactaaatatgatgtgggagagaaagggagaacaaatcaagataaaggaacaaaggactaagacatttgaagtcaaaatgaaatggataaaaacatgaatatactgtttaaatatatgaatatactgattaaagaaaaggtaatcaataagcagcatagaccttagaggacacagccatcaactctgtcatttactttaaggaaaacaaactctcaayatctactaagctatcctaaaaattatagtttctcctcactgggcaaagaccacttgaaagagtcaagcagaaccctcttctcctaagtaagtgattagaaaaaatcaattttagctacaaaatggcagaccatttcctgaagagctcagcctctgcaaattgcaatttatttgaggaaccccaaatactttaccaaaaacttcgaacattacctactgt

SEQ ID NO: 264583 - DNA, 601 bp, Homo sapiens
ctgatgttaacacatctaccacgttgccagttgtataaaagcctagcacatacaatcatgtaaaatacagaatacctgataaagattgtaagcgactatgtcattggtttatgtctttactatactatacttttagtcattattttaaagtatactccttctgtgtgtgtgtgtgtgtgtgtgtgtgtgtgtgtgtgtgtagatttaaaaagttaactgtaaaacagctttagacaggtcctttaggaggtattccagaagaaagaattgctgtcacaggagatgacagctccatgcatgctaattgcccctgaagaccttccaagtgggacaagatatggaggtggaagacagtgatactgatgatcctgaccctgcataggctgaggccaaatgtttgtttgtgtgctagtttttaaataagtagtccaaaaaatttgaaaaagaaacagaagtttytgaataactatttaaagaaagaaaatatttttgtacaactttacaaggtatttgtattttaagctaagtgttattataacagagtcaaaaagttttaaaagtttttaaagtaaaaaaatgtaataagccaagcttaattgcc

SEQ ID NO: 264584 - DNA, 551 bp, Homo sapiens
tggcaatctattttctgtgtcttgtcagggcacactgaagggaggttatagctaactgctggcagtcttctttcatgtctcccttgaacacaatacttcaagccaaaccattttgacattgctttatctgttcaggcttgactacatagagcattaagacytcagccacatgaacagggaagggaaaagatagaggtttaatcaggcaggaggatggatagaaaaattagactaactgtaaagcagcatctttaaagtagtcaactactgtgcaaactttgtaaattctgcttgattagattaagaattaatgtctgagaatgtccaatgcagagtgaggtccaaccagtaaattatgctcaaactcaaatcagtgggatgctacacgttttattatgagtggaaacaatggcttaggttagagagcaggggatgataaaatacaactagaggataaaaaatgagtacaatgtcaaaactctaccctttgaatagagcaataaatgaggatgatagctgaatcaaaataactgggccacatgacagaggag

SEQ ID NO: 264585 - DNA, 551 bp, Homo sapiens
tggcaatctattttctgtgtcttgtcagggcacactgaagggaggttatagctaactgctggcagtcttctttcatgtctcccttgaacacaatacttcaagccaaaccattttgacattgctttatctgttcaggcttgactacatagagcattaagacctcagccacatgaacagggaarggaaaagatagaggtttaatcaggcaggaggatggatagaaaaattagactaactgtaaagcagcatctttaaagtagtcaactactgtgcaaactttgtaaattctgcttgattagattaagaattaatgtctgagaatgtccaatgcagagtgaggtccaaccagtaaattatgctcaaactcaaatcagtgggatgctacacgttttattatgagtggaaacaatggcttaggttagagagcaggggatgataaaatacaactagaggataaaaaatgagtacaatgtcaaaactctaccctttgaatagagcaataaatgaggatgatagctgaatcaaaataactgggccacatgacagaggag

SEQ ID NO: 264586 - DNA, 624 bp, Homo sapiens
aaaatcttaacatctccatttttaaaattctgtaatgataattccaaataagcctttgtayagtctacaattactaccaaaatcaggaagcaatttcaatactcatgaaaatgttcatagaggatctgtgaagcaaagatgactttgaaagacaggtgaatttagtctatgtgaatggaaaaaggaggtaattcccagaaaatgaacaatagggaacgcaacaaggcacagaaatgaaacaattgagctaaagtctttgtaggaaacacttcaagcatggaaaaaactattttaaaagaactttattggtaggccttaaataatttttctctgtattaataaatgagcagtttacatttgccaaagattttataaacacaagttatgagtttaagggaaatggtcacttgttttaaaacttattttggtttagatcacatatcattcaaagcctttatctatgtagacaataaataataaatagcttttgatgctggtgggagatgtgggaaggggaaacttgctttttattattatgtcagtttcaaaaagttaattcttctagtacaccattgttcaagttcatgtttttatctaaaaaagactttgataacagtcataaca

SEQ ID NO: 264587 - DNA, 443 bp, Homo sapiens
agaaatttaattcattcacttaaatgattgaatartactccctggaaagaacttgccacagtttcttcagtctttatattttttgtatagacattaattgtgtttgctattttgtcactaatggaactttttgtttgtgggaaatagatttccaggagtggatatctattaataggttgaagcaaatctatacattaattttaagaaacatttgcaagattggttttcttgttttggttttcaccatagcacttatcgtatcttatatcttctgttctttatttattttctgtttttttcactagaagaaatagttttataagaactcaagattggatcatctattcactgcggtattctgtgtctggtacataccaaatctgcaattggtatttgttgaataaaaaaatgattggtttagaattgctaaaaccataaagatt

SEQ ID NO: 264588 - DNA, 570 bp, Homo sapiens
gaacccatgttaactcagaagccaagcaagacagaatgaggaaggaaatttctgctgcagcaaatgtgagagaatacaatctgaagacaatgtgaataatctctctttctttgaatcagtcatgcaactgttcctattagcacatgtaattgagatggggatgtgtatgcaaatgagtgactacttcaacactgaaattcagatattctcaagttacactgttttgtaataaaataatataacaacataaagtcaccagcacatgtataataaagaatagttaaataccagttagacagaaagacttaacttggacttctagaaacctcttaatacgatgcatttactcacagattctgaaagcacattgaggaactggaagtaatctgttcatattcrttttatagactaacagaaaaaaaatgactctcaacatgttctaaaaataggaactttagaccataggcattcaaaaaatttttatgactttcttttcgaattttctattcctctatttgtccttttaccttcagtttataggactaccaagttcttgtttttcattgatta

SEQ ID NO: 264589 - DNA, 517 bp, Homo sapiens
tttgagtatatcaaaaccaaatatcacagatgcagaaaagtgtcgaatgtgttgactggactcagggcccctaccctcctccagccagtcttctcattccttcccttgctgccattcccttttcctgctggcatcctttttctttctcagaattaactccaaactcagtgattaaaatcagtatataccacctcttccctgctacacgtttataatttatacactgtgtatgtgcaaaattcattgagaaaatgaatgaataagaatggttcaaaatagaactaacaactccatataatagtaagttactgactactaatgtcytcaagtagatgctgaatgactgtctattagagattggtggagggtattaattactaacaaagagactggagaagataatattaactttttacttcaaaggctaatgttttgtgattgaggaaaattaagcaatgtacatttaaacacaataaatccagtagttaaactaacacttttattttagctatacccc

SEQ ID NO: 264590 - DNA, 592 bp, Homo sapiens
gtcttttttggttccgtataaattttggaattgaagttctgtgaagagtgatgatggtattttgatgggaattgcattgaatttgtagattgcttttggcagtatggtcattttcacaatattgattctatccatcaatgagcatgggatgtgtttccatttgtttgtgtcatctgtaatttctttcagcagtgttttgtagttttccttgtagagatatttcacctccttgtttaggtatattcctaagtatttttttactattttttgcagctgttgtaaaagaggttgagtacttgattttattgtagcttggtcattgttggtgtatagcagtgctactgatttgtgtacgttgattttgtatcctgacactttactaaattcatttgtcakatctaggagctttatggctgagtctttagggttttctaggtatacaattatgtcattggtgaaaagtgacagtttgacttcttctttaccaatttagataccatttatttccttctcttgttgattgctctggctagaacttccagtacaatgttgaatggcagtggtgaaaatggggatatttgcttgttccagt

SEQ ID NO: 264591 - DNA, 578 bp, Homo sapiens
aatgtatattctacagttgttgggtagaatgtcctgtaaatatctgttatgtccatttgctctagggtatagtttaagtccattgtttctttgttgactttttttcttttttctttttgttttttttaagagatggattcttgctctgttgcccaggctggagtgcagtggcacratctcagctaactgcaacctcttcctcccgggttcaagcgactctccagcctcagtttcccgagtagctgggactacaggcgcatgccaccatgtccggctaatttttgtatttttagtagagatggggtttcactatgttgaccaggctagtcttgaactctgaccttgtgatatgcctgcctcagcctcccaaagtgctgggattacaggcatgagctaccgcgccctgccaggactttctgtcttgaggacctgtctagtattgtcagtagagtattgaaattccccactattattgtgttgccatctatctaattccttaggtttaataagaattgttttataaatgtgggaggtccagtattaggtgcatatatatttaggtttgtgatattttccta

SEQ ID NO: 264592 - DNA, 546 bp, Homo sapiens
agacacccagcaggggtaccatgctctaggttggtgctgggcaatgtctgcaaagacatcacccatgtctgcatcacatcctgtgatgtgatccgtcttcaggtctcccaggtatggatattagcacctgctctggtagaggtggcaggggagtgaagtagactgagattcctgtccttggttgtagatatttttagtgtgctggctttcttgaatgctggttatgctagcagtgaagttgtcatgtagatagattcaggacctctggttagccaggatgttgcaggcagtggaattagctgytgttttctccttccttggagcaggattattgtgttatgagttgctgtaatgtcctgagtttgtaatgtcctgaggtgacatttttaagagagtgcaaggtatgacagtagaaggggatataagcttgccctaagttggccagggtaagtattcaggtttctcagccgataggtggggccataaagctcccaacagtttatgtcttttgtgattggctaccagggcaggtagagaaataccagg

SEQ ID NO: 264593 - DNA, 598 bp, Homo sapiens
ctctggttagccaggatgttgcaggcagtggaattagctgttgttttctccttccttggagcaggattattgtgttatgagttgctgtaatgtcctgagtttgtaatgtcctgaggtgacatttttaagagagtgcaaggtatgacagtagaaggggatataagcttgccctaagttggccagggtaagtattcaggtttctcagccgataggtggggccataaagctcccaacagtttatgtcttttgtgattggctaccagggcaggtagagaaataccaggtatcagggaggggcagattaggcaggtctgagctcagactctccctgggcagggcttgccgcagctactgtggaggatgggcggtgggatggtttttgggccaatggggttatgttccagaggrgattatggctgtctctgtcaccagggaactgggggaaacctgctagcaataggcctcacccagctcccatgcagctggtgaggctagtcttgctcctgccgtgtcccactaacagtgcctagtttatctccaagcagccttgctggtgttttaagacattctctccttcaatgccagttagcatttcaat

SEQ ID NO: 264594 - DNA, 607 bp, Homo sapiens
gaaagagaaatagagttgttttaaatcttttctgatataatatttatgtatgtgtaaatttattttaagatttcaaagcctaagtgagtgtgataaagcattgcaagaggatatttttgataacttatcaagtcacagcaattccaaggaacattatcttatttttgaaaatcattgttaccaaagacaaatatttatgtgtttttaacttcagctttattttgtttgtcccgcagcaggagtgcagagtaaggaaataaaccataaaaatcataaatataagttggataataacatcaaggtttgccatcacacaaataaatacaaaaatcccaagatagcttgattataattttgctaaatctatatggttactgacaataatcattgaggaaatattttcattttctrtacttgagctgggttcttaaaaagtctgtggactttcagagttataaaaagttttgagttttagagttcatctagttcagctaccttattgaacaggtgaaattattgaaacacaaagattaggtatcttactgatggttacataactgtttagatagcaggatcatgggctttttacctccatttttgttattct

SEQ ID NO: 264595 - DNA, 554 bp, Homo sapiens
ggacattgctaagtgaaataagccagtcacaaaaagggcaataatgtatgattctccttctacaaagtacctagagcagtcaaaataattgagattaaaaagtagaatggtggtagccagggactgcagggaggagggaatagagagttgtttaataggtatcgagtttgagttttgcaagatgaaatgaattctggagattggctgcacagcaatatgaaagaatgtacttaacatgactgaactgtacacttaaaaatggttaagatgatacattttatcttatgtatattttaccagaattaaaaataaaagagaagttaatgagagctgctatattattataraagggaagatatgggccgtctcatttaactctgtggaaggcacacagtggaaatacagctagtactgtacttgcggattgatgatcaagtgcgttaattaactggaaaatgaacaaataaatagaaatatagctctgtcttcttgaatgaatttcccatgagccagtgaaaattacagctgggatttggaaataagcttggttcata

SEQ ID NO: 264596 - DNA, 545 bp, Homo sapiens
tctactcaaactattctgaaaaatataggaggagggaatactttcaaactcattctatgaggccagtattaccctgataccaaaaccagatgatgacacatccaaaaaagaaaactgcaggccaatatatctgatgaatattgatgcaaaaatcctcaataaaatattagcaaactgaattcaataatacattaaaaagataatttattattaccaagtgggatttatcccagggatgcaaagatggttcagtatatgcaaatcaatcaatgtgatacrttatattaatagaaagaaggacaaaaaccatatgatcacagaaaccatatgattggtttcatcaattgatgctgaaaaagcatttgataaaattcaacatcctttcatggtgaaaacctcaaaacactggacacagaaggaaccatactgcaacataatacaagctatatatgacagacccacagctagtatcatactgaatggggaaaaattaaaaaaatttcttctaagatctggaacatgacaaggatacccaatttcaccac

SEQ ID NO: 264597 - DNA, 550 bp, Homo sapiens
tccaccctgggcaaaaagaagtgaaaccccatctcaraaaaaaaaaaaaagaaaaaatgagataatactctttggagggacatggattgaactggaggccattatccttagcaaagtaacacaggaaaaaaaaacaaatactgcctgtcctcacttataagtgggagctaaatattgagaacacatagacacatagaggagaacaacacacaatggggccttttggagggtagaggatgggaggaggaagaggatcaggaaaaataacgaatgggtgctagacttaatacctgggatgaaataatctgtgcaacaaacccctcatggtgcaagttgacttttgtaacaaacctgcacatgttccggggcacatgtacccctgaatttaaagtaaaagttaaaacaaaacaaaaagaatattaaaggtgtcccatcttcagcagtccctcctgaaatcccttttcctcatcatagcctctcacctcctgaggctgctgtgaaagatgcctctctttcagaatactttctgttaattctcttcccccatgct

SEQ ID NO: 264598 - DNA, 563 bp, Homo sapiens
gagtttattttgagtgaatgcagaaaatattgcacttatcatgctcatataaaacatttaactttgtatatttttactcaatagtaagtgcagtaatttcttatgttattacagaaaacaacacatacttaatggatatataatagttcaaaatacgtatcttagatggcaaaatagatcatccctcttcattctctttgctaaagggagaaatggttttcttacccattttagtaaaggaaaaaaacctccacttttctttgatagttgcttaatgtgtgggtgtcagagaccaagcagacaatataccagtggtgcaatttcaactctaaccattttctgccattagtatgccagccttccccattaaaaatccgaagcagaaagccatattatctstatgtcactttcaaacataaacacttagtagaatggttgttaggttccatatctgtgaaatgtgtttgtataagtgacttattgtctttgcatgaagtggctggacaaagggatgcctggttgaggaaactagctgtaggaaggatatttctgcacatcactgc

SEQ ID NO: 264599 - DNA, 574 bp, Homo sapiens
ataatgatatatcagtcagggctttccagagaaagagatccgataggatatatggatggatagatggatagtgatgcatatctaggatctatgtattatatgtgtatgtatttatcatctatctacctacctacctacctacctatgaagagaagtattttaaggattgtctcacaggattgtagggaactggaaatctgaaatctgtagggcaggctggcaggctggaaactcgggcaggagttgatgttgcagtgttgaggcagaaacctctgtttttgttctcaagrcctttaactgataagatgcaacccactcacattatggtaaaaaaggacaatcttctttacttaaagtcaactgtttgtaggtgttaactacatctacaaaatatcttcatagcaacaccgagagattagtgtttgatgaaatcactgtgtaacaagcagcctagccaaactgacacataaaacataacagatatccttcaggtcttttcatttgtttctgtcatcttctaagctagtactatgtaacgttaaagagcagaaccatctaaccttatgcttatttc

SEQ ID NO: 264600 - DNA, 574 bp, Homo sapiens
ataatgatatatcagtcagggctttccagagaaagagatccgataggatatatggatggatagatggatagtgatgcatatctaggatctatgtattatatgtgtatgtatttatcatctatctacctacctacctacctacctatgaagagaagtattttaaggattgtctcacaggattgtagggaactggaaatctgaaatctgtagggcaggctggcaggctggaaactcgggcaggagttgatgttgcagtgttgaggcagaaacctctgtttttgttctcaaggcctttaactgataagatgcaacccactcacattatggtaaaaaaggacaatcttctttacttaaagtcaactgtttgtaggtgttaactacatctacaaaatatcttcatagcaacaccgagagattagtgtttgatkaaatcactgtgtaacaagcagcctagccaaactgacacataaaacataacagatatccttcaggtcttttcatttgtttctgtcatcttctaagctagtactatgtaacgttaaagagcagaaccatctaaccttatgcttatttc

SEQ ID NO: 264601 - DNA, 611 bp, Homo sapiens
gtacatcttctgaaatctaggcagaggctctcaaacctcaaatcttgttttctgtgcacccacagccccrgcgcaacctggaagctgccaagacttgggattttcaccctttaaaacaatggcctgtgctgtacatgagatccttttagccacagttggagctggagtggctggaatgcagggtgccatatcccaaggctgcacagagcagggggccttgagcctggcccatgaaacaatttttccctcataggcctctgggcctgttagggaggagcttctgtgaagatccctgaaatgtcctggaaacatttttttccattatcttggctgttaacattctgcttcttattacttaggcaaatttctgtagcaggcttgaatttctttccagaaaatgggtttatcttttctaccacatggtacagctgcaaattttccaaatgtgtacactctgcttcccttgtaaacataagttgcaatttcgaatcatctctttgtgaacacatatgactgtgtgctttcagaaagagccaggtcacatcttgaaagctttgctgcttagaaatatcttctgccagataccctaaattatctctctcaagttcaaa

SEQ ID NO: 264602 - DNA, 611 bp, Homo sapiens
gtacatcttctgaaatctaggcagaggctctcaaacctcaaatcttgttttctgtgcacccacagccccagcgcaacctggaagctgccaagacttgggattttcaccctttaaaacaatggcctgtgctgtacatgagatccttttagccacagttggagctggagtggctggaatgcagggtgccatatcccaaggctgcacagagcagggggccttgagcctggcccatgaaacaatttttccctcataggcctctgggcctgttagggaggagcttctgtgaagatccctgaaatgtcctggaaacatttttttccattatcttggctgttaacattctgcttcttattacttaggcaaatttctrtagcaggcttgaatttctttccagaaaatgggtttatcttttctaccacatggtacagctgcaaattttccaaatgtgtacactctgcttcccttgtaaacataagttgcaatttcgaatcatctctttgtgaacacatatgactgtgtgctttcagaaagagccaggtcacatcttgaaagctttgctgcttagaaatatcttctgccagataccctaaattatctctctcaagttcaaa

SEQ ID NO: 264603 - DNA, 524 bp, Homo sapiens
tggctgaagaacaaacagtcaaaagaagaattattctagaagtggaaggtaagtgatcatataaaacaagcaaaacaaaagaggaaataaagaataatttttaaaaaataagaattattcatcaaacaagctccatgaatgatcacggaccacactgtagtataaaattatactcctgagtgtatatgtatgtatatgtgtacacaaagcaaaatacaataaataaattagatacatgttgtattagtcagctcaggctgccaaaacaaaataccayagactgggtgccttaagcaatggaaacttattttctcacagttctggaggctgaaatttcaagatcaggttgccagcctggttgggtgctggtgagggctctctccctggctgcagatggctgccttctgtctgtgtcttcacacagtggagagagagcaagaattagtaccaaggtaacggggcactgctgtaaagatacccaaaaatgtggaagcaactttggaactaggcaacagaaagaggtt

SEQ ID NO: 264604 - DNA, 525 bp, Homo sapiens
tgaatccgagtcaagagtgatataaataattttcaaaagtcaagggagagaagagaaagcttttctttatagtaacatcccaaataataagtataaaagaatagtgggaagaggaaattttcatttggcaaataccacattaataattgcttcagcaagagtcatcaatggatgctaaaattagtggctgaaaatgtgacagaamacagaatatcgagaccatgtagtcccaatttttctccctgtaacatatgtattaattacaaaggtaaacgtagtaattttatgatggagaaaccagacagactccacctggaataggttgaattgtgttcccccttcttaaattcatacattaaatttttaactcccagaatctcacaatgtgaccttatttgaaaatagagtcattgcagatgtaattagttgagatgaagtcatactggagtaggatgggcccctaatctaatctgattggtgtccttaaaaaacagggaagtttagacatggatgcaggcatgtaca

SEQ ID NO: 264605 - DNA, 525 bp, Homo sapiens
tgaatccgagtcaagagtgatataaataattttcaaaagtcaagggagagaagagaaagcttttctttatagtaacatcccaaataataagtataaaagaatagtgggaagaggaaattttcatttggcaaataccacattaataattgcttcagcaagagtcatcaatggatgctaaaattagtggctgaaaatgtgacagaacacagaatatcgagaccatgtagtcccaatttttctccctgtaacatatgtattaattacaaaggtaaacgtagtaattttatgatggagaaaccagacagactccacctggaataggttgaattgtgttcccccttcttaaattcatacrttaaatttttaactcccagaatctcacaatgtgaccttatttgaaaatagagtcattgcagatgtaattagttgagatgaagtcatactggagtaggatgggcccctaatctaatctgattggtgtccttaaaaaacagggaagtttagacatggatgcaggcatgtaca

SEQ ID NO: 264606 - DNA, 636 bp, Homo sapiens
taatatttgaggaatctttatgaagggtatrcaggaattctttatactatttttacaacttacatgtgagtgtgaaattttttcaaagtaaaaagttaagaacattaaagcaaaaacaaagtcatactatagatgcaagacagcggaaaacttgttttttggcttgtaatattccttatcaaaacatcaatgaagtcttttcaattctgtgaaggtgtggattagaagcaattctgaacagttatatagctactcccacagccttaggcaatactgtatacaagctgtcatagcccagtaatttgacagaagattcaaatattaatttccctttcatataatttgaagattatttctccaagtccttctctttaattttcaaattattttaagatcctaaaaaatgaatgaatacttctgattatccaaaattgcatttaaacatggtataattaaagctacatttcggaatctgaaagaaggcttttctacactgtgttgatagggtcataaaaatgcttattgacctttcagataacgaggctacaatggtcatagatagaacagatggttttctgatgaaaccaagtgatttctcaacataggatgtccttttcaacagtttccctaacaaag

SEQ ID NO: 264607 - DNA, 498 bp, Homo sapiens
tgtttttttttttttttttttttttttgggggaggttggggtttgggaaatgtctcaaactataaatgaaccatatttaacatagaaacaattaaataatttctcagactgaaatttctcagactgaaattgggtatttagttttactacaacagcagctggcagacagcacctgccatctggtacaattaatttacagttaagcttccaagttgctgcttgcaatttaragcaggagagaggctgtacacacattcagatgggtacagtattagaggaaacataacctgtgatgtttctccaaaagagtaaagagttaccatgtctatgtatccattcaggttggcatttccttgactttccaagggagtatgatgcatattttttttttttttggttatatgaatgtatctatagcttcttgtagtggacatacattaaggtgacccctagtgagtcatatatttgtataatcctttctgctgctggagtgtgggc

SEQ ID NO: 264608 - DNA, 514 bp, Homo sapiens
ttttatggcctttaccagaaatttatgatactcatggtatgaacagtgcccctagaattgtrtactgcacaaccacaggcagtaagcttgagctgctggttggtcactcccaatactctcaactctaatcttgtaactgcctctcatatctcttccagcttctctataggtagaattagacacaagacccagttctgcccaaagagagataagagagtgtctgctggggacttctttactggtaaaaagcatatgtcacaacaaaaagagctcattttgtcactctcatctcctacttgcttccagattgggaggctgctgtgtatggataagatacctgctacagccagcttgacaccatgagaaggacaagagaattgcagagacacatatccaggattctgatccagttgaggcactgaaataatctagaaccaccttcaaatttcttataaagagaggtaagtaattaatattgttttgtgtgtaacatgtttagttgtgactgaaagta

SEQ ID NO: 264609 - DNA, 571 bp, Homo sapiens
ctgagccatgagcaaatccataaattggaaatctgtgtcatctgctccagagaagtctggyacatatacattcctatctctctgtgccctcctccatcttacctcttatcctagcaagtgggagccatctgtttatccacccaccacctgaagagcaggtgaacaagcactgctctgctcatctagacatctccagcctttagtccattagcccagtacctgagatacaatagatgtccaataaatatttgttgaactgaaataaactgaaaggaaattgttagcatcattaaaactacccatcttaatgagagttattaatatagaaagatattaacacaactttcagaccttgctaaaaaatgagtaacaattgaaatatacctaagacattcttattaatgtgtcatttacacagtaatgctaaacaaggccagatagcttaatacagtgtaaggaagattctagttattttataattgttatttcacactgaaaatgccctgacattgacatcatataagagagggcaaggaatatgcagggagaaaaatagattattcagcaggat

SEQ ID NO: 264610 - DNA, 629 bp, Homo sapiens
ttagcatcattaaaactacccatcttaatgagagttattaatatagaaagatattaacacaactttcagaccttgctaaaaaatgagtaacaattgaaatatacctaagacattcttattaatgtgtcatttacacagtaatgctaaacaaggccagatagcttaatacagtgtaaggaagattctagttattttataattgttatttcacactgaaaatgccctgacattgacatcatataagagagggcaaggaatatgcagggagaaaaatagattattcagcaggattaatacttaactatcttggctttatgaacacaaggatgtggagcattttctaaaccacttttcccaaacccactctcccagtctatttacaagtggggaaagaaggacccaataagtttctcagtctatgaatttatatatgtctgtcccatgttcttgtcattaattgcacctaggtgctttactgttttgcaaaatgatatgcaaggttctaataactcagtcctaatagccatggcrtattgtagtcctatacactttaacccaaagtgattaagcttttgcatggtgtagagaaatggggcacaggtacctggcttgaatgtcttgctcctcca

SEQ ID NO: 264611 - DNA, 633 bp, Homo sapiens
tatatatatatatatctgaatataagatatatatatatatatatatatctgaatataagatatatayatatatatatatatatctgaattaagacttgaaagtcaaaaattactccttgattcttgggctacagaatggatgtagcaggcatgaaaacaacattcatcttcttgtacgtctccatcagatgtactcttgagtgactaggtgcattgtcaatgagcagtaatatttaaaaagacatcttttgggcaggaggtttcaacggtgggctgaaaatattcagtaaaccatacggccaaaagacgtagtgtcatccaggctttgttgctccatttatagagcacagacagagtagattcagcataattctttagggtcctaggatatttggaatagcaaatgtccactggcttcaacttaaagtcaccagctatgttagcccctatcaagagactcagcctgttttttgaagctttgaaatcactcattaatttctctgtatctgtgaaatcctcgatggcatcttcttacaacacaagactgtttcatctacactgaaaatttgttatttaatgtagccaccttcatcaatgatcttagctagttcttccagataatttgctgcagct

SEQ ID NO: 264612 - DNA, 366 bp, Homo sapiens
ttgattaagaaagtattttctgcaaaagctactttattgctctctgcctcaattacctcatctgtcaaacagggataatagtatttatctcataaagctgtcataagaattgtgtatgtatgtatatgtatgtatacttatatatactcaagaaatacatataattagaatattctctgtatgtgttaactagtattacaaactgatttacccagacagttgcagtcacagatattttgtggaaaagkaagaattgtgttgtttcaaaagtaagcaatatttccaaatagatcacacacggtgagtgctagtaattccaaatgttgttttagtagagctatttcttctaaaattaataaatcaatt

SEQ ID NO: 264613 - DNA, 520 bp, Homo sapiens
atctcaccttgttagtcatttcccatatccttcacgtataagaaattcatacactctcattttytcttcgaactccccaatactcataacttaagattaactgatcaaaaatggtccattttaaagtaatctataacgcgaacttgaaacattaaaatatagtaataaaataatattaaagcattagtccctcttaaccagtgtattttcaaaaaggtcaaagcagagacagtaacatgttaaattatcagcaacacaaaggatttcccagatggacacttatgaaaaatatccaaaacatttgcatatggtatataagtaaattaatttgcctcaacattctatttttaaatgcacactctcctttgtctcttctctaacattaatagatttaccctatctatgacccaggatttttacagcatcagtatagcttttaaataaggttaaacacatttcaaactgcccaagccttcagcaaaaccattttttttgttgttgttgttttaataattgtggt

SEQ ID NO: 264614 - DNA, 602 bp, Homo sapiens
ttcttgtatttttgataaaggaagaaaaagtaacgggtagataagattattgcttaccaaattaaagaatattatttcattgatagagtcttaatagtgtctggaggtagggagggaacaaagacaaaatatgggattttggatgtctggcttaaygtagttcattcattgtgaaagcctgtttgtactgaagaaaaaaaatgacataataatataggattgtggacagagtgatgccagggttccctgtcttgaaaagtaaatagccatttgatgagcctggttgagctagctaaggtcctgagtcctttcatgaaagctggctgagtagtctaatgctcagaaaaacggactttcataaaggtcttaaacaactaatgtaagttatttgaaatttcatcttcctggacaagacaatcttagaatgatcaagtcaagttgtagatggttagatgactgattagattatttctcttcttacttacagaggtcaggaagaatctatctccaaacttcagagacaaaagttgaaaatagttaaaagcttgggtcagagatattacataaagtttattccctttggaatttttggatgagcccag

SEQ ID NO: 264615 - DNA, 572 bp, Homo sapiens
ctttccagggctgtccagataccagtatttttaaattattccaatgtgcatctaggactaataattttcataattactgttgcatttttttccaaatagaaatgatatattttatttatttaactggttgtaggaaacaaaattttaaaatgtaaaattaatttactccctctttagatcctaagtgattcatctgccataagatgagtcaaattgtaatgaaataatcctttaaatgttgctccattgatttggtagatatggagcagctgttgttcaatattcaagcaggcatctaataacaatgttattttgcctaaaaagctaccactggtggtaaaacattgctggaagatggccgaataggaacagctccrgtctgcagctcccagggagactaacgcagaaggtgggtgatttctgcatttccaactgaggtacccagttcatctcattgggactggttggacagtgcgtacaacccacagagggtgagccaaagcaggggatttcctgttcctaaccaagggaagccatgagaaactgtaatgggaggaatggtgcactccagc

SEQ ID NO: 264616 - DNA, 643 bp, Homo sapiens
aagtgtatgcatatttacacagtattagaaatggtctgaaagaaccataaaatgtaatttcatataaaattatacatcaagtgactaaccattgtattgtccgttaatagtttaggctgaggtcttgataatcttacaactcatctttcctccttgtaggattcataagagataatatagagaaaataattcaaaattcttcataagcatctagaataattagataagatgtgcaattctgagtgttaatgttgaaaacagcataaaatatgcacattttacatttttaaatttttctttatttaagtttaactattcaaggtaatgccaaataggaaaaagaatgccattttgttgatatctgggaaacaatattttccatcacagggattatctgataaactgtgctccataacacaaataatttcattcttcttcctttcttgccgagtagtaaaaaaagaggatggctggtttatctcaagtaatcagacatttaataataatayagaaaatacactttataaaatcacaaaatagagtaattattcttccacaacacatctgacacagtgaataaaacatattattgcttaaggaaatgaataatttgtggtaacattttttaaacttggtatatgtg

SEQ ID NO: 264617 - DNA, 572 bp, Homo sapiens
atataagtgaccaacaggtatatgaaaaggtgtatgacatcactaatcatcagggaaatgcaaatcaaaaccacaatgagctttcacttcacatcygttagaatggctattaacaaaaagtcaaaagataacaagtgttgatgaagatatggagaaatgaaacccttgcacactgttggtgggaatgtaagtgggtacagccactacgaaaaacagtatggtagttcctcaaaaaattaaaaatagaactacggtatgatccagcaaccccacttctgggtatatacccaaaagaaataaaatcagtatgtggaagaggttatctgcactcccatatgtattacacagtcgttcacaatagccaagacacggtatcaacctgagtgcctgtagacaaatgaatggataaagaaaatattcatacacacacatgaatatcattcagccaaaaatgaaggcggctaggcatggtggtgcatgcgtgcagacccagccccagctagttggtaggctgaggcaggaggattgcttgagcccaggagttcaagaccagccttatctcaaaaacaaac

SEQ ID NO: 264618 - DNA, 572 bp, Homo sapiens
atataagtgaccaacaggtatatgaaaaggtgtatgacatcactaatcatcagggaaatgcaaatcaaaaccacaatgagctttcacttcacatccgttagaatggctattaacaaaaagtcaaaagataacaagtgttgatgaagatatggagaaatgaaacccttgcacactgttggtgggaatgtaagtgggtacagccactacgraaaacagtatggtagttcctcaaaaaattaaaaatagaactacggtatgatccagcaaccccacttctgggtatatacccaaaagaaataaaatcagtatgtggaagaggttatctgcactcccatatgtattacacagtcgttcacaatagccaagacacggtatcaacctgagtgcctgtagacaaatgaatggataaagaaaatattcatacacacacatgaatatcattcagccaaaaatgaaggcggctaggcatggtggtgcatgcgtgcagacccagccccagctagttggtaggctgaggcaggaggattgcttgagcccaggagttcaagaccagccttatctcaaaaacaaac

SEQ ID NO: 264619 - DNA, 572 bp, Homo sapiens
atataagtgaccaacaggtatatgaaaaggtgtatgacatcactaatcatcagggaaatgcaaatcaaaaccacaatgagctttcacttcacatccgttagaatggctattaacaaaaagtcaaaagataacaagtgttgatgaagatatggagaaatgaaacccttgcacactgttggtgggaatgtaagtgggtacagccactacgaaaaacagtrtggtagttcctcaaaaaattaaaaatagaactacggtatgatccagcaaccccacttctgggtatatacccaaaagaaataaaatcagtatgtggaagaggttatctgcactcccatatgtattacacagtcgttcacaatagccaagacacggtatcaacctgagtgcctgtagacaaatgaatggataaagaaaatattcatacacacacatgaatatcattcagccaaaaatgaaggcggctaggcatggtggtgcatgcgtgcagacccagccccagctagttggtaggctgaggcaggaggattgcttgagcccaggagttcaagaccagccttatctcaaaaacaaac

SEQ ID NO: 264620 - DNA, 572 bp, Homo sapiens
atataagtgaccaacaggtatatgaaaaggtgtatgacatcactaatcatcagggaaatgcaaatcaaaaccacaatgagctttcacttcacatccgttagaatggctattaacaaaaagtcaaaagataacaagtgttgatgaagatatggagaaatgaaacccttgcacactgttggtgggaatgtaagtgggtacagccactacgaaaaacagtatggtagttcctcaaaaaattaaaaatagaactacggtatgatccagcaaccccacttctgggtatatayccaaaagaaataaaatcagtatgtggaagaggttatctgcactcccatatgtattacacagtcgttcacaatagccaagacacggtatcaacctgagtgcctgtagacaaatgaatggataaagaaaatattcatacacacacatgaatatcattcagccaaaaatgaaggcggctaggcatggtggtgcatgcgtgcagacccagccccagctagttggtaggctgaggcaggaggattgcttgagcccaggagttcaagaccagccttatctcaaaaacaaac

SEQ ID NO: 264621 - DNA, 550 bp, Homo sapiens
caaaaaaggtgaggtgatggatgtgttaattagcttgattgaggtaatcatgtcacagtgtataggtgtatcatatcatcacattgtatgccttaaatacataaaacttttatttgccaattatactccaataatgcaggacaaagtatacaggtctgacatccagagaaaaatatcagcagacttaaaatatctgatcattttcccccggaggaggattgtacagtttttttaattgatgagtaacaattttawgtagtaagcctattcactctctgttaaccacatttattgcaaacaagtttttcccaaatgtttagacatttattcctacttattctcacacttccctgataattcactgaaattgcgatcaaggctttattctcagcaggaagtacttgtacttctctaagtgacagacaggcttaaagagtgggctcaagggtggaccaagggcaactgcagataggccaattagacaaaaacattcaggaaactggtagttaaaataaataaattaagcctgtggtgattcagcaagcttatt

SEQ ID NO: 264622 - DNA, 629 bp, Homo sapiens
agtgtttaaaactacaattcaagataactttacaagaataaagagacctgagtagaaatactaaagggatacactgggtacctgtgaaatctgacccacaacaatcaacyccaaaatgtatccaagtaaaactattagattttaaagataaaggaagaaatcctcagggtcttcactcaaagaaataaacataacatccaagggcaaaagaatcaggctgcatcagacttctcaaaagctacatagaaagcaaggcaagaaaagaactgaatctttttaagacactcaaaccaagaaagtgtgaattaagatttttatatctagccaagctacctttcaaatatcaaggctatacagatacaattctaaatatccaagaactcaaggaatactgtgctcttaaggaatctactagaaaatgagcttcatccaagagataaactgaggaaacttcagtaaaaggattggtgataagcatttgctgtattcaattgtagctctaagacaaaaataaagatggggcgaggcggaagagtgatatataaatgctatatgttttcataaagtagaaataatgcaactgaaaaactgagaggaaaagggatgcagaaaaaggaaaatagaataaa

SEQ ID NO: 264623 - DNA, 603 bp, Homo sapiens
gtcccactgagctggatctacaaggtcactaacttatctgttaaaagaacaaacatctactctctccatacttggcacattcagatgattgtatattccatgtaaaatatatgccaatttctggcttgaccaactacaagtatgggtttctcaggctaatggtttgtaagaaaagaaggtagacttcaggcataactcttcaaccacagaatactgttataatatttatcaytctgtggaaaaatatcagaaacaacattaaatgatttatggtcttaattatcttttgtttggactttaattctgtgaacaggaatccattatgggggaagttttataaagtccacatagatctcaaattatgcatgctgttcaaaacctgcagcagaaagccaccttaagagtaatggttttctaccagggctttactccctgggaagagtgctctgttccttctccttgtaggattttttaaaacttaccaacattattttgggaatatctaaatgcatgcaatcttctgctaaaaagaactgaataaaaacattcttttgtacataaataatagcggtatttaaatctctaattagaagtagcctatat

SEQ ID NO: 264624 - DNA, 574 bp, Homo sapiens
tctatctatagcagacagaaggatgttactggctttgtgcttattcctagaatcccaaggcttgatccttggaagaaattatctgtcyttcagctattctcactactcagaaataagttgcatacatctcgaaaaggcttctgtcctgttgaagctaaaagggagctagaaatgagcatcaaatctataataaattgatcaaagaacagctaagtgatagcacagggccatcccaggcaggtgggctcctggttctctggtgtagccagaatccatacaaactgggctggcccagggaacccaccagtcaggctatgttcagttgcagcttcagtattcttatttaccatcatctgccaagaatggatattttttattgaaaagaatcataacacagtgactggctaaatggaagactcattgcacactgattctagagccaaaatgcccaggtttgaatcctggcaccacaggttagtctcttatgtttcagtttgctcacttgtaaaatggaataataatagtactttatagatttattgtgaggaataaataaatgagttaatatttgaat

SEQ ID NO: 264625 - DNA, 575 bp, Homo sapiens
ccaggtacttatctaggcactagagatacaaaaaggaaaaattgaccaaaaatatacatattttgggatgatttccctcggtgcccaaccaaataggggatggaggctgaagtctataagaaagtaaaggtccctgattgcactggttagtgtaccatgtacgctaacctttaacatggggaaagagggaaaactgacttggccctcttctctgtccttgctgatcacctgctgaagaatgtggctgtaaccagttaataagagtctgtcttggttttcttcctcaatgtgcagagccttaagcctgaagtgtagagtggagggtagatgtctttcctctttccctaaacctatgagactcactggtagctgtmtatttgcctgaaaagaaatttcttcaaaagtcagtaggaggaagttgtaaaattgttttctctttttaataaaggacccttttgaagactctactatcctcctccttgaaaattaacttcaacttcacattttatctagggagaagctaaatgcatcaatacttgcatgattttatttgtaatttaaacctgtaatttttc

SEQ ID NO: 264626 - DNA, 548 bp, Homo sapiens
tacaatctctgtagtatactacaagctctgtagtattatttattacagtctctgtagtatacagtattacaatctctgtagtataccacaagctctgtagtataatttgaagtcagataatgtgattcctccagttttgctmtttttgattaggatagctttggttatgctggagagtgtgtttgtgtgtgtgtgattccatataaacttaagacttgttttttctattactgtgaaaaatgtcattggtattttgacagggattgcattgaatctgcaggttgctttgggtagtatagacattttaacaatattgattcttccaatacctgaacatggaatctttttcaaatttttgatgttctcttcaatttatatcatcagtgttttattgttttcatcacagagttctttcacttctttggtaaagttaattccattacagaattgtttcacttctttggtaaagttaattcctaggtatttaattttatttgttgctattgtaaatgggattacgtttttatttccttttcagatagttcact

SEQ ID NO: 264627 - DNA, 548 bp, Homo sapiens
tacaatctctgtagtatactacaagctctgtagtattatttattacagtctctgtagtatacagtattacaatctctgtagtataccacaagctctgtagtataatttgaagtcagataatgtgattcctccagttttgctctttttgattaggatagctttggttatgctggagagtgtgtttgtgtgtgtgtgattccatataaacttaagacttgttttttctattwctgtgaaaaatgtcattggtattttgacagggattgcattgaatctgcaggttgctttgggtagtatagacattttaacaatattgattcttccaatacctgaacatggaatctttttcaaatttttgatgttctcttcaatttatatcatcagtgttttattgttttcatcacagagttctttcacttctttggtaaagttaattccattacagaattgtttcacttctttggtaaagttaattcctaggtatttaattttatttgttgctattgtaaatgggattacgtttttatttccttttcagatagttcact

SEQ ID NO: 264628 - DNA, 616 bp, Homo sapiens
tctttgttgaaaatttggtagaattcaacagcaaagccattggatcccgggcttttctttactgggaaacattttatttgttacaactttgatatagatagttgttattggtctgttcaagttttggatttcttcctatttcaatcttataagcttttctgtgtctcgaaatttgttcatttattctgtatctttcaatttttggcatacagttgctcatagtagccactaataatcctttgaatttctgcagtatcagttgtaatgtctcctttttcatctttgattttatttatttggatcttctcttttttttccttagtctgggtaaagattttttcrattttgtttaacttaaaaaagaaaaacttttgtctgattgatcttttatattattttcttcctttcaattttatttatttctgctctgatctttattattttcttctactaaattttgatttgggctgggtgcagtatctcacacctgtaaccccagcactttgggaggccaatgctggagtatcacttgagctgaggaatttgagaccagcctggccaacacagggagaccctgtttctaccaaaaaaaaaacacaaaaaacaaaaaaaacaa

SEQ ID NO: 264629 - DNA, 616 bp, Homo sapiens
tctttgttgaaaatttggtagaattcaacagcaaagccattggatcccgggcttttctttactgggaaacattttatttgttacaactttgatatagatagttgttattggtctgttcaagttttggatttcttcctatttcaatcttataagcttttctgtgtctcgaaatttgttcatttattctgtatctttcaatttttggcatacagttgctcatagtagccactaataatcctttgaatttctgcagtatcagttgtaatgtctcctttttcatctttgattttatttatttggatcttctcttttttttccttagtctgggtaaagattttttcaattttgtttaacttaaaaaaraaaaacttttgtctgattgatcttttatattattttcttcctttcaattttatttatttctgctctgatctttattattttcttctactaaattttgatttgggctgggtgcagtatctcacacctgtaaccccagcactttgggaggccaatgctggagtatcacttgagctgaggaatttgagaccagcctggccaacacagggagaccctgtttctaccaaaaaaaaaacacaaaaaacaaaaaaaacaa

SEQ ID NO: 264630 - DNA, 616 bp, Homo sapiens
tctttgttgaaaatttggtagaattcaacagcaaagccattggatcccgggcttttctttactgggaaacattttatttgttacaactttgatatagatagttgttattggtctgttcaagttttggatttcttcctatttcaatcttataagcttttctgtgtctcgaaatttgttcatttattctgtatctttcaatttttggcatacagttgctcatagtagccactaataatcctttgaatttctgcagtatcagttgtaatgtctcctttttcatctttgattttatttatttggatcttctcttttttttccttagtctgggtaaagattttttcaattttgtttaacttaaaaaagaaaaacttttgtctgattgatcttttatattattttcttcctttcaatttyatttatttctgctctgatctttattattttcttctactaaattttgatttgggctgggtgcagtatctcacacctgtaaccccagcactttgggaggccaatgctggagtatcacttgagctgaggaatttgagaccagcctggccaacacagggagaccctgtttctaccaaaaaaaaaacacaaaaaacaaaaaaaacaa

SEQ ID NO: 264631 - DNA, 604 bp, Homo sapiens
tttcaattttgtttaacttaaaaaagaaaaacttttgtctgattgatcttttatattattttcttcctttcaattttatttatttctgctctgatctttattattttcttctactaaattttgatttgggctgggtgcagtatctcacacctgtaaccccagcactttgggasgccaatgctggagtatcacttgagctgaggaatttgagaccagcctggccaacacagggagaccctgtttctaccaaaaaaaaaacacaaaaaacaaaaaaaacaacaggacatgtttgaacacacctgttgtcccagctacttgggaggctgaggcccacttgagactaggatatcaaggctgcagtgagccataattggatcactgcattccagcctgtgcaacagagtgagcctctatctcaaaaaaaaaaaaaaaaatgtgtttggtttgctcttgccattctactttttaaagatgtattgttctattggtctatatctctgttttggtatcagtacctgctgttttggttactgtagccttgtagtatagtttgaagtcaggcagcatgatgccaccagctttgttcttttggcttaggattgtc

SEQ ID NO: 264632 - DNA, 588 bp, Homo sapiens
agatatggtctgtctttgagaatgacttacgtgctgagggaaagaatgtgtatcatgcatccattggatggagctgggagtagagtgacacaaacaacctcacggctaccattactaggaatgtgctgggtcagacctgaagctggtacagcactcggtgtcaactaaggcctgatgtaaccacttcctggctactacctatgtttgctcaaggccccagggctctacagtcagcagrtggcaagccaaccaggcctgtgtccttcattttagggtagtgagttccccaagccccaggcaggtccagattgccatccaggagtcagggactggagttaaaaacttagaagtctacctggtgttctactgtactgtggttgagctgatactgaaatgaccagatgcagtccttccccctttttcctcccctttccaaaggcagagtgtaaggttagccgagagaaggaacgagtagaccccaaagtcaggcaagcaagtttgtattaacctgccgggctgctccactgtaaacagaggaggcagccccgcttacaggctgctgtggggttttatagggcaaggggctac

SEQ ID NO: 264633 - DNA, 556 bp, Homo sapiens
ggacctttgggactggcaattcccttctggctagggctggtttaagtgttccctctgtgtttgagtgttagctgagtttgatcctgttttgtttttcgctataacagggtggcactgagttcaatgcctgacaattgctgtactctccctctccccagcacaaaaaaaccactcttctcaccgtgccactgttgctggggaatgggggattcaagaccgttgttgattcaagactgatcctctgacctcttcagtgcctctttcagtgataaaaagttaaaaccaggtactatgaattttggtttttatgaggtgcatttataaagatagttgttaaattgatgtcctttatggagggatgatctgtagagccttctattcccctattctgttccatcccaactgatcatctttatagttacatggaaatatgtatttatttcacaaaatttctgwaagtttattcaaaacaaaaactaagaatttactattttttaataaaaaactgtaattaaagtataaatgcagcctctaaataattaagaaatgtataaca

SEQ ID NO: 264634 - DNA, 579 bp, Homo sapiens
attgtttgtaacacagggataaatgctcaaagtaatggatatgccaataccctgatggaattattacatattgtatacctgtatcaaaatatctcatgtacctcataaatatacatacccactatgtacctaccaaaattaaaaagtaagtaaataagtaaaataaacagtgtagagaagaagaaaaaaatagacataaagaaaagaggcatgtagtgaacattygagtagcaaccagaaggtttttatgccaaatgccaagatcagtaagatattatatatagatggtgtttgaatctaatttacaatttattctggaagaaaaggccagtcaggcagtaaaaccataatttagtttttttaacatcgtgacagaattgatggtctagtgagcctttaaaatacttttaataataaaactagttcttggcttttctttcattgtatacaattttgatttattgagctgacttctacagttctaagtagaaaactttatgaacagaactattgcctttggcatttatattctcttctggtaacaggtgcttttatttcattgcaaaagaacacagtttt

SEQ ID NO: 264635 - DNA, 574 bp, Homo sapiens
agcttctgggtttactacattctattggattatactcagcacagatgccaaacatttatagtattggtgaatcagttcatagcatttttttttcttaatgaggtaaatacagtccatattctgttttcaaactgacagtgtaagtaatctcacatgacttatcaaaggccttgcatctttaacaagttttcaatttcatttaagagaaccagattcttttaatatgcttcttcattgacttaaattactayatatctttgtgaaactaatttattattcttatgaataaatgagagaaattaattgagtatgacatatctagtttaattgctttggagacatctattttagattaattaaaccatgcttaacatgttgtagtagtaactgtgacattcatggaaaattcctttattcttagaaacattaatactttgagctttaatcagaagaaatcttaataccgagtgatagaactgggaaataaaatctccagccttataagttaaagagctgtgctcttttattttataataataatatatgatatttattgatggtaatatgatatatg

SEQ ID NO: 264636 - DNA, 574 bp, Homo sapiens
agcttctgggtttactacattctattggattatactcagcacagatgccaaacatttatagtattggtgaatcagttcatagcatttttttttcttaatgaggtaaatacagtccatattctgttttcaaactgacagtgtaagtaatctcacatgacttatcaaaggccttgcatctttaacaagttttcaatttcatttaagagaaccagattcttttaatatgcttcttcattgacttaaattactacatatctttgtgaaactaatttattattcttatgaataaatgagagaaattaattgagtatgacatatctagtttaattgctttggagacatctattytagattaattaaaccatgcttaacatgttgtagtagtaactgtgacattcatggaaaattcctttattcttagaaacattaatactttgagctttaatcagaagaaatcttaataccgagtgatagaactgggaaataaaatctccagccttataagttaaagagctgtgctcttttattttataataataatatatgatatttattgatggtaatatgatatatg

SEQ ID NO: 264637 - DNA, 630 bp, Homo sapiens
ggagcaggaataaaatgagggggaaattaagagggaaaagggggataaactgaactttaaaacacatgattgaagataattgtaagacaaacttcaggctggcagaaaatatttgcaaaagccatgtataatacaggaccatcatacaaaatgtacaaagaactttttaaaatttaacaataagaaaatgaacaacttaatttaaaaatggacaaaatagctaaacagtacactcaccaaagaagatccatagatggcaaataagtatatgaaaagatgatccacatcatatgtgctatggactgaattgtgtccccccaaaaattcatatgttgaaatcctaacttccgatgttactgcatttggagaaaggatctttrggactggtgcctttaaggagataattaagttaaatgaggtcataagaatgaggctctaatctgataaaactggttttctaataagaaaaccaatgtacacagagaaaagctcatgtggggacacaatgagaaggcagctgtctgcaagtcagaaaatggagcattaccaaaactcatctctactggcatcttaatcatggactttcagccttcagactgtaagaaaataaatatctgttgtttaagctac

SEQ ID NO: 264638 - DNA, 563 bp, Homo sapiens
tgcttttggcttatctctactaagatccatagaaataatttaagagaggttgcataagctatgaaatcaaaaccattaggacaaaaatactactttttagtaatgtaggtaaaaaaggagatggagtccaactgagttacatgataaactttttaaatttttttttgaattttattttaagttccggggtacatctgtaggtttgttacataggtaaacgtgtgccatggcggtttgctgcacagatcaacccatcacctaggtattaaaatcagcatccattaactattcttcctgatgcacagtaagaattgactggcagaattttttaaaaaagrattgaattttcaggataataactttgctttatctttgttctgtagttattttcagttgtttgacattttaacattcacctgtgacttaacaattgcaaaatgaagtgttaaattctacaaatgcaaaaggggaatgacttttctcaaatatagtaaccacggaagaagcttaaccctttgtcagaaacccagcatcttttcaatacacctaagattcaaaggttt

SEQ ID NO: 264639 - DNA, 532 bp, Homo sapiens
attgaataactagcaaaagaaccttcttgccactcaagcaattagttctcgtataaccctgcaagatttatcaagagttgcacagaaaatacatgaacatttgtagctttggctgtgcgaccttggtccattattaaacaggtaaaggtattcaaagaacaatgtcttcagcacagaaaaatgttgttgggaaatgctataaatgtgtttgaagccagamaacagaagccaagaggtggcagaatgcatgcagttattaccagacccacccctttcagcaacatgcaaatgaagcagccttcacctcaacacttagcagcctcagctggtagcagggtttcagctgtttctagggcttagtttggtacacattcaactcagctattggcagaaaaagtaccagcaaggccacatttggatttggaaaaataaataaaccttcagaaatcttagtgcaagctttggcagctcaaataacatctgcatttaacttcagcaattctggcatcacagtacccgttggttggacata

SEQ ID NO: 264640 - DNA, 608 bp, Homo sapiens
tctatcacccaatctaaatgcccttgggaagagaagagagccatgataattacaaactatatggtgaatattgaaaatggtcacgcagtgtttgcacagcacactctggctgggatgagggattgtgcacactgagtatccacaggtgagaaatcaaatgtagacattccagggagcctgtagggcaaaaagggatgtcagacctggtaactgttataggagacccacagtaagacctcgtgaattgaatcatttcagtgaaatccaaatgctctccyataagaatcttccttgatgagccaggacactcctgccgtgttgtagtgtccttgttgctggtgctgtgtgtctactacctactaccttgctaaggtcctatgtctggcactatcagctttcccaatgttttatttggattcctcctgtatgtttagagcacacacatttcctcatcctgtgctatttgccaggtctttgatatacaaccttgctcctgaggaactgggtctcctgatattcaacagcttgcctagttttatctcattacttggcttgctgctgtgtgtgatctgagtatgagctgttcatcttgctcttgaccccaagat

SEQ ID NO: 264641 - DNA, 591 bp, Homo sapiens
cctactaccttgctaaggtcctatgtctggcactatcagctttcccaatgttttatttggattcctcctgtatgtttagagcacacacatttcctcatcctgtgctatttgccaggtctttgatatacaaccttgctcctgaggaactgggtctcctgatattcaacagcttgcctagttttatctcattacttggcttgstgctgtgtgtgatctgagtatgagctgttcatcttgctcttgaccccaagatatacacgcatgcacacatgcatacgcacacacacacacacacacattatttatctacttgccaattattggaagctcgatagtacataaaacaaatctctgtcctacctttacaaatcttactatccagtgattaagacagatatttctcttatgccccaacaaacatataaatacaaattaacaaattatgctatgtgccatgaaaagaacagagtactttgaaatagaccaacaggaaaggcctttccaagaaagtaacattaagctaaaacctgaagaatcagtaggagtcaaatggacaaagagcttttcaggcaagaaaaacaacatagccaa

SEQ ID NO: 264642 - DNA, 339 bp, Homo sapiens
aacctgttagaaatgcacattcttaggccccacyctcaatatcctgactcagaaactctgggggtagagttcagcaatctgttttcacaggctctccaggatattctgatgcacactcatgtttcaggaccactgcattacaggaggatgagattggatcacaagaaaccagttaggaggctacagtgcagggatggtgctcttcctgatgttgttcctatgttgtagggctagatggagttgccctattcaggaaatgctcccttgaatttagaatgtccttcaaaggaaattcaatgataaagatgttctctttctgtcacccaaaagctgtctttt

SEQ ID NO: 264643 - DNA, 558 bp, Homo sapiens
ttttttttttaatggaggaggtgtagaattcagaagactgcattcacaccatttagctaaggaaaagcaattgaaatctgcactattttcatatctaaaccacatcacacaagaaacagactaatcttggggtgaatatgggggactggtgcatttagaatctatgcctcatatagaccagagatggagacgttctaccctaatgtaagtgtatggattcttatctagaacaacagtgaaatcaatgaagaaatgctattattggtcaaatcccttgaccttgctcacagggccttttatatgtgtgctcacaccaaagagagaaggaaacctttatttcacaycctctcatagtctcctgtgcaggaagacacaccattcttgactaaaggggacctcccccaaggtatcactgaaaatacccacacactttttgtgggctcaatgagctggactaatattatggttgccagcatcgtccaccagctcttgtctcccaaggaacctaagaattataaaagaatttatgccagaagagtaaaatgctgtggctttgtg

SEQ ID NO: 264644 - DNA, 285 bp, Homo sapiens
gctttgccctcataatgacatccggccagataaatgggargacactggaataatttgatttctaccagatatttctactcttgctacctgtcctttttcttctccttctaaaataaatgtcgactcctcttagccacatttcttcctacttgtcctataaagaaaagactagggttggaagacccaagtgtgatttgttttctttctctgatctttttttctagttagccctctctaaactagaacgtatgtgattcaatcattcatttattaattcaataaaat

SEQ ID NO: 264645 - DNA, 626 bp, Homo sapiens
aagtttctagaaaccagaatttttaaaaattttaattgtgataaaaaacacatgacaacatgacataaaatttaccatcttaaccatttttaagtgttcagtaaggttaactgtatgtacattgttgtacagcagacctgtaaaattatttcatcttgccaaactgaagctctatatccagtgaaaaacaaagccctatatccccctttccgtaggtcctggccatcaccattttattttctggttctatggatttgaccactttatataagtggaatcacacaatacttgcctttttgtgatttgcttatgttagcataatgttctcaaggtttatcctgttttagtatgtggcaagatatccttctttttaaagggtgaatgctattccattgtatgtatagaccayagtttatttattcatttatccctcaatgaacatttgggttgcttcaacctcttggctaatgtgaatagtgctgctatgaacatgggtgtgcaaatatctgtttcagatcctgctttcaattcttttggatgtatccccagaagttggattgctggatcttatggttaattctataattctactcttagttttctaaggaacctccatactgttaaca

SEQ ID NO: 264646 - DNA, 501 bp, Homo sapiens
agtgtaaccagtgtgcttttggagctcaaaggaggaagggcggagggtggaaacagacaggaggcatcaattttgactgggttgtcttttccactagggtggagaacattagaataaagckctgcagttgcggattttaatgaacttcttggaacttgcctttgtttttcttgttgcttggcaactctcggtctggctcctgagatggtcaccactgggaacaatttttttaaaggctaaaatgtaaatctcccatttacacatagaccacacttgtaaaacttgtctccattcaattgcctatttgggaaatgaccttggccatgggaagagcatgtcacccaaattttaccttacttttatgtttgctgtactctcatgggggtaatcactggactcttaactccagtaactcccagggacattttgagctggcttcctccaaagggagctatgactggttagaatgtgcttcaagttgagacctatttatttcccttt

SEQ ID NO: 264647 - DNA, 427 bp, Homo sapiens
agcctgagaaaagcaggatatggtcttatgactcactgactccacagacttcataaacatagattcaaagtagaatccatgggatagaatgagagagcattcaaaatgctctcccatttttcctctttatctggatttctgctgttactattcatttcatggatacagmaccccactacgtgccaagactatttgtatccactgtgttgacttctttgacagctttttgtcccaattcctgtttctcacctcaccagtcttcatcagatctgcatttcctaccagcatgtgcaccctcaccctgctcatctcagagccccagcactccatccccacatctccctattgaaccatcccctcgcttctttctttactgacctggtgccattttgccataaccactgaaccaactcttgactgtcaacag

SEQ ID NO: 264648 - DNA, 625 bp, Homo sapiens
accaattgtcgattaggggcatcatggaagtgccctctgaggaagtggcattgaagctaaggtgtgagggatgggtaggaattaaccaggtgagagaagaaagtgagtacaaaacaggagcaatagcatgtacgtagtgcctgagacaggaaagtgctgggcaattttgaggacaggaaaggccrgtgtggcaggagcaagcaagaaagtggttctgagaggaagcacagcaagatagctgaataggaccctccaatgatcttccccctccacaggaacaccaaattgaacaactatgcacacaagaaagcaccttcatgaaaatcaaaaatcagatgagcaatctcagcaacaggttttaacatcctatcaaggaaataggcattgaagagggtaggaaagacagttttggttttttttttgacttttactttcaggagtacatgtacaggttgttatataggtaaattgcatgtcacaggggtttagtgtacagattatttcaccattcaggtaataaggatagtatccgatagagtttgttgatccttgctctcttcccaccctccaccctcaagtaggccccaggatttattgttcccttctttgtttccatgtgtagtca

SEQ ID NO: 264649 - DNA, 566 bp, Homo sapiens
gcctcagcctcccaagtagctggaattacaggcaagtgccaccatgccgagtaatttttgtattttagtaaagatggggtttcaccatgtcggccaggctggtctccaactcctggcctcaagtgatctkcctgccttggcctcccaaaatgctaggattacaggcatgagtcactgagcccggcttacatttttaaaatattttaaattattgaaagaaatagttctatagaaggtgagaagtcaattctgcttcctccaaatacttatacacatacccactttccttaattcttagccacatggtaatgtgagggaaggcatcccctttgtgaattatgtcatgttattttattggcaatggcattgattgggaagcataaaagtcttccaataaatccctttagttctgtgctgctttctttaatgaatcagaagaaaacaccctctttctctctccctccctctccgtctcttcctccccttctcccctctgccctctgtctctctcactatccaagtttgcaattcgcttccccggattacacactgacactatgaaaata

SEQ ID NO: 264650 - DNA, 604 bp, Homo sapiens
agatgcagtatcaattaattttgctgtgtagaagagttattttgtctccattgtcacacaaacatataggattacttaccttactaatttttaatattctgatttattatcacattttaatatctgtaaaatctgtagtaatgccacttttctccttttctcattcctgagattaataattcacatttctctcttttttcttcctgctcagtctgtctataggttttataaatattttttgatttctcagataattagctttttgttttattgatttgctctaccgtttttctttgctatttcattgctttctgcatggatctttatttcttctgcttactttgggtttaattggctcttctttccagtttcttaagatgraaaccaaggtaattggcttagacctttgtttcctttctaataaacactttgctgccataaatttctgagaactgccatgtggcattccacaaattttaatatgttgtactttcaatttcattcacttcaaaatacattctaaattccttttcaataaaaatagttgttttatgttatggtatgttgggattgttttgcagcaaagccaaacaaaaacttcctt

SEQ ID NO: 264651 - DNA, 572 bp, Homo sapiens
tttttcctatagagttgtttgagctccttatatattcagcttattaatcccttgtcggatgggtaatttgcaaatattttctcccattctgtgggttgtctcttcactttgttgattgtcttctctgctgtacaaaagctttttaatgtaatgtgatcccatttgtccattttgctttggttgcctgcgcttctggggtattactcaagaaatctttgctcactccaatgtcctgaagtttttgcagtgttttcttctagtagtttaatagtttgaagttttagatttaagtttttaatccattttgatttgattttttaatatggtgagagacaggggtctagtttcattcttctgcaagtggatattgagttgcccagcaacattttttaagactggttttwtcctaatgtatattcttggcacctttattaaaagtgagttcactgtagatgtatagatttatttcctagttctcgattctattccatcggtctatgtgtctgtttttatgccaccaccatgcagttttggttactatagctctgtagtataatttgaagtcaggtaat

SEQ ID NO: 264652 - DNA, 560 bp, Homo sapiens
actgtaatgactacctttctactgcctatgtttggtgaaggctctagggctctacaatcagcaggtgatgactccagccaggcttgtgtccttctcttcagggaagcaagttttcgacacccttggtaggtatagagatggcatctaggagtcagggactggagttgaaaaccttaggaatctacttggtattctattgtcctgcagctgagctgacactcaaaccacaagacccagtccttcccattcttctctcccctttccataggcagaggagcttcattccayggctaccaccaccacaggcccacagtgagtcctgccaggctaccaccaatgttcactaaaggcacaaggactcttcagttagcttgtggtgaatgccgccaggcctgggactcacttttcaggagagtgggctccactctggtccagggaatgtccagaaatgccatccaagagccaaggcctggaaataggggacccccaagagcctgcttgatggtttgcccctgtggttgagctggtatgtaaggtacaagacaaagtcccctttactt

SEQ ID NO: 264653 - DNA, 570 bp, Homo sapiens
caagaatctactgctgcagaggcaaatcactgtatcttccatgataggaacccaagtgattggctggcctcccttggatatggtaccaagatggatgttggtagatataaatgccagctttcttaatccacaggtmggcaatctctgaggcatgttctacactctctacctgaggttccttaaggggtttagcttcagtaaaccacaaaggtaacttgctcgccaatgtaaactgtatttattttcttctctcccatttttacatccttattcctttaatggtgtattctaggatctcataaatttcataaagttcttcccaaggactgcatcttggtgggctaaggcaagttcttttacattcacatattttgttcattcagtaggggttgatatggtttggctgtgtccccacccaaatctcatcttgaattgtagctcccatagttcccatgtgttgtgggagggacctggtgggagataattgaatcataggggtggtttcccccatactgttctcatggtagtaaataagtctcatgagagctgatagttttataaggggaaacc

SEQ ID NO: 264654 - DNA, 590 bp, Homo sapiens
tctaccttaccaagagcactgaaagagtctgtgagaacttgtaggtcccactagcgtagtgctggctatacatgcagatgtaattgttttaatttataaattaagaatgctaataaaaagtawtttttttcttctgatatgatttcttttttaaaagaaaactttcctaaaagtattaaaaaatatttttacacacatcccttatgccatctatcagaacacttaaagtagagcatttgcatagaatttcaaaatcactcaacagagaagaaaatatttcaccaatagctatgtccatctctatggtgaccatatttcatattcatgtgctgtcagggattttcccagttctgaagatagaaagattttatgctgatcagagagaatgtggtgtcccacaatgccattctgtcaacctggcaaaagcattgagataatttgtcaagattaatttatctttttcttttttaaatttcaatagtcttttggggaacaggggtttggttacatgaataagttctttagtggtgatttctgagattttggtgcacccatcacctgagcagtgtacactgtacccaatgtgtagt

SEQ ID NO: 264655 - DNA, 541 bp, Homo sapiens
tatcagaactactttgtctttgtaatcatttaagagcccagcaaatgagagtcctaaaaaacccacttcataagttaatacttttattttactgtgtagaccttagaagtgcatacttggctttccaccaatatgtgtccctggactgcctttactccacagttccatgtgtgcacacctctcaggtcctctatgttcagactaaacatcaacacaccctcaaagactcttccaatctttctatttgagggaggcatgccctcccctgaactcttgtgcatgttgcytctttcattcatgccacatctcaactgttgccttccatgaaggggattttcatttgtgtttgacctccttgtttcaactccaaagaaggaactctaaaatagggatgaatattgtcgtgggttgcaactggctggggccagccttgcaggtggtaaacaaacttaccaagacagtcttaggtgaagaaaggcaggtttattacaaaaaatattaaaatacgaagatatgttgcaagagagcaacgggtgaagat

SEQ ID NO: 264656 - DNA, 615 bp, Homo sapiens
ctaccctgtgctctctccagccaatccccgcccaccactaggaaactactattctaatttcagtcacatagtttggtttttgccttttcttgaacttgatgtaaatgaaccatacagtaagcacttctttgtgtcttttttccctgaaagtttttaagatctgggttgtatgcatcagtagttcattcttttcattgctgaatagtattccattatatgcatatacatagtttacccacattatgaataaagatgctatgaacattcatgtgcacatatttgtgtggacatgtgtattcatgttcctggataaatacctgggagtggaattcctgggtcatagcaataggtatgtactaggtaggcctagggtatatatacagtgactttataggaaactgacaagctatttgctaaygtggttgtgccattttatgcttcccaccagtgaagcatgcgagttccagctaattcacatcctttccaatatttggtgttttctatctttatcattgatttctggaggtataaaatagcatttaattcaggttttaatttgccatttgtatttctctgactacaaatgatgttgagcatttttaaaatgtgcttatt

SEQ ID NO: 264657 - DNA, 534 bp, Homo sapiens
agtgcattgtaaacacttataaaaacaactgtaaaaagatcttcatgagatgatactaaggaaatttttgaggattattcttttaataatagtatttaaaaaatttaagtggcaattatatatatatatatatatatttaagattcctatctcttacagatacatatggaagaatttatcattgagtaggacatgtcttaaaataatccagtgaggcaggaaaaggggatatgccgctaactgtagaagtgaggttatggatatttgagggttcattatactattttatcttcttttgtgtgtttgtaaaagtctgcgtattaagttttaaaagcttttcayaaaaataagaattaaaagcagaattgttcggtggacttttcttaaagtttaaaatataacacaaccattctgaaatgtgattgtatttttttcacttttaactgctttattgggctataatttacatctacacagttcacctactataggtgtacagtctattgatttttagtaagttttatggttgtacaa

SEQ ID NO: 264658 - DNA, 601 bp, Homo sapiens
actagtaaatggtcagtacggcttctaagagggtggtatgaatctccaaactaaagccctaggtcttcctttcaaattgaagaagaaaataaaatataaaaagggattgagaggaaggaggaggtatttgcttccccccgaccaaaaaaaaaaattctatagttttgattccactgaaacaagtaaaaagaacttaatgagcctgtactagatctagaatactgtacataagtatgaatttatatcagacttatcaaaaatctcataccatctacttttcagctgatttgctataagtgacctttcaatcttgttgatagttatgatrccctcctagatttgtattctttcatcttttgctttatttcatgttttcgctgttagaaaagtaaacatttttataaagatgcattctgttgtcgaatgtcggtgatttaatgaagctaaaggctctagtaaagacattaaagactccatagaggtgtgagtttaaatgtcttatacctgtaaggagaaaatacatttctctctcttccttgggattgttctttgctaggtgaggtataagaattcactgttaattagcaagacagcacacaca

SEQ ID NO: 264659 - DNA, 403 bp, Homo sapiens
ttcacaggccttaatataccttaagcctcctacagcgacacattaaaactatacacaggttgttacatttgtacttaactacataatccaatyatagtatttttaaaataccaaaatgactgacaatcataaagacaatagatggtgtcctagtctgtttgggccactataacaacataccttagactgggtaatttataaacagaaattaatctcctccccttgagaattgggttgggccgagagattcatttctaactaatagaacagagcaaaagttaccagctgtcactttggatatcatattataaaagactacagcttcctgactctgtctcccttcctcccttttcttttccttcttgcttgcttgctctgataatgcgagggaacatgtcacatg

SEQ ID NO: 264660 - DNA, 584 bp, Homo sapiens
aatgtgatcatggaagagaactctactgtctgggagtggaagaagcagtttccaacttcacctccatactttaatgtttrcgcttgaagacctatgaccaccatacttagtagagcactattgcccacataatagtaaagaataatttttatctaattggaaatgctatcctatagcagaatctggttttatcattaaagccagaggtcagaaatgtgttaaaatgaaccataaggaattcctgattttgcaatcaggatttgaaaacaggtaggaaacaactatttcctgtggcagctcagttaaaagtgagcataggaaaccgtttttggaatagtacagcaatgattcatcagtcctgaagtatattggggctagactagaaaaggtggctctgaatttctttgcagagtcagtcatccaaatctactgactagtgccctattgttgctcttatttaaagcctctactgttttctgctgggggaattcttaatgaaaaaataccaaaagacttcactgatgatttatttgaacacattctttgatgtcatcttaacataccattttaaatattttgaggag

SEQ ID NO: 264661 - DNA, 584 bp, Homo sapiens
aatgtgatcatggaagagaactctactgtctgggagtggaagaagcagtttccaacttcacctccatactttaatgtttgcgcttgaagacctatgaccaccatacttagtagagcactattgcccacataatagtaaagaataatttttatctaattggaaatgctatcctatagcagaatctggttttatcwttaaagccagaggtcagaaatgtgttaaaatgaaccataaggaattcctgattttgcaatcaggatttgaaaacaggtaggaaacaactatttcctgtggcagctcagttaaaagtgagcataggaaaccgtttttggaatagtacagcaatgattcatcagtcctgaagtatattggggctagactagaaaaggtggctctgaatttctttgcagagtcagtcatccaaatctactgactagtgccctattgttgctcttatttaaagcctctactgttttctgctgggggaattcttaatgaaaaaataccaaaagacttcactgatgatttatttgaacacattctttgatgtcatcttaacataccattttaaatattttgaggag

SEQ ID NO: 264662 - DNA, 437 bp, Homo sapiens
cagctaatgctatagcattattgggaattcttcaaaaagatttttgatttaatctgtcagtgataaacagtaatagtgccttgtataaaaaccacctggagattttccacaaagcaatatttaatgagcaaaatttgaaattctgagcaaggatcaaccaaagaggwttttttgttgtttgtcacagtttgtttttcagtaagactcagaaaaataattccttgtcattgtaaatttaatttatgtgatctggaatagaagttttactaggcacacacagaatacatgatttctgccttttctgggtttctgtataaatatgtgtttgtggcaaattaaaacgttaatatcagaatcaagtctgtgatttgtgtttcatacagaataatttcatttaccagctggttcaagctccaggtccctgtgtgagtctcacc

SEQ ID NO: 264663 - DNA, 599 bp, Homo sapiens
ttttcttgttttaagtagtttctgtggaattacctagggaattatttttataactcagttataaacatacaaaaacctaaatgcaggtgcaactttttccttcattggaaagctgatcgatccatggataatgaaacttggtaaatgccttttaagacttgtattaatatagtttattttgtattgatttgggaattagactttaatcattcacctgcttgaaacaatgctgttaatttaaaatctaaaattcatgagagtaaagacctatttgtttttgtgtttttgtattttttgttagtttactcttttatcccatgtgtatgagagagattaaatatgtgaaaaagatggctrtctttatataaaatattttttaattaatgagattatttttataaaactttataatatttgtaaaactcatttcacaaaatcatggtatataggtgtcattttattttccttttctagatgaagacatttaggatcaaacttagtccacccaatctattcctaatcctaaggccaaagttagacccttactcaagtcataggactccaaacctacacctaacctaaagtctggattctaaatc

SEQ ID NO: 264664 - DNA, 595 bp, Homo sapiens
tataatagcatagcagtgactatgcagactgtaaattatgattttaaagtataaatttttgtgtgtgtgtgctctgtttaatgggatgtatgtgtgttcttattttcttcttcttaaacatttaatataaaaacacttagaactgtcttccaaaataacttatttgccaataatgtcagttagtagccatattattgtaccttacaaatggtttatacgttcattttaaatttgaatcacttatttgccttgaagattttcasaaccttcctgtcttaaagaaataataataacttaaaaaaagggttctcccttgtggtggaagctagactggcttcaagggtcagaaacctagttttaattttttacgtcactcactaggtgtgagattaaggcaagttatttaaaacttctctgggcctcagtttctttgtctataaatggagaagtagtgttgccctacccgaacattgctgtgaaaaattacctgaaaatgtttgtacagattttataaattataaagtagcaccaaaatactagattattactatcctctatgaacaaatgccaaagttcctggtgatgttcacgtaga

SEQ ID NO: 264665 - DNA, 529 bp, Homo sapiens
aatatacactgaactgaataaactttaaagtccaaagaaataactaaatgtaatttaaatttgttttaattcaataagtatttatggggaacctccaatatgttgcaaggtcacgaatcatttgcataagggttggtctgctgtagtctaagattcacttctgtgaattttcagtaaatgtaactaagactttttagattgtaggcatacagaatggaaaaaaatggccactgtcttatgaacacattggaagattttcttctatgggtgttcaaaaacagagaccttcaaatgccaggattgttctaaaaggattttaaaaaaaaatacccttcaaaaatttgttactgtaacaacccaggatgattttctcccgaaaacaatatttcatcttccacatataggataggagagttgtaagagactgttgcagacatgtcattttcagaaaattttgtcgtttatatttttagttgtgtaaacattaacaatttaaattakacctacacaaatatataatgtgtgtctc

SEQ ID NO: 264666 - DNA, 597 bp, Homo sapiens
tgccctgcgggctccagtgccccttcctctcttctgggtttcagccccatgcatatacctgtccactgaatgctcccacctgaatgtctctgacacttcaatccctccttgttcactaatcaaatgccayatccccaccccccacacagcccccttcccgcctgctatatgcccaattttaaagctacaaggagttgcatgaactagaagctacaagttatccatgatttacaccgcttctccccacaatcctctacattcaactgctggcaaagaactgatgattctcccttcgaagtgtcttctgtgtcccatctatatccatcagtactttcctcattgcaggatctcttggttaaacttctgaatcatggagtttgaatccctgttactatctgactttagagaagttacttagccttttcatatatcagtttcctgacttgttaaacaagaattataaaagtgcctatttcatgagttatcatgaaaataatataccacacaaagcacttaaaatagtcactgctatgcagtaaggataaaatgaatggtagctgttatcgctgtatttctgtgattatcattattactatt

SEQ ID NO: 264667 - DNA, 583 bp, Homo sapiens
taagagatccctgtcctttagggactcataatccagtgtgggagagtggctcctaagcaaattaagccctggggcaagaacggcacatgaataagtgctaagagaatacagaagagaaagtaactattttcgyctcagaaatcagaaaaggcttcacagaagaaataacaatagatttgcatcttgaggactgttttctggatggaaagggaattagaaagtcttcctacccagagaaacacactaaaaaaaaaatgttgtcagaaggcatcatatattttgggatgggtgagttttgtggctggtgcacagtggggtgtatgtgtagaattgagaaagagcaaaaccgtgaggacttgttagaccatatgacacagtctggacatgaatcttaggcaatggtgaagccagtccaggtctaatttgtgttttgggagttcactctagtagttcagtggaagatgtcctagagtaatggcaaagggaccagtgaagctcagaatccagatgactctttccaaagaaagagtctttgggaagactttgattgggagatataattccaattaatcatccttgtctc

SEQ ID NO: 264668 - DNA, 583 bp, Homo sapiens
taagagatccctgtcctttagggactcataatccagtgtgggagagtggctcctaagcaaattaagccctggggcaagaacggcacatgaataagtgctaagagaatacagaagagaaagtaactattttcgcctcagaaatcagaaaaggcttcacagaagaaataacaatagatttgcatcttgaggactgttttctggatggaaagggaattagaaagtcttcctacccagagaaacacactaaaaaaaaaatgttgtcagaaggcatcatatattttgggatgggtgagttttgtggctggtgcacagtggggtgtatgtgtagaattragaaagagcaaaaccgtgaggacttgttagaccatatgacacagtctggacatgaatcttaggcaatggtgaagccagtccaggtctaatttgtgttttgggagttcactctagtagttcagtggaagatgtcctagagtaatggcaaagggaccagtgaagctcagaatccagatgactctttccaaagaaagagtctttgggaagactttgattgggagatataattccaattaatcatccttgtctc

SEQ ID NO: 264669 - DNA, 642 bp, Homo sapiens
tgtcttgttcatcactgtatccctagtgcctctagtagtgcctagtacgctgtgggtgtttagtaaatatttttgaataaatactaataaagctaggctacaatttcatattttgccaatagatgycactctctaagcctgtgctgtgcccacatctgattttttttagttccatattgttttacagaatgaaatagtttaacatttccaattgtataatttgaaagtgaaattactatgaaatcccagtgaagtcacatgtataaatggtgggcaggcatagcagcttaaacagctgcagtaggatttttgtttagattggtgctgttgtgatgtctgcaggaaatgtgcactattgcctgaacctatgcagctatcaaaaaattcaaataatggagaaatatggctctacttatattagaacatgtttgaaaataagtgtaatgttatcatatgtaatctaaagtctcagctgcattaagctgaccatctcctcctctatattatccacaaatcatgtacttttacttttttgagaaagagatttcaaggcaggaaagaagtagttttatattctgagtatacatattaatgttttgtactagtgtactctattttaacagttattttttattattttaa

SEQ ID NO: 264670 - DNA, 642 bp, Homo sapiens
tgtcttgttcatcactgtatccctagtgcctctagtagtgcctagtacgctgtgggtgtttagtaaatatttttgaataaatactaataaagctaggctacaatttcatattttgccaatagatgtcactctctaagcctgtgctgtgcccacatctgattttttttagttccatattgttttacagaatgaaatagtttaacatttccaattgtataatttgaaagtgaaattactatgaaatcccagtgaagtcacatgtataaatggtgggcaggcatagcagcttaaacagctgcagtaggatttttgtttagattggtgctgttgtgatrtctgcaggaaatgtgcactattgcctgaacctatgcagctatcaaaaaattcaaataatggagaaatatggctctacttatattagaacatgtttgaaaataagtgtaatgttatcatatgtaatctaaagtctcagctgcattaagctgaccatctcctcctctatattatccacaaatcatgtacttttacttttttgagaaagagatttcaaggcaggaaagaagtagttttatattctgagtatacatattaatgttttgtactagtgtactctattttaacagttattttttattattttaa

SEQ ID NO: 264671 - DNA, 642 bp, Homo sapiens
tgtcttgttcatcactgtatccctagtgcctctagtagtgcctagtacgctgtgggtgtttagtaaatatttttgaataaatactaataaagctaggctacaatttcatattttgccaatagatgtcactctctaagcctgtgctgtgcccacatctgattttttttagttccatattgttttacagaatgaaatagtttaacatttccaattgtataatttgaaagtgaaattactatgaaatcccagtgaagtcacatgtataaatggtgggcaggcatagcagcttaaacagctgcagtaggatttttgtttagattggtgctgttgtgatgtctgcaggaaatgtgcactattgcctgaacctatgcagctatcaaaaaattcaaataatggagaaatatggctctacttatattagaacatgtttgaaaataagtgtaatgttatcatatgtaatctaaagtctcagctgcattaagctgaccatctcctcctctrtattatccacaaatcatgtacttttacttttttgagaaagagatttcaaggcaggaaagaagtagttttatattctgagtatacatattaatgttttgtactagtgtactctattttaacagttattttttattattttaa

SEQ ID NO: 264672 - DNA, 493 bp, Homo sapiens
taggaggtaagttttgtatttttagtttaataaaaattgttaataggtaatgcaacagcactaagatctgtgtactctcaaaattgaaaacgaagccaacagggagcaaaggtttctgaaaatctgatgagttctgttttcatgctaaaacattttagaagagaaatatttattagctggagtcaaaaagaggtatgttttatggctatagttctagtgaatttttcgagcctgagtttgctaagtttcaagaactaggcacttaacaaaaaacaaaacaaaaatgaatgacttttatataaacccatagctaatagttcttattgccacgtctgtttagaaattagacctatatgtgataacattacccacatagagtacatacctaactttagaagtatgtgtaataaagaaagatatatatgaaaaaagctttgaaatgttacagyggctcatcaaaagaggaggagagggtaaaaaactagaaccaaat

SEQ ID NO: 264673 - DNA, 587 bp, Homo sapiens
gactgccggctttcccccacttccttgaaaacctgcatgactcagcagaggcagccataatcctccttggtacacaactccagtgaactgggaatctcgaccccaccccccacagcagccacagcaagacccacccaaggagagtctgagctcagacgtgcctagccatacccccacctgatggtccttccctatccaccctggtagcagaagacaaagggcatatactcttgggagttcttaggccccacccatcacagttccctcagcacactactacaactgatgctttctggaaatygccacttcctggcaggaggccaaccagcacaaaaatagagcgttaaaccaccaaagctaaaaaccctcacagagtccattgcacccttcaccacctccactggaataagtgctggtatccccacctgagagacccatagacagttcacatcacaggactctgtgcagacaacccccaatgccagcccggagccaggtagacttgctgggtggctagaagagagacaacaatcactgcagtttggctcacaggaaaccacatccataggaaaagagggagagtagtt

SEQ ID NO: 264674 - DNA, 620 bp, Homo sapiens
aaagttaagacaaaggaaagaatcttaagagctgtgagacagaagcaccaggtaacctataaaggaaaacctatcagattaacagcagatttctcagcagaaaccctcaaagctagaagggattagggacctatcttcagcctcctcaaacaaaacagttatcagccaaaaattttgtatccagtgaaactaagtatcacatatgaaggaaagatacagccattttcagacaaacaartgctgagagaatttgccaccaccaagctatcactaaaagaactgctaaaaggagctctaaatcttgaaacaaattctggaaatacatcaaaacagaacctctttaaaacataaatcacacagatctataaagcaaaaaaaaaaagttaaaaatcaaaaaaccaaagtacacaggcaacaaagagcatgatgaatgcaacggtacttcacatttcaataataacattgaatattagtggcctaaatgctccacttaaaagatacagaaccgcagaatgtataagaactcaccaaccaactatctgctgccttcaggaaactcacctaacacacaaggactcatataaacttaaagtaaaggggtataaaaggcatttcatgca

SEQ ID NO: 264675 - DNA, 620 bp, Homo sapiens
aaagttaagacaaaggaaagaatcttaagagctgtgagacagaagcaccaggtaacctataaaggaaaacctatcagattaacagcagatttctcagcagaaaccctcaaagctagaagggattagggacctatcttcagcctcctcaaacaaaacagttatcagccaaaaattttgtatccagtgaaactaagtatcacatatgaaggaaagatacagccattttcagacaaacaaatgctgagagaatttgccaccaccaagctatcactaaaagaactgctaaaaggagctctaaatcttgaaacaaattctggaaatacatcaaaacagaacctctttaaaacataaatcacacagatctataaagcaaaaaaaaaaagttaaaaatcaaaaaaccaaagtacacaggcaacaaagagcatgatgaatgcaacggtacttcacatttcaataataacattgaatattagtggcctaaatgctccacttaaaagatayagaaccgcagaatgtataagaactcaccaaccaactatctgctgccttcaggaaactcacctaacacacaaggactcatataaacttaaagtaaaggggtataaaaggcatttcatgca

SEQ ID NO: 264676 - DNA, 620 bp, Homo sapiens
aaagttaagacaaaggaaagaatcttaagagctgtgagacagaagcaccaggtaacctataaaggaaaacctatcagattaacagcagatttctcagcagaaaccctcaaagctagaagggattagggacctatcttcagcctcctcaaacaaaacagttatcagccaaaaattttgtatccagtgaaactaagtatcacatatgaaggaaagatacagccattttcagacaaacaaatgctgagagaatttgccaccaccaagctatcactaaaagaactgctaaaaggagctctaaatcttgaaacaaattctggaaatacatcaaaacagaacctctttaaaacataaatcacacagatctataaagcaaaaaaaaaaagttaaaaatcaaaaaaccaaagtacacaggcaacaaagagcatgatgaatgcaacggtacttcacatttcaataataacattgaatattagtggcctaaatgctccacttaaaagatacagaacygcagaatgtataagaactcaccaaccaactatctgctgccttcaggaaactcacctaacacacaaggactcatataaacttaaagtaaaggggtataaaaggcatttcatgca

SEQ ID NO: 264677 - DNA, 542 bp, Homo sapiens
ggtaataagttgaaattctgtaaatcaaggattgtatttcttttttttttaatctggagttgccttttttcttcaaaaatactttcctattatgtcttttttttatgtttccaaatttttcttcttttggtctttattatacttgactaccactacctctgggtgtaatttatagcacagagagataaatcactttatacacataaaatcagctgtcatcctgatattttctgtaagaaatattctggttctagatttacctcttacgctttcttaattgaaatgctacctggcatatattaatgtccactaaatatttgttgctttatataattatatggtaagaagaaaaatgtagratgtcatgttaatattgctaaaacccttatgatatataacacatattaaaatagatcgaaaagaaaaattctaatattttatacaacattttgctaacaatttatacagttagaaggtaaagacttacatatgaaagaaaactagttcctcttagtccctatctgaccatcattacagtacaa

SEQ ID NO: 264678 - DNA, 569 bp, Homo sapiens
atatatctaccaaaataatgaaaactacaaaggtaaaaaagatggggaggattttgtattttgcctgatcttagacattctacaaaatgaaagtttttcttcagaataagctacactgtcagatctttttttggaagtcaatatttaagatatactaatgtaataagaaaagaaaactgcagaaaaatgaagaaaacataatgaattgagacctacctttaagtatgtaaataarcactgtcctgaataaaattcaaaagccacagccagccctggttgagaaccctcacaatcaggctccctctgcaatatccaactccccgcatccagtgctacctctctgtgtgcatgctacactctagagactaaatccacagatatttctgatataactggtctctgggctggtatgtatgtcattccctccatctagaatgtcttcttctgccatctctgcccaccaaaactcctgcctagcctgtaaggccatgcctcactgccagcctctccacatgcccatctctgtgcttccaagatacctgagctcatgctttctcatactctcacca

SEQ ID NO: 264679 - DNA, 580 bp, Homo sapiens
aaaagattattttaagaatgaaagtacattttttttttgtttactgtcaacttacttatctgtgctccagcatcacttaaggawggtaccacatttctgggaattgacccaaaaaaagcagtagtcacaattattctttaagaaccataaaatattttagattgggaaaaacagaaacaagtaatattttattttgtcctattatattctacagtgaaagagaacactgtctaattagaatcttttgttttctttcttcacactgagacattacacctttcataatcatgtaatcattgaaaccaaacgacttcatccttaagaaaactggatttctaatgattcgctgtctttgtaacttcaatctgctcaaatgatctgaccaattaaaaaaaaaaaaagcatgtacctgtaacacaaatggaacatgtgagaaagctttccaatgccataaagacaggggaactgaatcagctgcccatttcattttatgcatagcaacaaatgaccagcagaacaaatgtttttatgggtggttattattttaaataatctaagccttagacctagtctaccaaaa

SEQ ID NO: 264680 - DNA, 588 bp, Homo sapiens
tctgtatttccttaggtataactactttatgaaaggttactgtagaaccaaagtataaagacaaatctgttttcccactctgtaataacatccggtcaaataaccactttcctgyagcctagagcattgccgcagattggttaagtctgtttgctgagtttgggcaacataaattcctggaacaatggtgactctctaaatctcaaggtttgtagggaaagctgttttgagcaagaaagaaacaaagaggttactgtgcacattcagaaaaagccaaagccaaagagcagcaacaagagcaacaacaataaaactaaagcaagtttttttctctgacaggcctttatgcacttcagatatcatagctaactgttttcagtttggaaaagaagaaagccaattctccaagaactgtgccaaaatagaggaaacaatttgttctttttaagtaataataataagaaataacctggtagattacagtaggtaaaatccaaaagtttctatattctcccctcaaccctctcccctcccttccctccttcctttctttcttccttcctttccttttttgagacaggatcttgc

SEQ ID NO: 264681 - DNA, 588 bp, Homo sapiens
tctgtatttccttaggtataactactttatgaaaggttactgtagaaccaaagtataaagacaaatctgttttcccactctgtaataacatccggtcaaataaccactttcctgtagcctagagcattgccgcagattggttaagtctgtttgctgagtttgggcaacataaattcctggaacaatggtgactctctaaatctcaaggtttgtagggaaagctgttttgagcaagaaagaaacaaagaggttactgtgcacattcagaaaaagccaaasccaaagagcagcaacaagagcaacaacaataaaactaaagcaagtttttttctctgacaggcctttatgcacttcagatatcatagctaactgttttcagtttggaaaagaagaaagccaattctccaagaactgtgccaaaatagaggaaacaatttgttctttttaagtaataataataagaaataacctggtagattacagtaggtaaaatccaaaagtttctatattctcccctcaaccctctcccctcccttccctccttcctttctttcttccttcctttccttttttgagacaggatcttgc

SEQ ID NO: 264682 - DNA, 544 bp, Homo sapiens
tccaccatttcctttcaataagatgagtacatttttcttattgtgccatcactaaatacttggatcctgtaatttctcccattgatttttcttttccttctgaattatatctaaaatcttgaattactgatactgtgcaaagttgctgaatagaattatgacttctatcctataccttacaatcctaacttgtgttttcagatacaatgtgtaaacttccttttgtatggtacaaaccatgaaatattacagarttccaccatcccttctctaaagcattgttcccttaaaaacctaacaacacatccctatcttttccttttctcttgagagacatggtgtgtgcataggtatataatgatggggtaggggtgtagcagaggcagggctgtggcttgggctggtccagaagatgtttacacggaattggtgagcccacctagttttggtcaaagcaaacttagactgtggagtgagtccaagcctctctctattatttggggaaactatttgttcttctctgactcagagtttgtcctatgca

SEQ ID NO: 264683 - DNA, 544 bp, Homo sapiens
tccaccatttcctttcaataagatgagtacatttttcttattgtgccatcactaaatacttggatcctgtaatttctcccattgatttttcttttccttctgaattatatctaaaatcttgaattactgatactgtgcaaagttgctgaatagaattatgacttctatcctataccttacaatcctaacttgtgttttcagatacaatgtgtaaacttccttttgtatggtacaaaccatgaaatattacagagttccaccatcccttctctaaagcattgttcccttaaaaacctaacaacrcatccctatcttttccttttctcttgagagacatggtgtgtgcataggtatataatgatggggtaggggtgtagcagaggcagggctgtggcttgggctggtccagaagatgtttacacggaattggtgagcccacctagttttggtcaaagcaaacttagactgtggagtgagtccaagcctctctctattatttggggaaactatttgttcttctctgactcagagtttgtcctatgca

SEQ ID NO: 264684 - DNA, 635 bp, Homo sapiens
taacaagaactcttgcaagtgaattaagtgggggtggcgggattagatttgtgctttagatacatatatctgtcagctgtgtgaaaaacagatcatacagttgcctctcaatatccaaggggggattggctccaggaccgccccggataccaaaacccatacacgttcaagtctcatagtgagccctgtggaatgtgtagatatgaagtcagctttccatattcacgggtttcccagctcgccaacactgtatttcccgtgcatggtttgttgcagatacggaacctgtgaatatggagggttgactacttactgaaaaaatcctgcatgtaagtggacgcacacagtttagacctgtgttgcgcaagggtcaactgcaatggaataasacggtaacatcttctgtagtaaatgtaataaggaatttattaaaatttccaattgagagatagaaaaagcctacattaggatagtgagaaggggactagagggaagagaatccattacaaatatttaggcgtcaaagtagtagtttttaggataaaagtagtgagggagtgcaagaattccagcataatttctagatattctaattgagatggctttatgaaattgataaaacagggtgaatgtct

SEQ ID NO: 264685 - DNA, 574 bp, Homo sapiens
aaaattttaaagcttctctcaaatcctccaacagaacacctgcaccagagagagttggttttttaaaagttttgytgccaaagcaaatgttccaaaaatttgaaagtgagaggcacagtccagatgaagaaaaacctggctggccgcagctgatcactgccatcacctagaaaccaactgcaaatccaattttgattgccactagtttctaagtctctccccaaaatccatttcaaggcccaaatatcttatgatcaaagaatcccagtgggccaggcatggtggctcacacctgtaatcccagcactttgggaggcggaggtggatggtatcacttgagctcaggagttcgagaccagcctgggcaagctggcaaaaccccttctctactaaaaatacaaaaaattagcagggcatgatggtgcacacctatagtcccagctactcgggaggcttgatgtgggagaatcacctgagcccgggaggtcgaggctgtagtgagccaagatcgtgccactgcgctccagcctgggcaaccaaagtaagacctggtcttgaaaaaaaaaaaaaaaga

SEQ ID NO: 264686 - DNA, 575 bp, Homo sapiens
ttcagatcacacacacatatcacctgagaattgttccaacataaataactatagacccgctcagggagccttctccgtaactgctgtttctctctcacagcaaagcttctggaaagaactatctacttgtgcatctcacagcacattcattatgcaacccagatggctccactacagtgtctcatgaccgcctcagacagatgttaaaaagtgaactcagctgggcacagcggcctacacctgtaatcccagcactgtgagaggatgaagcaggaggatcacaggaattcgagaccagcctcagcaacacagtgagaccccgtctctattccaatacatacattttttaaattaaaaattcatttaaaaaaaaaaaactcaagggatggattacagaagggcccaaggaaacttttcggggtctgaacatgttcattgccttgattgtggtgatggtttcatgggtgtatacatgtcaaaactcacatatkgcataatattaagtgtgtacagtttattatgtgtcaactatgcctcaataaagctgcttttaaaaatctttttttttttttttt

SEQ ID NO: 264687 - DNA, 591 bp, Homo sapiens
cagtgtgttctggtgggcaaagaggagctgatacaatcaaattgcctctcttggaaatctgttcaaagaaatccaaaaaaatatggcagtgagcagtgggagctgaagatgaaaggatgccrcaagctaaagggaacacactctgagtggttcaagccgagtgaagttatgaggaagcagaaatggaataaacagctgctatcagtgagagaaaaaccacagagcagaaaaaaaaatgcataacggaacaaagaaaaagagatgtcgtgagaggaagacacagagagactgaacccatgagacagacggaaagaaaagtcagtcctgccagccaccctgatttctataactgcactcccacccagtccaggtgcactctcataaacaaactcccctttttttctcaagctaagtttgtgaacctctagtctttgtaaccaataaagcttaataagaggatgcctcctctgggtggaagctggaccatggacctctgcaggcctcgccctttagctgctctatgactgatgacattattcatagtccttccatgctttgtttctttaaaacacttccataaatttagcccgt

SEQ ID NO: 264688 - DNA, 581 bp, Homo sapiens
tcattagaagcaagttacggcccggygcagtggctcacgcctgtaatccctttgggaggccaaggcaggtagatcacctgaggtcaggagtttgagaccagtctagccaacatggtaaaaccccgtctgtactaaaaatacaaaaattagccgggcatagtggtgcatgcctgtaatcccagttactcataaggtgaggcaggagaactgcttcaacccagcaggtggaggttgcagtgagccaagatcatgccactgcactccagtctaggcaacagagtaagactccatctcaaaaaaataaacaaacaaataaataaataaatagcaagttaccaagtccaatccaaacataaaggcaggagaatgaagctccacctcttgaagggaagagtgtggacatattttgaaaccatcacagtccaccttctggcccaaattacttacattcttcccatatgcaaaatatactccctccctcccaaaactctacaaaaatctcatctctttatagcattagcttaatatcaaggatactagcatctaaaacaggtacatgtgaagtccaaaaatgtagttta

SEQ ID NO: 264689 - DNA, 581 bp, Homo sapiens
tcattagaagcaagttacggcccggcgcagtggctcacgcctgtaatccctttgggaggccaaggcaggtagatcacctgaggtcaggagtttgagaccagtctagccaacatggtaaaaccccgtctgtactaaaaatacaaaaattagccgggcatagtggtgcaygcctgtaatcccagttactcataaggtgaggcaggagaactgcttcaacccagcaggtggaggttgcagtgagccaagatcatgccactgcactccagtctaggcaacagagtaagactccatctcaaaaaaataaacaaacaaataaataaataaatagcaagttaccaagtccaatccaaacataaaggcaggagaatgaagctccacctcttgaagggaagagtgtggacatattttgaaaccatcacagtccaccttctggcccaaattacttacattcttcccatatgcaaaatatactccctccctcccaaaactctacaaaaatctcatctctttatagcattagcttaatatcaaggatactagcatctaaaacaggtacatgtgaagtccaaaaatgtagttta

SEQ ID NO: 264690 - DNA, 534 bp, Homo sapiens
ataccttcaatagctgccttcctcaccgcagatgtttctgcctcttaaggatagatcttctgcaacagtcttgctgacaagctagagcttggactgaaagagaagagctggattatatatttcccagacttcaaaccctagcagaagctaaggcttgtgatttgacctgagacatttgtttcaggtaatcgtgtagaatgaagtatcttagtttaaagggtaagagagaagttgtttctggtttttccttgcccctgtgtgaaaataggtcctaaatgactgacttcactgcattagaccctatagctggtctcacaagacactttgtgcccagctgtcactcactcagcagcttccttgcagcagagcagggctgaggggaaggggctatgaatgtttgtatacrtgttcacagggcacggaaaatcttatgctgctccgtcataaacctacaccaatgcccagcaatcaccctcctcacttccttgtctagatgtagaggtcaggctgctgaaccagccaacacatgggcta

SEQ ID NO: 264691 - DNA, 576 bp, Homo sapiens
tgagaataggagcttatggacagaaagctcagcaatgtgtcgtccaaacaataataaacaacaataacaaaaacaacatcaaaaaagcacagggccaggtgcagtggctcatgcctgtaatcccagcactttgggatgccaaggcgggcagattgcctgaactcaggagttcgaaaccaccctgggcaacatggtgaaaccccgtctctactaaaatacaaaaaaattagctgggcatggtgacgggagcctataatcccagttactcaagaggctgaggtgggagaatcgcttgagcccaggaggcagaggttgcagtgagccaagatcacgccattgcagtccagtttttttagataccatctcaaaaataaaatgcacagatttttccctgcgatgctgttctcacctggatggagagactcactcgtaaattaacttgcrtgtgctaaaaggtaagtaatgaggagactacttaggcatattcaattaagggaatatgaagattccagagattatatgcaaattatctatggaaatgtgctcctatggttacagctgagttgtacactgaag

SEQ ID NO: 264692 - DNA, 576 bp, Homo sapiens
tgagaataggagcttatggacagaaagctcagcaatgtgtcgtccaaacaataataaacaacaataacaaaaacaacatcaaaaaagcacagggccaggtgcagtggctcatgcctgtaatcccagcactttgggatgccaaggcgggcagattgcctgaactcaggagttcgaaaccaccctgggcaacatggtgaaaccccgtctctactaaaatacaaaaaaattagctgggcatggtgacgggagcctataatcccagttactcaagaggctgaggtgggagaatcgcttgagcccaggaggcagaggttgcagtgagccaagatcacgccattgcagtccagtttttttagataccatctcaaaaataaaatgcacagatttttccctgcgatgctgttctcacctggatggagagactcactcgtaaattaacttgcaygtgctaaaaggtaagtaatgaggagactacttaggcatattcaattaagggaatatgaagattccagagattatatgcaaattatctatggaaatgtgctcctatggttacagctgagttgtacactgaag

SEQ ID NO: 264693 - DNA, 575 bp, Homo sapiens
tgtgtgccaccacacccagctctaagttttaaatgtcgggataaacttacacaatatagaggcagggaggagcaacgggtcctctcctagctgcttgcccaaggccaattctctccagttgtttagctactttctagttggagggggmagagttttcccaccactacccaagtcccctccccaggcaaagaactatgtgaagactctggtcagggagaacactttagacagcagcttgttggagaagtctgtgtggggactagggagtaagatgtctgatgtgtgctttgaacacagactcatgctgcctccctgctgtgctcccacagagagaacacagcatgctgctgccatgggctccccactgtggcaggggcaggaccctgatgtttaggcctgggtgtcttttctccaaaagcagcagcagtggtaacttgcatgagtgaagcccatcaggcatggctggtggagcctaagccgataggccagtgggtatctgggctaagggggcagctgtggcttgggttcagctgatgcttgccttatgagaatggatgcttgacctctatgtggcc

SEQ ID NO: 264694 - DNA, 539 bp, Homo sapiens
aacagcagcaggtaacagagtgcttccgtagcccaaccctgggctagcactttccatgcacaatgagcccagtccatcctaagaaaaacccaaaagctaggtaccattaccccctgtcccatggatgaggtctccgaggwtgagcagagtaacttcccaaaggccacacagcaagtcgagagcagaactgtgatttgagtggagtcagaaggggctacaggtgtgggctctttaccgctatgccctgcagtgatgaagattctggctataattcagagtacagacctacctaagaaggaggcctcattccatagacacccccagagtaaggtcctctggggctctgggttctaatggtaaaacgttgctgttagatgagaaacaacctcagacagcgcttggtccctgggttcttcaccctgtttacatgcatgttggcatcgctggaatatatagtgtaaatatctctaagccttaacctgacctagtgcatggagaccatgggggttggggcctagccatctgtatttctccataac

SEQ ID NO: 264695 - DNA, 598 bp, Homo sapiens
agagagagaacaccacagggtaacaagaagataattcctaaagagttggtgcttttgttttgtaaatagctagcattggggaaacgaagaaaacacactattcattgtctatttcctagtgtttattactcatccaagatgaacmaataatactctagagtgatattaaaatcgtacccaaggccattgagtatgactttgaattaagctttggaaatattcctagcaacacatttaattaactaggatacttggttgatattaaatccacatcaactaatattaaaaacatatatattgaagcttaacagcttcaggagagctcaggatctgattgtgatgttgttcatctcaatgtacaggttcattgaatctttccaaatggagcactggggactagaacattatcactgatttggagagcaaagtggggaaaattaagttcttgtgtaacaatgtttatattctaagcaatgtttataacgagctatacaaacaggttgggagaacttgctccattgatggcaatatctttcctctacctcaaaatgcttgagtttcaaaagcaaaattagaacaagcaaaggggcaaaatgac

SEQ ID NO: 264696 - DNA, 581 bp, Homo sapiens
acccatttcttagcctgtgcccacttgccagagcccaaaaatgtcaaaatagcaaaaccctgatgccagcctcaacatcaccccaccagcactctcttcctcttctccygtgggtgcctgccaggatgttttcccagacacgcaccattcctaccactctgacaagctacaattatttttttaaaaatacaacagtgcctgtgggtttttcctcctggtaaaagggacagcgagattttgtatcaataaattcctataaacctgcattttttttttcctgagtgaggttgctacttcactcctcatcaatcagtgtttcaagtcagccgaccctggatgggatcaatatggctacgtgcaggtttggctgctccaccgaagtacacaagtatctttgtgcttgcctgctaatcagaagagagggcctggatgggtggatgggatctagtcttattcttttcatttaaaaaaataaaatataacggttccaatactttgcactcagggtaacttactgttgctagagaccatgatgacaaaaaagcagagaagggtaaaggcaatctgaaaacatggaggca

SEQ ID NO: 264697 - DNA, 453 bp, Homo sapiens
cagcacaccacagcgctctgatttgccatggcatttcgcttctgaccacttgctgtattgagtatttccccaggcaaaggggcacacaccttagtaactgggctggagtctcacatctgcccagtagcacatttgcaaaaaaagattagctccaaatargtctccctggctctttgggggtcatggggcttctcccaggtacttgtaaccatcctgtcctatgtggcatggctgtcccacaccctccaccattgttccaggtgaggccagggtgaatctccagtcttcacagtaacattctctcctgctgctgaagggcaaatttcctgctttgtgctggctatgtaggttccctgggcactgaccagtttacagatcagaactgccttgagctctcggcctgtgaaacagactttaatggtgtcatctgttctgttttgtcaaagcctcctc

SEQ ID NO: 264698 - DNA, 453 bp, Homo sapiens
cagcacaccacagcgctctgatttgccatggcatttcgcttctgaccacttgctgtattgagtatttccccaggcaaaggggcacacaccttagtaactgggctggagtctcacatctgcccagtagcacatttgcaaaaaaagattagctccaaataggtctccctggctctttgggggtcatggggcttctcccaggtacttgtaaccatcctgtcctatgtggcatggctgtcccacaccctccaccattgttccaggtgaggccagggtgaatctccagtcttcacagtaacattctctcctgctgctgaagggcaaatttcctgctttgtgctggctatgtargttccctgggcactgaccagtttacagatcagaactgccttgagctctcggcctgtgaaacagactttaatggtgtcatctgttctgttttgtcaaagcctcctc

SEQ ID NO: 264699 - DNA, 605 bp, Homo sapiens
ttctgtagctctggtcagggtgggttattgttgtccacctacatgcatgtctcccccaaactacaaccatgagctcctggaaagttgagtctcattcattcctatgtgtggatttgtgtctcctaccaagggcatgatatttccacttgggataacagataaccttccaaacatagcacctacaaaatgaggctcctgcctttcgcctcaagcctcttccttcccaaatgttcttcaactcagtaaacaaaaatcctgttctctagttgctcaggtcaaaaactggggamcatctctgattcctcttttttcttataacccatatttagttcaacagcaaatcctgttagctcagccttcaggatacacacagtatgtgaacacatttcacagcctccactgtttggactaggtttagtccaagccacctctgtttcttgcctgtacaattttcagagcctcctaagggggacacggcttgcttgcctgtctgtcatctataatccatgcagcagggggcagtggggtgaatggaggcctctgaaaacacacatccatgtcctaaccctcagaacctatgaatgtgatttagttcggaaaagggg

SEQ ID NO: 264700 - DNA, 585 bp, Homo sapiens
caaaagcagcatcagcagcgtcctgagcaccaggtgagtatcagctgttcaagagaatccccaggrcaacaatggcgggtcagacagtggcaagaccaaccccagatgtttcggaggcattgctggtggatgaaggaccgcaaggggaagggcagcgagcattagtcgtgccggcaggatgccccagggcctctgagaacctgtccttgaagaaggcagtgatggtccacccagtgattctgctttgtggattctcatactgctgcagggacaccttgaagatttgccctcagccttgcatggaccagagaattaaaagaatgaggaatttcccacctgcctggctctctccatttgcagagccctgaactttatgttattttactggaaactaacaactacccagaaaaagtgatagaaacgtccccctgcccattttgttttaatcttacagatgagaaaacagaaatagaagaaaatgacttccctgaggttgaactgtcggtaagaggtcaagccagagcttaaacctggcatctagagcatttccacatttttaaaagttgtctcaaacatgcctcaaac

SEQ ID NO: 264701 - DNA, 279 bp, Homo sapiens
ggaggtggaggttgtggtgagccgagatcatgccattgcactccagcccagacaacaagaccgaaactctgtctcaaaaataaaataaaacaaaaataaaaagtaaaatcccrttcaactcttctctcaacttcctttgaatctcagccctccaggaattttcttagtatttcccgcctattccactattttggtgttttttgtttgtttgttttgttttttaatatagctactcctctagttagttattgttaaatgtttttcccgctacattctagt

SEQ ID NO: 264702 - DNA, 279 bp, Homo sapiens
ggaggtggaggttgtggtgagccgagatcatgccattgcactccagcccagacaacaagaccgaaactctgtctcaaaaataaaataaaacaaaaataaaaagtaaaatcccgttcaactcttctctcaacttcctttgaatctcagccctccaggaattttctyagtatttcccgcctattccactattttggtgttttttgtttgtttgttttgttttttaatatagctactcctctagttagttattgttaaatgtttttcccgctacattctagt

SEQ ID NO: 264703 - DNA, 516 bp, Homo sapiens
tttaatttacaaaatgaaatatttatcattgtgcattttgtgcgatattccttgcacccctgagtttgagaactgaaaaccagaagagagactcacagtgattttaaaatagaaatcgatctatatgaaaatagttgcattttccaatatgggaagaacaactatctttacattaataaagggtaggatagaactaaattgctttaagactgaaaattctcaaatatgggttagaagcaaagcaggtactgggtgcagctgttggactttcttccaggattttcagatgttttatttgtttagcatgaacaaattctgccgaggaaataggttcactcagtgttttctaaccccagactcaggcagcataatggactaaaaaggcctctgagatgcagaaaagagacctgggctcaatgagaagctctgactgaagggcmtgtgtccagacactggggccacatttccccatcagcacatgagaagtttggattaattcactctcaagcaactgta

SEQ ID NO: 264704 - DNA, 587 bp, Homo sapiens
gttgtagaaacagttcagccacgtctgggaattatcttagtcaaaatccaccctgatcccccaccccaaataacgatatcctccaaattgttccagcaggacrtcgaggatatggaatgggacacagtgctgtggagtgtggtcctgctggtgccactcagcaccgtctaaatcatggaacctagagcagatgacttcacctctatgagcctcagttccctaatctctaaattaagaagacactggccgtataggcctttggtgaggaataaatgagtgaaaggaagccctttataaatggtaaagtagtcgtaaagctattcaggtagaaatcattagaattataactttatatcatcatatgaccttaccaccccttaaagactattttatacattttaactgagataaggtagagggaacaacattagccaaccaaagcattatcgatgatttgcttatatgatgaatactatcatcatggacttccaagtgtccagggaattgaatttaatatattgaagctactggaaacaagacatgtcaagctgggtgttggaaatttcaccctatgcagtcaaaaactg

SEQ ID NO: 264705 - DNA, 567 bp, Homo sapiens
gcatgtttgttcagtatgcatgcatcatactgaaccccttcatgaatatgcattcctcctcctaacataacctaaccccttcatgaatattcatacctcctcctataacctgttaaatatgtgtacttggccaacttgtttagcacaaatccttgtgcctccctcccctcctgtgaactgcctgctttttggcctctgctagaggcaatgcttcccaacctgtcagaatgcccatcttgtaggttgtaaccctttataaaaaataaagtctcccttcaaaatttataaatgatataatttttcagttgactcagtggatagggcagagttgtagatatagaactgaaggcacacacacacaaatacacacaaccacacaaacaaacacaaaaacacacacacatgcgaatacacataattacagaaacacacagatatacacaaccacataagtacacacaaatacaaacacacgtttgtgaaattagattagagcttttcctgagtatgttaatagaaaaaaatagatgacccagaaataatccytatggcccctttgggatcaaa

SEQ ID NO: 264706 - DNA, 564 bp, Homo sapiens
tgagggcttttcagagaatgcccagaaaatatgagtttctaagtgacaaaagtaatttccttgggtaagtccttagaagtcaaagcttctatatcaactcattcaacacaacagcaagtgctggtttggtgccaccatctttttttttttttttttttttttgagatgaagttttgttcttgttgccctggctggagtgcagtggggcgatcactgcaacccccgcctcccagattcaagcaattctcctgcctaaggctcatgagtaacyggggttacagacatccgccaccacgcccagctaattttttgtatttttagtacagatgggatttcaccatgttggccaggctggtctcgaactcctgtcttcaggtgatctacactcctcggcctaccaaagtgctgggattacatgtgtgaaccaccacgcctggtcattgccaccatctttttcatatctgacatccctcctagatcctaagcctgccttctttcccaactcaggttccaggctacctttttttttttttttaataagagctcctcagagaacctacattg

SEQ ID NO: 264707 - DNA, 564 bp, Homo sapiens
tgagggcttttcagagaatgcccagaaaatatgagtttctaagtgacaaaagtaatttccttgggtaagtccttagaagtcaaagcttctatatcaactcattcaacacaacagcaagtgctggtttggtgccaccatctttttttttttttttttttttttgagatgaagttttgttcttgttgccctggctggagtgcagtggggcgatcactgcaacccccgcctcccagattcaagcaattctcctgcctaaggctcatgagtaactkgggttacagacatccgccaccacgcccagctaattttttgtatttttagtacagatgggatttcaccatgttggccaggctggtctcgaactcctgtcttcaggtgatctacactcctcggcctaccaaagtgctgggattacatgtgtgaaccaccacgcctggtcattgccaccatctttttcatatctgacatccctcctagatcctaagcctgccttctttcccaactcaggttccaggctacctttttttttttttttaataagagctcctcagagaacctacattg

SEQ ID NO: 264708 - DNA, 524 bp, Homo sapiens
ttgaaatgctgaatatcatcgacaactttggggaattctctgtaaacttgcccttccagatcactcataaaaacaagagataaaatgcctccgaggctggagagacctattatatgtacatcytcacaagagtggtgcctgtttattcccacaattgataccataaatatataaaatatattactctcttttgaacaaaatatggtcctccatccttagatgcttagctggagctgggactacttaccaaaaccttcaagaaaatatgcattgattataacatttgtgctttctctaatctttgattggttttctagaccatccctgaccagtagacctaaaaagcagatagctcagagcactgaattccattcagcacattttcctcctgataggaattttctttgtcatcgccctggccctgaactcttggcccaattctgcttcccaaatccagcctgccagatttagcctgacctcctggatgattcccccagagctttaacctgtttcccagatgccat

SEQ ID NO: 264709 - DNA, 580 bp, Homo sapiens
tttctcatgaagatagagaagaggttcaaacatatttctgaaacccacacttccctagaattccatctcccaccagggaaaaatgaataaagtcgctcttgctctctatactcatgacctataagaaggcagggctgaaccgctatggtggaggccaagctggcagcacagcttgcaaggttggggtggagctgcatgcctggactcagctctgtgaagcagcccctatgtccccacattatgctccagygagattcagagaatgactcctaaggcttccaggctttcttgtgaaattattattatcatgaattatatgtggtattgtaggatggtattttaaaatagacaatgtcttccccatcctgtcaccctaaattttctatttgtcatattttccttttctgtaattccaggagaagaatgacatagcccaatgaagataggaaactattctggactttggaagaatatgtaaaaaaaacaaaaaaaaaaacaaaaaaaaaaaacaagttttctgtatttcttctagatgggagaagacaaggaatgaaaaaggaaaccaagataatttcatact

SEQ ID NO: 264710 - DNA, 654 bp, Homo sapiens
tcctgctttatgcagagtcatggagaactttatgctttatgcaggttttaacctgagtaagaaaccctgggaggatgctcctggtaggtgagagggatgtgcaaactaccttggcatgaaggaggtgggatattcccagaccatgtgttgcatgaaccagcagaggaggggaaggccacaatagtcaatatactcttggaaataccttagaggactgacatatcatttcttactgtatccaacagatattgttttcattactgaagcaagattgtgtttcttcatctaagcagcagatgaagaattggcttsagttttgaagtcatgctcaacaaatcatgttcatcttcaaactctaggctgagtggtaacatgcgtacactagggaaggagtgaaggctcataagggtaatgactcctagctctcagcccaccacatctaagggaagagagcgtgttcatctagcacagcaggagtcagaaaacaccattcatttaaattgtcgcttcctgctgagcgaggtggctcacaccggtaatcccaaccctttgggaggccaaggctagaggattgcttgagcttgagcccaggagttcaggatcagcctgggctacatggcgagaccccatctcttcaaaaattttgtgaaaact

SEQ ID NO: 264711 - DNA, 654 bp, Homo sapiens
tcctgctttatgcagagtcatggagaactttatgctttatgcaggttttaacctgagtaagaaaccctgggaggatgctcctggtaggtgagagggatgtgcaaactaccttggcatgaaggaggtgggatattcccagaccatgtgttgcatgaaccagcagaggaggggaaggccacaatagtcaatatactcttggaaataccttagaggactgacatatcatttcttactgtatccaacagatattgttttcattactgaagcaagattgtgtttcttcatctaagcagcagatgaagaattggcttgagttttgaagtcatgctcaacaaatcatgttcatcttcaaactctaggctgagtggtaacatgcgtacactagggaaggagtgaaggctcataagggtaatgactcctagctctcagcccaccacatctaagggaagagagcgtgttcatctagcacagcaggagtcagaaaacaccattcatttaaattgtcgcttcctgctgagcgaggtggctcacaccrgtaatcccaaccctttgggaggccaaggctagaggattgcttgagcttgagcccaggagttcaggatcagcctgggctacatggcgagaccccatctcttcaaaaattttgtgaaaact

SEQ ID NO: 264712 - DNA, 538 bp, Homo sapiens
tttcctcttcagttttagaagttaacacttttttaaaaactctcctctttgtttccttttctactttttcctcttcctcctttctttttttaaaattagtttttagagatggggtctcrctctgtcccccaggctggagtatagtggtgccatcatagctcactgcagcctcgaactcctggcctcaagcgatgctccctccttggcctcccaatgcactgggattacaggtgtaagccaccacacctggcctttcttccttttttctctcctcctcctaatattcttagattccactatctgcacctgtgtaatagtttctaaatctataaaatctaagcactttgccaaaacctactgagtttttcataattttgggtccccaggaaaggagaattcagattactgtcactaagctgtcagcccccagcagtgagagcagccacactgaataacgtaaacagaagcacagaggccatcacccagaagagcgctctagggagcctctcagagattaaaattatgccactggtcagtg

SEQ ID NO: 264713 - DNA, 608 bp, Homo sapiens
tcacatcatagggtatgaactctcccagcctgaatggttgagacttgctggggttgagagaaagtcctctctggcctcggtctgatatctttcatcagaggatgagccaagattgaacatggaggccaagggccctggaacgtgaaatgccttggatgatctggaggagaagctgcagtggccaggacagcacctgccagactgctgtgtctctgtgcccagcctggtggctgggggcgtgctccttgtgtttctctgtgacccctgcctccctcagcacctttcagagttgggctcctggagatgcatttcctgaatgaatggcaccagaggccttaagtgagggatgcccttgtctyggctcctgtttaccccatctcttatttctccccaaaagctccttggggctacctcatgtcttccctgggctccatttaccaacctagcctgccctctcaggtaccttcccaaaattcaggtggtctggactctctcttttctttcaaagctcactttctatatttgtttcctattgatgtcacaaaaaatgaacacagatttagtagctgaaaagacaacaaatttattctcttttagttccgtaggtt

SEQ ID NO: 264714 - DNA, 535 bp, Homo sapiens
cacctctgagccccccttgcctcttctgcattccagaccctgctttaaaaacccctgtgttcccaccacagattgaaggtggaattgtttactgctcttcctctgctagcatagagaataaaggaaaatgtcgctccctcttatcactggttattatatttgacttctttctacaagcattgagcascctgacccttttgctagttacacacctgatgtgtctccatctcaagggtccttaacttaaggacattggcaaagtgctttctgctatgtgaggtaacatgtgcacaggtgccaaggactctgatgtgaacacccatggggtgctgcattttgcccaactcccccttcctggctctcattctttcagaaatttccagaagtctaacactaatttgatatactaattcacaatcaggaatgaatggatgtgttaggcccttcttttgcatttctgtaaagaaatacctgaggctgagtaataaacaaagaaaagaggtttaatgggctcacagtcctgcaggctgtacaa

SEQ ID NO: 264715 - DNA, 554 bp, Homo sapiens
atgataagctagggcagagcagcagcatcattgaaaagcaggtactgttactcccctataccaaatgcctgctgcatcaagtcatcagaaaaaaaaggttttccatatggcattaatttacagggaagaatacatccttctgcactttgtatctcttctagtgagttaagttccctgaaggtaaattgcagtagatgcttttgatctacttacatttaggaaatacatgcacatgcaggcacccacacactcatgctccctcattcacacctgcacatctgtgaacatgggtgctccatggggaccatagggcaatgagcacaagccactcaaactcggcaaattcagtaccagaccctccttttctgcckctggtaccttgcagtgagaatgcccagttcaggaggtaaaaagtgttcaacctttgcagaaggtttacaggcaaagcaaggctatcgattgtcccatgatgagaaaatgaagaaggatgtggcgcattttgtgatatcaatctgacctattagcaacagtggcaggtcactccatcctcccca

SEQ ID NO: 264716 - DNA, 568 bp, Homo sapiens
taggaaataggagagtgaccagggctctcggagagaggaagaagtgaacaaaacagcaagtgagagagggttcttcttgtgaccctctcatttcatctggaagaaaaatctttcctggaagctctccagcagacattatcttacatttcactggtctgaattgagccaatattacccctagatcaatcacttatggaggagatgctatccagaggctcaactgagaataaccacagttcatctcctgggacctggcacatttccacttgaacaaaamtaaacatcgttagcaaagaagaaatgaggcaaaaagcagtgtttgctataactttagaggcaaggtcaatagttagctggtgcatgatactcgtgcatagttttggacttggcaatgcattcccttactctttgttaactattttgaaaattatacctaaataaaagaactttggggattatctgtcccaaattcttacatgcccttccccctacccaaaaaatatatctatatcattgcactgatatcagttatgttatgtgcagtatcctactgtagaaaaacaaatac

SEQ ID NO: 264717 - DNA, 647 bp, Homo sapiens
agtgatgaagaaaggtcgagaaggtgcaggcccagtttcctgggccctacctagaatttcttcttttcagtcctgaagcccattgagttctctttttggttctgctgaattctataactgccacctgctactaaaagagacctggttaataattacaaaaataaataaaattgaaaaaatcatacataaatgtagattttaagcttatcgtttgttagaaacaggtgcctattattacaattacttaatttgccattgaaatctattctcctaagcagctaccaataaccttttatattgttttataattgtcygtttgtatgcacttatctcttggtaatctatttctgtgtaacaaactattccaaaatggagtggcttaacatagacattttattctttctcacaatgaaatggatcaggaaatcaggcagggcttgccgagagaatcctttgctccatgtggggtccactggctcacttgtggtattcagctggtgataggtctatctggcaagttcaggcagtttcactcacatttctgcacttagtggggagggctgggaggctgtgttctgctgggagcctcttcctttttatgcagcttcacagtctctctatggtctctccaacagagtggtcagact

SEQ ID NO: 264718 - DNA, 552 bp, Homo sapiens
ctctctgattcatttttaagagactctgaccaaattcaataggcatgtcttagttatgattttgttaattacttcttaccatctatcmcttgcattacacatctgatggccttcatatttccaagacagcaattacttcaacaaatgggtggaaataaccagttttctccttctgcctctcatagaagtcattttcactcacttttagaggaggattaatgaggtctaactaattttcttttgccaaagttactatgattagcagactttcctcattgaaggagtccatggatgatctatagctttctacaaatgtatgaagaacaaactcattgttccagcccatagagtgatttgatttcatttatttctcaagatctgaggtggattttttctgaaggaaaagggtagatattccaaaagtggtttaaaacctttagatccttcagagtattggctgactcatgttgatggcttgaaccagcctggcatatttcataaactaccagaggaaattaacatgacaagttattttttggtgaagagcaagac

SEQ ID NO: 264719 - DNA, 552 bp, Homo sapiens
ctctctgattcatttttaagagactctgaccaaattcaataggcatgtcttagttatgattttgttaattacttcttaccatctatcacttgcattacacatctgatggccttcatatttccaagacagmaattacttcaacaaatgggtggaaataaccagttttctccttctgcctctcatagaagtcattttcactcacttttagaggaggattaatgaggtctaactaattttcttttgccaaagttactatgattagcagactttcctcattgaaggagtccatggatgatctatagctttctacaaatgtatgaagaacaaactcattgttccagcccatagagtgatttgatttcatttatttctcaagatctgaggtggattttttctgaaggaaaagggtagatattccaaaagtggtttaaaacctttagatccttcagagtattggctgactcatgttgatggcttgaaccagcctggcatatttcataaactaccagaggaaattaacatgacaagttattttttggtgaagagcaagac

SEQ ID NO: 264720 - DNA, 552 bp, Homo sapiens
ctctctgattcatttttaagagactctgaccaaattcaataggcatgtcttagttatgattttgttaattacttcttaccatctatcacttgcattacacatctgatggccttcatatttccaagacagcaattacttcaacaaatggrtggaaataaccagttttctccttctgcctctcatagaagtcattttcactcacttttagaggaggattaatgaggtctaactaattttcttttgccaaagttactatgattagcagactttcctcattgaaggagtccatggatgatctatagctttctacaaatgtatgaagaacaaactcattgttccagcccatagagtgatttgatttcatttatttctcaagatctgaggtggattttttctgaaggaaaagggtagatattccaaaagtggtttaaaacctttagatccttcagagtattggctgactcatgttgatggcttgaaccagcctggcatatttcataaactaccagaggaaattaacatgacaagttattttttggtgaagagcaagac

SEQ ID NO: 264721 - DNA, 552 bp, Homo sapiens
ctctctgattcatttttaagagactctgaccaaattcaataggcatgtcttagttatgattttgttaattacttcttaccatctatcacttgcattacacatctgatggccttcatatttccaagacagcaattacttcaacaaatgggtggaaataaccagttttctccttctgyctctcatagaagtcattttcactcacttttagaggaggattaatgaggtctaactaattttcttttgccaaagttactatgattagcagactttcctcattgaaggagtccatggatgatctatagctttctacaaatgtatgaagaacaaactcattgttccagcccatagagtgatttgatttcatttatttctcaagatctgaggtggattttttctgaaggaaaagggtagatattccaaaagtggtttaaaacctttagatccttcagagtattggctgactcatgttgatggcttgaaccagcctggcatatttcataaactaccagaggaaattaacatgacaagttattttttggtgaagagcaagac

SEQ ID NO: 264722 - DNA, 581 bp, Homo sapiens
ttaccttaaaaagttggggctggagaaataaaagtaacttgctttacaaagttccaagtttctctactgggggaacatggctaaaaccactgtctcctaaatttcagttccctttttgtgactgcattttgatgctcccaattcataggcagagtttcaaattacattcatttttaattctgtgaacgatttatttaatccattcagatacctgaaccaatgaagctggttttttttataaaaaagtgtgcagaccatataaactcatgcttccaytgtttttctctacttgttggactgtcagtatcctgtccacagttgatgagaagactcctagcatgaaaaaggttggaagcttagtaattgctggcataaaagagctaaccagaacagaactcacctctgcaggggaaaattagtagcacaccttatcaagattgagggggctggtgaaataaacacaacttccatttagggaccaggctccaggaaaagggacttaggagtagagtgctagacagagcagtcatcacttggggcacatgttgaggactgtacaaggagaccaaagccagatacgt

SEQ ID NO: 264723 - DNA, 581 bp, Homo sapiens
ttaccttaaaaagttggggctggagaaataaaagtaacttgctttacaaagttccaagtttctctactgggggaacatggctaaaaccactgtctcctaaatttcagttccctttttgtgactgcattttgatgctcccaattcataggcagagtttcaaattacattcatttttaattctgtgaacgatttatttaatccattcagatacctgaaccaatgaagctggttttttttataaaaaagtgtgcagaccatataaactcatgcttccattgtttttctctacttgttggactgtcagtatcctgtccacagttgatgagaagactcctagcatgaaaaaggttggaagcttrgtaattgctggcataaaagagctaaccagaacagaactcacctctgcaggggaaaattagtagcacaccttatcaagattgagggggctggtgaaataaacacaacttccatttagggaccaggctccaggaaaagggacttaggagtagagtgctagacagagcagtcatcacttggggcacatgttgaggactgtacaaggagaccaaagccagatacgt

SEQ ID NO: 264724 - DNA, 577 bp, Homo sapiens
acctctgcaggggaaaattagtagcacaccttatcaagattgagggggctggtgaaataaacacaacttccatttagggaccaggctccaggaaaagggacttaggagtagagtgctagacagagcagtcatcacttggggcacatgttgaggactgtacaaggagaccaaagccagatacgtgaatacgtagcagtgtgaatagcacaggaaccccaggttctaggtagaagggcaacagtatattcccagacctctctcattgccaagcagggctctcattggctcagggacttcctaaacctatcatgcttcgcacagaactaagcagaaataagtaggctccaacccacaggaattcactgtccaccccccatcatgaggattctgtctacacaccaaccacatgcctgcttctctggtattcatgacgtgaagaactccttgaatcayagggcaaatttctgaacaaagacagcattctaatcagtcaacagtaaaaaaaaaatcagggtgtcaagctgcagacatatttggaagactgggttgttggagcttcatgtccgtttgtagtgag

SEQ ID NO: 264725 - DNA, 551 bp, Homo sapiens
tccaggaaaagggacttaggagtagagtgctagacagagcagtcatcacttggggcacatgttgaggactgtacaaggagaccaaagccagatacgtgaatacgtagcagtgtgaatagcacaggaaccccaggttctaggtagaagggcaacagtatattcccagacctctctcattgccaagcagggctctcattggctcagggacttcctaaacctatcatgcttcgcacagaactaagcagaaataagtaggctccaacccacaggaattcactgtccaccccccatcatgaggattctgtctacacaccaaccacatgcctgcttctctggtattcatgacgtgaagaactccttgaatcacagggcaaatttctgaacaaagacagcattctaatcagtcaacagtaaaaaaaaaatcagggtgtcaagctgcagacatatttggaagactgggttgttggagcttcatgtccgtttgtagtgagccagcyttctggaatttggggctaacgtgtagaaagctgatttatgcagtgagttaggct

SEQ ID NO: 264726 - DNA, 626 bp, Homo sapiens
gcttcctctttacgactcaagaagaaattctattatccccactttagatattaggtaactgaagcttgcccgagatctcaaggccaatgaatggcagaatcatattctaaatataggttttcaaactcctgtaccatttcctctataagaacattctttgaaactttatattcaataattaattacttaatatgtaaatatatgataaacataatataatgatccttttactacttgttataaactggataactagagtttagcacagaaatgggttttattattggtttttcccttttaggggtacccatctcaattctcagagaaagttggctaaagaagataatttcaaaagaaaaaggatatatttgcctcaaatcgcagcaataagtcagagagtatcagtcatttcctacaagtgggggctgtattccttcttgcactgcacatctacagagaagagaccctaaagtaacgaagatgtgttactaagtataaatggagaaagactgagtcaattccacataaagaaagcttcrccatgcataaggaagatgggcagtttttgaactcacgagtgactagaaaaataaaagctcaagcacttagttcatttacaattcaac

SEQ ID NO: 264727 - DNA, 627 bp, Homo sapiens
gagactccctcctttccttcttttaaaatacttttttagtttgtttgtttgtttgtttgttttgagacagagtcttgctctgtcacacaggctgaagtacaatggcgcaacctcggttcactgcaacctcggttcactgcaacctccgcatcctggattcaagcgattctcctgcctctgcctctggagcagctgggattaaaggcatgcaccactacagccagttagtttttgtatttttagtggagatggggtttcaccatgttgatcatgctagtcttgaactcctgacctaaagagatctgccagcctcagcctcccaaagtacggggattacaggygtgagccactgcgcccagtcaaaaatgccttctaaaaacattttggtttggtttccaggtgctttttgtttccctaggtgctatatctgccagtcttgggttagatgctctcaacccatgctaggattccatttcacatcaaaatttttatatcttaaatttaaagccaaatttacaaacatgaatattacaatcaaatattcagacagttgatttgacatgcacatcttaaactagaaaacaaattaaggcaggatttatacagagatccatatttttaagcact

SEQ ID NO: 264728 - DNA, 580 bp, Homo sapiens
cccctttacttagcagattactttatgactatatttattagttcactgggcttggagactaaatttaaygaagactcattaatttgggtttcactaccgtggcgtttgtggcctctggcacaggtgctagcctgaagcttacctctgtactgacggagaaaaactttttgcaaagtaaattaactgcatgaccaagactataggagtgttttatcttcttaagaagacaatttcaaccacgtaaccactaaccttttaaatacaaataattttactctgatatagtataaggagtccattaagcttgtgtgttatgttaattttgaataatttttccctcactgcagcaaaactttaaatgggcagtatttggttagtttagttaacattattataaaaactctggaacagtaaaaatactttaaatattgataatttgaatagcttcactctttcaaatatatgggttctttcctaggtccttttaattaacattttacagaaaatcacttgactcatgttctcagctggcccggagtctctgctgggaccacgtgtcagcagctccgggtggactgga

SEQ ID NO: 264729 - DNA, 516 bp, Homo sapiens
aatgttttgttcttatgtcttgattgatgctttcactacttattcttcaggctataagacagaaggaaacacagtgttaccttctttcataattacaaattccaacacctctttctmccccccaccccctgtctctcttctacttctcatattaccttaaccatcaaattcaaatgcatctgaatttgtaaagttaatctttcaggttctaaataacctgtatatataaaatatctccattactaatgccatctccacatacgtacaagaaaatgtatagctctacattgtcaatccagacactaaattcattccaaatgtttttaaataaaaataatgaattgatttttatttatggcatgctgcatacacccatctttaagtttcaggtataactacatgcagaaccctcttgttgaaagtggagagcaacattacagtggctaaatttcaaattaatataagcctcgttgtccactcattcagaattttctctgttagaagaatagaaaaaaa

SEQ ID NO: 264730 - DNA, 516 bp, Homo sapiens
aatgttttgttcttatgtcttgattgatgctttcactacttattcttcaggctataagacagaaggaaacacagtgttaccttctttcataattacaaattccaacacctctttctcccccccaccccctgtctcycttctacttctcatattaccttaaccatcaaattcaaatgcatctgaatttgtaaagttaatctttcaggttctaaataacctgtatatataaaatatctccattactaatgccatctccacatacgtacaagaaaatgtatagctctacattgtcaatccagacactaaattcattccaaatgtttttaaataaaaataatgaattgatttttatttatggcatgctgcatacacccatctttaagtttcaggtataactacatgcagaaccctcttgttgaaagtggagagcaacattacagtggctaaatttcaaattaatataagcctcgttgtccactcattcagaattttctctgttagaagaatagaaaaaaa

SEQ ID NO: 264731 - DNA, 571 bp, Homo sapiens
tgcatacacccatctttaagtttcaggtataactacatgcagaaccctcttgttgaaagtgsagagcaacattacagtggctaaatttcaaattaatataagcctcgttgtccactcattcagaattttctctgttagaagaatagaaaaaaaaaattgtttctgggccaggtgcagtggctcatgcctgtaatcccaacactttgggaggtagaggtgggcagatcacgaggtcaggatatcaagactatcctggccaacatggtgaaaccccgtctctactaaaaatacaaaaattagctgggcatggtagcatgcctgtagtcccagctactcaggaggctgaagcaggagaatcgcttgaacctgatgcagtgagccgagatcgtgccactgcactccagcctggcaacagagggagactccatgtcaaaaaaaaaaaaaaaattctttctggccttacttgcaaaaagtattgatttaatcaaattgagagccaatttttgaaggatttttagttttgtttttttctttatgacaacaagatactacctcttacaacatgcctact

SEQ ID NO: 264732 - DNA, 550 bp, Homo sapiens
ttgtttcattctatgcccgctcactgtgcatatgcacaaatgggctgtgtctcccaaagagcttgacagctttgcttatactgctcataggtggcagaaaaggctggtctctttttcagaccaaaaggcaagtaaagtccacaccttctccctctctggtttcctggacaattctgatcatttcactcccaggatttcaaccaccacctgcaccaaataccaatccatatcttcagctgtgactttcctgatccattttattaatcagttctggtggtctcaatatgaatatcctgtgaactattcagattccatatgtcttgggcttcagaatcattagtagctacaacacrttcataatttcaaagccaagcggctcattctgtttaccacttcatatctttttactctctcaaggcattggtcttgggaggttttaagtctttcttcactcttcagtcctcatttatcccctagcccagcttaaaattatcgcttgcttcgttgtcttcaactgccttgacccattatcccattgtcatcatcaacc

SEQ ID NO: 264733 - DNA, 393 bp, Homo sapiens
agccacatagcagctattctctaagtgtttgatgaagaaataaatgctttctttcaccaagctttatcatgctctgtgattattcatccaagcccaatcacagtggaatctgtttgcttgttttcaatgtattcctctgtggctggrctattttggtttttcttttttgttttatttaagggagcaaataattataaatttaaacaaacaaaatatgcaggtgagtatataccattccatcaatgaacaagtatatattgaaccctcattttgaggctagctttgcactgggtcctggggagacatgtttcttgttaggcaagaaagagaaggagcatattgtctgagataaagctgaaaagatggatatgtatttattttggttaattaaga

SEQ ID NO: 264734 - DNA, 550 bp, Homo sapiens
tttttttttttcatttttgctttgagtgatgaaaatggctgaatacgtgcacataattaatgtctgtcatagaagggggaatttttgcaaggtcagcaccactgtaaatgcacatggctcacatgtggcagttccagtgggtggcaaaaatcctgttctctctgcatgtagcctataagctccatactgggagcttacccctgttttctcaatgcctaatttartacctggctcagggttacagcttggaacacactggctgcttgggagggaaagaagaatctgttgacttatgatggttaaaatagttcaggccaatgacatttttgagtacctaccatatacgtggtatgatgctgggtgctggggatacaaaaattaatataacacaggccaacccttcaagtctaataatgagtgataatcccataaacagagcctttcaatatgatgtaacaagcgctctgacacaagtatgcagggaatgctttaagatcacagcaggagggccctgcacccagccagggagcttaggggaggcttccaatta

SEQ ID NO: 264735 - DNA, 550 bp, Homo sapiens
tttttttttttcatttttgctttgagtgatgaaaatggctgaatacgtgcacataattaatgtctgtcatagaagggggaatttttgcaaggtcagcaccactgtaaatgcacatggctcacatgtggcagttccagtgggtggcaaaaatcctgttctctctgcatgtagcctataagctccatactgggagcttacccctgttttctcaatgcctaatttagtacctggctcarggttacagcttggaacacactggctgcttgggagggaaagaagaatctgttgacttatgatggttaaaatagttcaggccaatgacatttttgagtacctaccatatacgtggtatgatgctgggtgctggggatacaaaaattaatataacacaggccaacccttcaagtctaataatgagtgataatcccataaacagagcctttcaatatgatgtaacaagcgctctgacacaagtatgcagggaatgctttaagatcacagcaggagggccctgcacccagccagggagcttaggggaggcttccaatta

SEQ ID NO: 264736 - DNA, 294 bp, Homo sapiens
atttttagtagagacagggtttcatcatgttggccaggctggtctctaactcctgacctcaggtgatctgcccgtctcggcctcccaaagtgctgggattataggcatgagccaaggcgcccggctggggattaggttttaaactatamatttgtgtgtgtattggggggaacacaaacatttagtctattggaatctgttttcagatttgttgccaaaaagttgttcttagttttctttctttaagaaagtcttcattgtatctataatgttcactttttactgctaatattg

SEQ ID NO: 264737 - DNA, 294 bp, Homo sapiens
atttttagtagagacagggtttcatcatgttggccaggctggtctctaactcctgacctcaggtgatctgcccgtctcggcctcccaaagtgctgggattataggcatgagccaaggcgcccggctggggattaggttttaaactatacatttgtgtgtgtattggggggaacacaaacatttagtctattggaatytgttttcagatttgttgccaaaaagttgttcttagttttctttctttaagaaagtcttcattgtatctataatgttcactttttactgctaatattg

SEQ ID NO: 264738 - DNA, 594 bp, Homo sapiens
tttgtttaaagtcgcaggccttgtaatcggtggagctggaacccaattccaggtctgtctgaatctgaaacccatgcttcgtcccataacaagttgataattcatgtagggagaaaagtcaaatatttatggacactgttggtrttggtgtctcaccttgtccctgtggaaatactgagcagttctgtgttctcatctgcagcttccatgggcttacctcctatcctaatagctgaaacctataaccttcttcagagaactgcccttgggctacagaagcagcttaccctggatgttctcaagagtgaaaactactcaggagttttcatgccttcagggcagcccaaggtgatagctgaggagtgaaggagcaggaaagccgagctcttctgccttgaggcaggacaaattgtgtggtgtaactgaccctcctggatcaggctgaggctaggacttcagcctgccttctggcttcctccctttccctattctgcttccccaactctcttactgctttctcctgggagccctttcttaacaaatcacttgcacacatgttctcatctatcagcttctgagaaacctgacccaaga

SEQ ID NO: 264739 - DNA, 367 bp, Homo sapiens
ctacttaggaaacattagaacaagatattattaatcaaaacttgtgaaatatagaaaactttatagccccaaatgccttctaattaaacaaaaaaattaacaaccctcgaagtattagaaagggaaaaacaaaataaaatcaaggaaagcagaagaaagaaataaaaataaaagcaaaaataaataagttagaaaatggtaaaattgtgaaatcaaaactcacattctttgacaatacatgagccctyagaaactgtaatcaataagagcagtgcatggcaggaatttaaaaactgatataaccactgaaaatttaataaaatttaacaaaaattaaattagaagaggggacataacaaatattaca

SEQ ID NO: 264740 - DNA, 593 bp, Homo sapiens
tctctctgaaagctgaaactactactagagaatacacaaagaaaatgaatccaggacctcacraggagctgcagtggttagcaaagaaagccaaaaatctatttttctatgaaatataattgcaaaactatatttaataaatactctgtgccaaaaattccaggttatttcaacatgggttgtggaaaatagaagtgtaggtgctgatgaagaatttagggaaaaaagcattctaaggttcatcaaaaggggacaatggacagtgattatagatactattagaaaatacaaattcaaccacttgtgactaaaaagttaatataaccactggaagaataaagatagaatatagttttcaaaacagtacatgaaaagtggaacaaagaaaatttcattaatccctgaaaaggctgggaaggggaaacaagaaaacaagaaagaaaggaaggttaaaatgaaaacacaaaataagatggcaggagtaggtttaaatatatatttttaataaccataaatatggcttgaacccaggaggcagaagctgcagtgcgccgagatcgtgccactgcactccagcctgggcaacagagaga

SEQ ID NO: 264741 - DNA, 593 bp, Homo sapiens
tctctctgaaagctgaaactactactagagaatacacaaagaaaatgaatccaggacctcacgaggagctgcagtggttagcaaagaaagccaaaaatctatttttctatgaaatataattgcaaaactatatttaataaatactctgtgccaaaaattccaggttatttcaacatgggttgtggaaaatagaagtgtaggtgctgatgaagaatttagggaaaaaagcattctaaggttcatcaaaaggggacaatggacagtgattatagatactattagaaaatacaaattcaaccacttgtgactaaaaagttaatataaccactggaagaataaagatagaatatagttttcaaaacagtacatgaaaagtggaacaaagaaaatttcattaatccctgaaaaggctgggaaggggaaacaagaaaacaagaaagaaaggaaggttaaaatgaaaacacaaaataagatggcaggagtaggtttaaatatatatttttaataaccataaatatggcttgaacccaggaggcagargctgcagtgcgccgagatcgtgccactgcactccagcctgggcaacagagaga

SEQ ID NO: 264742 - DNA, 567 bp, Homo sapiens
ctctacatgcataagcacaactctggggaagaaaaaaacactagctcagacttcagtttctgttggagcagatgttaagggatagattccaggattttatgtttaaactgggatttaatttttacatcagaggatatattccaggagatatatatatatatatattccaggatatattccaggatataagccttaaggcagaagcatgatcatcctaccaggcatgtagcaggtttattatccccaacagaggtttggaaagaaaccatttcctcattgatctatttcagagacaataaagaattcaggaaaggggttggggtaatggggatcaaagccaagtgggtcttggtcacaggatagtttacataatgcttagctaaaatttctcttagacttttttggcaaaccatccagaagatggaaacacagcagggatcttatagacatccaccttcattctggtctgatttcagttgccktagtaatatggagaatattttattaaaaagactttagagaattttctattcttcttgatagaattctttctattaaaaagacttt

SEQ ID NO: 264743 - DNA, 560 bp, Homo sapiens
tggtgagtgcctataatcccagctacttgggaggctgaggcaggagaatctcttgaacccaagagatggaggttgcagtgagccragatcatgccactgcactccagcctgggcagcagaaagagaattcatcttaaaaaaataaaataaaacaagacataaaccttaaacatttttaaaaaattaactcaatatggattagacataaatgtaaaacacaaaactatgaaacttccaaaagaaaatatagaagaaaatgataggttgaacttcattaaaattaaaagtttcttctttgcaaaagaccttttaagaggatgaagaaccattcacagactgggaaacaatatttgcaaaacacatatccctagcccagtctaaaggcatatatccctactctaatcataataaaaacatcagttaaatcccaacagaaggacactttatgatgtcctaccactactcctcaatactgttgaggtcattaaaagcaagaaaagccagagaaactgtcacagccaaagaagcctagggagacatgatgaccaaatgtagtgtgg

SEQ ID NO: 264744 - DNA, 560 bp, Homo sapiens
tggtgagtgcctataatcccagctacttgggaggctgaggcaggagaatctcttgaacccaagagatggaggttgcagtgagccaagatcatgccactgcactccagcctgggcagcagaaagagaatycatcttaaaaaaataaaataaaacaagacataaaccttaaacatttttaaaaaattaactcaatatggattagacataaatgtaaaacacaaaactatgaaacttccaaaagaaaatatagaagaaaatgataggttgaacttcattaaaattaaaagtttcttctttgcaaaagaccttttaagaggatgaagaaccattcacagactgggaaacaatatttgcaaaacacatatccctagcccagtctaaaggcatatatccctactctaatcataataaaaacatcagttaaatcccaacagaaggacactttatgatgtcctaccactactcctcaatactgttgaggtcattaaaagcaagaaaagccagagaaactgtcacagccaaagaagcctagggagacatgatgaccaaatgtagtgtgg

SEQ ID NO: 264745 - DNA, 521 bp, Homo sapiens
tttcctttccccaagcccctggcaaccaccatccctaccctgaatctatgaatttgactattttatatccctcattaaaagtagaatcatgttggatttatctttccatgtcttgttttaatgtcctcaaagttcatccatgttgtcacctattgtaaaatgttctttttttaaagctgaatagtattccatggtttgcatacatcacattttctttaccygcattcatctgtcaagacaatgaacatttaggctgtttctacatcttgggtattggggaaaatgctgcaatgaacacagaaatgcagatatctccttgagatcctgattttagttcttctggatgaatacccagaagtaggattgatgggttgtactgtagctcagtaaatgtttttagatttgcaaatgaaatatgtgtgtgtgtatttgtgtttgtatacagaactttaaaaaagtgacctgcaaataattctccaacttgtttttattaatcctttaaaatacatgccaggtaaaaa

SEQ ID NO: 264746 - DNA, 521 bp, Homo sapiens
tttcctttccccaagcccctggcaaccaccatccctaccctgaatctatgaatttgactattttatatccctcattaaaagtagaatcatgttggatttatctttccatgtcttgttttaatgtcctcaaagttcatccatgttgtcacctattgtaaaatgttctttttttaaagctgaatagtattccatggtttgcatacatcacattttctttacctgcattcatctgtcaagacaatgaacatttaggctgtttctacatcttgggtattggggaaaatgctgcaatgaacacagaaatgcagatatctcyttgagatcctgattttagttcttctggatgaatacccagaagtaggattgatgggttgtactgtagctcagtaaatgtttttagatttgcaaatgaaatatgtgtgtgtgtatttgtgtttgtatacagaactttaaaaaagtgacctgcaaataattctccaacttgtttttattaatcctttaaaatacatgccaggtaaaaa

SEQ ID NO: 264747 - DNA, 580 bp, Homo sapiens
ggcattccatagagagccagttacaaaattcaacccgacagaaaaaacctaatcgtgaaaagaaccgcaagggtgattattttaacattaaaaaaattggagaggatgtctgggaattgactctaagggcacaaggccaagagcggactaacaattttgagaatcatttatcaatatgagtttacttaccaaggattccgaatttgatgtattggcttgagcagctgcaaatggttttaattttttgtttacttggtgacgaccttcttctcaatgtcactacattaaatgaagtcraagggtctgtcaggaaatccttggtataatgcattgaaaggtatccagcaatttggggagatagtaaggctgaagttcatttatcatgaatggctcactcactcatcctcctttgtctcccaagaaaacctagaagacattctctaattaagtaatttagaaataccttggttgaggcgggtaccagcatctgtgaaaagtgtcatagtgtctgttctctgtagagcaggatgctggtggtggtggccacaagagacacaaggatgatgattctattggaatg

SEQ ID NO: 264748 - DNA, 580 bp, Homo sapiens
ggcattccatagagagccagttacaaaattcaacccgacagaaaaaacctaatcgtgaaaagaaccgcaagggtgattattttaacattaaaaaaattggagaggatgtctgggaattgactctaagggcacaaggccaagagcggactaacaattttgagaatcatttatcaatatgagtttacttaccaaggattccgaatttgatgtattggcttgagcagctgcaaatggttttaattttttgtttacttggtgacgaccttcttctcaatgtcactacattaaatgaagtcgaagggtctgtcaggaaatccttggtatartgcattgaaaggtatccagcaatttggggagatagtaaggctgaagttcatttatcatgaatggctcactcactcatcctcctttgtctcccaagaaaacctagaagacattctctaattaagtaatttagaaataccttggttgaggcgggtaccagcatctgtgaaaagtgtcatagtgtctgttctctgtagagcaggatgctggtggtggtggccacaagagacacaaggatgatgattctattggaatg

SEQ ID NO: 264749 - DNA, 519 bp, Homo sapiens
tgatgtattggcttgagcagctgcaaatggttttaattttttgtttacttggtgacgaccttcttctcaatgtcactacattaaatgaagtcgaagggtctgtcaggaaatccttggtataatgcattgaaaggtatccagcaatttggggagatagtaaggctgaagttcatttatcatgaatggctcactcactcatcctcctttgtctcccaagaaaacctagaagacattctctaattaagtaatttagaaataccttggttgaggcgggtaccagcatctgtgaaaagtgtcatagtgtctgttctctgtagagcaggatgctggtggtggtggccacaagagacayaaggatgatgattctattggaatgattagatctcaggacggtatcagcctaggggctgaacttcaccaccaaaaagaaaagagggcataattattgttgagtggtagccaggatgttctgagtagtagtgacttttggtattaaataattgatgagaggcctgagag

SEQ ID NO: 264750 - DNA, 571 bp, Homo sapiens
acttctcatagtctccaaaagacaataacttaaataccttgtgatgcagtcctaatagatgaagaatatactctgaaccagcgatccatgtatgtcccatattttccatagccagaataaacagttccaggaaccaaatggtggaaatcacatctaacttttacaactaatgacttaattgcaaaatgtttgtgtctcattactattctgggctcttctattttagatgttctcattacccaagagaatgctttcattcaggggtgcaagagtcagtccaaataaaaactyaaaacaaaacagcctgctacctggctatttatgactcctaataccactggatgaataaattctttagaaaatgcagggaagggttgtaatgttgttggctggagtgattgctcctaattttcaatgaaaaataggaatgctttttcacaactgggacagggaagagaatgaatataactcaagatcccctggagggcctcctggcactaccctacctggggctacagaagagtaggatgatgccatccaggcaagactacaaaggctcaaatcccccaga

SEQ ID NO: 264751 - DNA, 599 bp, Homo sapiens
attctttagaaaatgcagggaagggttgtaatgttgttggctggagtgattgctcctaattttcaatgaaaaataggratgctttttcacaactgggacagggaagagaatgaatataactcaagatcccctggagggcctcctggcactaccctacctggggctacagaagagtaggatgatgccatccaggcaagactacaaaggctcaaatcccccagaaacaaaggtttgcatcccctatcatgtaaagagataagaccagctaaggtgctggatgaaaggaaagaagccatgaaacaaatgcatgataagaaagagaatgaaaacatagtaactatggacttgtaactagttgaagaagcaagagctgtatcatgtccccatattttcttccttgctttttgtaaatgtatttataaattatacctaatttctttgcccactccagttccactactatttttgtctgggatgttttgatagtggctaatttcacattttagtccacaagttatagaatgtcaaaacaggattacaataaaaccagaaaagaaatggatatcactcagagaggccagacttacagtcaaatgaat

SEQ ID NO: 264752 - DNA, 599 bp, Homo sapiens
attctttagaaaatgcagggaagggttgtaatgttgttggctggagtgattgctcctaattttcaatgaaaaataggaatgctttttcacaactgggacagggaagagaatgaatataactcaagatcccctggagggcctcctggcactaccctacctggggctasagaagagtaggatgatgccatccaggcaagactacaaaggctcaaatcccccagaaacaaaggtttgcatcccctatcatgtaaagagataagaccagctaaggtgctggatgaaaggaaagaagccatgaaacaaatgcatgataagaaagagaatgaaaacatagtaactatggacttgtaactagttgaagaagcaagagctgtatcatgtccccatattttcttccttgctttttgtaaatgtatttataaattatacctaatttctttgcccactccagttccactactatttttgtctgggatgttttgatagtggctaatttcacattttagtccacaagttatagaatgtcaaaacaggattacaataaaaccagaaaagaaatggatatcactcagagaggccagacttacagtcaaatgaat

SEQ ID NO: 264753 - DNA, 599 bp, Homo sapiens
attctttagaaaatgcagggaagggttgtaatgttgttggctggagtgattgctcctaattttcaatgaaaaataggaatgctttttcacaactgggacagggaagagaatgaatataactcaagatcccctggagggcctcctggcactaccctacctggggctacagaagagtaggatgatgccatccaggcaagactacaaaggctcaaatcccccagaaacaaaggtttgcatcccctatcatgtaaagagataagaccagctraggtgctggatgaaaggaaagaagccatgaaacaaatgcatgataagaaagagaatgaaaacatagtaactatggacttgtaactagttgaagaagcaagagctgtatcatgtccccatattttcttccttgctttttgtaaatgtatttataaattatacctaatttctttgcccactccagttccactactatttttgtctgggatgttttgatagtggctaatttcacattttagtccacaagttatagaatgtcaaaacaggattacaataaaaccagaaaagaaatggatatcactcagagaggccagacttacagtcaaatgaat

SEQ ID NO: 264754 - DNA, 598 bp, Homo sapiens
atatcactcagagaggccagacttacagtcaaatgaattaatttaggatactttgggttgtctcttttgaggatattgtgatcatgtattcattttcattttaaatgatagttgtattgcatcaacaaatagcattttacatattttaaaggtttgagtatggaatatgagtgtttattgatatggggtagccaaagaaccagaagggacataccgtatttttggccaaccagaaaagagcaatgtgagaaaaccagaaaagagcaatgtgagaaaaccagttctgcctgaagcttccttttttttttttttttttttggcactagtgkcaggaacagccatttcttattgattttaaggttccatttctgaatcagaaatggtattggtagggaacaatgactagcaacaattgcatctagggttacatagggatagtagcaacagtgacagttttctcattgggcaagttatgcaacatgatttcagataattctatcagatacctaataacctttgcagttaatttcttcattgcttaattcagccaaagtcagcttctgtggctgtcaaatgaaaaaataaagtcctagaagga

SEQ ID NO: 264755 - DNA, 598 bp, Homo sapiens
atatcactcagagaggccagacttacagtcaaatgaattaatttaggatactttgggttgtctcttttgaggatattgtgatcatgtattcattttcattttaaatgatagttgtattgcatcaacaaatagcattttacatattttaaaggtttgagtatggaatatgagtgtttattgatatggggtagccaaagaaccagaagggacataccgtatttttggccaaccagaaaagagcaatgtgagaaaaccagaaaagagcaatgtgagaaaaccagttctgcctgaagcttccttttttttttttttttttttggcactagtggcaggaacagccatttcttattgattttaaggttccrtttctgaatcagaaatggtattggtagggaacaatgactagcaacaattgcatctagggttacatagggatagtagcaacagtgacagttttctcattgggcaagttatgcaacatgatttcagataattctatcagatacctaataacctttgcagttaatttcttcattgcttaattcagccaaagtcagcttctgtggctgtcaaatgaaaaaataaagtcctagaagga

SEQ ID NO: 264756 - DNA, 598 bp, Homo sapiens
atatcactcagagaggccagacttacagtcaaatgaattaatttaggatactttgggttgtctcttttgaggatattgtgatcatgtattcattttcattttaaatgatagttgtattgcatcaacaaatagcattttacatattttaaaggtttgagtatggaatatgagtgtttattgatatggggtagccaaagaaccagaagggacataccgtatttttggccaaccagaaaagagcaatgtgagaaaaccagaaaagagcaatgtgagaaaaccagttctgcctgaagcttccttttttttttttttttttttggcactagtggcaggaacagccatttcttattgattttaaggttccatttctgaatcagaaatggtattggtagggaacaatgactagcaacaattgcatctagggttacayagggatagtagcaacagtgacagttttctcattgggcaagttatgcaacatgatttcagataattctatcagatacctaataacctttgcagttaatttcttcattgcttaattcagccaaagtcagcttctgtggctgtcaaatgaaaaaataaagtcctagaagga

SEQ ID NO: 264757 - DNA, 595 bp, Homo sapiens
caggtaaccgaaacagtggaaagcaaaactacacataagaagggattactgtaacagtgcaaacaaaaccatgacaacacgaaagaggtggctctatcacttttgctagaagagttaaggaaggcttcaaaagttacacctgagctgaacatcaagtctagaatctaggtagggtcagggtcaggagaattcgctatgctaacgagtttggattcyaccctgcactcaatgcagtctctgacagattttagttggaaaaaaaaatacagctgggtcatttttgttttaggtaaattagcttcataggattgcagagggccaaaattggacagaaaagagagcagaggcagagagagcaattaaaaggttattgctgtttgtggggtgaaagaaaaacagagcagagatcatcaacctcttcgtaaggtgacgatgaaacaaaaggcaaatttctcttctaatgtttaggtcaaatagcatgtaagctatgaactatttttctcctcctggcattggcataaagagatttttttgtgtggccactgctgaaagtaaggtaaataaaactcagtgagtaaaaattgaaaaattattt

SEQ ID NO: 264758 - DNA, 595 bp, Homo sapiens
caggtaaccgaaacagtggaaagcaaaactacacataagaagggattactgtaacagtgcaaacaaaaccatgacaacacgaaagaggtggctctatcacttttgctagaagagttaaggaaggcttcaaaagttacacctgagctgaacatcaagtctagaatctaggtagggtcagggtcaggagaattcgctatgctaacgagtttggattctaccctgcactcaatgcagtctctgacagattttagttggaaaaaaaaatacrgctgggtcatttttgttttaggtaaattagcttcataggattgcagagggccaaaattggacagaaaagagagcagaggcagagagagcaattaaaaggttattgctgtttgtggggtgaaagaaaaacagagcagagatcatcaacctcttcgtaaggtgacgatgaaacaaaaggcaaatttctcttctaatgtttaggtcaaatagcatgtaagctatgaactatttttctcctcctggcattggcataaagagatttttttgtgtggccactgctgaaagtaaggtaaataaaactcagtgagtaaaaattgaaaaattattt

SEQ ID NO: 264759 - DNA, 581 bp, Homo sapiens
gagaaaaagtatgttggggcagcaatggcgtgtacaaaggacctgaggcagaaacgtggttaaagatctgtacaggaacagtgtggctagagaatgtgagtaatgggaatagtgggagatgaggtcagaaagacagtgaagggccagatgtgcagggatttgcaggctgtacagattctgtgaattttatttaaatgtggaggagagcccttggaagtttcggmcatgatcacatttgggttttcattggctccgactatgtgaagaacagacttggtgtgtgctggggggtgggcaaagggagtagcagagaggccgaagagcagtctgttgcagtaatccaggtgagaaactgatggtggagtggagggggtaaaggttaagagggctgtgttttaaagggaacgccaataggaatgcctgtgggatatgacagaaaaacagcaatgaacaataatgctaaagtttttgtcatgacaaccaggtgaaccagaagccaatcactaaggtggagaacactggggaaagagcaggtatgggggaggaagacaagaattaaatttaaaacatacatttaaatt

SEQ ID NO: 264760 - DNA, 352 bp, Homo sapiens
aagaatctggtaacacaccaacacayatgcagtcagttgattgcattttactatcatgcaatagggaaaaacttttcaataagttgtactgaacaactgactatccatatacataaatatgaatctttacccctacctcacagcatactaaaaaatctattttaaatctaaatgtaaaaggtaataccataaagcttttttgaaaaaaaaaaaactctagattacttttgtggtcataaaatagtcaaatattttttagattgtaggcaaaaactaaatagcttggttttaaagtctgaagaaataattgctgagcaggaagacagactgatagaaattattcagaacagaa

SEQ ID NO: 264761 - DNA, 546 bp, Homo sapiens
taccctggccaggtgtgggcatgctcagggaagcactgacatgccagcctcctaccacctcggccccctctggaccttgggcgccaacaagcacagggggaaagctgagggaggggctgagggtggctcaacgctggcctgcaggtgccccttggcacaagcagcctcagtgccatggatagtggcagtaggcagatgggctcctgggcagaaggaagsaggtccctgataaggccccatcttcaggccagggagggcctgaaggctgggggccaagctgccagtcccatggactggagtagggatttgtggtgccttttctgggcccacccatggctgcccatgaaccaataagcacgcacttcctcccctctgagtcctataaaagccctgagctcagccagagcagagcagaggatggacagccaatgggacaaccagctgcagagtagctatcctccttgctgagagctgcaaacgacggaacaacctgcctgcagagaggagccacccactctggggcctactctctgccaacagctgcag

SEQ ID NO: 264762 - DNA, 546 bp, Homo sapiens
taccctggccaggtgtgggcatgctcagggaagcactgacatgccagcctcctaccacctcggccccctctggaccttgggcgccaacaagcacagggggaaagctgagggaggggctgagggtggctcaacgctggcctgcaggtgccccttggcacaagcagcctcagtgccatggatagtggcagtaggcagatgggctcctgggcagaaggaaggaggtccctgatraggccccatcttcaggccagggagggcctgaaggctgggggccaagctgccagtcccatggactggagtagggatttgtggtgccttttctgggcccacccatggctgcccatgaaccaataagcacgcacttcctcccctctgagtcctataaaagccctgagctcagccagagcagagcagaggatggacagccaatgggacaaccagctgcagagtagctatcctccttgctgagagctgcaaacgacggaacaacctgcctgcagagaggagccacccactctggggcctactctctgccaacagctgcag

SEQ ID NO: 264763 - DNA, 530 bp, Homo sapiens
tcatttatgtttttgccctaaaactgttcccttccacctctgctgagttaagcagtatcctttatttggtgtttataataactctaatatatattttaattctatcactgcatatatatgcttttataaaatatattttttgacatttttaaacatacctctatggtatgaagccataaagtatggtttcatactttatgtatcattctgcaatttgcttcttcacttaatcttatgtgttttgagatttatctatgtcaataaatacaatgttagtttatcaatttttacaactgtataatgctgcattgtatgagtacattaaaattatttatccattcttttctgaatggttttttaggtcatttcaatattatgccatggaaaacagtgaaacagtgaacatttttgtatatttttctctttgagcacattggaaagacctctctaatattgcctaaaagaaamgtaaagcaaatgatataaaacaagtgtaatttcagggataaagaaaatatacatcttcaaac

SEQ ID NO: 264764 - DNA, 505 bp, Homo sapiens
aactatttaacagtccctaagcaatttcaaacttttccttatcttccagtcttcttctgagccctccaaactcttccaacttctgcccattacccagttccaaagctgtttccacataacaccccattcttggtactaattttctctattaggccattctttgtgtcactataaagaaatacctgatgctaggcaatttatttaaaaaayaggtttaattagatcatggttctacaggctatacatgcatggcaccaacatctgctggacttctagtgaggacccaggaggcttacaaccatggtggaagcaaagggcaaagctaggaaaccacatggtgagagcaggagcaagagaaggagcaaggagatcccacacttttaaacactcagatctcacacaaaataactgagcgagaactccttattttctagaggatggtgctaaaccattcatggagggatctgccctcataatctaattacctcccaccaggccccacctc

SEQ ID NO: 264765 - DNA, 505 bp, Homo sapiens
aactatttaacagtccctaagcaatttcaaacttttccttatcttccagtcttcttctgagccctccaaactcttccaacttctgcccattacccagttccaaagctgtttccacataacaccccattcttggtactaattttctctattaggccattctttgtgtcactataaagaaatacctgatgctaggcaatttatttaaaaaacaggtttaattagatcrtggttctacaggctatacatgcatggcaccaacatctgctggacttctagtgaggacccaggaggcttacaaccatggtggaagcaaagggcaaagctaggaaaccacatggtgagagcaggagcaagagaaggagcaaggagatcccacacttttaaacactcagatctcacacaaaataactgagcgagaactccttattttctagaggatggtgctaaaccattcatggagggatctgccctcataatctaattacctcccaccaggccccacctc

SEQ ID NO: 264766 - DNA, 590 bp, Homo sapiens
gaaagagaatgagagagaaagtgatctaagatttcataaacaacttttctgaagtttagttaattttacttttcttatttttattcctttagaatagagacctagattggtttcttgatatgatgtaattctgttttgaaaatttcattttagttcattggttttcattttgactgttttcatttctacaatatcaggaacatgacttaccttttataaaaatgatttgctatataagcattaaattaaaacttaaattggctatattgatttgaaattgccaccaatttggaaatatgaattcatgaagttatatsatcaagtttacatgtttaacaacaaacaaaatgatctgtccttgggtcaccagggtcaggctctccatgtgacactgggcatggccaccctggactcaggcttgggctggaaccactctgatcccactgggactgtgcactcatggtaaccacatgcctgcgttcccaccagatgcagcagtaaatggctgaaagtggcagcaacttgtgctttttattccctaactgccaaagtgttaaagcagatgttcttttaccaagtcctaggcatcc

SEQ ID NO: 264767 - DNA, 619 bp, Homo sapiens
tacaagcataattgaaaacagcattggagaaaaataattaaggatgcaagtgaacagagattagttatttagatatgttaattaaaaatacatttaaagcgatgattattaaataaatagcattctagtcttgggcagcatattttcactgtttctggaatccttccttttggggattgaaaatgtctactttgaaaaaaatcaacaaataaggcccattgtaaaaataatctatagttctatccaatgtggggattgcagacatgctgacatgtggtttattctcagctctcttaagttgttattgccattgtctattcatgccacacaatataaggctaatggtcctttgcatttctgtccatttccagatcatccttgggcatcctgtgaaatgcttaggtaatacatcaaaaatgtcttcttttacacaatacacactatttagatagtgatactttacttgacagtagcttctgccaataccatattttatttatatgatctaaaatagtgatgccactgtgaacatgtagcttcataagtccaagccatttgttatkatttttatattcctttcaaatatgtgttggattgctacactgggaaattgacctaa

SEQ ID NO: 264768 - DNA, 566 bp, Homo sapiens
gttgttctctccactacaacctcactggcttcagtgcctcaggacatcagcacttactgttsgttttgcctagaacgctgtttcgcagatagctgcgtagctcacttctaatctgtttcattttgtttactgctgcattcttagcacaaggacagtacttggtatgtagtaggtacccactgaatgtgtattggaaaattaatttaccttgaatgaggatatggggagaaggctggcaatttgggtagcatgagtgagatttgctgaataagtgagatgaacctattttgttacatgtggaaggtaggacctggcataggaatattaagtgaggcaaaagtctcattttagggtctcattatttagtggtttgccttctataatgatttctcccacttatttcttagccttttaaaatctggtttctctttgaactgcctttagattctcattccattcatatttattgaacacctaccatgtgtgagattccgtgttgggtgcttaagatattttgtctcacttaagacaactccacaataaacatgtagttaggtattatattc

SEQ ID NO: 264769 - DNA, 599 bp, Homo sapiens
gctggttgttggcagaagacctcagttccttgccatgtggactcttaatagaattgctggaatatcctcatgacatggaagctggtgttccccatggtgagtgatcgagaaagtgtgagacagaagctgcaatatattttatgtagtagtctaggaagtcacacaccatcactttcacaatttcccattaggggtgggactgtacaaagtgtggataccaggaggtgaggatcagtagagtccatcttggagctggctgccatagtctgycctgtggcctcccatgaccccacctttcccacttgcaaagtatagtaatttctcctccaggccctgagagttgctgctcataacagcatcagctctatgtccaggatcctatcatctaaatcagtttcaggtattattaacttttacttcacaaaatcttgccattttgggtccccttctacctgccaggttaccttttctcttctttgctgaacattgaacacctggttagcattgattaagtgtgtttctgtgccaggcactaaggtatgagtatgaaaaaaataataaggcaggatgttgatcactggggagctcgcagtcgaatg

SEQ ID NO: 264770 - DNA, 599 bp, Homo sapiens
gctggttgttggcagaagacctcagttccttgccatgtggactcttaatagaattgctggaatatcctcatgacatggaagctggtgttccccatggtgagtgatcgagaaagtgtgagacagaagctgcaatatattttatgtagtagtctaggaagtcacacaccatcactttcacaatttcccattaggggtgggactgtacaaagtgtggataccaggaggtgaggatcagtagagtccatcttggagctggctgccatagtctgtcctgtggcctcccatgaccccacctttcccacttgcaaagtatagtaatttctcctccaggccctgagagttgctgctcataamagcatcagctctatgtccaggatcctatcatctaaatcagtttcaggtattattaacttttacttcacaaaatcttgccattttgggtccccttctacctgccaggttaccttttctcttctttgctgaacattgaacacctggttagcattgattaagtgtgtttctgtgccaggcactaaggtatgagtatgaaaaaaataataaggcaggatgttgatcactggggagctcgcagtcgaatg

SEQ ID NO: 264771 - DNA, 599 bp, Homo sapiens
gctggttgttggcagaagacctcagttccttgccatgtggactcttaatagaattgctggaatatcctcatgacatggaagctggtgttccccatggtgagtgatcgagaaagtgtgagacagaagctgcaatatattttatgtagtagtctaggaagtcacacaccatcactttcacaatttcccattaggggtgggactgtacaaagtgtggataccaggaggtgaggatcagtagagtccatcttggagctggctgccatagtctgtcctgtggcctcccatgaccccacctttcccacttgcaaagtatagtaatttctcctccaggccctgagagttgctgctcataacagcatcagctctatgtccaggatcctatcatctaaatcagtttcaggtattattaacttttacttcacaaaatcttgccattttgggtccccttctacctgccaggttaccttttctcttctttgctgaacattgaacacctgrttagcattgattaagtgtgtttctgtgccaggcactaaggtatgagtatgaaaaaaataataaggcaggatgttgatcactggggagctcgcagtcgaatg

SEQ ID NO: 264772 - DNA, 608 bp, Homo sapiens
tgtccattccacatcttgtacagcttcaccactctgtgggatgggagggacagaaaagtgctatgaggtccatgctcttccatttcaataggtatgaccttgggttgataattcatcacagacttcccttgttggtgcttatccaatattttctttcttgctctctttttttaaaatcttactttctaggccttcatggcatatttccccatttgagagttactatcttaaaagcaaaagctatgcttacactttgcttcttgtaaaacacttcagtctatagactagtgatcagtgaatctttactgtcattgattgaagtatttggattgtccagaaatttcccattccacatggctatgatacatactaaacactctcatgaagtccaggttagcaaactgacrgttcctgaaaggagggacttaccaaattccaccctgcacatcatgtatataccatgctgcttattcactccaacgtggcacatttctctgccacagcttctatttttaaaatcacttagcaaatcatttatttgtaaatcaatacatgtgtactatacagaacctaagaatttagacaattttaatgacccataaacatgt

SEQ ID NO: 264773 - DNA, 600 bp, Homo sapiens
gggtattagagaaactttgagctatggagatctcttccaacattcttctgattccttgatccttcaaatgtttgtctcagtactatcaatrtgctcttctatgttttaacattaacttcaacattcatttcttcttgtccatgtgagttagaagatgcaagaaaagcttgtctagaaagagaaaggtttagaaaaacaatagcatgtgttgaaaattgttgagggaagatagtaccatcagttaggaagatgtcatccctggagctggcgttaccagttaaaagctgtattcttctcataagttcattgatcctctatcataatctctctactgtatgtttttaagtagtggcaaagatgtgttggagtgcatcatcccacctaagtttattcaggacttccaccctgcaaccaataacaagcatttttaaagcaggtagagggttaaggtgcagctgtggccacagaacagagtgacaaatgacctgtaagatgacatattgtgttacctattgtctcataaatatacaattccatgagaggatgatttgatcagcttggatggtgagcattgcctctggttccccaaaagtattgtca

SEQ ID NO: 264774 - DNA, 561 bp, Homo sapiens
acagaggtcacgttctgtattactgttaataaaatatcaggtctgtaggaagctatattttgaactttaataaaaaatcactatattaaactatgttatttttaatggccaaggtcctttaaaaacttcctgaaattcactcttaactctgaaaaaaggtggaggggtgtgggggttatttgaagaaactatagggcatctgacattccaagactattrgtttaggaaatataactcatttattttctttaagaattgtacctaattattcagtaaggcttacttatgaaaacatttgtttggtatttaatttttaacgtatggttacacgcagaaaagcgttcctacctaaaaccttagagattttccaacattctacctgttggttcttacttcagttttggaattggcaacagtctggaaagtatttgttatgaaaggtgtaatgttgatgggatgaatagaagaaagctgggtttctagcagagtctgtgagaaatggaattttgcagcgttttggaaggagcctaattggtaatcaattttccatatgtgtttgag

SEQ ID NO: 264775 - DNA, 506 bp, Homo sapiens
cttttgtttggatgctgcagagtccacaggagtattgttgaagcttttgaaaatacatgtctttaacatgcyagtgtctcaagtaaataatttaattcatgccaagaataaaatcacagacaggctatgaccttggctgtccctaacggaccaccattaattcagtggacattttgatggacatttgtgggctcatttgccttcttttgaagcccgtgggtttccatgcagtgtggagctacctcaggtgcagttcaccaaggacaagcatgcaaacaagaaatgcttttccattcccacatgtctttaatggaccttcccctttttcttacccacacttttctgcccttataactgagaatgaaaggtttaaaatactttccatagtgaaatagtttcaaagaatatattatatagtaaatagagttaatgaactgagggtaacagtaatatcatttcacagaagagatctatcctattgctgtttaattaaaatctttctgctg

SEQ ID NO: 264776 - DNA, 657 bp, Homo sapiens
gctggggtgaagtagggtaaaagacctccatcttgtccatacccctgctctgtggcagcatcacctttgaggtgtacatgagaaraacatatgttacaacactttattctcttccttaattaaaaaaaaaattctgaaagcaagcaagcaaacaaacaacagcaacaacaaaacagaaccctcaaaattacctgttaagtgtcaaggaaagattgccttcaaaaccatgttatctccttataacctctttttgcctatttacatcagatccttgatcaccttactccttttcctcagctagaaacttggtcttcctatgctagcagttcaacactagtgatgattctatctcctacggagcatttaatatatgccaggcaactgtgctgtgttttcatatattatctaatttcatattttttttaaaaaaaacacctttttggggtagctgtcaataaccttattctatataatctggcaagggcatcgtaaatgctacattaactttcaccaagtaaatgatgggatagagcactcagtagaacactgaggcacagcagggaggcacaactgtggcacactcataccctagtacgaacagagctggacacaagccaatttcatccaatctcaaaatgcctctatgctggagcagct

SEQ ID NO: 264777 - DNA, 657 bp, Homo sapiens
gctggggtgaagtagggtaaaagacctccatcttgtccatacccctgctctgtggcagcatcacctttgaggtgtacatgagaaaaacatatgttacaacactttattctcttccttaattaaaaaaaaaattctgaaagcaagcaagcaaacaaacaacagcaacaacaaaacagaaccctcaaaattacctgttaagtgtcaaggaaagattgccttcaaaaccatgttatcyccttataacctctttttgcctatttacatcagatccttgatcaccttactccttttcctcagctagaaacttggtcttcctatgctagcagttcaacactagtgatgattctatctcctacggagcatttaatatatgccaggcaactgtgctgtgttttcatatattatctaatttcatattttttttaaaaaaaacacctttttggggtagctgtcaataaccttattctatataatctggcaagggcatcgtaaatgctacattaactttcaccaagtaaatgatgggatagagcactcagtagaacactgaggcacagcagggaggcacaactgtggcacactcataccctagtacgaacagagctggacacaagccaatttcatccaatctcaaaatgcctctatgctggagcagct

SEQ ID NO: 264778 - DNA, 657 bp, Homo sapiens
gctggggtgaagtagggtaaaagacctccatcttgtccatacccctgctctgtggcagcatcacctttgaggtgtacatgagaaaaacatatgttacaacactttattctcttccttaattaaaaaaaaaattctgaaagcaagcaagcaaacaaacaacagcaacaacaaaacagaaccctcaaaattacctgttaagtgtcaaggaaagattgccttcaaaaccatgttatctccttataacctctttttgcctatttacatcagatccttgatcaccttactccttttcctcagctagaaacttggtcttcctatgctagcagttcaacactagtgatgattctatctcctacggagcatttaatataygccaggcaactgtgctgtgttttcatatattatctaatttcatattttttttaaaaaaaacacctttttggggtagctgtcaataaccttattctatataatctggcaagggcatcgtaaatgctacattaactttcaccaagtaaatgatgggatagagcactcagtagaacactgaggcacagcagggaggcacaactgtggcacactcataccctagtacgaacagagctggacacaagccaatttcatccaatctcaaaatgcctctatgctggagcagct

SEQ ID NO: 264779 - DNA, 602 bp, Homo sapiens
gcatctgacacataataagtgcccaagcaatatttactgcatgatcagaaacttaagatttaaggataaaggcaggaaaaataacctaagacatttcagatcaaaactttgtttttctattaaaacaataaaaaaaaaaatccaaggaataagaaggcttttctgttttacacaagcactgagtaaaasattatgaagatagttttccaagtatcacacttttttctaatcttctactcataccttacaatagagatttgtatataagagacactttctgcatggggggtagatacattttgtttatctaaaaacatatactcacctactcatttgcagactcattagcaaaactcattgacttcaagctccatgctaaaatcagctgtgcacccttatctttctttcatcagaatttgagcctatgatttttacagatattaacatttttctcttgaaatgtaagttttgaatcactttaaaattgtcatgaaatatttgttgtaaaggttacataatgcatgaaaatgaaagtgagtggtatgtaaagacatttgtgcaaaatagtgctccctggaaataaaaaataccaaataaacaca

SEQ ID NO: 264780 - DNA, 602 bp, Homo sapiens
gcatctgacacataataagtgcccaagcaatatttactgcatgatcagaaacttaagatttaaggataaaggcaggaaaaataacctaagacatttcagatcaaaactttgtttttctattaaaacaataaaaaaaaaaatccaaggaataagaaggcttttctgttttacacaagcactgagtaaaacattatgaagatagttttccaagtatcacacttttttctaatcttctactcataccttacaatagagatttgtatataagagacactttctgcatggggggtagatacattttgtttatctaaaaacatatactcacctactcatttgcagactcattagcaaaactcattgacttcaagctccatgctaaaatcagctgtgcacccttatctttctttcatcaraatttgagcctatgatttttacagatattaacatttttctcttgaaatgtaagttttgaatcactttaaaattgtcatgaaatatttgttgtaaaggttacataatgcatgaaaatgaaagtgagtggtatgtaaagacatttgtgcaaaatagtgctccctggaaataaaaaataccaaataaacaca

SEQ ID NO: 264781 - DNA, 602 bp, Homo sapiens
gcatctgacacataataagtgcccaagcaatatttactgcatgatcagaaacttaagatttaaggataaaggcaggaaaaataacctaagacatttcagatcaaaactttgtttttctattaaaacaataaaaaaaaaaatccaaggaataagaaggcttttctgttttacacaagcactgagtaaaacattatgaagatagttttccaagtatcacacttttttctaatcttctactcataccttacaatagagatttgtatataagagacactttctgcatggggggtagatacattttgtttatctaaaaacatatactcacctactcatttgcagactcattagcaaaactcattgacttcaagctccatgctaaaatcagctgtgcacccttatctttctttcatcagaatttgagcctatgatttttacagatattaacatttttctcttgaaatgtaagttttgaaycactttaaaattgtcatgaaatatttgttgtaaaggttacataatgcatgaaaatgaaagtgagtggtatgtaaagacatttgtgcaaaatagtgctccctggaaataaaaaataccaaataaacaca

SEQ ID NO: 264782 - DNA, 545 bp, Homo sapiens
aaacacacatccacacatgtacacaacaggtatgagcaaggaccaatattttacagaccaagtgggttagtaacattggtttagagatcctggtctcagcattagtggggcacaaagtaagggtatacacaattctcagctgcaaacatgtcagatcattcatggtgttcagatcggattctctttgaacatatgccctttcaagtgaaattaatcaatctctttatcactctcactgcatctggagccataatcattacccaactgctgagaaagaaatgaaaccactaatcgcacagggagtggagcttagtgttsagagcaggaaagtttttattaagttctaatttgaaaagtgatttttcatgaccagccaaacaagacatgctatgagcagcaggctgcactattgaacctgccagctaagcatccactggcatattagcaacatgttaagaactttagaacttatacttcatttgaattatgcaattattgatttttaaaatcagcttataatactcaatactctacataagtattct

SEQ ID NO: 264783 - DNA, 545 bp, Homo sapiens
aaacacacatccacacatgtacacaacaggtatgagcaaggaccaatattttacagaccaagtgggttagtaacattggtttagagatcctggtctcagcattagtggggcacaaagtaagggtatacacaattctcagctgcaaacatgtcagatcattcatggtgttcagatcggattctctttgaacatatgccctttcaagtgaaattaatcaatctctttatcactctcactgcatctggagccataatcattacccaactgctgagaaagaaatgaaaccactaatcgcacagggagtggagcttagtgttcagagcaggaaagtttttattaagttctaatttgaaaagtgatttttcatgaccagccaaacaagacatgctatgagcagsaggctgcactattgaacctgccagctaagcatccactggcatattagcaacatgttaagaactttagaacttatacttcatttgaattatgcaattattgatttttaaaatcagcttataatactcaatactctacataagtattct

SEQ ID NO: 264784 - DNA, 657 bp, Homo sapiens
tgaaagaatggagtcttgagaaagcaataaatattttaaatgatctgattgtgaaacttaaagaaaattaaaatccagagcaaggaaaagcatcagtaatacaaagagctaagatgtttagggttcataatttaagttaataaattattaggctctgaaattaaatttaacagatctttttcrcagccaaattaaggaaatatttagagatgaacataagttatattccagccccaaatttcaactcaaattattcatatacataaaggataatgcatgaggtagctaagaatctcaaaatacattaacgtgactttgcagtcacaactaatgagcaaagctgtcaggataatttttcatgctctcaaacctagacatagaagatctatgctggaaagcatttaataataaatagctaactagtttaaaccctgaaagagacatgcagaactggtccaaagcgttcttagctgagaatatcagctaaattcagatgtcatttttgctacaaatgtgctgcacactggtgaaatatttgacaaaggagaagtagatgtaactatggaaatcataactttaattgacaacaacatgaaaattcagaaggataacaagcatcatggatggagaagacaattatgcaggagtaaaaaatca

SEQ ID NO: 264785 - DNA, 657 bp, Homo sapiens
tgaaagaatggagtcttgagaaagcaataaatattttaaatgatctgattgtgaaacttaaagaaaattaaaatccagagcaaggaaaagcatcagtaatacaaagagctaagatgtttagggttcataatttaagttaataaattattaggctctgaaattaaatttaacagatctttttcacagccaaattaaggaaatatttagagatgaacataagttatattccagccccaaatttcaactcaaattattcatatacataaaggataatgcatgaggtagctaagaatctcaaaatacattaacgtgactttrcagtcacaactaatgagcaaagctgtcaggataatttttcatgctctcaaacctagacatagaagatctatgctggaaagcatttaataataaatagctaactagtttaaaccctgaaagagacatgcagaactggtccaaagcgttcttagctgagaatatcagctaaattcagatgtcatttttgctacaaatgtgctgcacactggtgaaatatttgacaaaggagaagtagatgtaactatggaaatcataactttaattgacaacaacatgaaaattcagaaggataacaagcatcatggatggagaagacaattatgcaggagtaaaaaatca

SEQ ID NO: 264786 - DNA, 511 bp, Homo sapiens
gagtcaagcaatgaagttccagtacacagctctctgacagcctgcctcaatccagggatgagaagtaaawagcaaccaaaacttttcttcaaatttctacactgcataccaatattgagaagaacaaaagtggagtgctccagctgaaagatggtaaagctccgttgcttgaatggtttttttctccaagagtggcctgttagatgatttcatgaaacttttgcggcgttactagacacaattctaaaacttctggcctagagaactgaattggccacatttccttagagcaaacatccaagaatatgacttgtcacaactgcgcttttgctaaaaattaggcaaaatggctactaaattatagtttattctaaggcaattactagcttacatggtatttttgtgtgaagctgaaaaaggtagtccccctcctcaagtaaaaatatttttaagttagtatactattacaaaacctgaattgttctgaccaagagtccttttctggaaccct

SEQ ID NO: 264787 - DNA, 647 bp, Homo sapiens
aagggctaagaaacaaaactggatgtatggttctagaatgagtcttggccatggtagtggcatactgggtagtggagcttttaggaatgggggcttgtgttcactcacatttgggattagtcatttacatgtgagatttaatgataccaatatatagtcaagattataagtaagttgaacctcaagaatgtttttatatttaaaaaatgtsttgttttctaacatgcacatgggttttgggattattgactttgtacagatataacttaagtagccgaaaaattgatggtcctgaggtgttagtgaatgttatgaaaatatgtctttatccaaaggctttttagtacgtggagaagaatcaaagtgctttgcatacgtgaacaattcaggagttatgaatgtggattctggaaacacataaacatgagtttgaatgccggttttgctactactttgctggttttgctattttgtaaatattaccccaaatgatataatttttaatgatattaatttaacgatataatgatatatttgattttataatgatatatgatttaatgatataatttttaaatgatataaattttgctactactttgctggttttgttattttgtaaatattaccccaaattatatcattta

SEQ ID NO: 264788 - DNA, 647 bp, Homo sapiens
aagggctaagaaacaaaactggatgtatggttctagaatgagtcttggccatggtagtggcatactgggtagtggagcttttaggaatgggggcttgtgttcactcacatttgggattagtcatttacatgtgagatttaatgataccaatatatagtcaagattataagtaagttgaacctcaagaatgtttttatatttaaaaaatgtgttgttttctaacatgcacatgggttttgggattattgactttgtacagatataacttaagtagccgaaaaattgatggtcctgaggtgttagtgaatgttatgaaaatatgtctttatccaaaggctttttagtaygtggagaagaatcaaagtgctttgcatacgtgaacaattcaggagttatgaatgtggattctggaaacacataaacatgagtttgaatgccggttttgctactactttgctggttttgctattttgtaaatattaccccaaatgatataatttttaatgatattaatttaacgatataatgatatatttgattttataatgatatatgatttaatgatataatttttaaatgatataaattttgctactactttgctggttttgttattttgtaaatattaccccaaattatatcattta

SEQ ID NO: 264789 - DNA, 647 bp, Homo sapiens
aagggctaagaaacaaaactggatgtatggttctagaatgagtcttggccatggtagtggcatactgggtagtggagcttttaggaatgggggcttgtgttcactcacatttgggattagtcatttacatgtgagatttaatgataccaatatatagtcaagattataagtaagttgaacctcaagaatgtttttatatttaaaaaatgtgttgttttctaacatgcacatgggttttgggattattgactttgtacagatataacttaagtagccgaaaaattgatggtcctgaggtgttagtgaatgttatgaaaatatgtctttatccaaaggctttttagtacgtggagaagaatcaaagtgctttgcatacrtgaacaattcaggagttatgaatgtggattctggaaacacataaacatgagtttgaatgccggttttgctactactttgctggttttgctattttgtaaatattaccccaaatgatataatttttaatgatattaatttaacgatataatgatatatttgattttataatgatatatgatttaatgatataatttttaaatgatataaattttgctactactttgctggttttgttattttgtaaatattaccccaaattatatcattta

SEQ ID NO: 264790 - DNA, 647 bp, Homo sapiens
aagggctaagaaacaaaactggatgtatggttctagaatgagtcttggccatggtagtggcatactgggtagtggagcttttaggaatgggggcttgtgttcactcacatttgggattagtcatttacatgtgagatttaatgataccaatatatagtcaagattataagtaagttgaacctcaagaatgtttttatatttaaaaaatgtgttgttttctaacatgcacatgggttttgggattattgactttgtacagatataacttaagtagccgaaaaattgatggtcctgaggtgttagtgaatgttatgaaaatatgtctttatccaaaggctttttagtacgtggagaagaatcaaagtgctttgcatacgtgaacaattcaggagttatgaatgtggattctggaaacacataaacatgagtttgaatgccggttttgctactactttgctggttttgctattttgtaaatattaccccaaatgatataatttttaatgatattaatttaaygatataatgatatatttgattttataatgatatatgatttaatgatataatttttaaatgatataaattttgctactactttgctggttttgttattttgtaaatattaccccaaattatatcattta

SEQ ID NO: 264791 - DNA, 614 bp, Homo sapiens
taaggttggcttttggccaaggcacatactactattttctgtaagggcaggaaaattcatgttttgctcttagaaatctttaatgtttgtaaccactgagaacatttggagtgatgattatgttgatatgacccatattaatgttgaaattgctctttaaatgccattcattaataattctttgatcatctgtgtgtttaacaaaattggtaaaattgctttcactgtttctttctaataaaaaccttttggcgttcctctggagattttattgataaactctcccttaagcatacatccaaattaaatgtgagaacctgcagctaaaagaaattgcttcaaggcaatgattcactaacrtgaaaaatcaatagcagtttcattaaggaaggaaagataccttagacatactcctacctagctttcttcatactaaaaaatggaaacagttgttgataatgtctttccttatagatgtaatgttcatatcttagtgccatgcctgctgtatagcaagattgtatgtgtaccttctactctgctgtgattcttgaatagagctagtctctgcattttgagaaactgacactcattcaaatcacagtttctttaat

SEQ ID NO: 264792 - DNA, 598 bp, Homo sapiens
aacagcttctctacactgggaagtcctgggcatgcgtgagtgatgggtctggggtgactttgtatgctcttcatgaaggtgtttatacctcagatcctccttgtcatgcactcaatttagaactcctttaacaagtggtcttggttctagttccttaaattggtgtttcccaaaccccaaagtgaaacaatttcccaaatgatgtrttccttaaaaatgcatgcagtttaggagagcagtggtaaataattggcaactcagtagctttagacctttttactctctcaaagctcttgactacagttggcaatctcataaaacaaccagagaataaatagttgcctaaaacagtaatatcacggagtatatttttgcttctgccaaaatatattcttggtaattagtactaacctcaggcaaaacccaagcaggcaatatttttgtagtgtttccttccctttcttgtctatacctcaccttgcagcagtctgctttttgggagaccagcttgcttcattctgatgacccagatcagaccatgtaaatggctctttataatgccagttgcttctcataagaatgtttattttctaacagg

SEQ ID NO: 264793 - DNA, 598 bp, Homo sapiens
aacagcttctctacactgggaagtcctgggcatgcgtgagtgatgggtctggggtgactttgtatgctcttcatgaaggtgtttatacctcagatcctccttgtcatgcactcaatttagaactcctttaacaagtggtcttggttctagttccttaaattggtgtttcccaaaccccaaagtgaaacaatttcccaaatgatgtgttccttaaaaatgcatgcagtttaggagagcagtggtaaataattggcaactcagtagctttagacctttttactctctcaaagctcttgactacagttggcaatctcataaaacaaccagagaataaatagttgcctaaaacagtaatatcacggagtatatttttgcttctgccaaaatatwttcttggtaattagtactaacctcaggcaaaacccaagcaggcaatatttttgtagtgtttccttccctttcttgtctatacctcaccttgcagcagtctgctttttgggagaccagcttgcttcattctgatgacccagatcagaccatgtaaatggctctttataatgccagttgcttctcataagaatgtttattttctaacagg

SEQ ID NO: 264794 - DNA, 577 bp, Homo sapiens
tgtagtgtttccttccctttcttgtctatacctcaccttgcagcagtctgctttttgggagaccagcttgcttcattctgatgacccagatcagaccatgtaaatggctctttataatgccagttgcttctcataagaatgtttatyttctaacaggcttattctaaatgtacagcatctttcccaaagtacttaaatctaggattgtggcaggcaggattattaaaattgaagttcaggggacttttctctctgtcacaggatatttggagtgtcacttttccagccagaaacctctgtggccagtggcacctttttcctagtttttcttgggcctactgggcttgttccacctgcttggcccagcaggctgcatatggctcacactactggcctggatcccacacctaccaagggtgagccaggtgcagaggggcaaggagtgtgtgagcaagtgagtgtggggtccagccactgtgcacagctgggcatgccggctgtggcagggcgggcagctctaggcactggcatagggaccggctctgtgaggctgcaggtggaccgcacatatcataag

SEQ ID NO: 264795 - DNA, 537 bp, Homo sapiens
acctgtaggcctgcaccaagctgccctcagctcccctggcctgcctcctgtgcttcttggcacccaaagtccagaaggagccgaagtggcagggggcttatgcgtcagtgctgccctggctgggttatgacagtacctgggctcagccacagctttgctctgccccagaatggttgccaggaggagggagaggccaaggagtgggagcaggccctttgaagcctgcaggggtkgggggcttcctgggcccctgagagccccagggatgccagggtctggagctgaactcggcatcagcacccgggagtgcggccttctgcactgccaacttggtagaaggcggggctctcatctgctcctggctcccacaccagctctgcctagtgcgcaggcctggctgtgcctcccctgctgcagccagtgtccttacagcagccgctccagatgggccatcactgccatcatctggacactcaaaaaaaaaaaaaaaaaaaccacataggcaggccccttattctgcttatatgtaagcctact

SEQ ID NO: 264796 - DNA, 630 bp, Homo sapiens
gttcttttaaatttgtagtttccttttaaaaaaagttaatatcaattaagtttaggacatgagttttcttatattttaatccgatctctcagattctaaattggtatagcaatttcttagaacgttgcatctgaaggatgtgaatgtaaaagcagggcaatcgtgagggcatttcattcataggaggcagcagaagacagaaatatagaaactataygttttctcctgcctcagcctcctgagtagctgggactacaggtgcctgcccaccacacctggctaattttttgtatttttagtagagatggggtttcaccatcttagctggatggtctcgatctcctgacctcgtgatccacccacctcggcctcccaaagtgctgggattaggattatgggcatgagccaccacgcccgggaggcagagcttgcagtgagccgagattgcgccactgcactccagcctgggcgagagcggactccgtctcaaaaaaaaaagaaaaaacaaaaaaagaaactatatgttttcttgcacataaaaaacattaagattcttactctcaggcagtagaaatttaataaatctgtcaaggagtaagattaaatttaccctgaattattaaactgtgt

SEQ ID NO: 264797 - DNA, 611 bp, Homo sapiens
ctctgttcactcttgtgtgggaaaccacttcttggacatagaatgtggcgggggaggattcagacagacgcacctcagagggtgtggtaatggtgatggaggtgctggtggggctagggagggagagtgtacctgactattcagattctctccaagcagggattctgggaaattctttaaggagtgtaattggttacaagtgtatcgcagacaaagtcccaaggaaactttagaggttagacactacctagggatcatgaacatatcctcaggccagcagctattttgatataacagtttcggctaactggcttcagtcattatacttgcttaataatttcctgcttctttgtctgatagtgcagcattgtgtcaagacttccttgacttgtgttgscttaaaggagtggagatggaaacagataagctgtccctctcttctctcgatcagtagcttagcagtcattcactcccatttatagcatatgtcaaagtcagttactgaaactgcactcatgtccttcctagtttttcttgtcatagaacttcctattctctgaatttactatttcacttttgcccctaaaaacaggttttggtgaaacttacta

SEQ ID NO: 264798 - DNA, 611 bp, Homo sapiens
ctctgttcactcttgtgtgggaaaccacttcttggacatagaatgtggcgggggaggattcagacagacgcacctcagagggtgtggtaatggtgatggaggtgctggtggggctagggagggagagtgtacctgactattcagattctctccaagcagggattctgggaaattctttaaggagtgtaattggttacaagtgtatcgcagacaaagtcccaaggaaactttagaggttagacactacctagggatcatgaacatatcctcaggccagcagctattttgatataacagtttcggctaactggcttcagtcattatacttgcttaataatttcctgcttctttgtctgatagtgcagcattgtgtcaagacttccttgacttgtgttggcttaaaggagtggagatggaaacagataagcwgtccctctcttctctcgatcagtagcttagcagtcattcactcccatttatagcatatgtcaaagtcagttactgaaactgcactcatgtccttcctagtttttcttgtcatagaacttcctattctctgaatttactatttcacttttgcccctaaaaacaggttttggtgaaacttacta

SEQ ID NO: 264799 - DNA, 605 bp, Homo sapiens
gaggatgtgctaaataatcaaacctttcttgcctagagatttccagtgwtagacagtgcacactgacaagatggatgacagagttaagggtataatttgtgcctgtgaagcgagaagggaacaacgtgtgtagaggtaagatgcatatataacacttaagggttataataaagatgtgcacaccatggttcagaaaagagcaaaatctactgccattggtcagagagaaaagaaggcttcttggaagagacaggaaagagctgaggctcaggggatagttctggattggaattccacacagcatatgcctggtgaaaggagagatccaacctgacaggaattctcccataaaatcatggggcataaggtgataaaagttgtacatgccagtatgttaggtaaaagtgaatggaattatttactacaggtaatggagaaaaaaagttaaattccagtagcatgaaacatgttagcatttgtgtttcggggaaggttaatccaatatctcccattccagaattgactggagaaggatacatcaagagagcagagaataacttggaagatgttgctagggtggtgggtggtagcaataggagcgcaat

SEQ ID NO: 264800 - DNA, 605 bp, Homo sapiens
gaggatgtgctaaataatcaaacctttcttgcctagagatttccagtgatagacagtgcacactgacaagatggatgacagagttaagggtataatttgtgcctgtgaagcgagaagggaacaacgtgtgtagaggtaagatgcatatataacacttaagggttataataaagatgtgcacaccatggttcagaaaagagcaaaatctactgccattggtcagagagaaaagaaggcttcttggaagagacaggaaagagctgaggctcaggggatagttctggattggaattccacacagcatatgcctggtgaaaggaragatccaacctgacaggaattctcccataaaatcatggggcataaggtgataaaagttgtacatgccagtatgttaggtaaaagtgaatggaattatttactacaggtaatggagaaaaaaagttaaattccagtagcatgaaacatgttagcatttgtgtttcggggaaggttaatccaatatctcccattccagaattgactggagaaggatacatcaagagagcagagaataacttggaagatgttgctagggtggtgggtggtagcaataggagcgcaat

SEQ ID NO: 264801 - DNA, 605 bp, Homo sapiens
gaggatgtgctaaataatcaaacctttcttgcctagagatttccagtgatagacagtgcacactgacaagatggatgacagagttaagggtataatttgtgcctgtgaagcgagaagggaacaacgtgtgtagaggtaagatgcatatataacacttaagggttataataaagatgtgcacaccatggttcagaaaagagcaaaatctactgccattggtcagagagaaaagaaggcttcttggaagagacaggaaagagctgaggctcaggggatagttctggattggaattccacacagcatatgcctggtgaaaggagagatccaacctgacaggaattctcccataaaatcatggggcataaggtgataaaagttgtacatgccagtatgttaggtaaaagtgaatggaattatttactacaggtaatggagaaaaaaagttaaattccagtagcatgaaacatgttagcatttgtgtttcggggaaggttaatccartatctcccattccagaattgactggagaaggatacatcaagagagcagagaataacttggaagatgttgctagggtggtgggtggtagcaataggagcgcaat

SEQ ID NO: 264802 - DNA, 573 bp, Homo sapiens
cagtctcatgaagagaaaagagcactggtttggaaccaaacaaacttaaactttgattcttaatccaccttgtaagtagcaatttaaccttgaccagattactatattccctgagcaataatttcctcaattgtaaaattcggctagtgaggtttgcattctagggctgtactaacacatgcatgtatgtgtgcatgtatatatagctgcacatacacacatgtatatacatatttcccttcgacctacttgtcattgatctgacctttacaaccttctactttggggctacatttggggcyactttggggcttcaatctcttcattcagtcccatgaggctgttaaaaattgtggcaaacatatccagtcttaaatatttatggcctcgtgactagaagaaaaatggctttttctaaccagaacaatcaggaaaaaaagttctgggaaagcactattattggcccagactgagataaatagtcattgttagacaatgactgctctggggaatgtagtactatattgaaccagcctgagacaggactaaaggggcagacgtctcttaggcctg

SEQ ID NO: 264803 - DNA, 575 bp, Homo sapiens
ctcctgccaaacttcctgcactcctaagcactagctgtgccctatcaatgtctgtcatcagtcagtcctcactatctacagtctacttgtttgaaccaaagtagacttcattccccagacgcaacattcactttggttcaagccaactgttctcagaaggaaacacctgttcctcagaaatgctaactcaatgtcctgcagtttgacaaaattaagccttttgctaggtacataggtgaccttatctgttcaacattgaacaatggttcatccctgaagccaattatttcataaggattccacaacattatctaaatgtcaaaagatgtaggttctactggagtggcagcagaggaaaaacctcttgttagtattccagaagtcaatttgcctggaattcaaaccatttcttaatattcttgcgtaataatgaaaagacaactgccctggaagtcagcataccggctgcccaccygaggcaggtccagctcactcagcaggtaatgtttttaaaagactaaaacaagttaattatgtagagataagggaaaaacgggagggagagaaagagaagc

SEQ ID NO: 264804 - DNA, 601 bp, Homo sapiens
ataatttcctttactaacaatatcagtaaaatgtgtgtttaggaggaaagagaaacatagaaattatgtcactaaattaattttaaaaattgactaactagtaagagagactaaaatagcaatcaaaaacagttcaaaaaagaaaagcccaggataaaatggcttccctagagaattctctcaaatacttagagaaaaattaacaccaatccccttaaactcttccaaagaattggaggaaatacttccaaactcatcctatgaagccagtattactctgatcccaaaatcacacgaaggcacagcaagaaaagaaaactatagaccaatatccttaatgaatattgatgtaaaaattcagtacaaattattagtaaaccaaattcaacagcacattaaaagaattatacaccatgaccaagtgggatttataccaagaattcaaggatggctcagtgtatgaaagtcaatcaatgtaatagaccacattaacaaaatgaaggacaaaaatttcatgatcawgtcaattcatgcagaaccagcatttgaaaaaatataacatcctttcatgataaaaacattcaacaaactaggaatatag

SEQ ID NO: 264805 - DNA, 576 bp, Homo sapiens
ttttaaaaattgactaactagtaagagagactaaaatagcaatcaaaaacagttcaaaaaagaaaagcccaggataaaatggcttccctagagaattctctcaaatacttagagaaaaattaacaccaatccccttaaactcttccaaagaattggaggaaatacttccaaactcatcctatgaagccagtattactctgatcccaaaatcacacgaaggcacagcaagaaaagaaaactatagaccaatatccttaatgaatattgatgtaaaaattcagtacaaattattagtaaaccaaattcaacagcacattaaaagaattatacaccatgaccaagtgggatttataccaagaattcaaggatggctcagtgtatgaaagtcaatcaatgtaatagaccacattaacaaaatgaaggacaaaaatttcatgatcatgtcaattcatgcagaaccagcatttgaaaaaatataacatcctttcatgataaaaacattcaacaaactaggaatatagtgtaaatgsctcaacataataaaagtcgcagataaaaagtccatgcctataacat

SEQ ID NO: 264806 - DNA, 532 bp, Homo sapiens
caagtgaaataaccaatattacttcaggtaatgagaagtgctataaaatattaagcaggaatagagagtggcagagttgctattttagacagagcagtcactctgaatgacatgaggaaggaagccttgcagctatctggaggaagagcacagatttgtgaatgaggagggggaatatgtcatgcatgtatctgggtgaggagaattataagcagagggaacagaggccctgagatggaaagttagttggcyagaagggaggctatggctagagcagagtgaatgaggtaagtgcagaaggagagtggtagaaaataaataaagagccacaggcaatggccagaccctggcagatcttacaggccatagtaaggacttgagatttaattccaagtaggaagaaaagcccttggaagacaggggatgacaagaagagctttatatttttgatgattcatgatgaatatagaggatcgaatacagacccgccaggttaagagtggacacagagagatctttgggaaagatgaag

SEQ ID NO: 264807 - DNA, 522 bp, Homo sapiens
caataatatttccaaaatggcttacactgttttgactagcagttttctttagctctgaaattaacttcaaattctttaatttcatatttgaaaacagacaacagctgcatgttcttcccacacgcaatgatctcctttctaataatgcagtctgctgttttcggaaacaaagattaaagagtagtcgcaaacttcctaaataactttgatgagactagtttaatttcttccccraaagcaaaaataaacagacattaattctcagtcattttctctgtctttatgcaactcaaacccctgtgttctttcatcattatcagggatagattcagtcctttatctaacaactcaaatgtgtaccagtttctcttcttgggccatggaattcaggaagtatggcatattttcagaaaggactaatatatattaatctttcatttctccactttgtgaggaaactgaagtacaagagttattttaggtattctttacaacatagaatgaagatgctaaaacaaaggg

SEQ ID NO: 264808 - DNA, 607 bp, Homo sapiens
cacagtatttcacttcaatttaatctttgtttatgcacactcaggtatgtgtgtgtgtgtgtgtgtgcgcgcacaggcatacaaagaaaatgacatctggtacctaggaaaaggaaaggcatagacgggctgggaaaacaacacacactagatttgtgtctgaacataaactaagccacacacactaccattcgcagttacagactataatacccagtggggccacaacttagagcttgtataataaaaatataaaaaagataaaaagaggggcgagggrgaggatatttgtaaaggcatgttttaatgtataattattctataaatgaagattaaagtagtaagacagaaggaaaatagatggaatgtatatgcttcaaagaaaaataaattctagataatggttttagccaaatatataacccatgcctgctcttcctggcttcacccacagacccatattttccctcaggatcttcatggctttccctgtccctattaattttgattcccagtatgtgctcctcatcttattaatgagtgcttaatctttcttctccaaatttaaatgagacaacctagcaaagaacaatgggcctggagtcag

SEQ ID NO: 264809 - DNA, 607 bp, Homo sapiens
cacagtatttcacttcaatttaatctttgtttatgcacactcaggtatgtgtgtgtgtgtgtgtgtgcgcgcacaggcatacaaagaaaatgacatctggtacctaggaaaaggaaaggcatagacgggctgggaaaacaacacacactagatttgtgtctgaacataaactaagccacacacactaccattcgcagttacagactataatacccagtggggccacaacttagagcttgtataataaaaatataaaaaagataaaaagaggggcgaggggraggatatttgtaaaggcatgttttaatgtataattattctataaatgaagattaaagtagtaagacagaaggaaaatagatggaatgtatatgcttcaaagaaaaataaattctagataatggttttagccaaatatataacccatgcctgctcttcctggcttcacccacagacccatattttccctcaggatcttcatggctttccctgtccctattaattttgattcccagtatgtgctcctcatcttattaatgagtgcttaatctttcttctccaaatttaaatgagacaacctagcaaagaacaatgggcctggagtcag

SEQ ID NO: 264810 - DNA, 561 bp, Homo sapiens
gtttgccattgtttttagaatgtaatataaatatctcaacaggaataagcgatcctscatgcctctattttccactctagtctcatctgtaaccaccctcctctcctgcctggtctatactatgctccaactccaaccatactgtaaatcatttctcatccccctccaccatccctacctttggttcattgcatatgttatttctgcagcctggaaaaccttccactctcccaccctactcactctttaggtctgagctcagtcacaatcccctccaggaagtctaccttcacaactcttccttcccaatccttcccctgcctactccccacccccagcttaggatgggttatgacacgtatttcctctgttctcacacagcaccttctaatatcctcatcaaggtacttaccacctatgtaaccggcgactggctccttgtctctctgcaactatacacccctaaaagcaccaatgtttcagtcattatagaaccatcggcacctactactgttgtaggtttgtagtagatattcaataagtatttatttgaattaataa

SEQ ID NO: 264811 - DNA, 500 bp, Homo sapiens
taaactgccttaagtcccaatcccaaacaataatttagtggattacttacagaaaagttcaggaatgtggtttcagacacagctggtttcaggggctcaagcaatttcttcaagttttggagtcagtgcgtgtctgtgagtttgtctctctcgcttcccttcgckgtctctatgattcacctctgccttcctctaagctgacttttgtcaccagcaagccctctccagaagacagaagaattgaaacacactttccctctctcaaggtctctagcaaaaatatttgaattcaatttccttgggccagtttgagtgtaagcttattcctgactctcttgctgtggccagggtgttggaacacattgattggctaggccagggccactttcccacttctgatttgggggatggagcataagttggatgcaatgggctgaatgggagaggtctttccttaaagtgaaaagggagctacactgggaagggaaaaacaatagatg

SEQ ID NO: 264812 - DNA, 500 bp, Homo sapiens
taaactgccttaagtcccaatcccaaacaataatttagtggattacttacagaaaagttcaggaatgtggtttcagacacagctggtttcaggggctcaagcaatttcttcaagttttggagtcagtgcgtgtctgtgagtttgtctctctcgcttcccttcgctgtctctatgattcacctctgccttcctctaagctgacttttgtcaccagcaagccctctccagaagacagaagaattgaaacacactttccctctctcaaggtctctagcaaaaatatttgaattcaatttccttgggccagtttgagtgtawgcttattcctgactctcttgctgtggccagggtgttggaacacattgattggctaggccagggccactttcccacttctgatttgggggatggagcataagttggatgcaatgggctgaatgggagaggtctttccttaaagtgaaaagggagctacactgggaagggaaaaacaatagatg

SEQ ID NO: 264813 - DNA, 496 bp, Homo sapiens
acaacagtgctgatagagtgcatattatgtgcaaggcaatgttctaaatgtttataatataacctaataaaatatttgcaaaaaccctrtcgggggtgctatcactttacagatgataaaacagttacataaaggtataatctatgcccaagctcacataattaataagtatgggcattgaaaaactattgtccatggacccaatttggtccgtcacattgtttcatatgcttgagaactaggagtggttctttaacatttttaaatggttggggaaaaagtataaagaaggtaacatttcacgatgggaaaattatatgaaatttaaatttccatggataagattttactggaacacaatacaatttgtgtatattcactggttgcttttatgctgcaacagtaaagttctgtagttgtgacagagaccttacagactgccaagctgaaagtattgagtatgaggtcgtttaaagaaaaagtttgcagatgcctg

SEQ ID NO: 264814 - DNA, 496 bp, Homo sapiens
acaacagtgctgatagagtgcatattatgtgcaaggcaatgttctaaatgtttataatataacctaataaaatatttgcaaaaaccctatcgggggtgctatcactttacagatgataaaacagttacataaaggtataatctatgcccaagctcacataattaataagtatgggcattgaaaaactattgtccatggacccaatttggtccgtcacattgtttcatatgcttgagaactaggagtggttctttaacatttttaaatggttggggaaaaagtataaagaaggtaacatttcaygatgggaaaattatatgaaatttaaatttccatggataagattttactggaacacaatacaatttgtgtatattcactggttgcttttatgctgcaacagtaaagttctgtagttgtgacagagaccttacagactgccaagctgaaagtattgagtatgaggtcgtttaaagaaaaagtttgcagatgcctg

SEQ ID NO: 264815 - DNA, 542 bp, Homo sapiens
acgccctgtgtcttgaggtttcagctaaaaataagcacaaagaagtcaatctctctttcagttagcattccactgcaggtatcaccagcgtcttgaagtaattcagaaactgaaaataaaggagcaagccctgaagagtatgtagataaaacatactaggtcccatacattgttcattgcaacaacaacaacaaagactgtaggtaagatgggagcagtcatcaaaatgacaaacaatgacctcgtcccccgttaactgttcttaattgtcccagccccattcaactgtcatcaaatctccatttgggcttccatatctgccagtctcatacccagtctaagtgaagtttttccagatctttttcccaaaagtttaactcacatttattgagcatcacctgtgtaccaggcagtgatgtgcttataaatgttcaacaacccgttctggttgaagtgaagccttattcccatataatgtttgccagtttccatggtgaattctttcrctgtggccaattttaagataccagtgtggcttgagc

SEQ ID NO: 264816 - DNA, 595 bp, Homo sapiens
tcattgtgatttgcatttgatttctctaatgatcagtgatgctgagcatttattcatatgcttgttgtccatgtgtatgtctttttttgaaaactgttcatgtcctttgcccactttttaatgcggttggttgctttttgcttgttaattcgtttcagttccttatagattccagatattagacttttttcagatgcatagtttgcaaatatcttctcccatcctaaaggctgtctgtttactctgttgatagtttcctttgctatgcagaggcactttagtttaaataggtyccacttgtcaatttttgttttggttgcaagtgcttttggtatcttcatcatgagatgcttgccagggcctacatccagaatgctatttactaggttatcttccagggttttatagttttagtttttacaattacttaatttatattgagttgctttttgtacatggtgtcaggaatgagtccagtttcaatattctgcatatggctagtcagttattccagcactatgaataaggagtcatttctgcattggttgttttcatcagctttgtcaaagatcagacagctgtaaatgtgtggctt

SEQ ID NO: 264817 - DNA, 413 bp, Homo sapiens
tcaatgagttaatatgtttaatatacttagagcctaagttagtttcaaaactaatggtctataggatcaagatcagatcttatagtcaaacctcaggaaatcaacctagtagataaggaaatatcagacccagctaacaaatcaggctctgaagtctagaagatctacattccctgagtgttgtgtccccatacatacagggacaggaatggaaaagctataattctttgcatatagcaatatatcatctctcatcctgttacatggcaggaagcactccatgcatggataaacatgctcattctctccataataaccaggattgaaatrattatatttgtcaattctgttaaatctatggctttaaaatgatactaagaaaatattagttctccagtcctttccagagtaca

SEQ ID NO: 264818 - DNA, 569 bp, Homo sapiens
gtgtcccttcaaataatattctttaaacataggtttaaaatttatttagaagagatgtyacatgttgcattgagacaacagtagagaagaaaagctctgctggccataccatcctcttacaagaaagtctggcctgagactcactctagaactgggtttatcaacattagcaccattgacatttggaagctgcataattttttgttggggtggggagtgggcatatcccgtccagtattgaatgcacagcaaaatccctggcctctactcacaagaggccagtagcctccccataccagctgtgacaaccagatatgtctcagacactgccaacagtttcctgggggcaaatcggcccctgagaaagaatcacttctctagagaggcagggatggtatttagctgaccagcaccaacgggaccatgctggtgtccgttgcctgcatctgtactgttggggctgcatccataccatgctacttgtgaaatatctataatatcagccctgtggaggaatgggatgaacaagccccttggaatatcactactctatcatgggcaagggatgc

SEQ ID NO: 264819 - DNA, 572 bp, Homo sapiens
tgataatccttattacatcaagagacaattcacatgaaaattctttacacacataagatgttattaagtgctgtgacacagcayaattaatgtaaagaccttacaagattcaaaatgccttgtttccctgaacatcaaagctcgtactacaaggaatatttcgtgacatgaaaaaatgtgcctacctactacaaaaggaacaaagctgagcacaaaaatattatgtatgccttgatacgtgtaaatacatacacaacagtaggtctagacacaaaaatcatatgttatattaaataaaacttttatagaaatttcatcttatgtatatacatatccaaatacatatccaaaaaaaatatgtgtatatatatatagaaatatgtacatactgtacatacccttttaaaagactagaagagtataagagaaaatattgacaatggttatcttgccatagtgcctttttgttttccaaacttctgcactgagcagataatgctttataattagaaacatagccagaagggttaatttttaataaatattatatacaggtaacgtgaagtctcctg

SEQ ID NO: 264820 - DNA, 438 bp, Homo sapiens
ccagatagatctgctaacattttactctgaactattttcttgtttatgcttcctggctgtccacccaccttaattaacctgcttcttggagagactggcccccgtgctggctgaagcaacagcttcccctcactaatgagtccctagaaggaaggttataaggtattctctgtgcttgctgragccaagctggcagagatgcacatgtctcacacttattagagcggctgtgaagttcacctggcctggtctatcttaaaattcacactgcctcgcctttcactccccagtctcccttcacactatccagggtgaacccagatggagtccatctatcgaggagtctcactgctgggaacagggccggttcagacctcttagctagcaggtctgctttgaggagacagagttatccctgctgttcaagtgtgccctgcc

SEQ ID NO: 264821 - DNA, 581 bp, Homo sapiens
acgtgtacttcaccacaacaccacagcttctggcacatgcaagcaagcactgatcctgctgccaccaccccagtgatgtgctttggccagcaccccccatcagagtgttataaccagcagactgagaacccttcagcccctccaggacagcaggttcctagtcctgaggggccaaagaacaaagctggggtcctagtatcagcccctcagagttagaggacacaatccacgggtactgagctgagcactggtcacccaaaattttccagaaccaaacccagtcagctgaacctaccttataccacagtcaaaccctcaagcacatcaaagaaaatacaagaaaaamaatccaaaggacaccaactgcaaagattaaaggaacattagcccacacagatgagaaagaactagcaaagaactctggccactaaaaagccacagtgtcttcttacctctaaatgactgcactatttccctagcaatggttcttaaccaggatgaaatggcttaaatgacagaaatagaattcagaacatgtatagtaacaaagatcatcaagattcaggaaaaagttgaaaccc

SEQ ID NO: 264822 - DNA, 460 bp, Homo sapiens
tgaatttctatccctgctctctccaaaagtaacagaacaaaaaaataccagagctagatgaatttgtgggataattttaataaatccttaaaaagcacttccaagtgaattaaaacttcccaagaagtagagaaaattgaaacttccaaatttattttgatgaagtagatattagttgtacacacacatatacaccaactactgccttacctcacttattttgtcaatataaaaatgttttacaaaccattaggaaagagaatccagcaataaacttaaaggatacttgataaaaatcaacagttcataaaagaaaatccaatcatacaagaaaagctggacacattcgtaatatctcagtcccaaagccagtatcacacttaacagtgaaacactaactacaggcatcccagtgtaattccaaaacagarcatgagcacccaccatcaccagtttgatt

SEQ ID NO: 264823 - DNA, 562 bp, Homo sapiens
aaatataccaacatgcacaagtaggggttattatcatattgataataatgcctggctaacagtaggcgcttgatagcagtctctcaggtgcatgtgcatggatgagtgaagtctgtagtcgtttatatttgggggctatgtatttcctgatgctctaaaaatgggattgatttttgtgctgatacaatctacttgggactcattctacttgatagccaatgatgcgcatttacaagacagcctcccagggcaaagatggggactgaggagtacaacaaagccaactgggcagccaggagtgagtctgtggtccttcagttccatagtctgatcaggtgagctgaatgtggctcaacccacggtgcatccttacaagccattctctatgaagaagctcaaggcacaccttaaactatatttcacatttttccactcacctaattaaaactatcyagtggttttccaactcacatggactaaagccaaagtcctcaccacattctacaagtctatatgatctggctcctgcgtatttctctactcttacttctgcccgctcacc

SEQ ID NO: 264824 - DNA, 614 bp, Homo sapiens
agagggccaggatctattttttccctcatcccttaactttttgtttctcatttcccagtcttttacatttgtgtctttttttcttctcattgcctttttcttctacttctcatttgtgttcctgttcattttgcactgccttttgggtgggaaaaaatcaytttctatttggaggttgagctaaaaatgaatctcacattgcatagtgtcatgatacttcctgtgtaacaccattaaacatcccctgagagcaacataggcctaggagcctcatcactgattaattgcttcatgccaattttcatgtaggctacactttgactttcgacatctcacttaatttgtacaatgccaagacaaataattattcccatttggcaggtgagggggatgaggctcagagatgaagttgtggtctatgattgtgagatttattaacaccggagatgggcttagattccaggtttagggctctatatcaaagttgtggtatacacatcacataggatcttgttaaaatgtagatcagcattcattaggtctggagcaaggctggagattatgcatttttaagaagcttcaagatgatgctggttctgctgtactgtgacacc

SEQ ID NO: 264825 - DNA, 614 bp, Homo sapiens
agagggccaggatctattttttccctcatcccttaactttttgtttctcatttcccagtcttttacatttgtgtctttttttcttctcattgcctttttcttctacttctcatttgtgttcctgttcattttgcactgccttttgggtgggaaaaaatcattttctatttggaggttgagctaaaaatgaatctcacattgcatagtgtcatgatacttcctgtgtaacaccattaaacatcccctgaragcaacataggcctaggagcctcatcactgattaattgcttcatgccaattttcatgtaggctacactttgactttcgacatctcacttaatttgtacaatgccaagacaaataattattcccatttggcaggtgagggggatgaggctcagagatgaagttgtggtctatgattgtgagatttattaacaccggagatgggcttagattccaggtttagggctctatatcaaagttgtggtatacacatcacataggatcttgttaaaatgtagatcagcattcattaggtctggagcaaggctggagattatgcatttttaagaagcttcaagatgatgctggttctgctgtactgtgacacc

SEQ ID NO: 264826 - DNA, 614 bp, Homo sapiens
agagggccaggatctattttttccctcatcccttaactttttgtttctcatttcccagtcttttacatttgtgtctttttttcttctcattgcctttttcttctacttctcatttgtgttcctgttcattttgcactgccttttgggtgggaaaaaatcattttctatttggaggttgagctaaaaatgaatctcacattgcatagtgtcatgatacttcctgtgtaacaccattaaacatcccctgagagcaacataggcctaggagcctcatcactgattaattgcttcatgccaattttcatgtaggctacactttgactttcgacatctcacttaatttgtacaatgccaagacaaataattattcccatttggcaggtgagggggatgaggctcagagatgaagttgtggtctatgattgtgagatttattaacaccggagatgggcttagattccaggtttagggctctatatcaaagttgyggtatacacatcacataggatcttgttaaaatgtagatcagcattcattaggtctggagcaaggctggagattatgcatttttaagaagcttcaagatgatgctggttctgctgtactgtgacacc

SEQ ID NO: 264827 - DNA, 450 bp, Homo sapiens
aagtcatgagaatgctggaactttgtaactacatgtcaaaggcactagaccaaattagtagggttctaggaaatgaactagtcaattcaacatcaacaccctctaaccaactctgaagtttatttctgttgttttttaaatttatttttgagggaggaatgtgtagtgaatgttggctgtgacctgactcactggtactgaaaagaacagcaaccattagccatagtacataatttttaccttttwcttgtattggaccatttctattttatagctaattgcttatctagagcagtgaatttcaaccctagctgcccattagaatcacctagagagctttagaaaaatagatgcccaggtcctagctcagttcaatgaaaggaaaatctctataactggggcctcctctagttatttaatttccctagttatttacaaaattgaggtaat

SEQ ID NO: 264828 - DNA, 525 bp, Homo sapiens
gaaaacatttctccaagtgctttatactgcaggacaatataataaggacttggactcaatgaaaacaagacttcaaagagacatgtgacagaacaaaaagaagaagaaaatgcagactcaggaaacaaatcgaagacaaaaagtcttatcattccaggaccaataaatgaattatataaacaaaatgaatctgaaaatatataactgaaaagtaaaatgttgattaataggaaatgcttaacagcaataaatgcagatttgaaagaccataaaattgaaagagttagagaaaagcaagtagataaggaagaatgacaaagaatgcaacttacyggctggttatcagaatccaaattattgatgttcctaaaggatcaataaatataacccaagaagtataaaacaataatgaaaatttccctgaaaggggagatggagacctgactccagaacaaaagagttcacacttcattatgtggaaatttgacacaaaatgttcagcacaactttatcttagtttaacat

SEQ ID NO: 264829 - DNA, 592 bp, Homo sapiens
gtcctccactcgtttgaacagtcatgcatgatgctgttaggagacctggagatgcagagtattgaagtccagaataaaattggaagtaatattgccyttgctccaaaatacaggttgaaaaattcaagaaaactcacagcattctactcattaatattgctaataacttctcatctatttcgtatcctacttcagaaaaccatggtgtcacactagagtgtgagtccacaaatagcaaagatttctatggcagacatctagttttgaatatttttaaaactgatgggcttcaatcacaaacactgaactttctcagctttcttagcaaaatctgtgcaacttgaggtggggggtacagtatccatgattgctacagtaaaatattgcctcaatttaataatcaagtcagcccaaattcagatcgatgtctctagattgggcataccaaggatttgaaagtttgaaacatgagaccctacctctcttttcttctttcagatccggtgacttgggttggattttgggctgcaattttgttatttctatttcttataaatcttcgttggcaaggaatgttgggcttttgcttaat

SEQ ID NO: 264830 - DNA, 592 bp, Homo sapiens
gtcctccactcgtttgaacagtcatgcatgatgctgttaggagacctggagatgcagagtattgaagtccagaataaaattggaagtaatattgcctttgctccaaaatacaggttgaaaaattcaagaaaactcacagcattctactcattaatattgctaataacttctcatctatttcgtatcctacttcagaaaaccatggtgtcacactagagtgtgagtccacaaatagcaaagatttctatggcagacatctagttttgaatatttttaaaactgatgggcttcaatcacaaacactgaactttctcagctttcttagcaaaatctgtgcaacttgaggtggggggtacagtatccatgattgctacagtaaaatattgcctcaatttaataatcaagtcagcccaaattcagatcgatgtctctagattgggcataccaaggatttgaaagtttgaaacatgagaccstacctctcttttcttctttcagatccggtgacttgggttggattttgggctgcaattttgttatttctatttcttataaatcttcgttggcaaggaatgttgggcttttgcttaat

SEQ ID NO: 264831 - DNA, 592 bp, Homo sapiens
gtcctccactcgtttgaacagtcatgcatgatgctgttaggagacctggagatgcagagtattgaagtccagaataaaattggaagtaatattgcctttgctccaaaatacaggttgaaaaattcaagaaaactcacagcattctactcattaatattgctaataacttctcatctatttcgtatcctacttcagaaaaccatggtgtcacactagagtgtgagtccacaaatagcaaagatttctatggcagacatctagttttgaatatttttaaaactgatgggcttcaatcacaaacactgaactttctcagctttcttagcaaaatctgtgcaacttgaggtggggggtacagtatccatgattgctacagtaaaatattgcctcaatttaataatcaagtcagcccaaattcagatcgatgtctctagattgggcataccaaggatttgaaagtttgaaacatgagaccctacctctcttttcttctttcagatccggtgacttgggktggattttgggctgcaattttgttatttctatttcttataaatcttcgttggcaaggaatgttgggcttttgcttaat

SEQ ID NO: 264832 - DNA, 307 bp, Homo sapiens
ggtgggatgagtcaggtgagggtatttatttcccctattcccttccttcctattcactgaaggctcccattaggaatccatctctacagctccctctcaaagttgtggtcatcactcactccactttcccttttggtctagggatggtaatagttcccagttattgctagtctcagggtgcttcaccatcctcttttggtrtttcttaaccctagtcccacctttcaaatagtctatttaattatcttcaaattactccatttgattttgccatttgttggagcctggattgatgctgtggggaagg

SEQ ID NO: 264833 - DNA, 543 bp, Homo sapiens
aattgaactccaggtgcagagacacctggaaggggtctccagcaggcccgtagctgccaaagtcccagtctcasatcgaagtaagcccctaaattggaggaaaaacacagaagctcaagtctccttgatgctcacaaatggtcttctgtgcttacttcccctatagaactgagaggcaaggcacagcctaatgagtccagtgactgttggggtcaataattctcactggggagagaaagtctcttgaagatatattgaaatcccaggagggtgaagtctagaccagccccccaactgatggatacccaacatttacaatttcttacaatttaaataagctcatttaaaattactataaatccagaacctataaaagaatagacatgttgattcttctactcagctcagaaaaaaaaaaaaaaaactgcaatgcagaagaaagaacacaggaattaggacctgagagactgaattgtagtcccaactctgccacttgttagatacctttactgaataaatcccttcccctccctcaggctcaat

SEQ ID NO: 264834 - DNA, 543 bp, Homo sapiens
aattgaactccaggtgcagagacacctggaaggggtctccagcaggcccgtagctgccaaagtcccagtctcagatcgaagtaagcccctaaattggaggaaaaacacagaagctcaagtctccttgatgctcacaaatggtcttctgtgcttacttcccctatagaactgagaggcaaggcacagcctaatgagtccagtgactgytggggtcaataattctcactggggagagaaagtctcttgaagatatattgaaatcccaggagggtgaagtctagaccagccccccaactgatggatacccaacatttacaatttcttacaatttaaataagctcatttaaaattactataaatccagaacctataaaagaatagacatgttgattcttctactcagctcagaaaaaaaaaaaaaaaactgcaatgcagaagaaagaacacaggaattaggacctgagagactgaattgtagtcccaactctgccacttgttagatacctttactgaataaatcccttcccctccctcaggctcaat

SEQ ID NO: 264835 - DNA, 543 bp, Homo sapiens
aattgaactccaggtgcagagacacctggaaggggtctccagcaggcccgtagctgccaaagtcccagtctcagatcgaagtaagcccctaaattggaggaaaaacacagaagctcaagtctccttgatgctcacaaatggtcttctgtgcttacttcccctatagaactgagaggcaaggcacagcctaatgagtccagtgactgttggggtcaataattctcactggggagagaaagtctcttgaagatatattgaaatcccaggagggtgaagtctagaccagccccccaactgatggatacccaasatttacaatttcttacaatttaaataagctcatttaaaattactataaatccagaacctataaaagaatagacatgttgattcttctactcagctcagaaaaaaaaaaaaaaaactgcaatgcagaagaaagaacacaggaattaggacctgagagactgaattgtagtcccaactctgccacttgttagatacctttactgaataaatcccttcccctccctcaggctcaat

SEQ ID NO: 264836 - DNA, 543 bp, Homo sapiens
aattgaactccaggtgcagagacacctggaaggggtctccagcaggcccgtagctgccaaagtcccagtctcagatcgaagtaagcccctaaattggaggaaaaacacagaagctcaagtctccttgatgctcacaaatggtcttctgtgcttacttcccctatagaactgagaggcaaggcacagcctaatgagtccagtgactgttggggtcaataattctcactggggagagaaagtctcttgaagatatattgaaatcccaggagggtgaagtctagaccagccccccaactgatggatacccaacatttacaatttcttacaatttaaataagctcatttaaaattactataaatccagaacctataaaagaatagacatgttgattcttctactcagctcagaaaaaaaaaaaaaaaactgcaatgcagaagaaagaacacaggaattaggacctgagagactgaattgtagtcccaactctgccacttgttagatacctttmctgaataaatcccttcccctccctcaggctcaat

SEQ ID NO: 264837 - DNA, 607 bp, Homo sapiens
gtgtctcagtccattttgtgccactgtaataggatatcacagatgagatmattgacaaacagtagaaatttctcatggtactggaggtggaaagctcaagatctaggtactggcaggtttgcgtctgatgagagctcagtgtttactttgaagacgtcaccttaaacacagcatccttcagatgggaggaactctgttccttcagggcagaagagcagaatagcaaggagagagaacccactctccaaagcccttttttaaaggcattaaacccaccaatgagaccagagccctcctggcctaatcactacttaaaggcaccacctcttaatactcttacgatggcaattaaacttcaacctgagttttgaaggagacaaacattcaaatcacagcaacggaaaaaaccacaggttgaataacacctctaaattcatccagcaaaggcaatactcaatcccacatcttctgaatccaaattctgattcattttacatcacgacgctgcctttaatgtctcctctttcataatcgacctgaatctctgctttattttcttttcctctgtctacaaaaggggagcaattatctttaggcccaacacctc

SEQ ID NO: 264838 - DNA, 652 bp, Homo sapiens
tgtgctttgaccacgtttttcttaaagtgaggtgctcagagctaagtcaacattccaggtgagacatgaccagggcccaggagagcagaattcaacctccttcatttttctgtataccataattaggatgccactgtgatacaagacaatcttagtactgaattcctagagcaattattttctgagcaacaggcttggtttttaatcatacattgtcctataatatcacttcacttgtcatgaattgttacccatttcactttatataagtgaactatatatgtgtgtgtgtgtgtgtgtgtgtttcttcatactgtctatgttgggagttccctgaaatatatgtttttagacattttaatgactcctgttaaatctagcacgtttctgggaccataaaaatgaatctaattcgaatatttagggagaaccaaagcaaagggacagcatttattaaaatktaaaatggccactgtggaaatggagtcaagctattctgtgcacacagtgttgctgggataaaacacgctagaagaaatggcggtaagttcttatttggtcaatgaatcataattccccaaaagacaagcatgatgcttatggcagcccttagtaataattcttcatgtgtggttttcttgctcatattttc

SEQ ID NO: 264839 - DNA, 652 bp, Homo sapiens
tgtgctttgaccacgtttttcttaaagtgaggtgctcagagctaagtcaacattccaggtgagacatgaccagggcccaggagagcagaattcaacctccttcatttttctgtataccataattaggatgccactgtgatacaagacaatcttagtactgaattcctagagcaattattttctgagcaacaggcttggtttttaatcatacattgtcctataatatcacttcacttgtcatgaattgttacccatttcactttatataagtgaactatatatgtgtgtgtgtgtgtgtgtgtgtttcttcatactgtctatgttgggagttccctgaaatatatgtttttagacattttaatgactcctgttaaatctagcacgtttctgggaccataaaaatgaatctaattcgaatatttagggagaaccaaagcaaagggacagcatttattaaaatttaaaatggccactgtggaaatggagtcaagctattctgtgcacacagtgttsctgggataaaacacgctagaagaaatggcggtaagttcttatttggtcaatgaatcataattccccaaaagacaagcatgatgcttatggcagcccttagtaataattcttcatgtgtggttttcttgctcatattttc

SEQ ID NO: 264840 - DNA, 652 bp, Homo sapiens
tgtgctttgaccacgtttttcttaaagtgaggtgctcagagctaagtcaacattccaggtgagacatgaccagggcccaggagagcagaattcaacctccttcatttttctgtataccataattaggatgccactgtgatacaagacaatcttagtactgaattcctagagcaattattttctgagcaacaggcttggtttttaatcatacattgtcctataatatcacttcacttgtcatgaattgttacccatttcactttatataagtgaactatatatgtgtgtgtgtgtgtgtgtgtgtttcttcatactgtctatgttgggagttccctgaaatatatgtttttagacattttaatgactcctgttaaatctagcacgtttctgggaccataaaaatgaatctaattcgaatatttagggagaaccaaagcaaagggacagcatttattaaaatttaaaatggccactgtggaaatggagtcaagctattctgtgcacacagtgttgctgggataaarcacgctagaagaaatggcggtaagttcttatttggtcaatgaatcataattccccaaaagacaagcatgatgcttatggcagcccttagtaataattcttcatgtgtggttttcttgctcatattttc

SEQ ID NO: 264841 - DNA, 652 bp, Homo sapiens
tgtgctttgaccacgtttttcttaaagtgaggtgctcagagctaagtcaacattccaggtgagacatgaccagggcccaggagagcagaattcaacctccttcatttttctgtataccataattaggatgccactgtgatacaagacaatcttagtactgaattcctagagcaattattttctgagcaacaggcttggtttttaatcatacattgtcctataatatcacttcacttgtcatgaattgttacccatttcactttatataagtgaactatatatgtgtgtgtgtgtgtgtgtgtgtttcttcatactgtctatgttgggagttccctgaaatatatgtttttagacattttaatgactcctgttaaatctagcacgtttctgggaccataaaaatgaatctaattcgaatatttagggagaaccaaagcaaagggacagcatttattaaaatttaaaatggccactgtggaaatggagtcaagctattctgtgcacacagtgttgctgggataaaacacgmtagaagaaatggcggtaagttcttatttggtcaatgaatcataattccccaaaagacaagcatgatgcttatggcagcccttagtaataattcttcatgtgtggttttcttgctcatattttc

SEQ ID NO: 264842 - DNA, 520 bp, Homo sapiens
tctgcatgccttgggaagatctaagtgaagaacaatagcaaaggcaacaaccagggcaaaggtgctgtggtgggaggagcttgatgtgctagaagaaggagaaggcctgtccgtgtagcttcactattatggtggagggccagtggtgaaggrtggggctggaggtgtagtcagggccacatgacagagaccagataagcagtatggatctcattccaagtacaatagggatctggggaatgcaaggacctgattttcattcgtaaaggatcatccgggatgttctgtgagaatggagtagaagaaaaaagtagggcagagtcgtggcggagcccatggtatccactgggagatgttgttcattggatatggtcatattccatgctgatgaggcccagcaggagagggttttctaacagcagaagtggtctgtttgtaaaatcacataagacactttccggtgttggggcacagaaaatgatacccccaaacatggcactttggcacattgagtactttg

SEQ ID NO: 264843 - DNA, 520 bp, Homo sapiens
tctgcatgccttgggaagatctaagtgaagaacaatagcaaaggcaacaaccagggcaaaggtgctgtggtgggaggagcttgatgtgctagaagaaggagaaggcctgtccgtgtagcttcactattatggtggagggccagtggtgaaggatggggctggaggtgtagtcagggccacatgacagagaccagataagcagtatggatctcattccaagtacaatagggatctggggaatgcaaggacctgattttcattcgtaaaggatcatccgggatgttctgtgagaatggagtagaagaaaaaagtaggrcagagtcgtggcggagcccatggtatccactgggagatgttgttcattggatatggtcatattccatgctgatgaggcccagcaggagagggttttctaacagcagaagtggtctgtttgtaaaatcacataagacactttccggtgttggggcacagaaaatgatacccccaaacatggcactttggcacattgagtactttg

SEQ ID NO: 264844 - DNA, 520 bp, Homo sapiens
tctgcatgccttgggaagatctaagtgaagaacaatagcaaaggcaacaaccagggcaaaggtgctgtggtgggaggagcttgatgtgctagaagaaggagaaggcctgtccgtgtagcttcactattatggtggagggccagtggtgaaggatggggctggaggtgtagtcagggccacatgacagagaccagataagcagtatggatctcattccaagtacaatagggatctggggaatgcaaggacctgattttcattcgtaaaggatcatccgggatgttctgtgagaatggagtagaagaaaaaagtagggcagagtcstggcggagcccatggtatccactgggagatgttgttcattggatatggtcatattccatgctgatgaggcccagcaggagagggttttctaacagcagaagtggtctgtttgtaaaatcacataagacactttccggtgttggggcacagaaaatgatacccccaaacatggcactttggcacattgagtactttg

SEQ ID NO: 264845 - DNA, 520 bp, Homo sapiens
tctgcatgccttgggaagatctaagtgaagaacaatagcaaaggcaacaaccagggcaaaggtgctgtggtgggaggagcttgatgtgctagaagaaggagaaggcctgtccgtgtagcttcactattatggtggagggccagtggtgaaggatggggctggaggtgtagtcagggccacatgacagagaccagataagcagtatggatctcattccaagtacaatagggatctggggaatgcaaggacctgattttcattcgtaaaggatcatccgggatgttctgtgagaatggagtagaagaaaaaagtagggcagagtcgtggcggagcccatggtatccactgggagatgttgttcattggatatggtcatattccatgctgatgaggcccagcaggagagggttttctaacagcagaagtggtctgtttgtaaaatcacataagacactttccggtgttggggcacagaaaatgatacccccaaacrtggcactttggcacattgagtactttg

SEQ ID NO: 264846 - DNA, 582 bp, Homo sapiens
gcacctagcctctagtaccactttctaatgactccataacctgacatrttcaggaaatggctaatgatctaggagaccaactcaagaacaaatgaagcagtcaagtagttttctttttgagaggaaagagggtgcaattactaattaaactaggacaacaggcataaatccacacagttcaggcaaaccatgatgaatgatcaatctattcaagaacctcaatctcagtatgtggcacagaagtaaactcatcaacttcgtttcaaaccttatctttctcctatattctctatagtatttactaatatcaccatccatctaggtatccaagccagaaacctgaaagtagtctctgacatgttctttctaccccttcatccccatatcctcatcctactccttcaacttggcctcatgaatatttcttggatgtatttgtttctctatatcctactctaactgctctggtacaggctcccacctttctagctggtctataatgctaacaaagtgctgtctgtttcaacttgatgaatacacacatattgccgacttggtgtaaaggaaaaattgtgtttagca

SEQ ID NO: 264847 - DNA, 582 bp, Homo sapiens
gcacctagcctctagtaccactttctaatgactccataacctgacatattcaggaaatggctaatgatctaggagaccaactcaagaacraatgaagcagtcaagtagttttctttttgagaggaaagagggtgcaattactaattaaactaggacaacaggcataaatccacacagttcaggcaaaccatgatgaatgatcaatctattcaagaacctcaatctcagtatgtggcacagaagtaaactcatcaacttcgtttcaaaccttatctttctcctatattctctatagtatttactaatatcaccatccatctaggtatccaagccagaaacctgaaagtagtctctgacatgttctttctaccccttcatccccatatcctcatcctactccttcaacttggcctcatgaatatttcttggatgtatttgtttctctatatcctactctaactgctctggtacaggctcccacctttctagctggtctataatgctaacaaagtgctgtctgtttcaacttgatgaatacacacatattgccgacttggtgtaaaggaaaaattgtgtttagca

SEQ ID NO: 264848 - DNA, 588 bp, Homo sapiens
cttgctttactcattttcaaattttgggaggagactgtaccaagtacctttttggtcctcctcaactcaagacatcctaattcctttgatgctctaaattacaggttcccaaagtctggtctttgaaagctctccaagtggtctgtgggttgctcaaatgcaatgggaaggttttgttagaagaggattttctactagagatttgaattctccataaaagggtacagaaatagatatttgaamattataaccacaaagatggtcacatgctaggcagacacttcaaatggtgtggggtgtgtgtgttctgtggttgcaagcagaagctttgaggtaggcggtccaagagattccttcagcatggttcacagtctgaagtctcatttaggatgaagttaagccaaactcttacagggccattaagaaatcaaagcatgccgggcccggtggctcacacctgtaatcccagcactgtgggaggccgaggcaggtggatcacttgcggtcaggagttcaagatcagcctggtcaacatggtgaaaccccatctctattaaaaatacaaaaattagcagggtatggtggcat

SEQ ID NO: 264849 - DNA, 588 bp, Homo sapiens
cttgctttactcattttcaaattttgggaggagactgtaccaagtacctttttggtcctcctcaactcaagacatcctaattcctttgatgctctaaattacaggttcccaaagtctggtctttgaaagctctccaagtggtctgtgggttgctcaaatgcaatgggaaggttttgttagaagaggattttctactagagatttgaattctccataaaagggtacagaaatagatatttgaaaattataaccacaaagatggtcacatgctaggcagacacttcaaatggtgtggggtgtgtgtgttctgtggttgcaagcagaagctttgaggtaggcggtccaagagattccttcagcatggttcacagtctgaagtctcatttaggatgaagttaagccaaactcttacagggccattaagaaatcaaagcaygccgggcccggtggctcacacctgtaatcccagcactgtgggaggccgaggcaggtggatcacttgcggtcaggagttcaagatcagcctggtcaacatggtgaaaccccatctctattaaaaatacaaaaattagcagggtatggtggcat

SEQ ID NO: 264850 - DNA, 584 bp, Homo sapiens
aatcttaatgaagaaattttgttttctctcccacaagtttccctgcacartagtcatttctctccctttatggctgtttgacaaaagttgtgtcccacaacagaattggaaatgacagttatttctttcctgaaacagttccctttctgctacagcacaggtatgaccagttacagccaccaagacataaggaaagtgtggagaaaacgttcctcattaataaaaagaaagagatgtaagaggagagtttccttcttcccttctgcctttagaagaaagtgtgagggcatgatttctgaagctttggtagccactttgcaaacatgaggatataggcctaggatgaaagccaaccagctgtgggtaggaacatggaatatagaaagagtctgagttcctaatgacagtattgtgatgctggatcaatccagcctttagactttttgtgatttgagataataaacactataaagtgtttaggccacttccacttgattttctgttacttggagagagaagcatccaaccaatacattaacaactcacaataaaggatcatgaattccccaaacttgttaaaatgg

SEQ ID NO: 264851 - DNA, 584 bp, Homo sapiens
aatcttaatgaagaaattttgttttctctcccacaagtttccctgcacaatagtcatttctctccctttatggctgtttgacaaaagttgtgtcccacaacagaattggaaatgacagttatttctttcctgaaacagttccctttcygctacagcacaggtatgaccagttacagccaccaagacataaggaaagtgtggagaaaacgttcctcattaataaaaagaaagagatgtaagaggagagtttccttcttcccttctgcctttagaagaaagtgtgagggcatgatttctgaagctttggtagccactttgcaaacatgaggatataggcctaggatgaaagccaaccagctgtgggtaggaacatggaatatagaaagagtctgagttcctaatgacagtattgtgatgctggatcaatccagcctttagactttttgtgatttgagataataaacactataaagtgtttaggccacttccacttgattttctgttacttggagagagaagcatccaaccaatacattaacaactcacaataaaggatcatgaattccccaaacttgttaaaatgg

SEQ ID NO: 264852 - DNA, 584 bp, Homo sapiens
aatcttaatgaagaaattttgttttctctcccacaagtttccctgcacaatagtcatttctctccctttatggctgtttgacaaaagttgtgtcccacaacagaattggaaatgacagttatttctttcctgaaacagttccctttctgctacagcacaggtatgaccagttacagccaccaagacataaggaaagtgtggagaaaacgttcctcattaataaaaagaaagagatgtaagaggagagtttccttcttcccttctgcctttagaagaaagtgtgagggcatgatttctgaagctttggtagccactttgcaaacatgaggatataggcctaggatgaaagccaaccagctgtgggtaggaacatggaatatagaaagagtctgagttcctaatgacagtattgtgatgctggatcaatccagcctttagactttttgtgatttgagataataaacactataaagtgtttaggccacttccacttgattttctgttacttggagasagaagcatccaaccaatacattaacaactcacaataaaggatcatgaattccccaaacttgttaaaatgg

SEQ ID NO: 264853 - DNA, 498 bp, Homo sapiens
cactttccttgtctcagatttcacatctgcaaagtggggataacaacacctcaccgtgttgttggaaagattaaatgagagactgtagagcacagaggctgtaagtagtaatcaataaataagggccattattattatcctctcaaaatatctgccacacctctaacttatttgtcagctaatggcagtgctccaccacttggccataataatattttgttcatgaccaactgtggagattttgtgaaaacttttatcttggaagaatttctcattgaggaatatgtaaaccttatgagaaaaattggattaggaaagctgaggtcacgcataaatctataaaattcatggcaaataagattatattcattaaagtcagtaaagrcagaatattaaacaatgagactatagtaatattttatgcatatcgagttagtgatgattgatttccattcaccgtttcctgcttaccagaaacttttctgggactctttggct

SEQ ID NO: 264854 - DNA, 577 bp, Homo sapiens
aattattaatatattttcagtttaatttaaagattgttatttactttgaccagaggaataatttaggaatcagaacagtagtttacatctccaagttagcaaaatgtgacagatacataatctgtattggaagtgatttaagcctggtatttgtgattcatcaaaggaaagcccatttggtctaggttgaaatagtttccttagatgaggagtactctcctttttatcagttatagtattcttcacatccattttggttccaggactaaatgacatccacgccacaccgtgtatcaaaacactctataacacatttttaaaaacctctaatacattctgattgttttataaaagagctrtcttttaaaagagcagaccaagttcatgacagagaagttctctggtgcattctgaagcaaatagaaagaaaacaacaaaaatcttagaaaactcgtaactgacaaaatcaactgcatttgttttagtttggaaacagcaccagcaccagtttctttcttctaaaagagtaagaattcacagcaagaatattatttttgtttacaagaattgtgtctga

SEQ ID NO: 264855 - DNA, 568 bp, Homo sapiens
agatggattaagccctggaggttgaggctgcagtgaactaggaccacaccactgcacttgtgccactgcactccagcctgagtgacagaataggagtctaaaaaaaaaaaaaaaaaaaaaaaaaagaataaaagaagttgtgagaaatgcacctccttaaggcccatggcagatctattgagtcaaaaatttctgagttttcacaagcactccctgtgattttggtgatgctcacttatggcatctcttttcaccatgtagtatttatttggttgtatcgctttaccatgattwatgtaaccaactcccattgttgattttttttgctgttataaacaatgctgcaacaaacattgtttttttgtaaaggctttcttcagatgtaatttatatgtcatataattcacccatttaaagtatacaatccaatggtttttagtatattcaaagaattaggcagctatcactacaatctaattttacagcattttttaatcaccccataaagaaaccctatactcattagcagtccctcctcattcctctcattcccagcacctagtaacca

SEQ ID NO: 264856 - DNA, 624 bp, Homo sapiens
ggaagtgaagtctgtgaaagataaaaggggagagagtagcatggggcatagaaagtcttcagactgtgatgaatgtctgatatctgaaatgcaagggaagaggaaacaaaatggggccaggaaaacctcagctcaacccaatggaaaccctagaacacagayggtcactagaagagttccacattgggcagaaatggacacaccctagtgcccccaccaagctcagtcattgcctgggagctgcagcagagcgtggaatcagttccaatgcccaggatgcaatctgaaggcactgccgatggaggctgttcactaactgcactttgtacagctgagcatcagattctttttttttttttaatatagaaatggggtctcagtatgttgcccagggtggtctcaaactcctgggctcaagcgatcatcagcaactgttatataatgttctattatgtctcaggctctaagcttgatctatatccacaaagagttcacagtttaaaaatcaagtaattaaaacaatacatgataagaactaacagaaatgcatgtgaattattgcagaagctcaggggaaggaaggagaaaaatatgaaatgatttaagcatttgttttacccttga

SEQ ID NO: 264857 - DNA, 582 bp, Homo sapiens
aaaacctcagctcaacccaatggaaaccctagaacacagatggtcactagaagagttccacattgggcagaaatggacacaccctagtgyccccaccaagctcagtcattgcctgggagctgcagcagagcgtggaatcagttccaatgcccaggatgcaatctgaaggcactgccgatggaggctgttcactaactgcactttgtacagctgagcatcagattctttttttttttttaatatagaaatggggtctcagtatgttgcccagggtggtctcaaactcctgggctcaagcgatcatcagcaactgttatataatgttctattatgtctcaggctctaagcttgatctatatccacaaagagttcacagtttaaaaatcaagtaattaaaacaatacatgataagaactaacagaaatgcatgtgaattattgcagaagctcaggggaaggaaggagaaaaatatgaaatgatttaagcatttgttttacccttgagaaaggaccctgtcaatctactgcatataacaccaactctagtatgtgtgttgctcaactgagcttccaaagtggtttg

SEQ ID NO: 264858 - DNA, 531 bp, Homo sapiens
gtgttcttgtcatccaggctggagtgcaatggtgcaatcttggctcactgcaacctccgcctcctgggttcaagcgattctcctgcctcagcctcctgagtagctgggattacaagcactgccaccatgcccagctaatttttgtatttttagtagagacggggtttcgccacattggccaggctagtctcaaactcctgatctcaggtgatccacccaccttggcctcccaaagtgctgggattacaggtgtgagccaccgctcctggcctctaattttatttatctaacaaaggatactttactgtattaggatacttggctattgaatataatgctgtcctattccatatatatttcccaaatatctatttgtgtgtatgtgtgtgtgtgtgtgtgtgtgtgtgtgtgtstgtgtgtatctccatataaaattgttctatatatattttccttctactcctagatgacaaagttcttatgggcagggaccagatcttacatttcttttgtacctccatgggccacttc

SEQ ID NO: 264859 - DNA, 531 bp, Homo sapiens
gtgttcttgtcatccaggctggagtgcaatggtgcaatcttggctcactgcaacctccgcctcctgggttcaagcgattctcctgcctcagcctcctgagtagctgggattacaagcactgccaccatgcccagctaatttttgtatttttagtagagacggggtttcgccacattggccaggctagtctcaaactcctgatctcaggtgatccacccaccttggcctcccaaagtgctgggattacaggtgtgagccaccgctcctggcctctaattttatttatctaacaaaggatactttactgtattaggatacttggctattgaatataatgctgtcctattccatatatatttcccaaatatctatttgtgtgtatgtgtgtgtgtgtgtgtgtgtgtgtgtgtgtctgtgtgtatctccatataaaattgttctatatatattttccttctactcctagatgrcaaagttcttatgggcagggaccagatcttacatttcttttgtacctccatgggccacttc

SEQ ID NO: 264860 - DNA, 592 bp, Homo sapiens
ggattctgcaccagtggattggagaggtgtctctgagctctgttatcctgaccatagctgcttgaaccaggggtcagcacccaacccccaaacagccatctataggttggccagcatcaaagaaaagttggcttcatgagacagctttgcccccacctgggtggtgatagatcaaaagatcagcttgtttcttaaagagagtttaaacaatagatacaggatcttgtcattaagtgttttctgatataaaaatactcccttgggtaattggtggcagcaggggagagagaaattgactcacaaaaacagacatgtctgagggaatagccactgatgttgctgagttactgacctttctgcccaatgaccaaaactaacactgtttgctaaaggatgttccagtggccacaaggcttagcagggcagctkctgggacagttttgccaattcctgtctttctcatgtgtcattatattgaacatcctttattggagttgattgggatgtttctgtttcttgtattccgaaggaactaactgacagggtgcccagtgctaggagatatagaagagcttgtggtctctattcaaag

SEQ ID NO: 264861 - DNA, 592 bp, Homo sapiens
ggattctgcaccagtggattggagaggtgtctctgagctctgttatcctgaccatagctgcttgaaccaggggtcagcacccaacccccaaacagccatctataggttggccagcatcaaagaaaagttggcttcatgagacagctttgcccccacctgggtggtgatagatcaaaagatcagcttgtttcttaaagagagtttaaacaatagatacaggatcttgtcattaagtgttttctgatataaaaatactcccttgggtaattggtggcagcaggggagagagaaattgactcacaaaaacagacatgtctgagggaatagccactgatgttgctgagttactgacctttctgcccaatgaccaaaactaacactgtttgctaaaggatgttccagtggccacaaggcttagcagggcagctgctgggacagttttgccaattcctgtctttctcatgtgtcattatattgaacatmctttattggagttgattgggatgtttctgtttcttgtattccgaaggaactaactgacagggtgcccagtgctaggagatatagaagagcttgtggtctctattcaaag

SEQ ID NO: 264862 - DNA, 478 bp, Homo sapiens
tgggacaaccttccaatatgcagtcttttgttgaccaaaatggtgttatgtggctaatgaatgcccacttaactggaaaatacaaatattccaggactgaaaaaactatgtctctgagaacctctttccctcctctaccatatataggtcctcagggatgcactcagagctttggctaaggaaaggggtgcttaccagggtggccacatgcatcctggacatcaaagggatgacattggtcacagccagttgcctcgttcccaaagatkccagaaggacattggcattgtggcaaaagagcagcaatgccagtgttcccactgggcatgtcaagttgatttagaattaggctgaggaaaggggacacttcggcctagtccaggagaccatggggtgttatttcctagcttgttcttaatttctcagctgaaggtagtgtaatagacactgattatttgtggccacctaatatctctga

SEQ ID NO: 264863 - DNA, 553 bp, Homo sapiens
taaaggctgaattgtgtccccctgatattcatatgttgtggttctatttgtatttgaagacagggtcttgaaagaggtaattaagtaataatgaggtcaccaaagtgggctctaatccaatacaattggttccttaaaagaagagattatggcacaggcacagagagaagaccatgtgaagacacagggagaagatgggatccccaagccacgaagagcagcttcagaatgaaaccaaccctgctggtgtcttgatctcagatttctagcctccagaactgtgagaaaatccgtgtctgttgtttaagccatcaagtctatggtactttgttgtggcagccctagaaaaagaatacatttcaaagaaatgaaatcatacaatatctgatccattgtgatgggcttcttttacctaccataatgttttccaggttcacctatattgtagcatacatcagtacttcattccttttatgaccaaataatcttccrttgtatagatatacacattttgttgatccattagttagctgagggacatttggattgttta

SEQ ID NO: 264864 - DNA, 528 bp, Homo sapiens
caccatgcctggctggttgcttttatttattattgtcttttacaacatttaattttgaattgttaaataaatacaaagattgtataccaaagaaagacatcacacatttgatattttgggactattaaagatccaccttataaaaacaccaccaaattgttcccagcttgccaagtaagctagatttgtttttagtttactagtctccgtttcygcatccttctccctactccagtactcccaacccattgaaagccctccagaaaagatatgacagatcctctctagccatcctctctggccgtccttttgccttaatctgccccttgcacttcctccatcactgccctggccttccatttggcacttgtctacttctccatttgcctccccacaatgagagaggctctcaagaatattcactatgtctgttgtattcttagctcttatttctgagtctggtgcatggtatctactgaataattcactgttaaaaaatgaatgaatgatgaagtaaaagtaaaatta

SEQ ID NO: 264865 - DNA, 524 bp, Homo sapiens
cttttctttgtaaatagaaggtaaagaagcaccgtaatacaaagactttgtaatgttccttctcagctgtaggtactacccgatttggtgacaaagtgtgatgagtctataaattgaatatgtattttatctcctccaggtcccaaaatatttttgtccagtatgttcttaatakctttgtattctttagattttttttaagtggtccctcaaacaactgattcagaagtatgctggcatacatgcatatttggtgatctttagtgtatttaaatgctacttgatgggaagaaatactagcaggttttttctcttctctctgcctgcagttacagattcacttccatataacactcagaatgatatggctaaagagaaacatctaaagtttatgcatatttcaaaatgtttctaatttcatttcaatttcctatgagacccacagtttctacatttatttaacgaagccattaaatatcccattggctttggggaaatgaagattcagagcaacagcattttct

SEQ ID NO: 264866 - DNA, 524 bp, Homo sapiens
cttttctttgtaaatagaaggtaaagaagcaccgtaatacaaagactttgtaatgttccttctcagctgtaggtactacccgatttggtgacaaagtgtgatgagtctataaattgaatatgtattttatctcctccaggtcccaaaatatttttgtccagtatgttcttaatagctttgtattctttagattttttttaagtggtccctcaaacaactgattcagaagtatgctggcatacatgcatatttggtgatctttagtgtatttaaatgctacttgatgggaagaaatactagcaggttttttctcttctctctgcctgcagttacagattcacttccatayaacactcagaatgatatggctaaagagaaacatctaaagtttatgcatatttcaaaatgtttctaatttcatttcaatttcctatgagacccacagtttctacatttatttaacgaagccattaaatatcccattggctttggggaaatgaagattcagagcaacagcattttct

SEQ ID NO: 264867 - DNA, 524 bp, Homo sapiens
cttttctttgtaaatagaaggtaaagaagcaccgtaatacaaagactttgtaatgttccttctcagctgtaggtactacccgatttggtgacaaagtgtgatgagtctataaattgaatatgtattttatctcctccaggtcccaaaatatttttgtccagtatgttcttaatagctttgtattctttagattttttttaagtggtccctcaaacaactgattcagaagtatgctggcatacatgcatatttggtgatctttagtgtatttaaatgctacttgatgggaagaaatactagcaggttttttctcttctctctgcctgcagttacagattcacttccatataacactcagaatgatatggctaaagagaaacatctaaagtttatgcatatttcaaaatgtttctaattycatttcaatttcctatgagacccacagtttctacatttatttaacgaagccattaaatatcccattggctttggggaaatgaagattcagagcaacagcattttct

SEQ ID NO: 264868 - DNA, 587 bp, Homo sapiens
ttggaaacattgattacaaggcagaattaaatactaacactaatttctcatttcaatttaagcaaaaagggggcctttctgagagttcttatgcttttgaaacattaaagattgggaaggtgcaccctatggataatagtgacgagcttcatacatctgaggccatcctcttgactctccttgctcaggaaaatttcctatttgggagaatgaagagcacaaaccagatagtatattcaactatggaaaaataatgacaaatttcattcagcaactacatggaagagaaagtttgatttccaaattgtagtcattttattgcagtacctgatcataagagagtaaaaccttcaattgaagttacaaagaatagggcaatgatacatgtcagcctttcatgtcttccaataaagtctcagtcactccccacaattaattacccttcttagtgaagatctggatagttcattgcttagtactaatccctgtgaacaggctctcyctttccattgatttatctagatttgcactagtatttactatttaggcatcattcactttgtagaacccctgcaattcatagatct

SEQ ID NO: 264869 - DNA, 598 bp, Homo sapiens
agaattcccccagagcattggccagaattgcattacatgacagatactaaaccartcactgacaaagggagggagataactctgattggcttgaatcgatcaaagtttcctcttagaactggggataaggagtagcttgggagcaggtgactttctgaaagtgatctgggttctgttagaaggaagaatgaacagaaagacattgtgctgcaggtgaacagctgagcacattatgcacagagatatttcattttttagataattagaatagggagaggacattctacacagggcaaaagtgaagctgcctcttttgaggagaaatggttaatttagctgaagcatgaaagcaagagggggaatcactgcagaagaagatattctggacaacaatacaattatgatatcagagaactcttaatttctcaaaaacacttcactgactctcacatcaactagaacagcaagtatcaacagagaaatctgaagtccagagcaggtgagtaaatcttccaaggtcacacagcctgtaaacaacaaggtctggtgactcttgcctgggatccttttgcagttccttggcaattagttgaggcag

SEQ ID NO: 264870 - DNA, 598 bp, Homo sapiens
agaattcccccagagcattggccagaattgcattacatgacagatactaaaccagtcactgacaaagggagggagataactctgattggcttgaatcgatcaaagtttcctcttagaactggggataaggagtagcttgggagcaggtgactttctgaaagtgatctgggttctgttagaaggaagaatgaacagaaagacattgtgctgcaggtgaacagctgagcacattatgcacagagatatttcattttttagataattagaatagggagaggacattctacacagggcaaaagtgaagctgcctcttttgaggagaaatggttaatttagctgaagcatgaaagcaagagggggaatcactgcagaagaagatattctggacaacaatacaattatgatatcagagaactcttaatttctcaaaaacacttcactgactctcacaycaactagaacagcaagtatcaacagagaaatctgaagtccagagcaggtgagtaaatcttccaaggtcacacagcctgtaaacaacaaggtctggtgactcttgcctgggatccttttgcagttccttggcaattagttgaggcag

SEQ ID NO: 264871 - DNA, 646 bp, Homo sapiens
atgggctctggtccctgctggagctctcttttggcaggcagcctgtgggaatctgtagtatgaccagtcaggaacttggccctgggaagttggaggtatggatataacacaagtccctgagaactttgaggaaggaaccccaagagatatcaacttccctgttgcttgcttttcttcctctgcatgactttatggacttgaaggaggacctcaatgcttagtttgcacctcacttatcttacttggagctattgtactgggttatcttgcctaccaacatgactcaattatttcactgaaaccagtaacttccaaattatatctctaatgtacattcttttctgagctccagattacatatcaaattaactcctaactctacctgatagactgaccaacgcttcccctcaaagatgtccatgtcttagtcctcaaaacctgtgaataagttatctttacatagcaaaagacaccttgccaatgtgattaagttaaggatcttgagacaaggmgatggtcctggattatccaggtgagcccaagggcatcacaaggaaccacagaagagggaggcaaaagggtcagagtcagaggagatgtgatgacagaagcagaggtcggagtggtgaagggtcatgagccaagg

SEQ ID NO: 264872 - DNA, 549 bp, Homo sapiens
aatacacctgagtacaaatctagtttctacaacttagtagttcagtggtcatgaatttttgaacatttattccttaactatactgggaataataatatccacttttgtagattttatatataggtatatattatataatatctacctttattgatgagaattagttgtaatagagcatgtgaaacacttactgtggcatggaaacactccaggcacataagaaatgttgaaccctctctcacacacacatactctcaatacacacactgttttatttgctagatggtatattcacacatcaggaggtcagtgtcattgttgagatgataaatcttattgtaatttagaggagaagggaaggaaactatgttagagacaatgaaatatttcccaatagctcttcttcctttttgtaatagaatccccaagttctcaatgggcacagaactgttcagctagaggatatttttccctgcrtctttgccatacgactaggttatgtccaaagacatgtgagtagaagtgatacatgcgattttgatatcatgc

SEQ ID NO: 264873 - DNA, 612 bp, Homo sapiens
taaggcttatcaacttgggttgctcttagagtgcaactcttgttgagttttatgttgcaggaacccttcatgtcagtgcctctaggtttattcttggactggtcagcttccccaaaggaggctcttccaaactcctgctaagctttgtaagtgtggcttccctttctgaggctaagtgagagaagagagctgaatggtggtagggttaggggtgggggttcaactttttcttcttctcagctatacttctcttcatatgccaagagagcctctgttttgcaatcaacagagaataagtctttattcttctgccgaagtgaaggaagaaatctagggttttacagcatcaaatataattttaattgattctcctgtttttaacttcacctgtatctccacttttagatgtayatagagccacaaattccagaaccttttgagatttcttctgtttctggaagctttctccaacactggcttaggatacagctttctggactcagccaagccactaatccacggtcctactgctccatagctgtcaaaattttgttgcaattgtccttttcaccgattgttcttgttcttgtaaaaaaatcagtttattgacac

SEQ ID NO: 264874 - DNA, 612 bp, Homo sapiens
taaggcttatcaacttgggttgctcttagagtgcaactcttgttgagttttatgttgcaggaacccttcatgtcagtgcctctaggtttattcttggactggtcagcttccccaaaggaggctcttccaaactcctgctaagctttgtaagtgtggcttccctttctgaggctaagtgagagaagagagctgaatggtggtagggttaggggtgggggttcaactttttcttcttctcagctatacttctcttcatatgccaagagagcctctgttttgcaatcaacagagaataagtctttattcttctgccgaagtgaaggaagaaatctagggttttacagcatcaaatataattttaattgattctcctgtttttaacttcacctgtatctccacttttagatgtatatagagccacaaattccagaaccttttgagatttcttctgtttctggaagctttctccaacactggcttaggatacagctttctggactcagccaagycactaatccacggtcctactgctccatagctgtcaaaattttgttgcaattgtccttttcaccgattgttcttgttcttgtaaaaaaatcagtttattgacac

SEQ ID NO: 264875 - DNA, 531 bp, Homo sapiens
acagcacttctctgatctggaaacttctgcggcttcccctggctcatcagtgaatggcttgtgacaggacgaagaatggcgagctccatggcagggaaaccagcctagccggagtggtgagtagtggctgctgaataaaggaagatgtttggagaggagagttgaggccactgtgaggagctttatttaattacaaagctaacttcaggttgctaggtttagaaagtaattcttgggattttcatctagctgggatgaatactagatgaatcagtttgatttacctatcgccaggcatttttagaggtctattttgagtatgcaaacaaacatggaattgacactgaggttcttcttcaaggcctgtgcttcacatgacgtacaattgttcaggactcccctcattaccctgcatcatctcagtctagttgaaytgtgagttctcctatgttccacagtgttgaatcactaattcacttattcagagttcactaatttcacaacgtcttattgagcacttacaatgtgccc

SEQ ID NO: 264876 - DNA, 566 bp, Homo sapiens
cagtggcttccgagcgtgggcccagggacctgcgctggtccatgctgccaagtttcaactggtgcatggctaaatgacacaaaagaagtgcaccatggcaggttgttcaaaaagctaaattagttggaactgatttgatttattaaaagcatgtttcttgattctgaggtaataccagtctcacttttttgaaactccttattttgtgaaatgatagttattgataggcgtgttttgtgctttaacgctcttatttggcaaatttaaaatttggcttgaccagggatcagtggctcttcttgctgaccgagccccccatcccctcttaatgaccatggagacctttctgcatctctggcatatctcccatcagacccgtgggctgggctgtctatcactagcctccactccagagtcayctcccctgtctccagggtgcctcccctacaggtccactggctcttgtctccacttctgtgtcacatagaagtgaatggagcctcagaaacatcaagaccttttctgcctgactgtatctatgtgtcctcagaattgggcgtggaaca

SEQ ID NO: 264877 - DNA, 500 bp, Homo sapiens
gaaacatcctcacagagaaacccagaaataatgtttaatctgggtgtcccatagcatgctcaagttgacacataaacttagccattacatctatcatagattgcctatgagagaagaatctattactggtgtctgtgagtgtgagagccaggaaggctgtggctggcctccctgtagtcaccttggatgtgctattgatgtggatgaggcttttccctggggcctttcttctcataggagtcctccctccccaccccgagatactgatacttcacattttagtgaagtgcacagtagaatagaagaagctctgagttagaaattaacaaaggactgaggttacattgaggcaagtgggagtctgacccctgcaggacagccacagtttgatcctgcagatgagcccagttccagacagcattttccttaatcctttagactcccatgcctctagcaatccayaagagattcctaactgactgtattttcttagcttgttt

SEQ ID NO: 264878 - DNA, 586 bp, Homo sapiens
aggttttacaagcagttggagcccaggccatgaaagtttgtttaaacattcttctatgcccattctaggggcagtgaggaaccacctaagaagagtctgtaagtgagattttcagatttgcatttccagagatcaccctagtactttgtgaaggtggggttaagcagactgagttaggagtcaatttccatcatctgggacagagacagggagacagtggcctgaagtgatattcctggagacaaagagaagtttaagggtccragaatataaagaagcagcacatttggtgactgatgatggctggtggcagaaaaaggaactgagtctggacaggctcaggatgtcacagcttccagcctcccagaagtgctccatggagcttcagccccagcacatctggtctcccacttgctccaaggaggcaatgaagggggcatagaagtgccttctgaactccctttatccaccatcaggcacaagagtcaacgtgttcacaggtaattgttgagcatagtctacttagattctaatcacaccatgaaacacttacttgaaattcataacatgggaacagtcctgttaa

SEQ ID NO: 264879 - DNA, 610 bp, Homo sapiens
acaattttcttctccaggacatcaaaagatagaggtagcccatttctcactttagagacagaaagaaactctgaaagcaggaatgtaaacaaagctcctagaaaatgcaagctcatgactaagtaaagccccaaaagtccacccaaatcaaagtaacaagaggcaaaggccacagctcagatcacaaaagatggaacaagccaggtgtgcagagagcaaacgaaccggcagccgctcagtgacaartgctctgtggggcttgggccatcttgttctttctgaatggccaaggaagaatgtttgacaacagcttcctctgcactgtataggggcaaatctatgtttttaaattgagagaaaacttcagaatatattaatttatgcagaagagctgttttgttgaatatatttatcagtcgtacttctgaaaactgaattacattttcgacataaaaaacttgcaatatagggagctttatatttataatgctgatgcttgccaatgaagatgtggcttaggtaaatgtatgtatatgaaatgcagcatttgaatagcactcctaaaatgcaggcagcattcttggtgcaaaagactatgagagcaaagaca

SEQ ID NO: 264880 - DNA, 606 bp, Homo sapiens
acccaaatcaaagtaacaagaggcaaaggccacagctcagatcacaaaagatggaacaagccaggtgtgcagagagcaaacgaaccggcagccgctcagtgacaaatgctctgtggggcttgggccatcttgttctttctgaatggccaaggaagaatgtttgacaacagcttcctctgcactgtataggggcaaatctatgtttttaaattgagagaaaacttcagaatatattaatttatgcagaagagctgttttgttgaatatatttatcagtcgtacttctgaaaactgaattacattttcgacataaaaaacttgcaatatagggagctttatatttataatgctgatgcttgccaatgaagatgtggcttaggtaaatrtatgtatatgaaatgcagcatttgaatagcactcctaaaatgcaggcagcattcttggtgcaaaagactatgagagcaaagacatttacctaaaacatgtgcttgttaggtatttttcctaatcatctatgccacacggactttgtaaataaaatgataaaccagtcccttagatctgcatcttcctctacaaaacctttttcagcactctttgcacctg

SEQ ID NO: 264881 - DNA, 618 bp, Homo sapiens
cacaacctgggcaaagagagagaatggtaagacataatttctaccatgttttcttgcttgaaaggactaaataaattcttaagaattaaaagtcatcaaaaaggctggtgaggatgtggagcaatagaaactctcattcattgttggtggagatgcaaaatggtatagccactctggacaacagtttggctgtttcttataaaactaaacatattcttaccataagatccagmaatcattgtccttggtatttacccaaaggagttgaaaacgtatatcaacacaaaaacctgtacaaggatgtttataacagttctgcttatcgttgccaaaacttggaagcaaccaagatgtccttcagtaggtgaatgaataagtaaactgtactacatccagacaacggattattattcaacactaaaaagaaatgagtttgcaagccatgaaaagacatggaggaaacttaaaggcatattactaagtgaaagaagcacatctgaaaagggtatatattgtatgacattctggaaatgtgaaaactatggatatgacaaaaggatcagtggttgcaaggggttgggagtgggaaagttggggtgaataggcaaagcaaggggg

SEQ ID NO: 264882 - DNA, 583 bp, Homo sapiens
ctgtcaatgaaggctgtagaaaataattttacgcttgaaatagaagcacgatgtcacgggtaactttactagggattccttcctctgcctgttttcagggtcctctcaatcccaggcaaggagtactttgcattttcgctttcacaagcaatgtgtctataagcattttgtgcacatgttctgttacacacacggacttgcatttctttaatgtacatgccagcgattaaattgctgatggatagtgtttacacatctctgggcttgataaagtgaaagagctactatcccagaggtgtgggttctttcagatgactagtgagatggctaccctactctaatgagggtcccattgtggccacaygccaatcaatttccctgtaagtcttccctagatgagttctattattccattttgcattgctataaaggaatacctgagactgggcaatctgtaaggaaaagagatttatttgacttgtggttctgcagcctgtacagggagcatggcactggcatcttgcttggctcttagtgaggacttcgggaagcttttactcacagcagaaggcaacgggagctg

SEQ ID NO: 264883 - DNA, 583 bp, Homo sapiens
ctgtcaatgaaggctgtagaaaataattttacgcttgaaatagaagcacgatgtcacgggtaactttactagggattccttcctctgcctgttttcagggtcctctcaatcccaggcaaggagtactttgcattttcgctttcacaagcaatgtgtctataagcattttgtgcacatgttctgttacacacacggacttgcatttctttaatgtacatgccagcgattaaattgctgatggatagtgtttacacatctctgggcttgataaagtgaaagagctactatcccagaggtgtgggttctttcagatgactagtgagatggctaccctactctaatgagggtcccattgtggccacatrccaatcaatttccctgtaagtcttccctagatgagttctattattccattttgcattgctataaaggaatacctgagactgggcaatctgtaaggaaaagagatttatttgacttgtggttctgcagcctgtacagggagcatggcactggcatcttgcttggctcttagtgaggacttcgggaagcttttactcacagcagaaggcaacgggagctg

SEQ ID NO: 264884 - DNA, 603 bp, Homo sapiens
atctcctttactactctgtgattgagctcatagataatttaacccatccatcatataattaaaaatatatcatgccctaaaagtagtatagtggagaaatgaaaggacagtaatatataatagaaagacrtgcatgtattaatatataaatgttgtctcataattgcactagaacacatgattgagtcatcaagagtttcgactgtgagatagaatcaccatgtggtaataaaagcagactaatagaaacatattttcttggcaactcaagcttcataagtggcattatcattggtaacctgatcatctgaaaaggtgaacaaatcttgaaagtgtttcaaacaaaagcacaatcttcccctgatttaaacagtggaaaattcagtgtgtatcaaaagggatacaaagtaaaaacacttaatgtatgtgcaaaatggagttaggctctaggctcagataataaaggagtttttcacctacctggaagtctaatgggtcattaaaaaattgtgcaatatgagggaagattctttgtaatgcagacttatcccacaaattccatctcgcttcttggtctccatatattaaatgtcagtaacatcc

SEQ ID NO: 264885 - DNA, 457 bp, Homo sapiens
ctaatttgtttcatgactatgttaatgtttgtctttrccttcttctcaatttcagaaaaagacacaaaacactgaaactggattcagtgccagcccccactcctcttttacttataaagtgtgctttcttgatgtgagagggtgagaactttaaatctctctttggaaaaacatgcaatgaaactggagatggtgggaccccacacccagggccatctttgaatggatgtgtttttccagtgctttgggggcattgaaagcttcagcaaaataaaatcaagaccaacttcacagagttcatgttcttagccaaaagaacctcactttctctattactggggtagatatatgcagatgcaaaacacagacagcctgtccttactttgagttttgaaacagtgatttctgttgaaggtcatttggcttagagagaaaaaaagactgatatttggcaggg

SEQ ID NO: 264886 - DNA, 598 bp, Homo sapiens
tgactatgttaatgtttgtctttaccttcttctcaatttcagaaaaagacacaaaacactgaaactggattcagtgccagcccccactcctcttttacttataaagtgtgctttcttgatgtgagagggtgagaactttaaatctctctttggaaaaacatgcaatgaaactggagatggtgggaccccasacccagggccatctttgaatggatgtgtttttccagtgctttgggggcattgaaagcttcagcaaaataaaatcaagaccaacttcacagagttcatgttcttagccaaaagaacctcactttctctattactggggtagatatatgcagatgcaaaacacagacagcctgtccttactttgagttttgaaacagtgatttctgttgaaggtcatttggcttagagagaaaaaaagactgatatttggcagggaggaaggtgaggctggtgcatcactgccaaggaccttccatatgggtggcctgggagagcttccacctggccacagaacaggtcatggcccaggttaatgaggaagaaagaatgaggaggagaacagtttgattaaaatgaaaagaagaaatgt

SEQ ID NO: 264887 - DNA, 595 bp, Homo sapiens
agcccctcagaagaattagagttctctgctgtgctctagaacacttggctgtcgtctctctattagacgtcattaggttgtgctggaaatgaaacaggcctgcctccccttcagaccagaagctcttggaaggtggaagactatctcatatccctatctgctttgcaatggcctgacattatgactaggactaagtaggtgctcaataaatatctcttactttaataaatagatgaataagtgaattaattgggsccttttacaacacaaacaaaatttgtggacctgggaaaactatgtcacttactttaaccttagtttaaccatctttaaaatgagccaatgtgatcagatgatctcaaagtcccttcaaattctgtcatcttgtaggcatgtaattcagtaagtatttctatatattgcctctgagtttgactaagaaacttccatatacatccaaagcttgttcattattccaaatgttatgtacaacatcaactccaaatatctcaggtagaggacttatgttagtgtaagagaaaagtcacattaatcatttaagcatccttttgatcattcggcttcattagccaca

SEQ ID NO: 264888 - DNA, 489 bp, Homo sapiens
cccacattcagcccatactccgtggatcagtgtttccctccccactgggttgaaggatcctggaggagtycaggatctgctcagaagactaggagctaagtgaatgctgattaaatgactcccttgactgatgatgtaatctagtttgtaaaatttctggtagctgccttcaataacattgcaaaacagaaatgggtcattaaatgagagttttcccatcacttcacctagtttgaatacaacacaaattccttgagctcacagttttttactcctttctaaaaacctcctggtggcccagaaacctccctctgacctgcagagtgcaaggtggggttctcctctcatacattctagaaagcctctcattgggtctttgggagacagtcactcaagtgacctgagtttgaagctggcaaaagcatcccacaaacagcatgtacccatgtttttttataccaaagaccatggtctgttgattgttgtaga

SEQ ID NO: 264889 - DNA, 489 bp, Homo sapiens
cccacattcagcccatactccgtggatcagtgtttccctccccactgggttgaaggatcctggaggagtccaggatctgctcagaagactaggagctragtgaatgctgattaaatgactcccttgactgatgatgtaatctagtttgtaaaatttctggtagctgccttcaataacattgcaaaacagaaatgggtcattaaatgagagttttcccatcacttcacctagtttgaatacaacacaaattccttgagctcacagttttttactcctttctaaaaacctcctggtggcccagaaacctccctctgacctgcagagtgcaaggtggggttctcctctcatacattctagaaagcctctcattgggtctttgggagacagtcactcaagtgacctgagtttgaagctggcaaaagcatcccacaaacagcatgtacccatgtttttttataccaaagaccatggtctgttgattgttgtaga

SEQ ID NO: 264890 - DNA, 489 bp, Homo sapiens
cccacattcagcccatactccgtggatcagtgtttccctccccactgggttgaaggatcctggaggagtccaggatctgctcagaagactaggagctaagtgaatgctgattaaatgactcccttgactgatgatgtaatctagtttgtaaaatttctggtagctgccttcaataacattgcaaaacagaaatggrtcattaaatgagagttttcccatcacttcacctagtttgaatacaacacaaattccttgagctcacagttttttactcctttctaaaaacctcctggtggcccagaaacctccctctgacctgcagagtgcaaggtggggttctcctctcatacattctagaaagcctctcattgggtctttgggagacagtcactcaagtgacctgagtttgaagctggcaaaagcatcccacaaacagcatgtacccatgtttttttataccaaagaccatggtctgttgattgttgtaga

SEQ ID NO: 264891 - DNA, 568 bp, Homo sapiens
ctcgaatccagaggaaacacatggggaaaatgaattccagtgggctgattaacaatgagaagtaaatagggagagattcagctcatttttttggtcttttttcttttcctcattagatgtttcttccattgctttcctgttcatytctaaagtacaagacacagaatcaaaaggttgaggtcctagaaggatatctgtggggaatctcagggggaaaccagatgggaagttgggacaaggccttcttctttgggtcccatgacatcattcacatttccttagagcttgaggaataggatgccccattattgagacagagagaggcatggttgtagaagacagaatgctcatgtgtataagtctatttgtgctgctataacaaaataccagatactgggtaatttacaaacaatagacatttgtttctcacagctctggatgctgggaagtccaaggtcaaagctccggcaggtgtctggagaaggttcgtttctcatagatggtgccgtctaggtgtcctcacatggtggaagggataggagagcaaaaagggcctaagaaagcttcc

SEQ ID NO: 264892 - DNA, 568 bp, Homo sapiens
ctcgaatccagaggaaacacatggggaaaatgaattccagtgggctgattaacaatgagaagtaaatagggagagattcagctcatttttttggtcttttttcttttcctcattagatgtttcttccattgctttcctgttcatttctaaagtacaagacacagaatcaaaaggttgaggtcctagaaggatatctgtggggaatctcagggggaaaccagaygggaagttgggacaaggccttcttctttgggtcccatgacatcattcacatttccttagagcttgaggaataggatgccccattattgagacagagagaggcatggttgtagaagacagaatgctcatgtgtataagtctatttgtgctgctataacaaaataccagatactgggtaatttacaaacaatagacatttgtttctcacagctctggatgctgggaagtccaaggtcaaagctccggcaggtgtctggagaaggttcgtttctcatagatggtgccgtctaggtgtcctcacatggtggaagggataggagagcaaaaagggcctaagaaagcttcc

SEQ ID NO: 264893 - DNA, 568 bp, Homo sapiens
ctcgaatccagaggaaacacatggggaaaatgaattccagtgggctgattaacaatgagaagtaaatagggagagattcagctcatttttttggtcttttttcttttcctcattagatgtttcttccattgctttcctgttcatttctaaagtacaagacacagaatcaaaaggttgaggtcctagaaggatatctgtggggaatctcagggggaaaccagatgggaagttgggacaaggccttcttctttgggtcccatgacatcattcacatttccttagagcttgaggaataggatgccccattattgagacagagagaggcatggttgtagaagacagaatgctcatgtgtataagtctatttgtgctgctataacaaaataccagatactgggtaatttacaaacaatagacatttgtttctcacagctctggatgctgggaagtccaaggtcaaagctccggcaggtgtctggagaaggttygtttctcatagatggtgccgtctaggtgtcctcacatggtggaagggataggagagcaaaaagggcctaagaaagcttcc

SEQ ID NO: 264894 - DNA, 532 bp, Homo sapiens
gaggatgacttgagcccattggacaactctgtccaagaagctgtcaccctgcttagcgtggctgggaagtggcttcatttatcaacctaaaatctctttctgtaattcttggccatttcctttttttctcttctcggggagactggaagagtaggttgtgacctttcttatacttaggctctgcccagaaggagccataaagataaccaccagctcttcaaaggcgtcagatccctggcaaccgcacaggggattttcccagcacttgagcaaaggggcctggggatactggtggtttactccactggggccactgccagggctgcatgtggtgagccacggccggtgcactgcttctggggacaacactgcccttcagcatgacactctrctgggggccacacaaggggccacagggaggacacaagttgacagtgtttcttttggggaagcagctcacactaaagaaacctgtttcaggtggctttggaaagttttccaaagttcacttttgatttgcagtgacaggggg

SEQ ID NO: 264895 - DNA, 532 bp, Homo sapiens
ttcaggataatctgtttcccatctctgaggcagaattacagtttctaggactctgtgatgccttttacacatgaggtcagaatttcttctgaatcrttaagagtgtctgcactcataaactactttgtgtgttttaatttatttccaatcaaactgaaaatgccagtaagctgtttcacatgtatcaccaaacttatgagaaattaaactcagctcacaatatttactgagcactgattgtgcacacagcatgctgtgagactctacctggaagacaaagaaaaggcataagatgtggatttgttcccctttggcttatttcccatctcatgggtgggcaaaatctatggctgatcctagtcccaggagactcatctttcctgctgggctctgggttgagttgacaggggtcttggctgtcaggcatcttgcggctgggttctggagtggagaaaagtagagaaaaggaacttctgggacagagaccttggggatgagatgctttctagccctgggattcattcttgagcaa

SEQ ID NO: 264896 - DNA, 532 bp, Homo sapiens
ttcaggataatctgtttcccatctctgaggcagaattacagtttctaggactctgtgatgccttttacacatgaggtcagaatttcttctgaatcgttaagagtgtctgcactcataaactactttgtgtgttttaatttatttccaatcaaactgaaaatgccagtaagctgtttcacatgtatcaccaaacttatgagaaattaaactcagctcacaatatttactgagcactgattgtgcacacagcatgctgtgagactctacctggaagacaaagaaaaggcataagatgtggatttgttcccctttggcttatttcccatctcatgggtgggcaaaatctatggctgatcctagtcccaggagactcatctttcctgctgggctctgggttgagttgacaggggtcttggctgtcaggcatcttgcrgctgggttctggagtggagaaaagtagagaaaaggaacttctgggacagagaccttggggatgagatgctttctagccctgggattcattcttgagcaa

SEQ ID NO: 264897 - DNA, 618 bp, Homo sapiens
tctctttacttagtaatgtctctgtaaatccaaaactcttccccgccaaaaaatttatcttaaaaaatgtagaacacagaaaagaaaattatagcctgatcttacatatcaataaaataaaaaagagatcaaatagtaacctataagaaaaaagaatccagcacagaataaacaatgacactacattcacacatgtttacataacacacacactcatgcctacacacattacagtgaagcaaggtattttagtaatatgggttttttttgtgagaaaaaagcgtttacccccccccccggtataatataataatcatgtcaactgttgcagaaaaatatttttttaatttgataccattaaaaacaacaataaccagagtctgggaagggtagtgtggagggggagaaagaaaggagttggttaatgggtataaaaatataattagaaggaatcaaatctaccatttggtagcacaataaagtgactataggaaacaataatttattgtatatttcaaaataactaaaagastggaattagagcgtccctaacacaaagaaatgatcaatgtttgaggtggtagataccccacttaccttgattttattgtcacacat

SEQ ID NO: 264898 - DNA, 599 bp, Homo sapiens
tggtgtctactttaatcttaagattcagcctatgatatgagcactattgtagccccagtttttggaaggatagacagagatttaggcaggtaaggtgacttgtccaaggtaacaccacctgtaagtgatggaactgggatttgagctgaggcagtctgaccgccttgccctgggcttatgcttcctaaccactatcctctgctgcccctcactggattgtcattgaaagcctgtgaagtaggcatgaggatccccatctaagcagatgagtgaacaggccaggagaaaagaccgggtctttcagtgccccaaagctggccagtagtaagggcaggacctatatgttggcctcatcccaatttcaagggcaaatgctctcctatctcattgccttgaaccaggctttgggatcatcactgaaactggcaaaccatccagttagccatccctcgcttargtcttccccatgacaacgtcttccatccctcgcctctcctcaccacttcccttagcattcctggggtcctgtgtgaatcaggcagtgtgtcggggacatgtgctactgattatttccccggcttatcaaaggcctgatctct

SEQ ID NO: 264899 - DNA, 460 bp, Homo sapiens
aaatatatatgaaggagttaagtgctaaaagtagtctaacaaggatacttctgaaaaaaaacaagaataaggaacttgccttaccaaacaccaccttactatgaagctgtaataattggatcagtctggtattgatgsaaggacagccacattgaccaatggaatagaatagagagctcagaaacaaacaaatgcatgtaaataactttatgatgtcacagaggcaccatgtcctactagaatggaaaagagaaactattggaggatataggatacatgtaccaaagtatccattacagcaatgttctcatggcaaaaacaattagaagcaacccaaatgcctgtcaaagggagagtaaatgcagtgtgatatattctcacacttgtatattatacaacagttataaaagaaacacagagaagtgtaacaatatgtattaatcttgaaaatgtaaagtta

SEQ ID NO: 264900 - DNA, 460 bp, Homo sapiens
aaatatatatgaaggagttaagtgctaaaagtagtctaacaaggatacttctgaaaaaaaacaagaataaggaacttgccttaccaaacaccaccttactatgaagctgtaataattggatcagtctggtattgatggaaggacagccacattgaccaatggaatagaatagagagctcagaaacaaacaaatgcatgtaaataactttatgatgtcacagaggcaccatgtcctactagaatggaaaagagaaactattggaggatataggatacatgtaccaaagtatccattacagcaatgttctcrtggcaaaaacaattagaagcaacccaaatgcctgtcaaagggagagtaaatgcagtgtgatatattctcacacttgtatattatacaacagttataaaagaaacacagagaagtgtaacaatatgtattaatcttgaaaatgtaaagtta

SEQ ID NO: 264901 - DNA, 460 bp, Homo sapiens
aaatatatatgaaggagttaagtgctaaaagtagtctaacaaggatacttctgaaaaaaaacaagaataaggaacttgccttaccaaacaccaccttactatgaagctgtaataattggatcagtctggtattgatggaaggacagccacattgaccaatggaatagaatagagagctcagaaacaaacaaatgcatgtaaataactttatgatgtcacagaggcaccatgtcctactagaatggaaaagagaaactattggaggatataggatacatgtaccaaagtatccattacagcaatgttctcatggcaaaaacaattagaagcaacccaaatgcctgtcaaagggagagtaaatgcagtgtgatatattctcacacttgtatattatacaacagttataaaagaaacacagagaartgtaacaatatgtattaatcttgaaaatgtaaagtta

SEQ ID NO: 264902 - DNA, 548 bp, Homo sapiens
tatattctgcagtaaaattttaaggacattttcaatctaaatgtaactgtgataactccttcaacatacacagtatgatatatagaaagtctaattacatcctctgtagtcaacagagataaattattcttttttaaatgatgcatttgcattacagctcaaatatctcttctttaagtagctttgcactgctttgtagactatctcacatgcttgtttctccttgcttccaaaattggggtcaatgaaatcacctttgctgttcttcttttttcttgttttttttttttttgtttgttttgttttgttttatttgttcgttttttcaraaagagtgaagctgtgaaatatgtgttctttacatggtaaaatgtaagcaagaactacaatttcagtccttttagattttaacgatgttcatttttctgtatacgtatctcattgtgagttaacgttataagttttgtgatgagttagcagtcattctggtggataatggggcagatggcagggtggctccacactcaaatagcatcaaactatgatcc

SEQ ID NO: 264903 - DNA, 548 bp, Homo sapiens
tatattctgcagtaaaattttaaggacattttcaatctaaatgtaactgtgataactccttcaacatacacagtatgatatatagaaagtctaattacatcctctgtagtcaacagagataaattattcttttttaaatgatgcatttgcattacagctcaaatatctcttctttaagtagctttgcactgctttgtagactatctcacatgcttgtttctccttgcttccaaaattggggtcaatgaaatcacctttgctgttcttcttttttcttgttttttttttttttgtttgttttgttttgttttatttgttcgttttttcagaaagagtgaagctgtgaaatatgtgttctttacatggtaaaatgtaagcaagaactacaatttcagtccttttarattttaacgatgttcatttttctgtatacgtatctcattgtgagttaacgttataagttttgtgatgagttagcagtcattctggtggataatggggcagatggcagggtggctccacactcaaatagcatcaaactatgatcc

SEQ ID NO: 264904 - DNA, 548 bp, Homo sapiens
tatattctgcagtaaaattttaaggacattttcaatctaaatgtaactgtgataactccttcaacatacacagtatgatatatagaaagtctaattacatcctctgtagtcaacagagataaattattcttttttaaatgatgcatttgcattacagctcaaatatctcttctttaagtagctttgcactgctttgtagactatctcacatgcttgtttctccttgcttccaaaattggggtcaatgaaatcacctttgctgttcttcttttttcttgttttttttttttttgtttgttttgttttgttttatttgttcgttttttcagaaagagtgaagctgtgaaatatgtgttctttacatggtaaaatgtaagcaagaactacaatttcagtccttttagattttaacgatgttcatttttctgtatacrtatctcattgtgagttaacgttataagttttgtgatgagttagcagtcattctggtggataatggggcagatggcagggtggctccacactcaaatagcatcaaactatgatcc

SEQ ID NO: 264905 - DNA, 599 bp, Homo sapiens
aaatgacaattagcagccattaaaagagcattataaactcagagggacacaaacacttagatcaatggaattcaagagcagagaaatagaagataaaatatctgtgtctgccacatgattttagccagcagtagctgcatttcagactgtatgcctgcagcctatatttatatacatctctttgagtaagtgttatttttcacagcagtagtagtatttgtgctgcttttgttgacatttagatartatacagtaaataccttataacagtgatctgtttcacttacagtttcactagcctacaacactgtccactgcagttacaggtttgcagactcacagatattctcttccagatgcaattttgctgtaacttaaatttttgtcaagcatatgttctgcttaaaggttggattttttaatagaatgaaattgattaaaaggcctgcaagcgaggactccaagatgacttccggattccacatctgacttgctggatgagtcagggccactggccccataccttggtctcgacatctgtaaacccttctcagtggtaatgagagttacataggagcaccaggacacaagtgacttca

SEQ ID NO: 264906 - DNA, 548 bp, Homo sapiens
tgctatgttaacactaaatgattgtcctgctactttaaaaatatatctggggaaacaataaaacagtggaacgcaatataatatagtcgaagatgaaagaaaacgggactttggcagcatctgtgataagtgaacacttgtctccctctgtgagcttttgctgcagctcctgcccacccgctgtcactggactcccagctgcaaggtggcccatattaacagtcactctgggttcaacatcattaatgttcactctcaagtcaccacaaatcccacgttcccctcatctctcaggcttaaaaaactcatttaacaccaagggctaattaattaactggattttcttatatttaatggggaacatactaagccaytagaatccagccttgttcaaatttaggtcaccaaagaggtctacaagtatgccagtcaacagaaaacctaaccatttttttctggattttactttaatagaaatcaattttttttacgaaatattatgttaaagtagagcaggagggatgctgcactagaataattttataatt

SEQ ID NO: 264907 - DNA, 348 bp, Homo sapiens
aatggtgtgggtcatggagatgggctggtagcaagagtctgtccagcaacagaacaggaggaaaagcagcctacctggagaattgtcccattagtgtcaggacccattgactccaaccttccttttgagtttgctgttttcggccccagagttgaagcagtcttttcagaccatcagtgggtaygtgcacttcctcctggcacacgtccaactccctccaaggacacacacacactccagtcagagaatcagacagtattttaatcacaacacatattgagtgcgggtgtagtttttgaactactttcttcatctattttctgtggaggagaatagtggcagaggttt

SEQ ID NO: 264908 - DNA, 535 bp, Homo sapiens
gcccagttctttacactagtgtgaaaacagactaatacagctgttcatattttgttgaaactaaaggacaaaaatggacaatctctgcttgtctttgggtctttgttctgaaggatcctgtgtatacacattaaatatgtttgtatgccttatcttccactcatctgcctttagtgagttggtttttcagggagacttcataggcttggcccttayactactatagatttacctattctcaattagtgatttagctgccataatcttctattattgttttaagcaaaggaaactttggtgactattactataatactaggagtaatttttacatgtcagtctctgtactagaagattctttcctacctcttgttgtttattggaaaatagatctgcagtctcttttataaaatatttccattacaatgtttattgctcctgaatgtgaaaactcactgtatttgtcttttcattttatttaaaacatgtgactagtatgtggatgagtttgtaaatctgtggtatcgttacctgt

SEQ ID NO: 264909 - DNA, 630 bp, Homo sapiens
tatgatgtgctttcaatattttgtagtagatgggataaaaaaattataatttaggtctaccaaacaattttatgtctttacaaaaaccctggtgggattttctaggttataaagattgaatgaatcctytcataccctgcattggaatgaggagtactaaaagctaaaactatccaataaacctacctcctttattttacagtctcttcaggcttgcagtatatatgaaaatacaatgattacttagtttgttgcatcaagaaggtttagagtattctcttagttattctgaatctttccatatgaagagtgtaagataggtatttacacaggtatcaggtatttggttgtcatttcctaccgttactgaaatgtagcatttgaaaaattattgctcgcattaggtctacttcttaagactgctaagcaacaggaacttccaagaaattttataaaataggaggaaaagaaccatgctcagagacagaaatgcctcaggactcagcttataaagctagaatgtctgagttcgactcctgacaccttcaatttctacatctgggaccttagacaatgctatgatcagaatgtgtgtgtcccctaaaattcatgttaaaaaactagtcacca

SEQ ID NO: 264910 - DNA, 630 bp, Homo sapiens
tatgatgtgctttcaatattttgtagtagatgggataaaaaaattataatttaggtctaccaaacaattttatgtctttacaaaaaccctggtgggattttctaggttataaagattgaatgaatcctttcataccctgcattggaatgaggagtactaaaagctaaaactatccaataaacctacctcctttattttacagtctcttcaggcttgcagtatatatgaaaatacaatgattacttastttgttgcatcaagaaggtttagagtattctcttagttattctgaatctttccatatgaagagtgtaagataggtatttacacaggtatcaggtatttggttgtcatttcctaccgttactgaaatgtagcatttgaaaaattattgctcgcattaggtctacttcttaagactgctaagcaacaggaacttccaagaaattttataaaataggaggaaaagaaccatgctcagagacagaaatgcctcaggactcagcttataaagctagaatgtctgagttcgactcctgacaccttcaatttctacatctgggaccttagacaatgctatgatcagaatgtgtgtgtcccctaaaattcatgttaaaaaactagtcacca

SEQ ID NO: 264911 - DNA, 630 bp, Homo sapiens
tatgatgtgctttcaatattttgtagtagatgggataaaaaaattataatttaggtctaccaaacaattttatgtctttacaaaaaccctggtgggattttctaggttataaagattgaatgaatcctttcataccctgcattggaatgaggagtactaaaagctaaaactatccaataaacctacctcctttattttacagtctcttcaggcttgcagtatatatgaaaatacaatgattacttagtttgttgcatcaagaaggtttagagtattctcttagttattctgaatctttccatatgaagagtgtaagataggtatttacacaggtatcaggtatttggttgtcatttcctaccgttactgaaatgtagcattkgaaaaattattgctcgcattaggtctacttcttaagactgctaagcaacaggaacttccaagaaattttataaaataggaggaaaagaaccatgctcagagacagaaatgcctcaggactcagcttataaagctagaatgtctgagttcgactcctgacaccttcaatttctacatctgggaccttagacaatgctatgatcagaatgtgtgtgtcccctaaaattcatgttaaaaaactagtcacca

SEQ ID NO: 264912 - DNA, 567 bp, Homo sapiens
acactactaataatatgagtgacattcactgtgagctaactctatgccaagtgctacgttgagtccttcatgaacattgactaaccctcgttatgttattaatcctgctaattctaagaaagaagtattgtttcccatatactccagatgacataactgaaattcaaagaggcgaagtaaattcatcaaggttatamcattagtaattttcggagctggtccaaacctaagtctatagttgttaaccgccttttaccctggtgataatgagagcgggagtgtgaaggcagcattttctcctgacaggtgctaacataaggattgtgcaattctatcttataacactgaaaacaagaaaacagggcaaattgtgaaggaaaaaaagtgaaggaaaaaatgaccctctctattaagaagtcagaaataattctaggattccttaagcagcatgatagtcattgcactttgatccaccatttctgtggagttgttttttaggaattgcaggaaaaaaagcaagtgattctatttttgtgatgcttaattcagtaggtgagaggatgtcag

SEQ ID NO: 264913 - DNA, 598 bp, Homo sapiens
tttggtgttaaagtgaccttaatcattctggttactctacatcttcttgtacttaaatgcaaaagatagtgtctataaaagccgtgtctatcatgaataacaccctcagtacaaaggtaaagtttctatgaagcagcattcttgtctgcttcttaaaaaatttacaactaacttttaaartgttttctattttgcattattcaatttttatttttctaagtaactcaactagatcttatgatatataagacctgtgtaaaaatgttaaagaaaattgtatttatattctctttttcatacctacaaaatcacaaatctgctgcaaatgaaaaaggccaaaacacttgtagagatatctgcgtactcaattttattcttgtatatgataaagatatgtagaagcatctcatgtagatttctgaactcaaatacttccctaccgtattggaaaattatatttctgaaacatatagtttgagtatacaagtgacccacccatgccaaatctcaggggtaggattgacatttttttgttttcccttatttaaaactgccattgctttaagaagttggtgtcaactggccaccaccctacgtg

SEQ ID NO: 264914 - DNA, 503 bp, Homo sapiens
cctggttttttgaatctctgactctaaataattctgagtatttttgttttctttttactttgataaaggactttccttttctatagctggtgtcgtcaaaatgcattggtcccmtccacccccaaaccaaagacgtaaacaatattcacgcagggggaatataacttaagcaattcacagagtatacaaacatttattggtacaaaacctgcaacatgagttttttgttaaattttaacagtgttttctcaaatcttcaaagcttgccttgatggtttgctgaagtaattgaaccactcttgagttgttttatgtaggacatcttatctttctttcattacccaggctgtggctttttttctattcccatgaaatccatgtacacactttagaagccctcctgaacaagctcgcttctaactttcacagagcccttagcacaatttgaatacgaaagagatactgaataaaaagctttaatctcttgtctgttatgctgcttt

SEQ ID NO: 264915 - DNA, 470 bp, Homo sapiens
cttgccatctgtgaattcctctcttgtgtacaatattctatcacttctgtcgctgctgcaaggttgtcttctcctctgaaacyaatacccttaacaattatttggcctcatcttgaggccaaacgaggctaaagtatgtaaaacacaccttgggtgagaacctccactcccctgtgccaagattctgccttggtggcaattacacagctggctggctatgtaatgctccctttcctgcgttcctggagctaacaatatgctccagaggctgtataaatttcctctgaggggtaggctttgtccaagccacctgctgctatcatgaattggatgcaactgccttgccacttggcacaaggaaatacgcacttttaatgttgggtgcccacatttgaaccgtgtttcttttcttcttctttggataaaatgacctttacctttagcttttctttttttgcatcctcaattcc

SEQ ID NO: 264916 - DNA, 393 bp, Homo sapiens
caaacgtgacacgaaaactccaagtgagcacatgttgttgggaaaatggcacctacagattttttggaggcagggttgccacaaaactttaatgtgtaaaaaacacaatatctgcaaagcatgataaaatcaagcacagtaaaatgaagtatgccattatttttatcaaaaaggcaagcagtgtgacaccactcycattaccaagtagaatccacttaggagtagatagagtcagagtcaggtcgtatagaagaaagatgactgttaggtgaataataaaggcagatatttacaaaatgtatataagaataaaatgaactccttgagttttgagaaagttgaaataaggaatcatagagttccatgcatagaacatatggaaattacaactca

SEQ ID NO: 264917 - DNA, 587 bp, Homo sapiens
gacaattacccaggtctttacatttaggattgaaacagaaagtcttgccactgtcttgatatatcttttttcattcttacctactttatattcaagagttaaaaacataacctttcttctcttcttggagggtgtatacatacaatcattcagtctgacttatttaaatgaattactgatttggaagaatttttttgttaaattatatttttattaaaatatccatgttcttgaacattctgttaacactatgttacagacttatgtccagacatattcaacatttttatgaaaaaactattagtaagttctgagtcaactcttcatcagaaataattatgtgataaaccatttcaaagacataaggttattgacagaaaggaatatacctaatttattccctatataagcaaatgtaaccatagtcttaaaaaaaggcacttaaatattctgattcttttgtgtgctggggcatgagttttcttcctctctaggacataagaggaagcacgtctttaaagrctgatgtgctggatcctgcacaagactctctttcttcaaataaaatttcttagttttacatattg

SEQ ID NO: 264918 - DNA, 550 bp, Homo sapiens
ttatattatttctttaagtgtttggtagaatttacctgagaaaacccctggacatggtgggttttatttgtttygtttttagatttcgtttttgttgttgtggtggtggtttttttttttttttttttttgagacagggtcttgctttgtcacccaggctggagtgcagtggcacgatctcggctcactgcaacctccgcctcctgggttcaagcaattcttttgcctcagcttcccaagtaactgggactacaggtgcacgtgccaccacacccggctaagttttgtatttttagtacagacagggtttcacaatattggccatgctggtctagaactcctgacatcatgatccgcccacctcgccctcccaaagtgctgggattacaagcgtaagcccaccgtgcccggttttgtcttttgtttttaactactaatttaaaatcattaatagatgtaagactactcttgttttctatttcccttttaattaattttagtagttagtatctttcaaaaaactgatagttgcatctaagttaataggttt

SEQ ID NO: 264919 - DNA, 593 bp, Homo sapiens
ctgtgttagtctttacatcttgcttgtacagagaatcgaagttagctagaagtgagagattagggccttctcaggtctttcctatgcrcatgaatggcaatgtgcatgcacatggccttctagattcccagaatcgtgtcatagcttttcaaagcccctctatttgtttttcttttaccttttgtcaaccttaaataatgagatttagaacatatgattaagtacagagtttattcaagcacagagcttgaggatagccgtacgagtgcaggagttaaggtttcacttacataggtagaaataaagaagtttcagcagaatcacaacattttccatataagaccaggtgcatatgccacagtggtttggttggttacagattgctacactccagggaagcttattactttctgaggccaggtagttttgtctctggtgtgtttggtcttaattatttatgaagaaaaagcagaagttggcagctgcatgtcacatgtctcaggctgcatagacacattccttcatggctcaggataatttaaagttccaacagctttatgtttaagttaagtttaaattatttaattttacag

SEQ ID NO: 264920 - DNA, 571 bp, Homo sapiens
agagttcacatgtaatgtactggacaccagcagcagcataagcatgttctgtctgccccacatctctgaccactgggtgagggctgaatccttctctcggatatagaaagggctgttgtacacagtgcccaactgaaaagaccctgtctagaggtcagagagtgaaccaggacaacagtgtagtccagaggtatcagactccccaaactctgtctgatgctctgacactctttggaagatggcctgattctatgacaatctcaaccagtagagcaattccaagcaacccttcttctcctccaatccccaatccaatgccaractgtctcagggtatcatttttgtttttcatctttagcccctaacagtgggggaagacttgccatagtttacactttgaaggcagggagtaaagaaagtaccttgctatgggctgaattgtatccctctaaaagaaagttgttggagttctaacctccagaatctgaaaatgtgaccttatttgaagagaggtacttatagaggaaatctagttaaaatgaggtcctcaggaccctaacccaaacaactg

SEQ ID NO: 264921 - DNA, 587 bp, Homo sapiens
tttttttttttttttttttttgacagtctcactctcgttccccaggcagtagtgcaatggcgtgatctcggctcactgcaagctctgtctccgggttcaagctattctcctgcctcagcctcccgagtagctgggattacaggcgcctgccaccacgcccggctaatttttgtatttttagtagagacggggtttcaccatattggccaggctggtctcgaactcctgacctcaggtgatctgccctctaagtttcccaaaatctccctgrccatctttctcaagaatctcactagtcagagatatgagattctatgtccaattcaaccaacggcaaaataagtgggactactatggtgagcgagctaactccagtcaaaattcacaactttgtctgtggccgacctagaggaaactgaataaaatgcagttatattataatagcaaggaaaaaggggaaggaagaggctattagctaagaaatattctgttttcttagacaaagcaacttacacatggtccaaagaaaatatctgcgctagcatattcaaaagtagatttctcttgttttatatggtaaaagagga

SEQ ID NO: 264922 - DNA, 606 bp, Homo sapiens
caattcaaaaggggaaaaactgctaatcacttattccktatcgtgcagtattcattttcatatactgcatgagctttaaacaatttcttcaagaataaaaaaggagctgactcataagtcaaatgatattcctatgatacaaaaagattttgtaaaaaacgtttggctttctttcaaaatagctatcttgtagcataacaaacacttttattcattctatatgtgctaggcactggtgacacagccttaataatatcacaaatacaaataaataaacatgaagagtctcataaccataaacaaaatacaaaggggaaaccgattagggattgatcttgcttagaaaggaaaagagcagagaaggcatcacggaagtggctaccatttgaattgagcctggtggaatcagcgggattagtcagatgtggctggagttcagcacagattgaagctggctagggcacaaagaaatgtggttgaaaatctaggctttgactaacaatatgtttatgtatataaaatgtgttatataagttttgaaacaatgtatttgctcccctcctaggttttcttttacttcaattccaaaataatatatttgttaaa

SEQ ID NO: 264923 - DNA, 563 bp, Homo sapiens
gatatagaactaaacagaagaatgtcatgattagaagcagtttaagaagctgaagaactcaggatagtcatttgatagaaggtgaagattttttacacgcactgtctttgattttatataataatggcaatatttatttaatgcttcactctcagtgctgtttttgatgtgtattaactcatttaaccctcataacaatcttttgaggtaagtcctattatcctcaattttatagatgataaaacagatactaagcatcaataacttggcaaggatttcacagctagttagtgttaggcaggaaaacggcctcacgtaatctagggaaatcaccctgtgctttagtgcctctgtctattctgaagcaactttagaaaagattattttattatgggacatagaaggatgtattatttgattaaaatgattttttaatraagatgacttcatgtgctgtttgtgactataccctttacatgaacataaaacataaaattggattcaaaattagggtttgacttattcttttaaattgtcacattctctgtaattcatgactgctt

SEQ ID NO: 264924 - DNA, 604 bp, Homo sapiens
ttttgctttacagaagctctttaattagctcccacttgtcagtttttgtttttgttgctattacttttttcttttttcttttttttttttttttctgagacagagactcactctgttgcccaggctagagtgcagtggcgcgatctttgctcactgcaacctccaccttccaagttcaagcagttcttgtgcctcagcctcccaagtagctgggattgtaaatgcccgctaccaagcctggctactttttgtatttttagtagagacagggtttcaccatgttggccaggctggtcttgaactccaagcctcatgtgatctgcccactttggyctcccataatactgggattacaggcgtgagccaccatgcctggctaaaggattcttatagtttgaggcctgacacttaaatctttaatccaccttgagttaatttttgtatatggtgaaagtaacgggtcagtttcattcttctgcatatggctagccagctattccagcaccatttattgaataagaagccctttccacattgcttatttttgtcaatttgatcaaatatcagatggccataggtgtatggcttaactgctgggttttat

SEQ ID NO: 264925 - DNA, 437 bp, Homo sapiens
ctacattgcccagatgggagtgcagtggctattcacaggtgcagtcatagcacaccacagcctccaactcttagcctcaagtgatcctccccctgcccagtctcytgagtagctatagcctagcacctgacatttaaactataggtgagttttgcctatttttgaacttgttttttggagacaaagtctcttacacaggctggagtacaatggcacaatctcagctcactgcaacctgcacctcgctcaagcgatcctctcacctcagcctcccaagtagctgggactacagacatgcgccaccatacctaatttctgtatactttgcagagatgggatttcaccatgttgcccaggctggtctcagattcctgggctcaagcgatccgtccatctcggcctcctaaactgctgggattacaggcatgagccactgc

SEQ ID NO: 264926 - DNA, 376 bp, Homo sapiens
actggggcactacctagtggagctgcgagaagaggaccaccgtcctccagaccccagaatggtaggtccaccgacagcttgcactgtgtgcctggaaaagccgcaggcactcaacaccaccctgtgaaagcagctgcaagggctgtaccctgtaaagccacaggggcagagctgcacaaggcctttgggagcccactccctgcatcagcatgccctggatgtgagacatggagtcaaaggaatttattttaaagctttaagatttaatgactgccctgctgggttttgaacttgcatggggcccgtagaccctttgctttggccaatctctccyatttggaatgggagcatttacccaccacctgtacccccattg

SEQ ID NO: 264927 - DNA, 622 bp, Homo sapiens
taattgtcaaaaagttctttttgtgtttctactcactggcctaatgctacattttgaggctcccaatgacagctctttagacatttgattacaattcttgtgtcccctctgtcttctccagatgaaacattcctacttccttcctcaaatgatggggtcactgtctctcattattctagctgctttcctgtggacatgcctcaccctctcttaaaggatggccaataggctggatcacaaatctcctgcatggtttgacccgcaggactattactttctctgttctgaactggagttgcatcacactgttgactcatatggagcacaaagtcaactgaaaccacagcccttcttttttgacrtggtctactgatggtggtgagtcatctttctcccactttgtactcagtacttaagccaagatgtgttttctttgtttattttaagcccaagtatatccctgttaaattttatcctcctgttaagttttatggtctacctttcatttgccgagatcttttcatattctcagttctgattaaaaaaataaaaaaaccaaaaacttattgcctgcttactatgtgctaggagctaaataagatcactgcccttaaggagttta

SEQ ID NO: 264928 - DNA, 623 bp, Homo sapiens
ttttttgctgttaatttccaggcgctgcaggaagacaatgacagtaccctccactgatctggggcaagaggaaatttctgaatgatccccccgtagctttccacgctccactgggtctgcgatacaaaacttcagatcctaacagttgggcttttcaaacaaaccagtttttaaaaatgaatgtggcttacccccaacattccagctgatcaaaagtacttgtttagaaaaataagtttaggaatgaagtggaaacaaggcctttgaaatgcagcttaacctaaatagcacattttagacttttcctccccactgcacattctttatggtgtaggggccagggagcctgcagtcttcacccctcctgagccctccttggcctcgggcttcctctcccctgctgctgaggccttcagtcaggggctggcatctgggagaaccttgaaactgtttcccatcccctttggcagcaagcaacaagcaccaaaacgctccagttaacaccagtgcaatcatcgttaacgtgaaacagctgcccgaggcctggcgtatccaccwgaccgccccctcccctccatgctcagctgtgagtcaccagagaccccggctaaggcagggcccgg

SEQ ID NO: 264929 - DNA, 586 bp, Homo sapiens
caggagggcagcgagagaagaggccacgggcacgggcagagcaggagcagtgtctgcctgggtgagagggtgcttgtcgggaggaggagagggaggctgtgcaggcaaggctgmctgctggacagaggacttggagctaccctgggaagcatctgtagggagccattgtaggttctacagcaggggagggaccagaggatgggaggtggctgggatcccctggttgccaccatcttccatggctacagcctggaccccacatgtgcttattgctccttcctccctctgtgcacccctaactcagtccagggagtgcacagaagaagaggagccaataaaacacatttaaaaaaataagtcattattattactttaatttgacttctaggcaccttcttattcaagacacagttgtggctgggctcagtggctcacacctgtaatcctagcactttgggaggctgaggcaggtggatcacttgaggtcaggagttcaacaccagcctggccaacatggcgaaaccctgtctctactaaaaatacaaaaattagttgcgtgtggtggcatgtgcttgtagtcctagct

SEQ ID NO: 264930 - DNA, 615 bp, Homo sapiens
ttcgtcttaacttcaagttaactgatttttttcttccgcctgctcaaatctaccttcaaattcctctagtaaatttttcattttagttattgcattttcagctccagaatgtctttttggtttcttctattgatattttcatcatgctcatacatcattttcttgactttttacatgatttcctttcttttttttttttttttttttgagcatcttcaagaaaattgttttaaagtctttgtctagcaaggctgtcatctggtctttctccaggatggcttctgttggtttattttttgtttttgaatgaaccatactttcctgtttctttgtatgccttatgattttttattaaattgaaaacaagacattggaatctaataatgtagtaactcsggtaatcagattctccccattcctcagagtttgttgatttctatttttgtttttgtcctgtgattgttgtaagctgtctctgtaccagggattagcatgaggtataaacttaaagtcttttcaggtatttttaaaggcctgcatctatccttgagcatgcactgtgactttctaaattcctgaatatgtggtcatttttcattctttgagatggagtct

SEQ ID NO: 264931 - DNA, 558 bp, Homo sapiens
atatgtcaacatttatcaaatctacactttaaacatctgtagtttatgtatgtcaactatacctgaattaacttataaaaaagaactatgaattagtcactgacgtcaggtaaaaatgaaaataaatacgtgtgtcacacacaaaaataaaaaatattatagctcattgtcatggataatgaaggagactaattctgcctgtgaaaacttcacgccctgcaggacaggagctctgtgagagagcaactagtggtctggaagactggaggaagccagagcccagtgagtgtattagagaaattcaaaaaaaaagaggtcagttcaaggaggagaagggacacctcctctgagaattagggaagaccttgaggaagaagcaagatttttaattttttttttttaattttcatagggttttggggaacaggtsgtatttggttacatcagtaagttctttagtggtgatttgtgagattttggcctacccatctcctgagcagtatacactgaacccaatttatagtcttttatccccagagtcaattgtgtcattcttag

SEQ ID NO: 264932 - DNA, 646 bp, Homo sapiens
agctctgacaggttgtgtaaaagttgtgtaaaagcagcaacaaaacacgtctctgttcattctcaagttgctgctgctttctgcacttccagcagtgctggggctccagtgttccggctacagcagtgccactgacacaggcgttgggggcaggagtgggcctgcctggcagagagatggcagtctcccgagcctgtgccatgtctctaggctgctttttcttttactttttgagacagagccttgttttgtcgtccaggctggattgtagtggtgcgatctcggctcactgcaacctccgcctcccaggttcaarcgattctcctgcctcagcctcctgaatagctgggattgcaggcacccgccaccatgcccagctaatttttgtatctttggtagagatggggtttcaccatgttggccaggctggtctctaactcccgacctcaggtgatctgcccgccttggcctcccaaagtgctgggattacaggcatgagccaccacacctggcctaggctgctttttcttgttatcaccatggcagggtgtggaggcagagggccctggttttctgctccaccttcaacccctgctgctcactgactcccacaaggaggtcatcttgccctttctttttcatcaca

SEQ ID NO: 264933 - DNA, 257 bp, Homo sapiens
tctgttgcatataccaataataattttcttttagggatatattctgaaatgtttatggatgaaattatacaatgtctgggatttgctttcaaataattcaggtcaaaagagtggcatgaataatatggcagaatgtgaagtcccaggccytccttcctctacagagacactgacacaacaacacacacaccagctgcctttgtgaaaaatccagaaacaagttaagaggctcctgaactccaggaaaacatgaagcc

SEQ ID NO: 264934 - DNA, 428 bp, Homo sapiens
ggaattgttatcagcttaaaatagattgtgataactgtaagatgttttttgtgggccccatagtaatcacaaaggaaatacatatggtagatacacaaaagaaaacgagaaaataatcaaagcataaaaaaaatcaacaaatcacaaacgaaagcagcaagagaagaaaaaaragacaaaataactacaaaacagacaaaagacaattgccaaaatggaaatagtaagtcattccgatcaataattactttaaatgtgaatggactggccgggtgcggtagctcacacctgtaatcccagcattttgggaggctgaggcaggcggatcatgaggtcaggagatcgagaccatcctggctaacatggtgaaacctcatctctactaaaaatacaaaaaatcagctggctgtggtggcactcgcctgtag

SEQ ID NO: 264935 - DNA, 428 bp, Homo sapiens
ggaattgttatcagcttaaaatagattgtgataactgtaagatgttttttgtgggccccatagtaatcacaaaggaaatacatatggtagatacacaaaagaaaacgagaaaataatcaaagcataaaaaaaatcaacaaatcacaaacgaaagcagcaagagaagaaaaaaaagacaaaataactacaaaacagacaaaagacaattgccaaaatggaaatagtaagtcattccgatcaataattactttaaatgtgaatggactggccgggtgcggtagctcacacctgtaatcccagcattttgggaggctgaggcaggcggatcatgaggtcaggagatcgagaccatcctggctaacatggtgaaacctcatctctactaaaaatacaaaaaaycagctggctgtggtggcactcgcctgtag

SEQ ID NO: 264936 - DNA, 587 bp, Homo sapiens
atttgcaatttcatttaaaagagcaaaacatacargaataaacataagcaaagaaaatccctacctaaatcccaatggcactttttgcagaaacaaaaaaaaaatcctgaaatttgaatggaattgcaaaacaccctgaatagccataataatcttgagaaagaagaacaaagctggaggcttcatacatactgttttcaaaacatattacaaagttacaccaatcaaaagagtatggtactggcataaagacagacatatagaccaatataacagaatagagagcccagaaatgttcccttcacatctatggtcaaatgatccttgacaaagataccaagactacacaatggggaatggataatttctctaacaaatttggttaggaaaattcatatgtaaaaggaaaaagttaggcccttttcttataccatacacaaaaattaacttgaaattaattaaaaacctagagataagacctgaaactataaaattcttagaagaaaacataggaggaaaccttcatgacactggatttggcaatgatttcatgaatatgacatcaaaaacacaggcaacagaagcaa

SEQ ID NO: 264937 - DNA, 533 bp, Homo sapiens
gctgttttgtgtaaccaccttcatcagtgatcttagctagatcttctggataacttgctgcagcttctacatcagcacttgctgctttaccttgcatttttgtggaggtggcttctttccttaaccctcatgaaccaacagctgctagctttaaagttcccctatgcagcttcttcacctctctcagccttcatagagctgaaaagacttaggctttggcttaaggaaatagtttatctgatttgatctatgcagatcactaagactttcttcagatcagcaataagtctgttttgctttcttattcctgggatcactggagtagcacttttaactttcttcaagaacttttcctttgcattcayaacttggcgagctatttggcacaaaatgccaagctcttggcctgtattgactttcaacatgccttcctcactaagcttaatcatttgtagcttttgatttaaagtgagagatgtgtgactcttcctttcacttaaacacttagaggtcattgtagggttatgaattga

SEQ ID NO: 264938 - DNA, 685 bp, Homo sapiens
gcacacacatggtgaagatgccccagtctgggctcggaggtttgatttttttggattttttgtaaagctctaaataaaatccctcaggaaaatagtacagttaaggaaaagatgagcacatgcacagaaaaaaaagagaacaccaggcccagaaatagataaggcagccctaggacctgggagctccctgcttgttctcacccctgtgggtgcagggatcagggctgaggctgagtctccagaacaatgcaggaggaagaccagctccccttagcatgtctacattgtagggtcgtttataatgatctccatgcagattttttggacagtgtgcttttcactgaaatagcaaagatcttggtaaaggaactcttactgtctatctgtgttttttgaattctgtcctgaaaggcacagcctggccaccagttgactccatggggcacctgggtcaggaggtgaccacaccgctcagttggactaatcccctttcctcaccccatggtggatgcagacccagcactcgtgcaggcaggctacaggggaggaagaggaagcctgggctgaactgttaggcacagatccatcamccatggggctgtgaccgggaacccaccagaactcaccatcttgtttttttcacctacaaatggaagttcttgtcaacgtatatctcacaggaatc

SEQ ID NO: 264939 - DNA, 528 bp, Homo sapiens
ggctagtccaaggctccagtgggtcctgggtccagggtccaagcccattccaatagaccccagcaccaggccagtcttcatggaccaaaactccaagaacatacttgtagatccaggctgtatgctggcctccacaaaccaaggactaaggcccacccccagcactaggctggcccatggacccaaaaatcaggctagtccctgcagatataggctccaggcctgccctgatagtcttaggtcccacacccacccatatagccrtcttatccaggcacgtcccatcagaccctagttcgaagcccaccccagtggacccagactccaggctcaaccctgcagacccagatgccatgtcctgtccacacacctgctgactctgacactgggccagcctgcccaaggactccagtggcaagcctgctgaaggatcacagtaagcagcctgtgtgaatctctgatgaagggctttccctgcctaagcccgtctgtaaagactgaaataagagactacttcttcaaatgtgc

SEQ ID NO: 264940 - DNA, 653 bp, Homo sapiens
ccggcagcaccttgatcttggacttccaaatctccagaactgtaagaaataaacatttgctgttaacacaacccagtttatggtattttgttacagcaacatgaactgactaagacactcgtccaaaatggtttcttaaacaaacacacaaaataactccccagtgggaaattttgcctcagagtctaagttctttatggctgggctaattttctctgattctgtcagagtgaaagttcagccagaagctattcttctatctaactcygaggaaaattaatagatttttctccttagcctttattctaggctaaataatcactaatcatttagctttcatttgtggtcttactttttacagttttaaatttattttttgcattcgaggatgtttctcttacaccttctctaggttctgcatggctcacagttgtagcacccagttctgcataatccagagagattctgtttagttggtccagtggcctcctccccaccctcttttgcttctatctgaggtttaacttaagggacatgagtcaagagagtaagaggaaaccttgggaatttcttacctactcattttctttcttctcttatttccaatctcacaagcacatccttccaaacctagaatcaattttatgttcatt

SEQ ID NO: 264941 - DNA, 610 bp, Homo sapiens
ctgacagattcaaatcccggaaacagagtcgagattcaaagcaagcagtctggtgccagggccagtgctcacaactattgtgtaataaagaccctttgctatggtccatsctttccatgatgatttgaattgttatgcttaaatatatgcatataaatactatatatacacacaactatgcatacacaatacatatatatgaacaaaccacataaatacatatatgtttatgttattattttccattgataaaatacacattgtcaatatcagattgccttagttattgtggctttatagaatgttctgatacatttcttggcaattctccagcatattctctcccaaacaagttttagtatgacaggtccataataaatcatatgggatttttaattagaattgcaataaatttatagatgaatttgtgggaaattatcatcctaatagtattatttctttccaagtttatctcacagaagtagagagtggaatagtgattccagaggcaggtaggggtggggggaagcacagccaaaggttggttaacaacacaacgcacagctagatgaaaggaatacattttaacattctataccactgtaggtga

SEQ ID NO: 264942 - DNA, 552 bp, Homo sapiens
aatgacatgttaacaaagaaaaaagaaatgaaggaaagaaaacacaatgaaaattgattggaaactgagtcatttaatatgaaaggagacgagacttctttctacctgcccttttgctcaaacgtgatcaaagaagcctctgctataaaggaagcaatcggggacaatgttatattttaaattaatacacgtttgttgaaaatgtgcttggatcatggcattgcctatttttcacagtgtggtgcaacttatatgtctgtcagattctaaaatctattttgctgatctctgtggtatgtatttttggttttctaccttcaaaccatccaatctccctgatggttttcaacaggatccaatatttactkgtgtcacctacttttctattttctccactcaaccctgtgtatcatcaagcaattagataaggaattggtgcaagatttagttctaaccaacaagagttgtggggtactttttcttaaaaagaaactcaaagaaagaaaccactctgtctactggacattgtcagttgtcatgtctgcaggccaa

SEQ ID NO: 264943 - DNA, 594 bp, Homo sapiens
ttggaactgatctttcaaaaaacacaaggtatctttattaaagacaacatataggatatgtaatcagagaatgaggaagaaaataattgtcacatctctacacctgaaatttccaggtattcttcgagattatacacaatgctattaacagaagccattcatgtattactaggcattgttgaaataatgaatcagcaataaatatgcaagagaatgatkgtcagtatattattttcaaatattaaagaggaaaattttggtacagctaaatgattggcattagtcaaaaaagatacttttagattataaggctaccactaaattagtatttaaagaccatatattaataagttattaataaccttcaagaaagtagctggtacctttctaaatgaagctaatgaacaaaccttttgttcttgttaagatttaccttctgtaaaacctgtctggctaatactaacatcttatatttggattatcctgaaagacagaccaggaacgtgttaccatctttatattttacttgaagacacaaacctcaggaatgattcccagggtcatagaactgtgtcctgaatttagatcccaaga

SEQ ID NO: 264944 - DNA, 594 bp, Homo sapiens
ttggaactgatctttcaaaaaacacaaggtatctttattaaagacaacatataggatatgtaatcagagaatgaggaagaaaataattgtcacatctctacacctgaaatttccaggtattcttcgagattatacacaatgctattaacagaagccattcatgtattactaggcattgttgaaataatgaatcagcaataaatatgcaagagaatgatggtcagtatattattttcaaatattaaagaggaaaattttggtacagctaaatgattggcattagtcaaaaaagatacttttagattataaggctaccactaaattagtatttaaagaccatatattaataagttattaataaccttcaagaaagtagctggtacctttctaaatgaagctaatgaacaaaccttttgttcttgttaagatttaccttctgtaaaacctgtctggctaatactaacatcttatatttggattatcctgaaagacagaccaggaacgtgttaccatctttatattttactygaagacacaaacctcaggaatgattcccagggtcatagaactgtgtcctgaatttagatcccaaga

SEQ ID NO: 264945 - DNA, 545 bp, Homo sapiens
ttgcaatgctgtagttccaagccatctcatcatgccaattcatggcaatgtcacactccaaaataccaatttgctaacgaaattatttcctaaccaccatgttccaagcctacgtatttaacaatacatacttgtgataagattttcatcctcttttamccccttgtcttctgtttcctatgcctcatttggctgaggctatggattagaagtagcaagggggaaaagtctttattagcacaatgactcatcaatattacaatataaaaggcagtaaaaatcaccatgaaaaagtttgccagctcaagatgtactccgaagacaatgaaaatcttaaagattcgtttaagtatagtttgtaaaaacttgcagcagggctatgtaggaagtaactagaacttttagaccttgagactcttttctaaatggaagtgaaaacctgggtgtgaaggcagtattaaaataaatcaggcaggtcttgtaaaaaggaaagagaaagaggaagaccggtcactacatgggaagggtaaagaaatattgtgtac

SEQ ID NO: 264946 - DNA, 496 bp, Homo sapiens
attaagatggctaacgctttcagaaaatataacccacgatgttccttgaccagctatcatttgatccgggaaatagaaatttaggatggggttaatgaaaatatcccattagaaaaaaaaaaaagtcaaagtgtcagatggattctactaccaatttccgtctctttgtttcaagtcccatctgcccaagccctaactagctggtcacagtgatgacctacagattgcaaagttaggcaagcccaggcctctagtcaataagaatggtatctgaaaggatattgggctgtttccctgatttttttgaaatctactgtagaaaattcaaatccctccatgaccattgagggatcatctcctcatcttaacacctatcatctgtgttctggtcttctcatgacccatccactgagtcatttgcatttcctactrgaactggaatatggtttctaatggttggcttttttgacttgaccctcacctaactcctgcctgc

SEQ ID NO: 264947 - DNA, 612 bp, Homo sapiens
ttcagatcctatattgccactaacctttaagaaactacctttaatagagttgtggtgtgctaccaaagaaaaagaaccacaattatctaaaaaggccacaaaatatttctgccttttccaactacaattctgcataaggtccattttcttcaagcacttcagtgamaacaacaagctgtaaaagattgaatgcagaaatagttatgaaaatccatctgtttttctttcaatgcagacattgaagagactgtgttttgttttggaaataagttacttttcataaaaatgttacttacgttaaaacacaattagcatattattgtgattttcaaattaattaataaacacttttttctaaacgttagtgttaatttttaatacagtcaacattaataaacatgacccatataaataaaagctcttggatttcctcaatcttttatttgtttttttaaggatatgagtccctgagaccaaaaagtctgagaaccactaacataggaaaaaagaagaaatgtagtataagagccatttttttaaaaatcgtttatttaaaagggtgttaaggtgcataaccaactactagtacattcctcacttattaattaggac

SEQ ID NO: 264948 - DNA, 623 bp, Homo sapiens
gaggtttatcaaaatggggcatgggatgcaatgaagtagcagagacactcaataatttcgacttggaagactggaggattcattaccataaaaaaactgaacatgggaaatgaattataataaaaatataatgactgggtgtttaktttgaataaagaatagaacatcactgtgtaataatcgctgagaggtttacaggtcaaatggaagattgttctgcaagagaaaagaaaggtaaacactgcaagcaactacaggccatgaacgatggtaaaatcgatgtgggagacagagcactgaactgggagtcaggatacctggcctctactgaatttttagcaaataacagacttttcctgcaccctagtttcctcatctgtaggcattacataaacaaatattttcatttatgtttctgtgagctcaagaacattgcctggtatttcatattattaagtgcttaattttctattttagtgaaagtatgctgcaagaatttagagacagtggcaggtaaataaagacagcaataaggcaaaaaaaaaaaaaaaaaaaacccagcaaattgtcaataaaaacagtagttaaaagctgatttctggaggcagactgcctgagttcag

SEQ ID NO: 264949 - DNA, 612 bp, Homo sapiens
tctaatgaaattcaaggatcagctagcgtgagcctccttttttaatgacaaaaatatatatattgcacagtattctttgataatctttgtcaacatttttatttttattttgaaagttctggctttctataagctctttgtagttaatcacaggcttgtgatttgtccaaaaagcgctttcaggatcgatgtggttcctggttagcatcttgttctcttacattaaaaaaaaaagaatacgattattttgttattcatgaatactttatggtacttgttttaacagggaagctgaatgctatggccattgaacattttcaaactgtctacatggtagaggaagaaaacctagtggaacagatgtacactgtgttttcttctttttcacagaaacaaactcacctctccttgatcttccaccccgttgccaagttcagtattctgaagaatattgagaaaaaaaaaagtaaactgatactggccctgtcagagggtcttactaatttccagttaattattttggggttttgactggctctggtgacaacaaaatattcaaccaattctgttaagatatcatttacmtcatttattcaactcctgggtcacgtt

SEQ ID NO: 264950 - DNA, 513 bp, Homo sapiens
tggttcctggttagcatcttgttctcttacattaaaaaaaaaagaatacgattattttgttattcatgaatactttatggtacttgttttaacagggaagctgaatgctatggccattgaacattttcaaactgtctacatggtagaggaagaaaacctagtggaacagatgtacactgtgttttcttctttttcacagaaacaaactcacctctccttgatcttccaccccgttgccaagttcagtattctgaagaatattgagaaaaaaaaaagtaaactgatactggccctgtcagagggtcttactaatttccagttaattattttggggttttgactggctctggtgacaacaaaatattcaaccaattctgttaagatatcatttacatcatttattcaactcctgggtcacgtttactaaacagctacttgagaaaatggaaaaacgagtccaaacattgtttaaytgacccataggcacaataatttgtttcattaacttgttta

SEQ ID NO: 264951 - DNA, 479 bp, Homo sapiens
ctatggttagatgtcagagagaagtgacttgacttcagagggacagcttgatggcatagctttggagaggaatccggccgttcctcctccatcccctttccagctccccttcctgctgagagccactttcrtcggtaataaaatcccctgcacttaccatctccaatttgttcctgtgaccttattcctcctggatgccagacaagaatttaggtgccatgagtgcgggtacaaaaggctgtcacactgaccttccactgagcttttaacacttaagccatccagccatccacagatggcaaagttgaaagggcactgtaacactccttctagggcttcaggtgttgcaggcacccccctagatgctgctgtggggtctgcacaaagttttgctcctgccggcacccaaaaacactcatcctggctcccgtgtccactcacctgctctccccctcccacaaaaggtggaacacaactgg

SEQ ID NO: 264952 - DNA, 477 bp, Homo sapiens
caaccctgtgatgtacacactcttatgacactaattttatagagaaggaaactgatttcagagagcttaagtgattagaagcaaatccatgactagaccttggtgtccttaaccctcagggcaatgctttggcactctacaatcttacctcctagaaacaccttcaaaaccaccctatgattagaactgaattttagcatctacaaaaattcacagttcacttttagttctctrttttcctgggttcttcccaggaatttaagttattttgagaccagagaagcttaaggcattgacattccacatgccctcaggatttaacttaagctccaggctgtttcaataccaaagattttgcctcaaactttgccaccactgagaacttggggatgtgaaaaccactgaggcagcaatggcaaagagaagagtgggaaaggcctttccaggatccatgtgcagaattagatttgtgtacca

SEQ ID NO: 264953 - DNA, 552 bp, Homo sapiens
cccgattcttgggcagaactctggtctagagagaactttccttattccaagaagcaccgtgagcagaagacctaaaacaagacccatagagtaaagggacatgggaaacaaaatggcaaatctgacatcagaaaaaaatgaagaagaaaataaataaaaaatatagccttcatacttttaagtaaaatgartgtaagctagttgcaaaagacataaaattaataaaagataacaacttaataaaagatatcaaatctaatctgtctctctcacatgcacagacacacacacacacacacacacacacacacacacacaaagtgttgaaaggataatcaggcaggccgattttaagaaataaatgtaaaaataaagtcatcaaaaactgtcaccgcattaagaacctaaaggattaagaaagacaacatagaaaatagcatccatgagcatagaaggcttgaaataatcacagaaaaagaaatgaaacaaaaaaattagaaagcgattagatacaatattatagatatggaagtcagacatagaagatacaaa

SEQ ID NO: 264954 - DNA, 552 bp, Homo sapiens
cccgattcttgggcagaactctggtctagagagaactttccttattccaagaagcaccgtgagcagaagacctaaaacaagacccatagagtaaagggacatgggaaacaaaatggcaaatctgacatcagaaaaaaatgaagaagaaaataaataaaaaatatagccttcatacttttaagtaaaatgagtgtaagctagttgcaaaagacataaaattaataaaagataacaacttaataaaagatatcaaatctaatctgtctctctcacatgcacagacacacacacacacacacacacacacacacacacacaaagtgttgaaaggataatcaggcaggccgattttaagaaataaatgtaaaaataaagtcatcaaaaactgtcaccgcattaagaacctaraggattaagaaagacaacatagaaaatagcatccatgagcatagaaggcttgaaataatcacagaaaaagaaatgaaacaaaaaaattagaaagcgattagatacaatattatagatatggaagtcagacatagaagatacaaa

SEQ ID NO: 264955 - DNA, 552 bp, Homo sapiens
cccgattcttgggcagaactctggtctagagagaactttccttattccaagaagcaccgtgagcagaagacctaaaacaagacccatagagtaaagggacatgggaaacaaaatggcaaatctgacatcagaaaaaaatgaagaagaaaataaataaaaaatatagccttcatacttttaagtaaaatgagtgtaagctagttgcaaaagacataaaattaataaaagataacaacttaataaaagatatcaaatctaatctgtctctctcacatgcacagacacacacacacacacacacacacacacacacacacaaagtgttgaaaggataatcaggcaggccgattttaagaaataaatgtaaaaataaagtcatcaaaaactgtcaccgcattaagaacctaaaggattaagaaagacaacatagaaaatagcatccatgagcatagaaggcttgaaataatcacagaaaaagaaatgaaacaaaaaaattagaaagcgattagatacaatwttatagatatggaagtcagacatagaagatacaaa

SEQ ID NO: 264956 - DNA, 584 bp, Homo sapiens
ggatgtggataaacaggatggggagacgttaaatgaagatgtggtctcagcttgagtccagcttcagtctgatcccatagagagttctggagcataaattgaaccacagtgctagccccattttgaggtgaggggctggacttttgttccctcctttcaatcagtcattgactgcaggctgttcaatagggaagggataaataggggtgtaactttagagctagatggctcgacttccatgctgggtaattccctgaaaaagagacagctgggggctttagcaccagcacccacagcagcaggggtctgggtgcatcagtctgtgaaagcgaatcttggcagtttcccaatggtgtctcctgtagagcattgatagctctggttgatgttagctttccctgtcactgactggtcctttrttatcctttattatggcttataaatgtcagttttcagtgtctgaatgcatttcactgagagaaggaaagaaaagaggcgctgtagagggaaaaggaagtggggaaaagcctagactttttttaaggagaggaaatgtgccagtgagctttgtggaagttgtttca

SEQ ID NO: 264957 - DNA, 569 bp, Homo sapiens
agctatgcagaacaggttgcttgttcactaagaaaaagatgtatatatcaagtgctgtcttacaagtgggaatacaaaggtgaggaaggcatagccstagctctcaaggagctgaatatctagtgagaagaaaaagacatactcaagttttgttgcaataaatttcagcagaggaaagctatagggattttagaggaagaggtgaatgactgtccaggcatgctaagaggattcatggtgcctttatgaaataatccttctgatataggagggaaggaatcaagtccatcctacccctacctcctgtttgtttgtttctcagtttgcccagttcttgaacttgttcttttattacatgaatctaaatttcattgaatcccattccttcttcctctggagattttgtacttttccaatgtttttctttaaatgtaggcttccaatcattggtcattgtctcagctgtgatctgaggaacgtagaattcagcatagtgtgctgggaagtggcaatgtacccaaaatgtgtgtggaaggcttgccagtatattagcaataccttccctctac

SEQ ID NO: 264958 - DNA, 591 bp, Homo sapiens
attgactttcaatcactttgtgagagtgaacactgttactgcagggtctagctgctccacccattgttctagatgggagataaaacagcctaactctagctggatgctcagtccaaactctaggatgagggtcaaggcagggactgcactattcattcatgtttgcttttctgggactcctataactgatgccttggatttgtgggatggttggttatgaccagtggctacacctgaggaactcactgtagcttgatggttcatatagatttgagattaccaaaatgttattcaacattcatactagatggtcttgartatacttcaaattcagcatgttctcatctgaactcacatctcaacatcaccacactgtccctttcctttttcttatattttcagagtatcagtataaatctcattgcaccaggcagaatctgaggagaaatccttgcagctccttcttcctgattcatcatcaaagcctactgattttgcctccaaaccattcacttctgttcctctttacatatggacaatgggaggaactgactaaccacttgggcttgtcattctgtttgacccctttcc

SEQ ID NO: 264959 - DNA, 534 bp, Homo sapiens
atacatttttacattatgtgaatttgcrtaagtaaattatccagaataatttactcatgtcaattaacagaaaaaaaaacatgacttaattaaaatctcattacaggaactctcttcaatcaataattttggaaagtgacagacaaagatggtccacagggggatacatgaggacaaacatagctttagataagactgtgtttgcaccctagactggaatgtctcttcctcaaacatgtattaagccattccatttactgagcacctcttatattctaagaactgtacttgtcatcgtggtgggggaagggaggcataaataagctgtgatacttgggacaggacaaccaaaacctagtttccttcaaataggacttgagtcactcatagaagtctttcctaaatattccggtcttcaagaatttctctgaagacttctaaaaagtactgcttatgtcacgtgtgaatcctttcttgatgatgatgatgatagagaagtatttattatgaaagaaagaaagagaaggagagaga

SEQ ID NO: 264960 - DNA, 608 bp, Homo sapiens
tacatatatatgtattcatatatatatttatatgttacagataaaatgaatacatatatatatatacctatacacacatatctcctattggttctgtttctcttgagaacccygattgatacatagatagaagagtgtatgtaaaacggaagcaaatagatcttcatggaagatcagttgggtatgaaagcaaagagctatgaaaagtatatgatgcttatttgcttattgttacttgtacagattttgatatgtattattgtaatgattacttttatgtcaacatgactgaactaagggatgctcatatatcttgtgaaacactatttctgggtgtctgtgaggatgtttctggaagagactagcatatgaatgggtagacagcatcaagaagattgccctccccattgtgggtaggcgtcatctaatccactgaggggcgaaatagaacaaagaggctgaggaagggagaatttgctttccgtttgaaacatccatcttctcctgcctgtagacgtgggtgctcccagttctcaggtttttagactcggatcaaaatatatgccatcatttctctcaattctcaggccttcagactcagactgagt

SEQ ID NO: 264961 - DNA, 569 bp, Homo sapiens
tgctccagtgtctttggtaatttttccttgtgctgctcagatttcccagaaaaccctcccactcttcctcctgtaacagcagaaatctgactgccagagcaactgtcttggagattaaacagtcagcattatttttacatagttacttatttcctttgttttcagtatggtgcccacaccctcaactgtgcttgatgtccctagaaamcttctgttttgctttttactttttttttttaagggaatacgtatcaacaattttatggtgcagcaaacatcttttagagtcatggagttgaagagaatggcaactagtggtctacctgattcttagatggcttcacccaaatatctgttactttgacctcttccttccctttatctgcctctcctggttccaaacatgactgggatgcccccttctggggccccttgaggatttgaggattctgtggtgtaacttgtgttggttttcaattttctttgatactgacttgtaatttaactttctcggctctatcaagttacttcttatccacttgcttttggcttctaaaatttggctgctg

SEQ ID NO: 264962 - DNA, 609 bp, Homo sapiens
agagaatggcaactagtggtctacctgattcttagatggcttcacccaaatatctgttactttgacctcttccttccctttatctgcctctcctggttccaaacatgactgggatgcccccttctggggccccttgaggatttgaggattctgtggtgtaacttgtgttggttttcaattttctttgatactgacttgtaatttaactttctcggctctatcaagttacttcttatccacttgcttttggcttctaaaatttggctgctgttgtcttcttttctttcttcccatttgcaagagtttgtttctacaaaaaaaaacattgtttataatgaatttagtgggtttcatggggaaacaaaattaatgtatgtgtttaacctgtcatcttaaccagtaactcggctggtgtagttttaatgttaagctttcacctatttaacacatatttcttgatctctgtggagygaagaagaacatcatctcgcctccataaattctaagacaattacttttggcatcatttagataccctttccttattaagtttaggatagtcaagctttcaagcactaaaagtgctgggtaataatggtaattagccaa

SEQ ID NO: 264963 - DNA, 561 bp, Homo sapiens
atggtctccaattcttttgcttttatttccagccaatgagctcagggatgtgagttggatagaaacwgtcggctagactaccgtgagatctgaaggataggtgtttattttagtacgtttattcagagaatagcaggcacctaggaaggaaaaccgattacagagataaaaagcagttaggatctctcggaaggataggaattcatgtgcattcagaaagaaaaaaaaacagttgttcttgtgtgtgtaaggaaaatcatctctgtggaaataggttgtttacgttttcaagtcggcaaattcccttcacagccacaccacgtatcaaatagagaagggagacttttttttttggtccctggtgtgcacaaggaggatcccttgagatgcatcctcgtggagcaggaaagatcataatagcaataatgacaacaatgcatcaattgttctcaaaggcatctatggggcagagtatgcttttcaaaggacattcacttctattccatcccatttgatcattatgacaaccgcaggagggagataagatgggtttcattatca

SEQ ID NO: 264964 - DNA, 444 bp, Homo sapiens
ttcaaaggagatgaggacagacactgaggaacctgagagatgacagccactttgatcttcttgcttctactcataacctttaattgccacatagcagacaaagtgatgtttttaagataaaaattgtattttatatatataaatatatttataattatgttatattacatgttttatttataactgtatattacatataaattatatttataattatacacataactattgatacaatatatwaaaaatatattataaacacataattacatatatacaattatatataacttctaggaaaagtaaattcatatatatacatacacacacatatatatatacataaattcattattatttcacagctctgatggaagttccttccgactgtatttccttcctatcatcttaagataaaagacaagccactgtgccataaggcct

SEQ ID NO: 264965 - DNA, 559 bp, Homo sapiens
tcatctctgacctgctctacgttccatgcacgtagagagcatgggtattttgttctccattatagattcagcacatcatactgcacctrgcacaaagaatatactcaataaatatttgtttatattaattaacaaattaataaatatttgttaaatgattacacgcaagaatgaatgatcagaggcctcccatatacagcactatatgtagtcttctaaagcacattgacatagccataacagataaatcagtcacttagaacagcaaccatttatattcttttatattcttagcaatattattatgataaagatgcccacattgcaggtaatgataattccaagtgttcgcaattcatcacctgcctactggacattttcagcatacaacatattattatttttagtattaaagtacataataggaatggaaatctaaggtttgagtaacaggaaatgtgcaacatattttcaaagacagataccaccaattcagcctctctcatgagaccaatggagtgatattttccaaataaggtatcaaatgcaaagtgacaaa

SEQ ID NO: 264966 - DNA, 635 bp, Homo sapiens
tgaagcattcatattccatccagtggtttgtatgaaagtagagtcagcgtgatcaacactggacactgggaggtgactctyggacagccaaacctctcctttctgtgccagcttcccccttaggaagaccctactataccattgtcaggaattccggaattccatactcccttcctcaaaacccccctttttcctgaaatccactctcaggaaaacaggtaagctcctttcaatatacaaatgaatcatcagatcttatactctagctttcctgcagatatttgagtaattgcagaaggctaagctttaagttaaagaagttaatctttgtcatttataatagaaaaaaaataaaagcaaatgactaacagggaagaaattaagtaagttattacttatacctgatggcatgttaccaaagcacattgacagaaagtttaaatttttttcctataaaattattaaacatttaaaacttgtagaatattaatggcaaaacatgcttatgccatatgttgagcaaacacaggaggaaagagtataatacgataaaaactatttaaaatgtcacagaaaaagactagaagtgaatagttgcttttgagtaatgggattatggtttttattttaattta

SEQ ID NO: 264967 - DNA, 584 bp, Homo sapiens
gattaattcatagattgattattttaatgtatggattatgtaaatgtagttcattatgtttatgtcaatatattaaatttttttttttgaggcagagtcttgctctgtcaccacactgcagtgcagtggcgagatcttggctcactgcaacctccgccttctgggttcaagagattctcctgcctcagcctcccaagtagctgggattacaggcgcccgccaccatgcccagctaatttttgtatatttagtagagacggggtttcatcatgttggccaggatggtctggatctcttgacctcgtgatccgcccacttcagccttccaaattgctgagattacaggtgtgagccactatgccaggctctcaatatattaaaatatttgttaagtaatatgaaattaatgtattttgtaaattaaatcattaaataattgataatgagattttrtgtatttaattacattttatataagttaataaattttaaatattataattaatttcactttcattttaactacttttacagtggccactagaaaatttgaaattacacatgtggctgacactttatttcta

SEQ ID NO: 264968 - DNA, 622 bp, Homo sapiens
gagtgtagaaatggaccactgggcagatattccctctttaggggagcacagctactgccacactttgacccagcagggtgggctggtgattgcattcaccgacttttctcctctgattctctcacctcatgctggtgccttcttctgatagaaaaaggaccagcagccccactgcagggaccacagttgacgtggtccctggaggccagccttccagggatggagtggggtgaggaggttggctagtagatctgtagggcaaataaagaatgcccagctcacctttagcagggttgctttgaagattacatragatgaaataagtaaaaccctttataactggaaagacagaggcatctattattaccgttaagatgattcatctctatggagaaactggagcaagtttgagttcaggtagtgggattggaagagtaaagaaagttctgcggcattcctgattccgtcatagcaccatgctcagaaatggtgatgtcatgttaaggtacaaaataaaattccagtgacacagcctcaaaattagtaacacagagatgggggtgttgcgacatctgggttctcattctggctctgacacctttctgcagaacaatcacacaag

SEQ ID NO: 264969 - DNA, 561 bp, Homo sapiens
aaatcaatagcaataatacatacctatggaaacagaatgggctatatttatttttaaggatagtttcttgtgttatttggtttgaatttattaataaggggcttaaaagtaatcatataaaatattaagtatattttcataggaaaataccaatggtattttttgtggcagttaatacacatagagccatgaaagttgaattttccaaaagaaaaaaatgatggtacaggttcagtacacctaatgtaaattcatgaaatcaaagtatataaaggtttttctaggaagttagaggtasagagggctcaattctattcctgtatgtaatacttgttaatgtgtgtgtgtgtgtgtgtgcatgtgtgaatttgtgtgtagcatttattacattataaaatatagtatataaccttagaaactaagctctttccaatattggaatataaattgctttaaatatttggacacaatcactaccatcactattattatcatcatcatcccagctcatatttatgtagtctgagtctgggccagagagattccatgctaagtcctatt

SEQ ID NO: 264970 - DNA, 347 bp, Homo sapiens
gaaaaccttcatgttgttccactttcacttaacaaatagtaaatatgttttacttccttatgattttcttaataacacatttctttagcttgttttattgtaagaatatagtatgtaatacatataacrcacaaatatatgtcaatagactgtttatgttattgataagctttccagtcagggataggctactcgtagttaagtttttggggagtcaaaagttgtactcagattttgaatgcacagggttttagtgcccctaaccccgatattattcaagggataactgtaatcaagacctgacaagtcctgtctagtcatcaaatcaaaagttcatgagtgaggag

SEQ ID NO: 264971 - DNA, 566 bp, Homo sapiens
tactcaggtagcaaacgtgtgcatataccccaagaatctaaaataaaatttgaataaataaataaaaggttaaaaaaaagaatgtagagcttggaaggtttgatgaaccgtcactttcatcgagaatacaactccaggaagtgagagtgaagtttccagaaaacaaagcagaaaagcagcaagagccacaatgagggtatattttggagtggcggagacctattcwttgcttgatcaatggaagcatatttctccccaggaatctgtataatctatatctcagaactttctcccaggggtggaaaaagagataaatatccttgacttgtgtctccctaggccaacatttatcccctgggcctgaactgcttccgtgacagtcaattcatttgcagattcccaggagccacaatagtctgtagggaagcctgggatgggaggtgagaagcagggggtggggtgctcccagcggtgcctgtgtgaagtgggtctgaccccacacacagatgggacaagagtcaggaggtgaagccaagaggatttgaaacgaggcaaaagtgatacct

SEQ ID NO: 264972 - DNA, 564 bp, Homo sapiens
attctttgcttgatcaatggaagcatatttctccccaggaatctgtataatctatatctcagaactttctcccaggggtggaaaaagagataaatatccttgacttgtgtctccctaggccaacatttatcccctgggcctgaactgcttccgtgacagtcaattcatttgcagattcccaggagccacaatagtctgtagggaagcctgggatgggaggtgagaagcagggggtggggtgstcccagcggtgcctgtgtgaagtgggtctgaccccacacacagatgggacaagagtcaggaggtgaagccaagaggatttgaaacgaggcaaaagtgatacctagtccattactgttttctttgttttacaagtgaggaaatctcaggcacagaaagccaggtaagttgtctaaagttgaaatctgagatgtgatagggaggacaatgtaaacacagagattccaaactatcgcatccaaactcccaactactaattcctaatggaaagggttcctcttgaaaactttcagagaatgacctactaggtgacatagactaaac

SEQ ID NO: 264973 - DNA, 509 bp, Homo sapiens
gatttcctaccatttgccaggacaagatcatgcttcaagtagctttgctccttggcttatgawaagaacaaagaaatgctgcacagactgaactccaccaaaagcctggattccagtctaacccagatgataccagtctagaccagctgaccctcagaaacacttaggagaacaacataaatgctgttgctgtaacctttgcagacgtggggactgtttgctcacaacattatcacggttaaggaaataagctggttaataaaacatctttttgtaaactcaaacaaaattattgactaaggaagtggtcatcaataaatgataaaactattaggtgagaggttgatgggaaattgagtctttacatggtgtcagactgtaactccacagtttcttgccaggcagagagaacagacataacatcaatggagagatcaagctttcactaccttagtacagtgagtcactaattatgtgacaaccagacaccataatacagcatatgatga

SEQ ID NO: 264974 - DNA, 441 bp, Homo sapiens
ggtgaggacagggtgacttataatgcattaaagtgatgccttctaaaaagactatttctatttatgaatagattgatttattttatgaataaatttttaatgccttaacctaaacaaagaagtaacattgtcaatatattaggcctaatcaaagaagcagtccaagacatctgttgttcctataatggcaccaagtaagccattaccttctccgcttttatatctgatgataggtaggtaggtaggtaggtagatagatattaaactgataagaacagatactacacttgttcttagccaaaaggttgagaagtgatgtgatgttagataaatagataaatgatgattgatacayagatagatagatagatagatagatagatagatagatagatagagagatagtagatttatatgttaaactgaaattgaagggaaaaa

SEQ ID NO: 264975 - DNA, 603 bp, Homo sapiens
tacgttatcttatatgagagaaaatagactttattcagctttgcagatatgttgttttggatttatttaaaatagcaggtatttctctcttttagtgcaaagattcagttatagccaaataaattcaccttaaatattatcaactgcaacctcagaaaattcaaatttaaaaagtcaaagtttcagttaaacatccccagatttctctgcaagaaactatgatttaaaattttagaaagaggcagactcatctacattttaggttaggcagacccaaactcattttaaaatctgattatacatatattcaattckgtgcttaatagagagtataatcctagggagaaatctatgatcctttgtttaatcttattgtttgtgttgggatatttttacaaaaagttttatttaaaaggataatagctaagttgagtagaaatggtgttttgtcttcttagttaaaaagcttttggaagaacatttctgaagaccactaggccataggccaggcaccaatttctgtcagtctgttaacaaaaatacaaggcagggacttagcagaatataagcattattttgaaaactaacctagaaaacgcaatt

SEQ ID NO: 264976 - DNA, 519 bp, Homo sapiens
accattctgcagtcctgccaactttattcccaaatcatgattcgttgttctctgtctctttcctcttgataacataccatatatttttctccatcacatctatttgcctgctcttcttaatttctgtactccttttaccatgccrtacccattaactatgtcttcttgccttcctcttgtctaaaacaagtgaaatttctttactcatccttctatgaaaaaacaaaaaacaaacaaaaaaaaaacactcttcccaattcattggtagctccagaatttctacacaggatgacccagaggcagtaattttgttggaaagacatgccaaagaacatatcttgagtctgtcttgcagagcagatgctgtgtttttgtttagtgttggcttctgtagggtggcctggaaggagtggtgtgctaattagctcagtcacagtcctgtgggctagtttttgtttgtttgtttgtttgcttgccactccagactttttctccactcttccctaccttgtcctgtac

SEQ ID NO: 264977 - DNA, 550 bp, Homo sapiens
gtagtcactctcttcatacagctaatatttcactgaaagttttggaattttttttttttttttgagatggagtcttgctctgtcaccaggctggagtgcagtggcaccatctcagtgcactgcaacctctgcctcccaggttcaagtgattctcttgtctcagccttccaagtagctaggactacaggtgccggccaccatgtccagctaatttttgtgtttttagtaaagatggggtttcaccatgttggccaggatggtctccatctcttgacctyatgatccgcccgccttggcctcccaaagtactgggattacaggcgtgagccactgcgcccagccagttttatgtgttcttaatatgcaaacgttgaaatttgaatgaaaaacagtcatattaattgtgatttagcacatttgttcttaataagccctgtagatgttattgcatatttctgggaattcaacttaaaaaatgtaatatgattaagcttccatggaacagttaaaagttttataaaaatatagcaggaaaataaagaaaattcta

SEQ ID NO: 264978 - DNA, 550 bp, Homo sapiens
gtagtcactctcttcatacagctaatatttcactgaaagttttggaattttttttttttttttgagatggagtcttgctctgtcaccaggctggagtgcagtggcaccatctcagtgcactgcaacctctgcctcccaggttcaagtgattctcttgtctcagccttccaagtagctaggactacaggtgccggccaccatgtccagctaatttttgtgtttttagtaaagatggggtttcaccatgttggccaggatggtctccatctcttgaccttatgatccgcccgccttggcctcccaaagtactgggattacaggcgtgagccactgcgcccagccagttttatgtrttcttaatatgcaaacgttgaaatttgaatgaaaaacagtcatattaattgtgatttagcacatttgttcttaataagccctgtagatgttattgcatatttctgggaattcaacttaaaaaatgtaatatgattaagcttccatggaacagttaaaagttttataaaaatatagcaggaaaataaagaaaattcta

SEQ ID NO: 264979 - DNA, 604 bp, Homo sapiens
tctccaattccttctgccatctccttaaaactttcccaggcttttcccttgaaacttggatgaaatcaaggcttgatgatctggctcctrgctctctcttcaacctcttatcttcccatccatgccttcctggcccaagtgttccatcacataggatgttacttgtgccttgaggatactatgttcttcttgggacgtgctttatccaaatctttaagtggctccaccctcttagtatttgggttacaactacacttatatatgatgtgcattgctcaataaagcaataagaatgattactgttcctatatatcagttatacatcattaaatatgaagtttattatacctattataaaaaattacactttaaatattttttctttgtctcttcttgctgaaagaaggctccctgtgtatggggctgtttggtttattcattaatgaatcctttctgcctagaaaagggcctgcagcatagaaggtacttaattatctctgttgaatgaatgaactcaaatatctatccctcagagagactttcccaatcatgcagggtaaagcaacacaaatacccatacagttatttcttatccacattacat

SEQ ID NO: 264980 - DNA, 622 bp, Homo sapiens
gtgtttggactctggtcagacatttaaagtagtttctaatcaggctttattttgaaaacagattcaaatacgatggaaatattcacatgcaaccaaagggtgtctgagggagccagtgctccaaatgttctctctggcagaggtcttcaaagaagcaagaaaaatctgaggctgatttaaagtgttagatgatttaaaattacttagcatgatcaagaagagtgtttattatagttctatcaagctttaccatctgataaatcagccttgacacagagcataagcctatgcttccaaataggaggatctgggccagggctgggactggactttggaaaggaccttcttattaaaaggawgttgcagaggctcatttagtctggggatgccacgaggctggtgttttccaaaatgtcttctgcacagcagtgtccacatgagatccttgggccaaaataattatcgtacggctatgtaaatttagaaaacactatacactatggctctgccaccgctcagagattcacaatgcatattagaaggatattaagtactataattctgtaattagaacagctgcttacttttgccctaattcaacatttatcatttgaccacaggc

SEQ ID NO: 264981 - DNA, 554 bp, Homo sapiens
tttcccacttcaatactatctacctcttgcctttagacaggggaaaacagaggcacagaaataaaaacaaaaatgtccatctgcaattttcgctccatcgctacaccactggcttcctagttcggtggtacacagtaatgcccatgagacccagaaagaggtttgtccaaaacatcttggtggagctgctctggattttgctctgggaagattagtccgtggctccactctgaattcrtgctgtagtcttgggcacacaagttggcttctttgaacctcggtctctccccatgcaaaatgagggggctgatttaggtggtctccaaagacgcttttatttctgacattcccagccctccgacctcctcccagcatgctgccgctgctccagcaggcaggctcgctaacacatggatttatgtgggccactggctttccccagcagcccatttccgcagcttattaccagagggacagaagtcattagcctgctttgcttactgaaggcttcactctcgagattttatgtagtggtggcagctttaaccccccgg

SEQ ID NO: 264982 - DNA, 506 bp, Homo sapiens
ttgggacctaggcatgatgatagaggatggacaagatagggccrgggagtcagaaagccaacaatcccatattgtcttttgacatttggcagaagccacatctatgcagtggaggatgcccttgagccacttttctgtactctccccaagtagcaactacatccgggggcgatctccaacctggtccagaagatggggggccttgtgttttaggggttagttttgcctgttcttgcatccagactatggcaagtttattttggttgaaacttggctcatctactcccagagaccgatgcctcctttgtatggaaactctccttcactttgtggtttccagacggacacttggtaggcctggcccagctggaaggccatctagagttacatcttcataggggctcagacagattgttttcctcaagcttctcaaatgttttgcaaatgaaaaacaaaaaggggaaaaaaaagaaaaggaaaaaagcaaaacaacccctccccttcca

SEQ ID NO: 264983 - DNA, 574 bp, Homo sapiens
aggaggcatttttttccatcagatctcagcctctactggttaccttgaaagcagaaatcatatccagtcatctcttcacatgcacatcacagaagtctcagcttgaaccaaaataggtgctcaggaggatatttgcagatgcggtgcagaagggactatgcttggaccattcatggaaggacctcctacctgataccctgatgcagaaggctggggaatgatcacattatgtcctctggytgagtttcagaacaggtgagggccttggttatctggactgtgttagggatagacttagctcaacaaagaggggctggggagaatccatgtgcctcagtggagcccctttcccttacagtgagggccttaagaagccgaagtgtagtttaagcagaagctgagttcttgagattctatccaggggaggttaagtgttggcccgtttcctgaagagccagtgcttctaggttctgagaatttgttccctaatctctgcttacaggactccaggcggctggagtctgcatgaaaggggcctttgtctgatatgggaatggtttttggggctaatctc

SEQ ID NO: 264984 - DNA, 565 bp, Homo sapiens
attgaataaaaaggcattttgactgggccatttaagtccatttcatctctaagatgtgccaaggtcccaagcttcagtagaattgtgtcagagagacaggcattgggcagtaagtagccccatcctcccaccctgctaaytgaaggcttgcctcgggtctctctcttctccaagtcattctagtcactactattaatcttggcagatctttgatcatgtcacaacccaaggtatgtaaaattaaactcaggttctccagtctgacatgtagagcccctcactttttggccctgcaattatgacatggtggtttagatggtctgaattcaaatcctagcttcactacttaatagggatgtgagcttgggcaaattatttaacttctccatgccaaagagagatttagtagactgggctgggggcaagggtccaggaagcaagcatgttctcagccgaaatgcgaagttcagttttttccacccgtcaaatgggagtggaagcatcaccttacttacttaactgagtcatgaggattaaacaaagaccacctgtcatatattaagag

SEQ ID NO: 264985 - DNA, 590 bp, Homo sapiens
gttttgggacttggggcctaatgagaggtgattagaccaagaaggcggtgtgtatgtattagtgctgttatcatgagagtgggcttgttattgcaggagtggtttccttataaaagtgcaattttaactatttggcctctctctctctctctctgtctctctgtctatctctatctctttcaccctccaccttccaccatgggataacgtagcaagaagtcccttgccatatgctggccccttgatcttagacttcccagcctccagaactgtaagaaagtaaatttctgttctttataaattatccagtctgtggcacttagaaaaaataatagcacaaaatagactaagacacaaaggaatggaaaattatgttggggttaggatcctggkggtcaaagaagagtgattgcctcccttatccttgggtgaagaggaagagactcatatgtgccttctaggaaacatcatgctattttgtttggtctcttattctccacctgcttgtccgtgttcactgctaacgagggatcctggctgaaatgtagtggtcatgtggtggtgttgggaagaagaaggctcgtacaatg

SEQ ID NO: 264986 - DNA, 590 bp, Homo sapiens
gttttgggacttggggcctaatgagaggtgattagaccaagaaggcggtgtgtatgtattagtgctgttatcatgagagtgggcttgttattgcaggagtggtttccttataaaagtgcaattttaactatttggcctctctctctctctctctgtctctctgtctatctctatctctttcaccctccaccttccaccatgggataacgtagcaagaagtcccttgccatatgctggccccttgatcttagacttcccagcctccagaactgtaagaaagtaaatttctgttctttataaattatccagtctgtggcacttagaaaaaataatagcacaaaatagactaagacacaaaggaatggaaaattatgttggggttaggatcctggtggtcaaagaagagtgattgcctcccttatccttgggtgaagaggaagagactcatatgtgccttctaggaaacatcatgctattttgtttggtctcttattctccayctgcttgtccgtgttcactgctaacgagggatcctggctgaaatgtagtggtcatgtggtggtgttgggaagaagaaggctcgtacaatg

SEQ ID NO: 264987 - DNA, 632 bp, Homo sapiens
tggcacttagaaaaaataatagcacaaaatagactaagacacaaaggaatggaaaattatgttggggttaggatcctggtggtcaaagaagagtgattgcctcccttatccttgggtgaagaggaagagactcatatgtgccttctaggaaacatcatgctattttgtttggtctcttattctccacctgcttgtccgtgttcactgctaacgagggatcctggctgaaatgtagtggtcatgtggtggtgttgggaagaagaaggctcgtacaatgagatttgatgtccctgtcccacacagggatggttccactctcagaacgtggcccagtctctatctgccagaagttctgacagaagagcagagtttcagcactgtcttgtgccatagcatagaatgcatggatttccaaaggcaaaaaggactggcagacgacacccagtgagaactggaacccttcacccattctgcaaggtgtttcaggcagtggctggaggcagaggatgatgcacttccatcttagtgaatttctagtgtctcagagcctctgkcctgtccatagagcataactgtgcctgttgagggcatggctctagcacatctactttcatcctctccttcccaccaaa

SEQ ID NO: 264988 - DNA, 574 bp, Homo sapiens
ggatgctccgttttataagagagaattgagacccaaagagaggggaagtgacagctcacgggggcccagctgattcgaggcagagacacgtgggggaccctggtcttctaaccctcagtccagtgctcattctaccccttgcgaasgccctgaaatgcaaccggtgtcagtcccctccaccagccgacctccccctctttgtggttctgttttctcccaggtgagggggggtgaagatgcctctgctactcctagatccttgagccactccctggccaactgtatgatctctggtaagtcccctcgctgggatttgcttttcctaccagaacaatgaagttattggatcagatgatctcgaaggtagcttggaaccttgacctttcctggttccatgtttgggctgtgtccccagttacaagttatttggtcgaattgaagaatagaaccttgcagggtggtgggtgacagatgcaaactccagctgtgaatctgaccagactctgtgcattgagctggttgttttcatgtggagggtgcaaccttgttccccaggacttgagagagtcaggtc

SEQ ID NO: 264989 - DNA, 574 bp, Homo sapiens
ggatgctccgttttataagagagaattgagacccaaagagaggggaagtgacagctcacgggggcccagctgattcgaggcagagacacgtgggggaccctggtcttctaaccctcagtccagtgctcattctaccccttgcgaacgccctgaaatgcaaccggtgtcagtcccctccaccagccgacctccccctctttgtggttctgttttctcccaggtgagsgggggtgaagatgcctctgctactcctagatccttgagccactccctggccaactgtatgatctctggtaagtcccctcgctgggatttgcttttcctaccagaacaatgaagttattggatcagatgatctcgaaggtagcttggaaccttgacctttcctggttccatgtttgggctgtgtccccagttacaagttatttggtcgaattgaagaatagaaccttgcagggtggtgggtgacagatgcaaactccagctgtgaatctgaccagactctgtgcattgagctggttgttttcatgtggagggtgcaaccttgttccccaggacttgagagagtcaggtc

SEQ ID NO: 264990 - DNA, 574 bp, Homo sapiens
ggatgctccgttttataagagagaattgagacccaaagagaggggaagtgacagctcacgggggcccagctgattcgaggcagagacacgtgggggaccctggtcttctaaccctcagtccagtgctcattctaccccttgcgaacgccctgaaatgcaaccggtgtcagtcccctccaccagccgacctccccctctttgtggttctgttttctcccaggtgagggggggtgaagatgcctctgctactcctagatccttgagccactccctggccaactgtatgatctctggtaagtcccctcgctgggatttgcttttcctaccagaacaatgaagttattggatcagatgatctcgaaggtagcttggaaccttgacctttcctggttccatgtttgggctgtgtccccagttacaagttatttggtcgaattgaagaatagaaccttgcagggtggtgggtgacwgatgcaaactccagctgtgaatctgaccagactctgtgcattgagctggttgttttcatgtggagggtgcaaccttgttccccaggacttgagagagtcaggtc

SEQ ID NO: 264991 - DNA, 555 bp, Homo sapiens
gaggtggctggtttgggagaagcagcccgtgctgctgggccagcttgctgactggggtggtatctgaggttgcatctggagacagctctgcctcccatccagattcccatagcaggaacaaagtgacctgggccttgtctctccaagcccccacgcaagtggtttctatcaagttttgtaatatgagagcctctctggaggccaaggccttcttgcctaactgcaagtcgttgagatgccgtttccaatctttttagaaaatggattggtttccagattgacagccttggaaactggactcctctgtttttcctgcaaacaggtatcgcctgtgagctgcaggtggaggcagaacatggtgttcaagcccaactcctgattctccacggcttggggtaggtgtgggagggtgagggaacattgggaatgccagagcaatgatgtctatarctatatgttaataatgattatggaaaatcagccacctgctttaacttcccccttaaaagatgtttttaaagttaagtggccggaaaagtgacatttgaatgattt

SEQ ID NO: 264992 - DNA, 540 bp, Homo sapiens
gtgtgtgtgtgtgtgtgtgtgtgtrtgtatgtgtgtatgtgtgtatgtgtgtgggggctggagggtagaggagcggtgggtttgggaaggaaggtaaagaccacatagcatactgttaagtaaaagggttgcaggccatatttttccaggtcagctatctctattgatcagacagttaattcctatagtctcaactcccttcaattgagcaaaccaagaagtttctctggacagtttctctggcacagaaacataagctctgtgcagcatgtaagggcttcttcggggaagtaggactttagaattctctttgaataggattttgcaggttgtgctcgtgtgtgtgttagtgtgtttatgcacacttatgtgacataggatgagtttccgtaagtttaagtgcattgcccttatgcccagcatgtagtgtaagaaatacaaatcaaatggatggggctgccatcaacatgtagacaaaacatgcaggatcttgtgatggaattaaatggacaatataggcaatgacactgaacccaacaa

SEQ ID NO: 264993 - DNA, 633 bp, Homo sapiens
gagttgagtggggcctgattttctagtttttctggtcacatgggtggatttacctcatccatcttctgctcaagctctccctgtacctaaataaagataactgcgagacagcccagtgtgaactaaccagctcatccacagcccaacccatgatactggcagcctgactttggtcttccagcacattgatagagtgtttactgaatgccaggtgttctgccaaaggcttcagcagcattgtctcatttaattctgacaacgactccaatgaggaagctaagtctcagagagattaaataccttctgtgtgtgagtcagaatttgaactcaggattgccttttttttttttcttcagtygacacaatctcctaatctctcggctatactcttctggctctctggaggctataaccatttaaccatcagttaataccaccttagtctccgggtgaacaacacaaaggcacagaagcagccattctggcagatggaggggcacagcctgatctgctgcccaagaagggaaccagccctcattgccaccaataccagcagcattgtctcatttaactctgacaatgactccgatgagaaagctaagtctcagagagattaaatagcatgtgagtcag

SEQ ID NO: 264994 - DNA, 633 bp, Homo sapiens
gagttgagtggggcctgattttctagtttttctggtcacatgggtggatttacctcatccatcttctgctcaagctctccctgtacctaaataaagataactgcgagacagcccagtgtgaactaaccagctcatccacagcccaacccatgatactggcagcctgactttggtcttccagcacattgatagagtgtttactgaatgccaggtgttctgccaaaggcttcagcagcattgtctcatttaattctgacaacgactccaatgaggaagctaagtctcagagagattaaataccttctgtgtgtgagtcagaatttgaactcaggattgccttttttttttttcttcagttgacacaatctcctaatctctcggctatactcttctggctctctggaggctataaccatttaaccatcagttaataccaccttagtctccrggtgaacaacacaaaggcacagaagcagccattctggcagatggaggggcacagcctgatctgctgcccaagaagggaaccagccctcattgccaccaataccagcagcattgtctcatttaactctgacaatgactccgatgagaaagctaagtctcagagagattaaatagcatgtgagtcag

SEQ ID NO: 264995 - DNA, 633 bp, Homo sapiens
gagttgagtggggcctgattttctagtttttctggtcacatgggtggatttacctcatccatcttctgctcaagctctccctgtacctaaataaagataactgcgagacagcccagtgtgaactaaccagctcatccacagcccaacccatgatactggcagcctgactttggtcttccagcacattgatagagtgtttactgaatgccaggtgttctgccaaaggcttcagcagcattgtctcatttaattctgacaacgactccaatgaggaagctaagtctcagagagattaaataccttctgtgtgtgagtcagaatttgaactcaggattgccttttttttttttcttcagttgacacaatctcctaatctctcggctatactcttctggctctctggaggctataaccatttaaccatcagttaataccaccttagtctccgggtgaacaacacaawggcacagaagcagccattctggcagatggaggggcacagcctgatctgctgcccaagaagggaaccagccctcattgccaccaataccagcagcattgtctcatttaactctgacaatgactccgatgagaaagctaagtctcagagagattaaatagcatgtgagtcag

SEQ ID NO: 264996 - DNA, 557 bp, Homo sapiens
aaatagcatgtgagtcagaatttgaactcaggattgccttttttccagttgacacaatctcttaatctcttggttatgctctcctggccctctggaggctataacccacttaaccctcagttaataccacctatctatgtgtcagactcatggccagaagtacagagataactgagacacaattctygcctttgaggagttctcaatctagtgggcaagacagatactcttgaacacaaataattctaatcagagcattagtaggagctcaggtagttgatgtggaattgaaaagggcttagtctcctgtgtttggggatggagtgaaactggggatggttcctgaagggcagggttctctaagcaggtctgagaagtgcaggacttggcctcctcacagtgagtgcagagacctgtcttcacagagccagagagagcagatgagccacccatcacctcaagggactatgatctaataggagatagagtcaatgctgatgaaatgtcttacagatttttacatccaaagcctagacacctgtatgtctatatataaa

SEQ ID NO: 264997 - DNA, 647 bp, Homo sapiens
tgttcttttttcaacatcttgtcttctcattttttggactgcattgagcctctaggcctaattggaatcctgtttcctctgtgaatatgttcctggtttctgaggcctacagttacctctcttatctcgaaacatctgtgctactctcagtccaaacacttatattgggacattaatatttagtttaagtgccgccatcaaccacctgtgctctaggtgttggactagagccgtggtcagcaagctatgattccttgcccattgcccatttttataaatatagttttattagaactcactcacgccatttacctgtcatccatggtggctttcatgggacacaacagagttgagtagttgtgacagacactacatagccttcaaaggctgaaatatttgctatctggcgctttgcagaaaatgtttgccagtccctggactagaatattgttaagctttctatggttttgaaaagagatgacccrcattctcttatttacctaatacatatattcatcatttacctaatacatatattcaatctactagatgcctgcttgtgcaaggtgttggggatacatacagtgattggcttccttcatgacacttaaattctgttctgccacaatcattccaatatgccatga

SEQ ID NO: 264998 - DNA, 533 bp, Homo sapiens
ggtctctcagtcccaacctcacagtaaactcaagacatccaaatggtgctgccagacaaggcagctggaagccagacatcacggccgatttgagcaattagctgagctcccatcctgggctggcctcattaggggtgtccagatgtccactgctagcactgcctcccatccctcgggtgggctgtctccccaggtgaggctgagctggtgtctgtgggaggcaggttaaagctcagagagcccttactaattttcagggctgctaattgcagtgaagtgagggtcacagagacactgtcattgctgcctggtccctaaggctctctggytccccatgcataatcgccgtctgcacagagctcccctcatctgggggcaagcccagctgccacagctcaatcgattgtgaagggtgttcaggcagccatgctgtttgtccgctgctcagctctcaccatgactaaatggagacatctggaaaagggcaaggcagggcaagggcgacgagaagaagggcaggagaggattaagcc

SEQ ID NO: 264999 - DNA, 557 bp, Homo sapiens
gatactattaaataaatgatagattgaaaattagtagctaatgcctaagccagaaaggccctcatcttgaaggggatgacttccacagctagaactggggtcctggagtttgggatttctaggcacacagaactgactcttgtcagtaaacctatgatcatgggaagccagaagcccctccccaccagaggggtccttagaggtccacttagtggcgttacattagcccagtaacatcccgatattctcttcagctccctgattcyaccacgtgcgatttgatgacagagaaaatagcgttctccagggcttagatacatttcatgagaagcccatggggtctaagaatcaagaaactttgactattagattgtattagattttagaatggattagattacacaatacaggtgattgaagaagccaagtgatgtatccacatgtacacacatgcaagttctcatctttttcttcttaattcccctgtctctttgccttgcttgccacctgctcaagagtgaagagcgttagacagcagtgaggaggtcctggtcctc

SEQ ID NO: 265000 - DNA, 587 bp, Homo sapiens
aggttaatgggcctgagttatcaatctctcaggcatttggaatgattataaataagcttcctgggatcttttaaggcataaggcatggtcctggtcagtggccctaggagaggatttatatagtgactgagatgtctccagacctaagaaactccgtttgcaacttttcctcctaggaataagcctgtatggatgtggtgtcctgagaggctccagggcggggcatcactattggaatcagccagaggtctccaggccttcaggggacattaattaaaaccatcaccatgtggcctcttcagcccaaggggtgatgaattgcacttgaggtgtgtgcagtacattaccmtttggctcaagggtgcaagctctgtgtccttcatgacattacctaagagtaattcacaatatgttctagaaggctgccaggaagtatgaagagcaacttgtacacttctggattttctttcctccaatcaccattgttccctggaagaaggggcatctttatccctggagtctggatcacaatcccacatctgagtccttttattaatttcctggtgtaggttgggctggtaatgcag

SEQ ID NO: 265001 - DNA, 525 bp, Homo sapiens
cagctgctctgaatgttggtgctgccaaactttcaataacctgggacccttgccagtcaggatgttctccctgggtctgatttgcagtgcaaattgactcttagctgttccaaattctcttggctctcgaktacccatcctcaggccccagtactcatcctctagtcccatcccccattctgtaactctgtccccccagttatctcctcatctaatttggaattatcagtggtagaaatcaaatagtgtacccccattgtttatatgggagactcagcggggtccaggaaagtgacgttatttgttcacaattacactgtcctttaccattttttctttgatgagttcctttgaatgatgcctgtgatctgcagctttccacttaattttcctgtttttgggccccggcccctaatccacctactcttccctgactacccagctgatgacaatgggaccattgctttcatctttacctacctgcaccacctctggtggctgacttatacaatcccttggctgtca

SEQ ID NO: 265002 - DNA, 407 bp, Homo sapiens
gaaagtgacgttatttgttcacaattacactgtcctttaccattttttctttgatgagttcctttgaatgatgcctgtgatctgcagctttccacttaattttcctgtttttgggccccggcccctaatccacctactcttccctgactacccagctgatgacaatgggaccattgctttcatctttacctacctgcaccacctctggtggctgacttatacaatcccttggctgtcaaacccagtctggtcttatggctgtgcttccagagtttctcctcctctggtcctctgagggtgrgcaagcagctcttagaagaggagacaggaagcccctgactctgggcacctcactccccagccctccccgtctctcccactctctcaagcctccaggctgtttctga

SEQ ID NO: 265003 - DNA, 574 bp, Homo sapiens
ttgggttcagcttagttttgatactgcaaatgcaagtgcggcgagacctagaactttccccttggctgctggggtttcagttggggtcagggaggcaaatggggtcatgaagacagctttgggctgggattgggaccccttggrtcctagtcctgacaaggtaggtcctgcctcaaagccctgctggtcaagttgctttatctctccaggacctatttgctaattttcaaagccaaatcttttgaagaaattatctctaaggttctttgcgcatagccctgatgtttgctgattgatgccttaatctcatgatatgatttttgtttgaaacaaaccctgcttttctctgtgtgtgggcagccatcagaaggttctagcttctgtagatgcctgtgcggtgctgtcagcctccaaatcataatcaaccatgtggctgggccacaaaagtctcagacttggcctgatggaaatcaggcagctgtcctggaaggaatgagctttgctctgcccgctcttcctctcctgtttgtttggttttactcttgttctgcgtcagggatgagttggttgggag

SEQ ID NO: 265004 - DNA, 531 bp, Homo sapiens
ttccttggactaaccatattcttttatccatgcttaaactgacaaacaacattgataacaacaaaaacattttcccttttaatataatacaatactctcttatagagaaaaaacaaactcactatcttccccaaaacagatgagacacctgaagtcccatcagtaattacaactatcacttggtgatgagccttccctctctagtttctatataattccaactgatattttgtagctcatggattacattataaagttatccaccaaaacacattctatgaaaatggtggggaaatggaaaaaaaaaaaaacaaacagaaaagtaattttgttttgttttttaaaartaacgcaggttaagagtataggtggctgttacattcctcatttctctaactggtcacgagattgtagtaatcattttggtatttatctggtgaagtgaccaaaaactttattcctgagggttttgaatactgtctctattgggtcactgtatgttctattcattttgctaataactgaagatgc

SEQ ID NO: 265005 - DNA, 531 bp, Homo sapiens
ttccttggactaaccatattcttttatccatgcttaaactgacaaacaacattgataacaacaaaaacattttcccttttaatataatacaatactctcttatagagaaaaaacaaactcactatcttccccaaaacagatgagacacctgaagtcccatcagtaattacaactatcacttggtgatgagccttccctctctagtttctatataattccaactgatattttgtagctcatggattacattataaagttatccaccaaaacacattctatgaaaatggtggggaaatggaaaaaaaaaaaaacaaacagaaaagtaattttgttttgttttttaaaaataacgcargttaagagtataggtggctgttacattcctcatttctctaactggtcacgagattgtagtaatcattttggtatttatctggtgaagtgaccaaaaactttattcctgagggttttgaatactgtctctattgggtcactgtatgttctattcattttgctaataactgaagatgc

SEQ ID NO: 265006 - DNA, 531 bp, Homo sapiens
ttccttggactaaccatattcttttatccatgcttaaactgacaaacaacattgataacaacaaaaacattttcccttttaatataatacaatactctcttatagagaaaaaacaaactcactatcttccccaaaacagatgagacacctgaagtcccatcagtaattacaactatcacttggtgatgagccttccctctctagtttctatataattccaactgatattttgtagctcatggattacattataaagttatccaccaaaacacattctatgaaaatggtggggaaatggaaaaaaaaaaaaacaaacagaaaagtaattttgttttgttttttaaaaataacgcaggttaagagtataggtggctgttacattcctcatttctctaactggtcacgagattgtagtaatcattttggtatttatctggtgaagygaccaaaaactttattcctgagggttttgaatactgtctctattgggtcactgtatgttctattcattttgctaataactgaagatgc

SEQ ID NO: 265007 - DNA, 596 bp, Homo sapiens
ttgtcaagttatttttttctttcttttttttttttttcttttgcgacagttttactctgtttcccaggctggagtgcagtggtatgatcacagctcactgcagcctcaatctccctgggctcagttaatcctcccatctcagcctcctgagtagctgggactacaggcgtgcatcaccatgcatggctaatttttctattttttgtagagatggggtttcgccatgttgcccaggctggtctagaactcctaggctcaagcgatctgcctgccctggcctcccaaagtgttgggatgacaggcatgagccaccatgcctggactctttctcaagttttgttrtcaatattatacaaacatcataaaaagaatttgaaggttttccttctctttccaatgctctggaatagtttaaataaacagtattagaatcatctgctctttaaaacttggatataatgtctctgtaacactatgtaggctgtgaatttttacaggggaactattttactacttcatttcctttctgaaaatttgtttattttgactttcacttctgaggttaattgtaataacttatgaatttttaaaaaaat

SEQ ID NO: 265008 - DNA, 624 bp, Homo sapiens
ctattgtgaactgcacatgcgaggggtgtaggttgcatgctccttatgagaatctaactaatacctgatgatctaaagtgaaacagtttcatcctgaaaccatcccccacccttgtccatggaaaaattatcttccatgaaaccagtccctgctgccaaaaaggttgaggactgctgacctagggattcagatttgcaaataaggatttaaaaaactttaataatggctcttcccaccaattttccaaaagtggtcaaaatcagtaagtcacacatatagaaagctcagtgaatctcaatcaagataaatacagggaacatcacacccaggcattttgatagtccaacttctgaaagttaaaactgggaaaaaaagttcttaaacgtaaccaaataaaaatgcacattatatacaggaaaacaatgataagaattacagctgacttctcatcacaaaaattgaaagccagaagacaatggaataacatctttaaattgcagaaagaaatatattatcaatgttggattaaatattcagtgaagatagctttyagaaatgaagacaaataaaggcatattaagttaaacataaaagcagagaggattttccaacagcatacttgt

SEQ ID NO: 265009 - DNA, 477 bp, Homo sapiens
aggaaaggggaaacaaaagaatgaaaaatagagggaacagataagaaaacaagtagcaagatggtagaattaaagcaaaccatgtcaataatttaattaataaaagactaagcactcaaaatgcagagtttgtcagacaattaaaaagcaagacacagtaaaacactgtttagaagagatgcgtgttaagtattaacacactgacagaggtaagagaatgaaaaaagctatttatgcaaacatcaaacacaaaaaagctggtatagctatattaatatctgacaaaatagacaagaagataaagatgrtcatgggtcacaatggtacagattattttttgaactgaattgtgttttctcaaaattaatatgttgatgtcctaaccatcaaagtgtctgtatttggagatggagcctttacaaaagtaattaaagttaaaggaggccataagggtggggccattaggactggtgtcca

SEQ ID NO: 265010 - DNA, 529 bp, Homo sapiens
ttcatatgatcttcacaagtcagtcagaaaacttcggtttcagtcctggttttacactaaagggttgaacractgtgaacaagtcccataagttctgctctcctcactgaggagtgcagagtgtgtataaaatgggaacaatgctattttcccagctaccctagaacattgtttcaagaatcaaatgggataatactcaaagaagtatttggtgagctgtgaaatgctgaacatatgcaaggaattattatttagccaataaacatctctccaagacaccagtctctgagattgccccacttgagagatagctctcttctctatttacctcaaacacgtattctgactccaatccaaagtcacttggaaattggcctcaaagatctaaccatagccttggcaccagacagaaaatcagatctcacttcctgcccctgcttttatttgcaatgtagcttccaaagcaagaaacaaaatctcaagctccattaataatgaaacaaggaggctcaaaagcctcacatcctaa

SEQ ID NO: 265011 - DNA, 529 bp, Homo sapiens
ttcatatgatcttcacaagtcagtcagaaaacttcggtttcagtcctggttttacactaaagggttgaacgactgtgaacaagtcccataagttctgctctcctcactgaggagtgcagagtgtgtataaaatgggaacratgctattttcccagctaccctagaacattgtttcaagaatcaaatgggataatactcaaagaagtatttggtgagctgtgaaatgctgaacatatgcaaggaattattatttagccaataaacatctctccaagacaccagtctctgagattgccccacttgagagatagctctcttctctatttacctcaaacacgtattctgactccaatccaaagtcacttggaaattggcctcaaagatctaaccatagccttggcaccagacagaaaatcagatctcacttcctgcccctgcttttatttgcaatgtagcttccaaagcaagaaacaaaatctcaagctccattaataatgaaacaaggaggctcaaaagcctcacatcctaa

SEQ ID NO: 265012 - DNA, 529 bp, Homo sapiens
ttcatatgatcttcacaagtcagtcagaaaacttcggtttcagtcctggttttacactaaagggttgaacgactgtgaacaagtcccataagttctgctctcctcactgaggagtgcagagtgtgtataaaatgggaacaatgstattttcccagctaccctagaacattgtttcaagaatcaaatgggataatactcaaagaagtatttggtgagctgtgaaatgctgaacatatgcaaggaattattatttagccaataaacatctctccaagacaccagtctctgagattgccccacttgagagatagctctcttctctatttacctcaaacacgtattctgactccaatccaaagtcacttggaaattggcctcaaagatctaaccatagccttggcaccagacagaaaatcagatctcacttcctgcccctgcttttatttgcaatgtagcttccaaagcaagaaacaaaatctcaagctccattaataatgaaacaaggaggctcaaaagcctcacatcctaa

SEQ ID NO: 265013 - DNA, 529 bp, Homo sapiens
ttcatatgatcttcacaagtcagtcagaaaacttcggtttcagtcctggttttacactaaagggttgaacgactgtgaacaagtcccataagttctgctctcctcactgaggagtgcagagtgtgtataaaatgggaacaatgctattttcccagctaccctagaacattgtttcaagaatcaaatgggataatactcaaagaagtatttggtgagctgtgaaatgctgaacatatgcaaggaattattatttagccaataaacatctctccaagacaccagtctctgagattgccccacttgagagatagctctcttctctatttacctcaaacacgtattctgactccaatccaaagtcacttggaaattggcctcaaagatctaaccatagccttggcaccagacagaaaatcagatctcacttcctgcccctgcttttatttgcaatgtagcttccaaagcaagaaacaaaatctcaagctccattaataatgaaacaaggaggcycaaaagcctcacatcctaa

SEQ ID NO: 265014 - DNA, 550 bp, Homo sapiens
tgtccagttctcttattttaaagggatacatttcaacatcttcctgtttgcaatctttgttatcaacaacagatagtcagtgaaaatttcaaacactggagatttctcaaataactaaaagtagaattaccatttgacctagcaatctcattactgggcatatacccaaaagaaaataaatmattctacaaaaagacacctgcatgcgtatgttcacagtactattctcaatagcaaaaacatggaatcaaccaaggtgcccctcaatggtggcacataaagaaaatgtgcactacgtaaagaaaatgtggtgcatatacatcatggaatactacacagccataaaaaagaatgaaatcatgtcctttacagcaacatggttgggactggagggtactatcctaagggaattagcacagaaatagaaaaccaaataccacgtgttctcacttagaagtgagagctaaacattgggtacacatgggcacaaagatgggaacaataaacactggggattccaaaaaaggggaggggttgagcgttggaaaac

SEQ ID NO: 265015 - DNA, 539 bp, Homo sapiens
aaaatatcaagagacctagcattgtgtggttaagagaagaaaaagtgaaataaaaataactccataccctcatgcaaccccacacaggcagacaacattatccagacaggggataagtctgtycctgtgtcaaccctttagaagttaaggctctctcctaagcttgagccaacccagccaggtatctctctggcttagacttccatgatagctacagggagcgggataagttgacacttttccttcaagttctgctctgctgttccttctaggaagaccaaattcacagccaagctccctaagatctagtccaaagcctgagccagcaggaaacaattcttatttcagatttccagctactgaaatggtgtgtcttccctaggctctgtctataatcacttcctttcctctttctcccagtatcttctccttgcttcaggatccttggattttttttttttttttttttttgaactgttgctatttgggacccagtcttttggtttctagatgaaccaattagacagttgcaagtatgc

SEQ ID NO: 265016 - DNA, 430 bp, Homo sapiens
tcattgccaatgcacctggtcattcaagagctctgacagagactgctaacacaagatgcattctgcagccatggtctaaggagtcattttgattttcaagtcttattayttaagaaatacatttcataaggctatagctgccatagatagtgattcctgtgatgaatctgggaaaaggaaattgaaaactccctggcaaaaattcaccattctagatggtgaattgttaataaatgtgaacttaataaattcatgattcatgggaaatgtcaaaatagcaaccttaacaggagttcaaaagaagctgattccaaccttcatagacaaccttgagtggttcgagacttcagtggaggaagtaactgaaggtgtggtggaaatagcaagagaattagaatcagaggtagaacctgaagatgtgacagaattg

SEQ ID NO: 265017 - DNA, 532 bp, Homo sapiens
aatgtaaatactaaaaaaatttttcaaataaataatccaaacttctactttaagagcctaggaaagaaaagcctaagcaagcaaaaggaaggaaaaactaaagatccagaaatcaattacatagataacataaaacaatagagaaaatcaatgaaaccaaaagttagcttattgaaaagatcaacaaaactattttacctgtagctatgttaaccaagaaaagacacaattgttacactcaagaatgaaagagtagrcatcactatgaattcttcagaaattaaaagaactataagagaatattttgaacaactctatgccaaaaaattggacaacttagatgaaatggacaaattcattaaaagatctaaatcactacaaaagactcataaacaaaaatctgaatagaacaataagtaaataattgaattagcaattaaattcttcccacagaggaaaattcaggcccaggtgtcttccctagtgaactctataaatgtttttgaaaggaaataatactaatcctacacaa

SEQ ID NO: 265018 - DNA, 565 bp, Homo sapiens
ctttttttgtagaagttggaaatatgcttctaaacttgagagggaattataaaggatctagaatagccagaacaattytttaaaagaacaaagttggaggatttacactttgaagttacaaacttactataaagctacagtaatcaagacagttggtactagcataaattgacatatagacaaacagaacagaattgaaagaccagaaataaatccttagatttttgatcaattcatttttaacaaagctaccattgggaaatggatgatcttttcaacaaatgtttccaggtcaattagatatccatatgcaaaaatatgactttcggcccttacctcaaaccatacacaaagattaactcaaataggattatagacctagatgtaagagctaatattacaaagacttctagtagaaaacaggagagaatttttgtgaccttagattaggcaaagattaagacactaaaagcataatccataagggaaaatgataaatttgacttcattaaaattaaaaacctttattcttcaaaagatgccattaagaaaatgaaggacaagt

SEQ ID NO: 265019 - DNA, 598 bp, Homo sapiens
acaagatttcctgatgaattggatgtggctgtgagtgaaagtctctcaagcttttagaagcttctggtacaagaaaatgacagaatggagttgtcattgacctagaggaggaaatctacaggaagagacagttttccagaaggacaaaaggggaaaattgaatttggttttggaaatgttcagtctgagcaacaagaggtgttggataaactgtagttaagtctggagaggtccaggctgcagatataaatgtggcactaatcggtagagcatgayagattgatggaatatagcaccatgatgctggatgttatcacacggggcagtagcacagataaagacaattaatctgagaattcagcactgggacattccaaaattccaatgtgtaaaaataaggagaaatcatcaaagaaaactgagaaggagtagccaatgaaatagatggagaaccaataaagtgttattctggaagcagtaaagaaagtgttccaaaaagaaactttaagctaaatgttgctaatgggccaagagagataaagatggagaagcgaacatttgacttggcaatatggaggccatcaatgacttttaacaa

SEQ ID NO: 265020 - DNA, 598 bp, Homo sapiens
acaagatttcctgatgaattggatgtggctgtgagtgaaagtctctcaagcttttagaagcttctggtacaagaaaatgacagaatggagttgtcattgacctagaggaggaaatctacaggaagagacagttttccagaaggacaaaaggggaaaattgaatttggttttggaaatgttcagtctgagcaacaagaggtgttggataaactgtagttaagtctggagaggtccaggctgcagatataaatgtggcactaatcggtagagcatgatagattgatggaatatagcaccatgatgctggatgttatcacacggggcagtagcacagataaagacaattaatctgagaattsagcactgggacattccaaaattccaatgtgtaaaaataaggagaaatcatcaaagaaaactgagaaggagtagccaatgaaatagatggagaaccaataaagtgttattctggaagcagtaaagaaagtgttccaaaaagaaactttaagctaaatgttgctaatgggccaagagagataaagatggagaagcgaacatttgacttggcaatatggaggccatcaatgacttttaacaa

SEQ ID NO: 265021 - DNA, 583 bp, Homo sapiens
ttgtgaatttttttgtccagtgggataatttccagtcttgacyacaaaacttcaggcttcctctcctctacctatttcatactaaattggactacactataattatttataccaatatctaattatttatgtgattatttgtgtcaaagtctaactctcatactagcttttaagtgctcgacttcttaaggtttacaactatatttttatccatctaaaaaagcaagcatcaagctctaaatatgatagaagctcagtacattttattttgaacaggtgagtgagtttgtgaatgagtgaactgatggatgataaatggatctctttatacttttggctttcaaatctaaacatcacataaaatttttagtaatagcaagattctatcaaactttctgaaattctgagcttagctccaacctattgatgaaaattatttacggttatagatcatattataaattatcacttttgcctatctgaccttaaaacaactctggatgaagagtaaaatattcaccttgtgaattagtttcacttagagaagaatcaacttttctgtcatgagctttagagaagaatc

SEQ ID NO: 265022 - DNA, 583 bp, Homo sapiens
ttgtgaatttttttgtccagtgggataatttccagtcttgaccacaaaacttcaggcttcctctcctctacctatttcatactamattggactacactataattatttataccaatatctaattatttatgtgattatttgtgtcaaagtctaactctcatactagcttttaagtgctcgacttcttaaggtttacaactatatttttatccatctaaaaaagcaagcatcaagctctaaatatgatagaagctcagtacattttattttgaacaggtgagtgagtttgtgaatgagtgaactgatggatgataaatggatctctttatacttttggctttcaaatctaaacatcacataaaatttttagtaatagcaagattctatcaaactttctgaaattctgagcttagctccaacctattgatgaaaattatttacggttatagatcatattataaattatcacttttgcctatctgaccttaaaacaactctggatgaagagtaaaatattcaccttgtgaattagtttcacttagagaagaatcaacttttctgtcatgagctttagagaagaatc

SEQ ID NO: 265023 - DNA, 583 bp, Homo sapiens
ttgtgaatttttttgtccagtgggataatttccagtcttgaccacaaaacttcaggcttcctctcctctacctatttcatactaaattggactacactataattatttataccaatatctaattatttatgtgattatttgtgtcaaagtctaactctcatactagcttttaagtgctcgacttcttaaggtttacaactatatttttatccatctaaaaaagcaagcatcaagctctaaatatgatagaagctcagtacattttattttgaacaggtgagtgagtttgtgaatgagtgaactgatggatgataaatggatctctttatacttttggctttcaaatctaaacatcacataaaatttttagtaatagcaagattctatcaaacttyctgaaattctgagcttagctccaacctattgatgaaaattatttacggttatagatcatattataaattatcacttttgcctatctgaccttaaaacaactctggatgaagagtaaaatattcaccttgtgaattagtttcacttagagaagaatcaacttttctgtcatgagctttagagaagaatc

SEQ ID NO: 265024 - DNA, 318 bp, Homo sapiens
atggactgtattttgcaatgcatgctttaccactgtttgaagaaattccagatcatggcatgtgaacaattatataaacagagaatgataatgttccttaatttggtggctttgttaagtccttcagaaatgtacattcaaaacaatcgaggtaggctttaaaggagcattcaaaatcattaactgagtcttcaactgagtcatttattataatttgaagaaggttgaatggtctttacygggatgtctcttgagcaaaggtaaccttttatcatctacatatccaaaagccttagaactgtcaattttgttctctca

SEQ ID NO: 265025 - DNA, 604 bp, Homo sapiens
cccttgcttccctccgcacaccaaggccaatgcttcaggccttggtgtcactcactattcacttcattaaggtctttcttcacaagtcaccatcacgagaagctctttcctgaccactctggtctaaaatacagacttttgaaactcccargagtttgttgctgtaccgttttattaaaattacattatattcttttgcctgattatgtaaccccaccatcaaaatatacacttcaggaaggtagggatcgtatctggactgtttattgttatatccctggttcctagagtaatgctggaactctccatgcgccagtgaatgaatatttgtagaatgaacaaataattaagttgtattaataagtcaacagagttgagttaataaaagaatattaaccctactttccaaagtatctcaatgtttttaaaagtatcagtatagtctggatgaatttggctataactttttttctgaatgacactcattcttaagatagttctaaccagtggctaagattaccatagtgtgactcacgctgtatacattagtgtttactgctatacccacaagacatacacttaacaaaacaatctgaattcatca

SEQ ID NO: 265026 - DNA, 533 bp, Homo sapiens
aatgtatgtcattctagtaagtattgttcacatttgagaaattaaaagtgaagctctgaggtgttagctaacttttttaaggtaatacagctagaaagtagcagagccaagattgaaaaccacatctgtcaaactgcaaaatccatgggtagtccaggtatgtcatttccaaatagcttggagtaatagtgtgggaaaataaaaggtgggagrgatttaggtagccactgcttttttttttttttttttggcagatacttttaaaaaataattttgcataaattgattgactaaactccagtgacttacaccagtgattagctatgtgtggggcagtggggtaagatctccctggtctcctttttattatcatcacatgccagcaattctaaacaacatcagcaataaaatactcctcaaaagttctgtgtttgtctaactcctaaagaattgctgtggatgctgttgagtttaaattatctacttatctatattcatatagaatatgtatggatatatagtatacacacaca

SEQ ID NO: 265027 - DNA, 533 bp, Homo sapiens
aatgtatgtcattctagtaagtattgttcacatttgagaaattaaaagtgaagctctgaggtgttagctaacttttttaaggtaatacagctagaaagtagcagagccaagattgaaaaccacatctgtcaaactgcaaaatccatgggtagtccaggtatgtcatttccaaatagcttggagtaatagtgtgggaaaataaaaggtgggagggatttaggtagccactgcttttttttttttttttttggcagatacttttaaaaaataattttgcataaattgattgactaaactccagtgacttacaccagtgattagctatgtgtggggcagtggggtaagatctccctggtctcctttttattatcatcacatgccagcaattctaaacaacatcagcaataaaatactcctcaaaagttctgtgtttgtctaactcctaaagaattgctgtgratgctgttgagtttaaattatctacttatctatattcatatagaatatgtatggatatatagtatacacacaca

SEQ ID NO: 265028 - DNA, 506 bp, Homo sapiens
gtggttgaatagggaaggtggattttgttacgagaagagaaatwcaggttatttatgagctgaaaataaaaaactaatctagtctggaaggtcaggaagaatttcctttgcaagtgaaatttaagcagcaatctttgcacatttttaacaggatatctatcagaattttgagtgggacaactcctcctgataaggaaatgccctgagctctgcaggacatttagcctacccggaccctgctgcccactaaatgcagaaacaccttgccatcactgcaaccaccagaaacttccctacgcaactccaaaagcttcgtatagaacaagagcaaacctggctgaaaggaaaacggaggaacagttgcctccagaagagagaacaaaatgagcacaggaaaaggggtggtaagcaatgtttcttttgggtgaccctaggtctgaataggaggcatgtcacagaaggagaggcattagaggagaatccaaagatcaagctggtatacagtg

SEQ ID NO: 265029 - DNA, 557 bp, Homo sapiens
gtaaaaggatcaaatttgtgtcttatctataatgcaccttcatcctaaagtatggttccaatttgggaatatgatgctaatagctcctgtcacttccatgttttttttgctaatttttattttaaatgtatatttctgctacatcctcttggtgataagggcctggacaactccatctgagaactacacaacatactgccctcttcaacaataacagttgcttagaattaaaagattaccatctaattcttctctccttcactttttgcttctaaacattttgtccttcactattgatagtcatgttcactaccctaccaatcacagagaaaaaaaagacaacgaagcttaacttaatgtctttcaagcattgcattcacaattccaagtcttaaaattaatatctggacattcgtcrggatgggggagataaggaggtatgtgtcgagacgtgtaaaattagcgatcagatataaagttagcttctaactgaaattgtgatagattctagtactatgtttataaaaactgaaggaactggggcagtaagtactatg

SEQ ID NO: 265030 - DNA, 557 bp, Homo sapiens
gtaaaaggatcaaatttgtgtcttatctataatgcaccttcatcctaaagtatggttccaatttgggaatatgatgctaatagctcctgtcacttccatgttttttttgctaatttttattttaaatgtatatttctgctacatcctcttggtgataagggcctggacaactccatctgagaactacacaacatactgccctcttcaacaataacagttgcttagaattaaaagattaccatctaattcttctctccttcactttttgcttctaaacattttgtccttcactattgatagtcatgttcactaccctaccaatcacagagaaaaaaaagacaacgaagcttaacttaatgtctttcaagcattgcattcacaattccaagtcttaaaattaatatctggacattcgtcgggatgggggagataaggagktatgtgtcgagacgtgtaaaattagcgatcagatataaagttagcttctaactgaaattgtgatagattctagtactatgtttataaaaactgaaggaactggggcagtaagtactatg

SEQ ID NO: 265031 - DNA, 560 bp, Homo sapiens
atgtgattttttacaagttacaatttttgtctgtttcttcatgtataaaatgagcataataataacatctcctcatagtgttcatgcactgaatgagttaatacaagtaaagaaattaaaacagttatctggcacataataattgcttaataattattagttcttattattattgataatattacttgatttttttccttttcattatagtgtaattattcaatagattttagtgacaattatttcccaaatcatttgtaatcattgtttttatgcattgctggtgttccttttgtttagaaactacatccttatttataagcaaaattgttctaagtatttgtgtcactaggtttattggttttcrtattaaggttatattggctgatgtagtttggatctgtgcccactcaaatctcatgttaaaatataagccccagttctagaggtggggcctggtgggaggtgattggatcatgggggtgatttctagtggtttagcaccatcctcctgctgtggtcatgtaagatgtgcctgcttctccttcaccttccgccaa

SEQ ID NO: 265032 - DNA, 575 bp, Homo sapiens
accaagacaatgggggaaatgcctccacagtatgtcagagacctttgtggcagcccctcccatcacaagcctggaggtctaggaggaaaaatgtttttgtgggccaggccaaggctcccgtgctgtgtacagcctagggatttcgtgccctgtatcccagccagtccagccatggctaaaaggggccaaggtacagctcaggccatggcttcagagggtgcaagccccaagccttggcagcttccaggtggtgttgagcctacaagtgcacagaaatcaagaattgaggtttgggaaccttcacctagatttcagaggatgtatggaaatatctggatgtccaaacagaagyttgctgctggggtggggccctcatggagaacctctgcttgggcagtatggaagggaaatgtggggttgaagcctccacacagagtccccacttggatactacctagtggagctgtgagaagagggccaccgtcctccagaccccagaatagcagatctacaaacagcttgcaccgtgcacgtggataggtaccacagactctcaatgccagtgcatgaaagca

SEQ ID NO: 265033 - DNA, 575 bp, Homo sapiens
accaagacaatgggggaaatgcctccacagtatgtcagagacctttgtggcagcccctcccatcacaagcctggaggtctaggaggaaaaatgtttttgtgggccaggccaaggctcccgtgctgtgtacagcctagggatttcgtgccctgtatcccagccagtccagccatggctaaaaggggccaaggtacagctcaggccatggcttcagagggtgcaagccccaagccttggcagcttccaggtggtgttgagcctacaagtgcacagaaatcaagaattgaggtttgggaaccttcacctagatttcagaggatgtatggaaatatctggatgtccaaacagaagtttgctgctggggtggggccctcatggagaacctctgcttgggcagtatggaagggaaatgtggggttgaagcctccacacagagtccccacttggatactacctagtggagctgtgagaagagggccaccrtcctccagaccccagaatagcagatctacaaacagcttgcaccgtgcacgtggataggtaccacagactctcaatgccagtgcatgaaagca

SEQ ID NO: 265034 - DNA, 555 bp, Homo sapiens
attcttacctatagagaaaaaacatttacagtgacaatggatttgtcatcagaaaccatagagggcagaaagatgtggcacagcttttttcaagtactacaagaaaagatctgtcaaatttgaaatccatattcagtgaaaatattcttcagaaatgaaggtaaaactaagacaataacagataaagaaaaactaaaagaatgtgtcaccaaaataccttctttaaaacaatagctaaaggaaattstccaaacagaaagaaaataataaaatgaaacttgaaacatcaggaaaaaacaaaaagcacagtaagcaaaaatgcaggtaaatatcatagcctttcttcatcctcttgagttttataaattgtttaaaagttgaagcaataattatatcatctgatatggttctaagtgtatacagtggaatatataaaattattataaatgggagagagtaaagggacataaatgaggtgagagttctatacttctctcaaactgataaaataatgacatatcagtagatttttataagctatgcatagatagtgat

SEQ ID NO: 265035 - DNA, 551 bp, Homo sapiens
cattttttccaatggatttcaaatatgcagtatgttctattgatatatcaataacttttacataatcacaatattatcaattcccatttgataatcttctgaatcttagtaaaagtgatggaatagctgccagataatgggagaaaaatgaggatgagaagtggagggaagtttatgattactgacattctcagctcatattatggaaaattaaatgatactgtttaaagttgaaaaatcaagatatagagacttgaagttgaaaaatccagataaagaagtttaatagattagaatcattatcaatagatataaaagtgtaagtataattgattagaatmattacaatggaatatcaaaaaataattcaacttaaaaattaggaggagaggaccacaaatttctggtctttcagggtatagagacatcatataaagtttaatgttgatagatcaaggtatcaaaatttgagctccatggatatggattggatcaccagattaaataaaaatgaaaataattgaagaggtaaaactctttctttctgtgca

SEQ ID NO: 265036 - DNA, 540 bp, Homo sapiens
cctaaagccaccatgctggagagtccctacagagaaaaatgactaaggagacccacgtgttctagtcccyagcttctttagtcttcccagaccaggtgccaaacatgtaagtgaaggctaagagatgatcccagccatagccgctgcatgaatgcaatatcataaaacacccagagccagaaccacttagttgaaccattttcaaattcctgacctcacagaaactgtgagaaataatagttattgctgttttaagcaactaagctttggtgtaactgcttacatagccataccaactggaagaagcagagtaaaggaatattgagggataggaggaggttagattttacattgatattgaatgtaggcttctctaaggttttaaaatttgagcagagaaagaaaatgtggcacatatacaccatggaatattatgtagtcataaaaaagaatgagttcatgtcctttgcagggacatggatgaagctggaaaccattattcacagaaaacaaacataggagcagaaaaccaaacaccgc

SEQ ID NO: 265037 - DNA, 540 bp, Homo sapiens
cctaaagccaccatgctggagagtccctacagagaaaaatgactaaggagacccacgtgttctagtccccagcttctttagtcttcccagaccaggtgccaaacatgtaagtgaaggctaagagatgatcccagccatagccgctgcatgaatgcaatatcataaaacacccagagccagaaccasttagttgaaccattttcaaattcctgacctcacagaaactgtgagaaataatagttattgctgttttaagcaactaagctttggtgtaactgcttacatagccataccaactggaagaagcagagtaaaggaatattgagggataggaggaggttagattttacattgatattgaatgtaggcttctctaaggttttaaaatttgagcagagaaagaaaatgtggcacatatacaccatggaatattatgtagtcataaaaaagaatgagttcatgtcctttgcagggacatggatgaagctggaaaccattattcacagaaaacaaacataggagcagaaaaccaaacaccgc

SEQ ID NO: 265038 - DNA, 619 bp, Homo sapiens
aaataaagtaagtgctctaccagtatttgctagataaatgcatgaacaacaatatcttctgtagatattatgagaaggaagaaatacaaggtatgaaaagatattggcatgcaccattaatttagagaattttattgtttattttttctccaattttttttgcttttttttgctggactctatattcttattagcctcatgccatataaggaaaatatcttcatttgtttgactatacacatttcacttttaattataaaattatgtaaatatcttatgaatagattctaaacaagagaaaaacttcaataaatattcatagagatttttaaatctaaatatctttggaaatattttaggcctagtactcctctactatattccatgacatttgttaaaattgggtgaatcaaatacatatggtgtcrgattttgtaaaactcattttgattttaagtggtaaaaagtactcattcagtaaaaacaaacatcaacattatatgaattaagcctacagtagtaatgagttacggcctgacccaacattcatgtctctgccctttgctacctcaggtccatacctaagattatgtcaaaatcaatctattgtgttagaaat

SEQ ID NO: 265039 - DNA, 575 bp, Homo sapiens
attgaagtaaaatacagctgtctggtttccctcctctgtttatggtcaagttttagtatcttttctacagcatgctttcttttgctgcttttgcttccttctgctgtccaaacttagacttttgagtctagatgagtttaagtcacaaggaaaaagttgtctaaaatattcataaaaacatgggatttgcgacataccatcagcttagagagctaaacatgtggcacctgctctggtgacaagaaatcaaggtcagcctaaaggaaagtgatgtcgtggagrtagaatttgtttgaaatattcttttccactcaccttcccaatccctcctccttcctctcatttgaatgaggaagctgcccattaaaatgtagtatgcatagcatcatttcaaaactttatcattacagttactggccttgcttttctgcctcgatttgtctgtttttcttgattctctccacattggcttctctgatgcttccacttgccttccccttttttcctgtctcatctttctggttcatctccttctttatttatctccttctcatgtggtggaaagaaacaaagag

SEQ ID NO: 265040 - DNA, 575 bp, Homo sapiens
attgaagtaaaatacagctgtctggtttccctcctctgtttatggtcaagttttagtatcttttctacagcatgctttcttttgctgcttttgcttccttctgctgtccaaacttagacttttgagtctagatgagtttaagtcacaaggaaaaagttgtctaaaatattcataaaaacatgggatttgcgacataccatcagcttagagagctaaacatgtggcacctgctctggtgacaagaaatcaaggtcagcctaaaggaaagtgatgtcgtggagakagaatttgtttgaaatattcttttccactcaccttcccaatccctcctccttcctctcatttgaatgaggaagctgcccattaaaatgtagtatgcatagcatcatttcaaaactttatcattacagttactggccttgcttttctgcctcgatttgtctgtttttcttgattctctccacattggcttctctgatgcttccacttgccttccccttttttcctgtctcatctttctggttcatctccttctttatttatctccttctcatgtggtggaaagaaacaaagag

SEQ ID NO: 265041 - DNA, 603 bp, Homo sapiens
ttccatttctcaataaatcatagtgtacagtatttaaactgtcagtactcaaatcatgcagtcttccataaaagaaaatgtactcttcctcctagctctgtttgggaaagaaatgtctgcagatcagaatgtgggcttgaatcaatgtcaacatttattcaatctcagtgaytccaaaaggctgttgaggaacgttttttctcctccttgccaggaaacatattctttgatcatcgctaatatcaaagcctaagcctaaatccaaagggaaaacaaaatagtgattttaaaggacttactgttctcaaactttgagaataccctcaccaaagagagcttttcaatcatatcaccttaaattatcttgactcctatatttgcccagtgatcagtttttaaagaccattataacatttaaattgaagggctgaatacgtgaaaggttagacaaaaccctaatgcaaaatctccaaagttaactttgaaaagaagtaaaggctgcagatctggaatccagagaacaagggagactgatataaagtgaaatcaggaataagcagtggctagattatacagaggtctgtaaactatggtaagaagctt

SEQ ID NO: 265042 - DNA, 630 bp, Homo sapiens
gatgcaagaaaatatgccgactggagagaggtaggcagagcaagatggcagagtatggccctccagtagttatcccccaacaaaaacatcaatttggaaaccattcatgcatggaaatacctacacaagagctaagaaaaccaggtgagagatcacagtatctaactgtagcaaaacagtgagaaaagatataatacggaggatgggaaggacaattttacattactcgcatcattcttccccaaccccaggyatttcagcatggagagagatgccatttgcttggagggaagagacagaagtgagcacaggactttgccttggattccaccacacggcctactacagtaaaactcagcactgggaagacttctatagtctcatactccgtgatggtacttttggactgagcctgtagaaatgccttggtgccatattggagcacacagccccaggatttaggcttctgtggtagacttgatctctagaccacatcaccagcaggctgacttcagcagctccatgctccagacaatccttagtgacaggcagccctcagtggctctgagcttctggcccatcccagtgccatgcctgccacagggctttcccagacaaagccagtttaca

SEQ ID NO: 265043 - DNA, 621 bp, Homo sapiens
gcagtgtttttttcatgcatctaagaaacaacatagcacaaatttatctacctgtgggtatttcccttttaagtcttcttcaagacttggttatggttgtgcaagaaatagataattgaggtcatttatctcataggaaatactcattacaatgtcaaatataggcctcacttctctgttcccatgcctttctgcatgcactattacctttcatttcaacgatacatacagtatatttttaggacattttgagaggcagcaaactcaaaatatgtagtaacaataatgaacctaacatatttgaggtgatggcaagatgaacagaaataacaaaatttacaaatgggctggctattattatatatttctgttcttgtaggtcgaaaacagttcaatattggcaatttcatattgtttaatcctgtatgtcatgattgccatatccccaaaagtgattgtaaaacaccattyatatgacacatgatttcagagacattacaatgtggaaaaaaatgtgtaaatcagaatttaaaaatggtatttttcaattaacgctttccctgaaaaaaagttatatatgattttaagaattattagtgttaatgtcagacatgagaaaaa

SEQ ID NO: 265044 - DNA, 542 bp, Homo sapiens
gtaaacgagttttactacaaaacttctaatatgctttgtaaatctctaagagggaaattagtgtgactggaagtaattcccaaactcatttgatgcttttgttcagagtatctcaggggaatggtgacctacgaccaaacagtattttggaaatgctgagctcaagattcagttcattggatttgtcagtttcaacatcatgccacatgggtgacaatacacagtcacgcaatagacacacactgtatggccctggactctctagcccaaaccaaactgagccacgcatcccttcgcatgcagatgctcagcacttggctggccaatgaagaattctccctattcctgagactttcccaaacactttatgcacttttagattcccacgccttagctgatgttataccactttgctaatgttcyttccttcttccagttgcctgtcagaatcctattcacccttcagtgttcacctgcaagtgttttcccttcttctgtcactgtactttatgtgtgcttctctttaggtctgtggttttcaa

SEQ ID NO: 265045 - DNA, 607 bp, Homo sapiens
ccaatactaccaatactaatctctctgaaagagatttataatgcatgtataataacaataataataagttcagaagcacatgcttatctctccaaaccttgtcccttgtaacactagtgcaccatgagatttaatagatttatcacacacacatatgtgcaccctaacataaacacacagacacacacagacacakgattacaagaggatttcccagaactttataacgtttatgttaagtgtaaatatttaaggcaaagatatgatatttagtgtttcctaaattgacagtggaactttctttgtgccaaatatctataaacatatgaaagttttcagtaaattgttgtttcagaaatattgcttagaggaacaggttagcctagctgctttgagcctctttgttgaaaactattaaggacagcataaaacacttccctgtacttttaatcctcttgtcatttagatttcaaatgtctgttatttttcatgcttctctacttcttatcattcttaacaaaacaattatcaagtcctttcatttatgtccttagaacatttctttctctactcttttctttgtgcttctccacttcaaagccctcta

SEQ ID NO: 265046 - DNA, 489 bp, Homo sapiens
aatgaggaatgctacaaagggggtagaatgtgagcagccaaaaaacccctaacaaatatccactgtagcatgcacagtatttcagtatttttttctcaaaacgctgagattctagagaatagtaatcttccccattgtgcttagcaccatacctagcacaaayaggagctcaataaatactaagttgcttttatcatattattccactttaaacccttaaggtcaaataatccacttcttagccacctcaatctccattcactgacaactgccaagtcatcttttgttcttccttcttcctcactcctgttatttagtccatggccacaattgatactacctcttttaacatcttgctcattcattccaatccctcttccaacctaccacaagagtgactttcctaaaaatacaaatctgcataaaatccatcaatccaactattgttatctttgtccctcagaggcaagagaatatctcataccttga

SEQ ID NO: 265047 - DNA, 612 bp, Homo sapiens
tcaagcctcacttccccagtgttacttcccatcaccagttcgacctttcattcaaaaacagtaaaagccctctgatcccatggaatattgaaacccatatgtaacacatttttaagagatggggtgtcactatgtttcccaggcttgcctctaactcctgggctcaaagaatcctcctgcttcagcctcccaagtayctgagactaactacagatgtgcaccaccgcaccctgattgcaacctgtatgtaactttaatattgcatttgccttgtttcctttgctcgactaaagatgacttttctttcatgtatgaaaccagagttcaagtagaattgttagtggacagaattggattaagtatgcataaacaagagtaactaaaaagaatagagcctctaatgttcaactgtatttgaacaaaaggaataagccattctgctgaataactataactacaaattagaaaatatcaggttttcaatgagagagaatgttatcattttattaggttggtgcaaaagtaattgtagtttttgttattgcttttaatggcaaaaactgcaatgacttttgtaccaacctaagagtagcattcttatttaacccactc

SEQ ID NO: 265048 - DNA, 689 bp, Homo sapiens
gtcaattcattaaataaacagtttacttttgtggccccagtgtctagagtgatgccggaaaagagtagtattcaaaaaatatttgtaaaaataaataaaattacataaatatttactataccaaacaatgatacaatttagggtaatataagtaaagaattttaaggtgttgcctacacttttgtgtgtgtgtgtgtgtaacctgccagttctttattcctaaggtcttgaatgtgtttgtcacttgttttcttcataatgtctttaaatgcatacgtttctctttgtctcacaacccctgaactaacctgaatacctcagtcctctttactcttgtacttaccacaagtttcatcttctatcctactatttaaagatattgagtttatctttcccagaccacattttcttcctaagagttaccttcccaggaacctaaaaggcatcctatttctcatcagactaaaatcaaactcttagagctaggaaagaaaaaccctacatttgtcttcttttctcattctcttaaataaaatgtttgtcattgataacttctgccacctctctgggctttagttctcctagaaaatgtagagaaactagaaattggggaaattgaggagtggsatggtcctacaaatgtgaaggtatagtaacataagtccacgaagtatgttggcaaaatagta

SEQ ID NO: 265049 - DNA, 566 bp, Homo sapiens
gaaacaactcaaacacaaagacaaatactaaacgttctcctcataagtgggagctaaattatgtgtacacattgaagcagtgtgtggaatggtggacaatgaagacttgaaagggtatgagggatgaggaggggtgaatgatgggaggttgcttggtgggtacaaagtgcattactctagttatggatgcactgaagactctgacttcatgacagtgtagtacatcaatgtagcaaaattgcacttgtacccatgaatatatacaaataaaaaagctcatttccacataatcaactctagctcaactgctattaaattcacagaccttctaaacaaaatctgatttgtcatttctcacagtaaagattttctttaggcaaaaagaaaaacaaaactttttttaaataaatacatttagagcckgagaagaacttctttaacattaaatcctacctttagtatccagactcatacataagctttttaaaaattttattaattttttttttttaaattttttattttattgttattatactttaagttttagggtacatgtgcacaat

SEQ ID NO: 265050 - DNA, 518 bp, Homo sapiens
ccaggtcctatcccagagattcaggttcagtaagtctaggaataagatgggacccagagatgtaattttaacaagaacttgtaggaggatgttgccagttctccttgggacacttttggagaatgrtctcccaaacagaatttctggttatttccgatgacttaacacaacaaaacaaaccaactgccacaaccaccatgcaaccaacacactgaacctttccttgaaacacctccaatacctattctaccaaagtgaatcagggccttggattctcttgacattcaaatgagattggggacaaggtgataaacatgaagactttttagaaacagagcagatggtgcttctcatgttggatctaggaactcttttaggaaaacctagactgcctatcccaggaagactccttttgctacacaagaggaccgtcaaactatttaaaaattttgtttcgtttttatatttatctttaagagacttccctcaagaaagaggttacttcctgcagtgtgagg

SEQ ID NO: 265051 - DNA, 493 bp, Homo sapiens
agcgacattaatacctgcagggctcctcatgtgaagactaaaagtgaatgcatagaccagtgcttctcagtgggggatgacttcatatcccaggagacactgttgtctgtcatacctgggagagaggggctggtactggctgttagtgggtaggagccagggatgctgctaagcatcctacaatgcccaggatagcccccaccgcagagattattgagccccaagtagtgcccaggttgatctagaccaaatactctccacatcttcagagcttaatgatcatcaccctgttgtctctctaccaacgttgggccccaagttaccygattggtagaaccaagatttgaaaaaatgttcctctgcctccagagctgtattcttttcatcccaacgtgctgactcccactggtagcagactatggtaattttttcgtgttgatttataggagtgctgcaaattgcaaatcctgttctcagtcccccaaattcgctg

SEQ ID NO: 265052 - DNA, 552 bp, Homo sapiens
ccactgtaccatgtgctattattattcttatttcacagatcaaaaaatgagcaaatatgtgtgcaaaagtatgtgtgtgtgtatgtgagtgtatgtgtagttttaggtaaaagaataaaagatatcctaattgtcgttgactgatacagaattttttaggctataattagtattcttgtgctgtgctgattaagacttttatcagttcttgggctaaatataaatatttatactccttttttgttggcaggttttaatagttaaagatagattcgtggagagggtagaagatgaatagcaaacaattgatggagtcttctaaagtttaacattaatgattaaacaacatgatctgatgacttactcagcaactcaaagacaataaaacataataaatctgtcaattagcattttcatcttctctcccaacagagcttaatggcayctgcaaaatgcaattttcaacccagagctctttgacattttctgtttcctcccatgtccctctcccgttgttcccgttatgactgagagcagcaacgtgttctgctc

SEQ ID NO: 265053 - DNA, 468 bp, Homo sapiens
atccagttcatatatttgatttctattggttttatagttttgaatttrtaaatttattttgattctgcacttaagaaagaactataagcataaagagtgtatggtaagaagaaaaataatcaaggaattgagagaagcataaatctgtttaaaaaatgaaaaaaaaaacagtgtaaaaaagtctagagtatgctgtggcttacaaatactgatgacatctatagggagtgttaggttaaggctgtgtttcgagccatatgagaacaaggatgggattgtcttattgcttgaagccgatgatgtaatgctaatagaagccagagagaaagcagaaccattcaacttctatattgcttccacctttgctatcaagacaaacgatcaccgtgttgaaaagaagaggaaaacatgaagcccaagacaagtgaggagatcccaagggagatcagcaaactgctttgcataaat

SEQ ID NO: 265054 - DNA, 468 bp, Homo sapiens
atccagttcatatatttgatttctattggttttatagttttgaatttataaatttattttgattctgcacttaagaaagaactataagcataaagagtgtatggtaagaagaaaaataatcaaggaattgagaraagcataaatctgtttaaaaaatgaaaaaaaaaacagtgtaaaaaagtctagagtatgctgtggcttacaaatactgatgacatctatagggagtgttaggttaaggctgtgtttcgagccatatgagaacaaggatgggattgtcttattgcttgaagccgatgatgtaatgctaatagaagccagagagaaagcagaaccattcaacttctatattgcttccacctttgctatcaagacaaacgatcaccgtgttgaaaagaagaggaaaacatgaagcccaagacaagtgaggagatcccaagggagatcagcaaactgctttgcataaat

SEQ ID NO: 265055 - DNA, 539 bp, Homo sapiens
atgaaatggacgtggatcatcataaagaccttcatcctcttcgtcttcacagtaaatgggctgaggaggaggagcaaaaagaggaagagttggtcttgctctctcaggggtgatagaagtggaatgggtggaggaggtagaacgggagacaggcatactctgtataacttttattgaaaaaaaaatctgtgtataagtagatctgcwcagctcatactgtgttgtttaagggtcaactgtttattggtgatttattcacctccctcatttttttcatgattaagttatgtagtgatctatttaaaaaagaaaggcaactagattctgatttgttaatttgttactacattttactgttacccttaattcctttcttttggttatttttccttttgtgcctttgagctgaaattttatttatattttttaattttcattgatacacgtgcataggactgccaatttttctgtaaccactgctgtaaatgcatccggtagttttcactgtcatttttcagaaatttagaaattttggtttg

SEQ ID NO: 265056 - DNA, 539 bp, Homo sapiens
atgaaatggacgtggatcatcataaagaccttcatcctcttcgtcttcacagtaaatgggctgaggaggaggagcaaaaagaggaagagttggtcttgctctctcaggggtgatagaagtggaatgggtggaggaggtagaacgggagacaggcatactctgtataacttttattgaaaaaaaaatctgtgtataagtagatctgcacagctcatactgtgttgtttaagggtcaactgtttattggtgatttattcacctccctcatttttttcatgattaagttatgtagtgrtctatttaaaaaagaaaggcaactagattctgatttgttaatttgttactacattttactgttacccttaattcctttcttttggttatttttccttttgtgcctttgagctgaaattttatttatattttttaattttcattgatacacgtgcataggactgccaatttttctgtaaccactgctgtaaatgcatccggtagttttcactgtcatttttcagaaatttagaaattttggtttg

SEQ ID NO: 265057 - DNA, 525 bp, Homo sapiens
aggattaattaagaaatatataaaaagtgcttttcaaagaaaggatggtatagtagaagtataaattttcgacccatgtggtagactctaacaattatttccttctcttagaactgcccccaacctataagggacaggaccacatctaagactgtgctatatgaycctgctcccaggtcaaagctggtcacttcagggtgtgtacctcacctatgctatgccaatcaggatcttactccagagaattaaaacgtggaactgatggaatagaaaccaagagtccccagagctcaactagggcatcgttggagtgtcatgccaagtggtatataaattcttgctgcagagacccctgctgcttacccagctcttgcttctcctagagtttggtggttcagttcctcctgaaataccataccgcattcaataaatacctcccctttcttattgtacctgaagtttgtttctgttacttgcaaccaggagaaatccaactcatacagtcctgaaaagattagaaaagaa

SEQ ID NO: 265058 - DNA, 566 bp, Homo sapiens
ccctggcactgacattcatttccaactgtggttccaactgaacttcccagagatgtaagatatgactgtctatggtaaccttcctcctttgattctgaggagtaaacggcatttcctctcctcttctattttcatctactctgccacataactcttcctcaccagtggcatctgcagggggacaagccctccttctttcacatatcccaggaacgtggtttgtccactaggccttctccaggcttgtctctcagatatatgaatttcagaatgagatgggtgatatgcatgtagggatattttgcatattaaaagtaaaaatagccgggcacggtggctcacacctgtaatcccagcactttgagaggccgaggtggttggaccttgaggtaaggagttcgagaccagcctggccaacatggtaaaactccatctctactaaaaatacaaaaattagctgggcatggtggcgggtgcctgtaatcccagctactcagaaggytgaggcaggagaatcatttgaaaccgggaggcagaggtttgcgttgagccgagatcacactgtt

SEQ ID NO: 265059 - DNA, 545 bp, Homo sapiens
tataactgaataaatccaggtaaatacatatttggctttcaattagccagggagtctgaatttctagagaatattgaagagacagcgtcagacaatgcaatttcctttaatagggaccataacctcagagttgctgctctgttttttaatattgtacaattaactttttttttttttgcagcacactctgcttatagcttctgtggaaacttaaacattattcaatagaataatttcctggaaaatcttttgaaagtggtcacagccctgaccttgctctggtgccctgggtccaccagcatgctgtttcattacctcaggaaggtttggtgccaagagacagtccaagagttagtgcataaagaaagctaggttcatraaagaattaatatctgccttctttcaaggagggaaactgccacttccaaccattttatgcatctatcacttctcttctatcttcatcattcaacccttcaactggcctacctagatgacaggtaaaaattatagatttttaactcttaagaaataactgccgaagt

SEQ ID NO: 265060 - DNA, 470 bp, Homo sapiens
ccattttgtttttttcagagacatggtctcactctgttgcccaggctggagtgtagtggcacaatcatagatcaccgcaaccttgaattcctaggctcaagtgatccttctgcstcagccctctagtagctagaactactagagatgggggtctcactgtgttgtccaggctggtctcaaactcatggcttcaagccatcctctggatttggcctcccaaagtgctgggattataaatgtgagccactgtgcctggcctttatttttttaattatttttattttgaggtgtctgctatccacagaccccttcctccacaggcactgttcccagctctccctgtatcatctcctctataggtctctttctgttgcctaggctggagtacagtggcacgatcatgactcattatagccttgacctactgggctcaagtgatccttccaccttagccttccaagcagctggaa

SEQ ID NO: 265061 - DNA, 470 bp, Homo sapiens
ccattttgtttttttcagagacatggtctcactctgttgcccaggctggagtgtagtggcacaatcatagatcaccgcaaccttgaattcctaggctcaagtgatccttctgcgtcagccctctagtagctagaactactagagatgggggtctcactgtgttgtccaggctggtctcaaactcatggcttcaagccatcctctggatttggcctcccaaagtgctgggattataaatgtgagccactgtrcctggcctttatttttttaattatttttattttgaggtgtctgctatccacagaccccttcctccacaggcactgttcccagctctccctgtatcatctcctctataggtctctttctgttgcctaggctggagtacagtggcacgatcatgactcattatagccttgacctactgggctcaagtgatccttccaccttagccttccaagcagctggaa

SEQ ID NO: 265062 - DNA, 394 bp, Homo sapiens
cagaagtgggatccaaagcagatcctctaatgaccccatgagtgctgagtgactaagcaaggtacccactggacccatcaaggactaaactctgatattttttatctygctcaaattcctatctaaggggcctagggagtcatgctctacaaaccataaattctcatcagatggggtttatttaactctgtatatcgtgacttactttccaatctgactctggcacaacaaggaagaaaatcaaaatattttactccaaaacatgtttctctgccatatcttgaaatggccctgcaaagctgtccctcatggaaaaaaattcacattctgcagagaatccccttcccaccgcccctccactgcctttttttttttttccccttccttcctttcc

SEQ ID NO: 265063 - DNA, 615 bp, Homo sapiens
atgagagagagagaaatagagggaaagagtaagtaagagagaaaccagaagagacagaaatcaaagaaagacacagagggtgaaactaggaaaagaaatagtgtaaaaagaatgcagaaagttaagacatgttgaagattgtctgtgaaagtcataagaaaaactataaaagggaatttatgcaagaaatattgtataatttaaaagtaattacacctcctgaatataaattattaaaaaatartttatgtacaaggtatgtaagaaaaataaaatatacttttaataacaggattataaggaggcataagaatatggatttttacctacattaaagtttaaaaaaaattttgttttaaaggtttaagcaagttttaaaatgttaattgtaaaggaaattctgtgtgtaaacatattggctaaagttaaatgggtatcatccagtttttctgtgaactggacattaaaataaaagcacaatatatttttcttaaagcactaaactgctctttaacaaaaattacaaaaagttaaaaaaagtctataaaagttttaccttatagtcagacattaaaactggataatgtctacaagattttattataattaagttta

SEQ ID NO: 265064 - DNA, 649 bp, Homo sapiens
aaatacttgatcagaaaagtaaaacgtgtaatatcttttatttagttcacatgatttaagtaatctttgggatataaagacagttttaaagattattggtaaaataaaaatctttaaaatgtaaacatttggtctaaattatgtgggtcagatattaggttttctaagtgatttaaggtcataaactgcttctttgacttttgaaaattgttcattttacctactttggagctttggattctagataagccctrgaaccatgtggagctagccacactcactagctatgctggaaagagtcggatcttatctgcacttctgtctgggtcctaggctccacacctggtacatagttcaaatcacttactaaccaggtttttcaccaaaaataaaagttgctaagagttaacattgtatgcactccagcctggcaacaaagcaagactctgtctgaaaaaaaaaaaaaagagttgacattataacatgtaattgagactactgaagaaacagctttatgttcaaggtgtgtaaggaaagtagaatgtacatttgataaaagattataagaaggcatgggaatatggatttcttccctaagtttagagagttaaaggactgttttaagttaggataaagctgaagggttaag

SEQ ID NO: 265065 - DNA, 590 bp, Homo sapiens
acaacttacatatattgattgatgtctcatgtctccctaaaatgtgtaaaaccaagctgtgacccgaccaccttgggcacatgtcatcagaacctcctctggacacatgtgaatccttaactatggtgaaatgaaattcctaaattgactgagatctatctcagatatttggagttcagacttctaaattgctaaaatagtttatgaccaaagtttggtttgtcaaacccatattcctgagaagaaaatcaaaacttcaggtgaattctgctacctgatgggccatttaaacatttaaagagtgattttgttcaattgtcattttcaatgcatgttttctggttgtataaaagctttcccatgaaagagggctgaagttataatagtagctcattatgccacagtgtattttcrccaggtaaagaaagtttttcatggttcactgactgagaacaatcaaccacttctccatctagaacccaaagactggctcttctgagaacatcagaaagactgccctggctatccacgttgaagcaaaactttgggacttttaaccttgcgttcataatctcacaactcagtagggt

SEQ ID NO: 265066 - DNA, 505 bp, Homo sapiens
cctatttgagtagatggtgacagaagctgggtagggaaacaggaaagatgaaggacagcaaagccagctcccttttctctctggcccacataattcagcctgtgagacagtggctccatagcaaataatcctggctatttttttatccaaaataaatctaagcctcccctaaacacacataatattcaacagtggaaagaaaaaaatatgaaacatcaatagtcagtcccagatagaaaacaagaaaccaggaaaccacatatagaacaaatagcaacagatcttggctgctctgccaccytcacctatgtcgctgagatcctgaaacaaagttcagttttcccaacccctccatccttcaggttatgttcattcattgaagaaattgatgcaatatttcctaagtgccagaaactgtctttggtaccagagttaccacactgaatgcagagacaaaaatccaatccctcaaaaaaaaaaaaaaaaactattctaggtgacaaaa

SEQ ID NO: 265067 - DNA, 505 bp, Homo sapiens
cctatttgagtagatggtgacagaagctgggtagggaaacaggaaagatgaaggacagcaaagccagctcccttttctctctggcccacataattcagcctgtgagacagtggctccatagcaaataatcctggctatttttttatccaaaataaatctaagcctcccctaaacacacataatattcaacagtggaaagaaaaaaatatgaaacatcaatagtcagtcccagatagaaaacaagaaaccaggaaaccacatatagaacaaatagcaacagatcttggctgctctgccaccctcacctakgtcgctgagatcctgaaacaaagttcagttttcccaacccctccatccttcaggttatgttcattcattgaagaaattgatgcaatatttcctaagtgccagaaactgtctttggtaccagagttaccacactgaatgcagagacaaaaatccaatccctcaaaaaaaaaaaaaaaaactattctaggtgacaaaa

SEQ ID NO: 265068 - DNA, 505 bp, Homo sapiens
cctatttgagtagatggtgacagaagctgggtagggaaacaggaaagatgaaggacagcaaagccagctcccttttctctctggcccacataattcagcctgtgagacagtggctccatagcaaataatcctggctatttttttatccaaaataaatctaagcctcccctaaacacacataatattcaacagtggaaagaaaaaaatatgaaacatcaatagtcagtcccagatagaaaacaagaaaccaggaaaccacatatagaacaaatagcaacagatcttggctgctctgccaccctcacctatgtcgctgagatcctgaaacaaagttcagttttcccaacccctccatccttcaggttatgttcattcattgaagaaattgatgcaatatttcctaagtgccagaaactgtctttggtaccagagttaccacactgaakgcagagacaaaaatccaatccctcaaaaaaaaaaaaaaaaactattctaggtgacaaaa

SEQ ID NO: 265069 - DNA, 582 bp, Homo sapiens
tttagtcagcatttttgaaaattgtacagattagaaatctcttaagaagtgccctgacagcaagaaaagccatgttatcttctattcataaaaaagatcattttggaaaggtactttccttcagtagcttttggaggcttgggcttgtttatataatgtagctgcwaaataacattttcagataaattttaaaaactacagaaatgtaaataaattgtatagtgccaacaaataggactgttaataaatgataggaaatgtcttaaatgtacaaatccagaaatattactggcatatcatagtgaattataaatgcagaggtaacctgggggcagatagaaagagaacagaatttgagaactacaacatttatcttataatggtatacaaaaatcaggagaaaaagttccccaggtattgtaggaacttatacaacttatattagtattctggagcatgaccaaattggtagttcaccgattattttggcctttacctatcattaggttgcctaggcgaacaccaaaatttttctgggttagcaaagctaccaggtcataggagggaaattctgaccaatca

SEQ ID NO: 265070 - DNA, 611 bp, Homo sapiens
tggaggaaagtcaaaaccataatgattaataattggcatggtgaatgtgtaaacaaaatggtactcctacacactgtcggtgagagtgtaaatgaggacagagaatttggttgtaccaaatcaacaaccactcacatgtatttttttttttgatttagcaattttcttcaggttaggtgcattcatttaaataaatactttgaagccattaaaagtgaggttgcatatttatcttattgatayatagtgatggtcaatattcatgtgtaattttttaaaaaggaggttataaacatatgtacatgaaatccattgtttacttttcataaaggagattgttctttccacgacatgaaagggtaggaagttgacaaaaactaaaggaaaatgcttcaggagctcacctctgggaatttagggatgaattctcctagagacagatcagcttcatggtgactcatctttggagtctactaaaagagttacgttgcttcaaagatgaggctcattttcataaggagccaaattcttagtaaatcgaaagagcgggatcctgcttctaccttcaatagagatcttaagccactagctgagtggcttaagagccagta

SEQ ID NO: 265071 - DNA, 611 bp, Homo sapiens
tggaggaaagtcaaaaccataatgattaataattggcatggtgaatgtgtaaacaaaatggtactcctacacactgtcggtgagagtgtaaatgaggacagagaatttggttgtaccaaatcaacaaccactcacatgtatttttttttttgatttagcaattttcttcaggttaggtgcattcatttaaataaatactttgaagccattaaaagtgaggttgcatatttatcttattgatacayagtgatggtcaatattcatgtgtaattttttaaaaaggaggttataaacatatgtacatgaaatccattgtttacttttcataaaggagattgttctttccacgacatgaaagggtaggaagttgacaaaaactaaaggaaaatgcttcaggagctcacctctgggaatttagggatgaattctcctagagacagatcagcttcatggtgactcatctttggagtctactaaaagagttacgttgcttcaaagatgaggctcattttcataaggagccaaattcttagtaaatcgaaagagcgggatcctgcttctaccttcaatagagatcttaagccactagctgagtggcttaagagccagta

SEQ ID NO: 265072 - DNA, 537 bp, Homo sapiens
aaccaattcgttatgtgggcaatggaatttatctcaccttgggtttctccccagccagtgatgaaacattcggtccggtcagcgaccacataatttggggatggcagacaagctgggattactttgtcagtgatgacggcaggactgaaagaaaagcatcagcagttatgtttgactgctctgctcgcagctgcagyacccacaaccagtcatccctgtcttgaggccccagagccctctgaactggcactgccttgcttcactgacacagagcaacgtagaacacagagtttcaccctcacatttgcctgtggttgtctatggactatgcagatgtaaggtttcatttgaaaggcatcagttgcatgcaagatactgctggtggccttcacctttgaaagtagggatgacaaaggcgcacttctcatgtatattctgtgcacaactggaatctcatgctgagtgtgtccttttacattaatcgaatagggcattgatcagtgcatggaatgtctgactgagatgccaccaagaggc

SEQ ID NO: 265073 - DNA, 319 bp, Homo sapiens
catctcctgggttcaagcgattctcctgcttcagcctcctgagtagctgcaactgcaggtgcacgccaccacacctggctaatttttttttstattttcagtagagatgaggtttcaccattttggccaggctagtctcgaactcctgacctcaggtgatctgcttgtctcagcctcccaaagtgtagggattacaggtgtgagccaccatgctcagcctcttcttcctttctattattattattattattttggcaaagttattttttgaatgctctaaagccgtccttcctgtgcccctgttcaaaaggagctatga

SEQ ID NO: 265074 - DNA, 537 bp, Homo sapiens
tcctctgggtatatacccggtaataggattgctgggttgagtgttaggtctgtttttagctctttgaggaatcactggactgctttctacaatagatgaactaatttacagtcccaccaacagtgtgtaagtgctcccttttctccacaacctttccagcatctgttattttttgacttttttaaaaataatagccattctggctgagatgagatggtttctcgttgtggttttgatttrcatttctctaactatcagtgatattgagcattttttcatatgcttgtgggctgcctgtatgtttcctttagaaaagtgtttggtcatgtctcttgcatactttttaatggagttgttttgtttcttgtaaatttgtttaagtttcttatagatgctggatattagaccttgatttttgtcagctttgtcaaagatcagatggttgtaggtttggccttatttctgggctctctattctgtcccgttggtctatgtgtctgtttgtttgtttgtttgttttgttttgttttgttttca

SEQ ID NO: 265075 - DNA, 521 bp, Homo sapiens
aaatctagaaactcagaatacctcaagcagattaaacacaaagaaattaataataaacacatcatagtcgaactgttgaaaaacaaagatgagaaaatcttaaaggtagtcagagaaaaatgacctattgaaaacataggaacaaagatcagattactagtcaaactatttaaaacagaagataatgaacatcatcattaaagtgttgcaagtratgaaactctcaacccagtatctacattcagcaaaattacttttaaaaactgaaggcaaaatactttttcagacactcaaaatctgaaagacttcagcagtagcagacctgtgctacaaaaaatgctaaaagttgtttttcacagaaagaaactgacaccagatggaaattgagatctaccccagtagatgagaagcaccagaaatggtaaaataaataaataaagaaaatatttaaaatagttttattcttgatcactttaaaacacaactattagggcaaaaatagtgtcaatgtattgtgagat

SEQ ID NO: 265076 - DNA, 636 bp, Homo sapiens
atgataaaattgtttactccacatcatttctactaggtctgccatttcatcttctcctcttgaactcttccccacccccaccactcaccctctgctccccaaggtggaaaaactggacacccacagacctgaacattgtaaacaaagacactctttgtttacaaaacaactattagaactctggttgaaaatgaaatccatgtgtcagagagcatgggtctgatttccctttagcacagagagaataggatgaacaacacctaaagcctacatttcagtgaactcctgaggcagaagtttcagttgcaaagaaagaaaaacatgataaatggaygctctgatcaatcacccacagtaaccaataaccataactgttttaaaccagcaataaaataaagaccaataacatcccataggacttgtaggtcacttttcagaggctgcactcaggcactgacacatgttttcttttgatttcaagaacagggcaggtccaaatcctggaatctgggtgtgcatcatactcactgcagcgggggatgtcacaaagttcccagcgcttgttggggtcggtggtgaaacaccaaggccgcagctccctatcggggttacgacagtaattcttcttcaggttct

SEQ ID NO: 265077 - DNA, 593 bp, Homo sapiens
acataaattaggcagtgtcttctttttaaaattttttttattgttttaagagatggggtctctggcacccaagctggagtgcagtggaaggatcatagctcattgcaacctcaaactcctgggctcaagtgatcctcctgcctcagcctcctgagtagctaggagtataggcacatgccaccatgcccggctaayttttaaaatttatttgagacagggtctggctatgttgtcgaggctggtcttgaattccagggctcaaacaatcctcccacctcagcctcccaaagtcttgggaatacaggtgtgagccactgtgcctggccatggtagcttgtcttgatggtataaaattactgttttcattactgtgttagatgttttttcattttcccatggtggcctcctttgggactgtccatgcttttgctccaagagtaaatctcaaaggagcaagcatgagtaggaattttccttgcatgcacacagccagccaaacagccctatgtccgtgatgaggtgcattccagaaccagtggtaggatggggttgggttgtacctactagctgaagtttttattagatgtagaatt

SEQ ID NO: 265078 - DNA, 593 bp, Homo sapiens
acataaattaggcagtgtcttctttttaaaattttttttattgttttaagagatggggtctctggcacccaagctggagtgcagtggaaggatcatagctcattgcaacctcaaactcctgggctcaagtgatcctcctgcctcagcctcctgagtagctaggagtataggcacatgccaccatgcccggctaatttttaaaatttatttgagacagggtctggctatgttgtcsaggctggtcttgaattccagggctcaaacaatcctcccacctcagcctcccaaagtcttgggaatacaggtgtgagccactgtgcctggccatggtagcttgtcttgatggtataaaattactgttttcattactgtgttagatgttttttcattttcccatggtggcctcctttgggactgtccatgcttttgctccaagagtaaatctcaaaggagcaagcatgagtaggaattttccttgcatgcacacagccagccaaacagccctatgtccgtgatgaggtgcattccagaaccagtggtaggatggggttgggttgtacctactagctgaagtttttattagatgtagaatt

SEQ ID NO: 265079 - DNA, 571 bp, Homo sapiens
caatctccctaattcgctcaacccttacataagcatcagatttagatttttagagttttgcccaccaactcaaatcggttcccttcttcttccatgtttctgatttgatatmttttcctgacttttttcccctcctaccaagccttcctagtctctcccagcctcaggagcttgctcagccagaaaggaacaaaggctgcttccatttcacaaggcagaagtccagctgacaagtggagtgcgtgagccagctggttctgagcccagaagtcccgacaggctttccatttgtttccaatggctttattccacatgactttagtaaaccgtactcaatcaatttctgaccttggtactttgaagcaacacttgtatacagatattaagggaagagggaagttaagggaggaaaatcgaaggtcaaactgtgtgtcaaacaaggtgctgggtcctaattttatttttagttgcctcttgaatcgctcaagcccatcttgccttttttgttttttaaacaagaggtttctgcactagcttccatcttccagactcgtgctgtctaatccagtag

SEQ ID NO: 265080 - DNA, 571 bp, Homo sapiens
caatctccctaattcgctcaacccttacataagcatcagatttagatttttagagttttgcccaccaactcaaatcggttcccttcttcttccatgtttctgatttgatatattttcctgacttttttcccctcctaccaagccttcctagtctctcccagcctcaggagcttgctcagccagaaaggaacaaaggctgcttccatttcacaaggcagaagtccagctgacaagtggagtgcgtgagccagctggttctgagcccagaagtcccgacaggctttccatttgtttccaatggctttattccacatgactttagtaaaccgtactsaatcaatttctgaccttggtactttgaagcaacacttgtatacagatattaagggaagagggaagttaagggaggaaaatcgaaggtcaaactgtgtgtcaaacaaggtgctgggtcctaattttatttttagttgcctcttgaatcgctcaagcccatcttgccttttttgttttttaaacaagaggtttctgcactagcttccatcttccagactcgtgctgtctaatccagtag

SEQ ID NO: 265081 - DNA, 611 bp, Homo sapiens
tttttaagtcttttcacttcttcagaggtaaacttggtgacacttctgcttatatcataaagctgtactttcaatgataaaatgaatacagtatatatcaagtgtgctgacatatatgctgtgtgtgtatgtgtgtgtgagagagagagagagagaaagagagagagagaaacagtggcacatcttaatcctctggtagaactaaatgtggtgatagcgatttaggcagattttagcttggagatttgaaccccttaaagagatgggaagtatgggagaaaacctgctactctttaattatatggataaaataaaaatgtttcctttccctttccttcagttaaataatgacaggtaggcgtgtcattcagctcaccttcattttctcactattaaaagggtcttcgatgtctgtgaatttgtattaattttaaaattaaatgtgcacaatagtggattaaaaaataattttacttcatagcaacctttatttccctagcagtactcttgcagtaaaattgtgtccaagctcctagccagtcttagtgatgttmgagatgcttcaaaatgtcttctttgaaaaacacctttcctactccccgccaaaataa

SEQ ID NO: 265082 - DNA, 596 bp, Homo sapiens
tgaatctatccagttatattatttctgataccctcccccacccccagcaaataaaatattcctctattgattcaatctttttggggaaaagaagtttaatattccaccattcattttargtatgatagtatttaagggttacttttagcaacatttatagagcaaaatgctttatatttttgaatagtccaaattaatgataaatgtaattggataaagctgcttcttatcttctctaatagaacccctgcccacttgggattagagaccggcctttggaggattgtcaactgtgttcactggggactattaggaatcactccccacctcatgtcattctgtagtgtgggccctaggcagtgcaatctagaattaattgtaagttggctatgaaactaagaaacagcttatttaaataactaccccactttcttgatcccaaggaaggcaatcattttacattcagggatgagtctgctttcctagatgagcacattgaagaagaaaccctgagtttcctggggcacgtctggactgaactgtgagctatggttgacctctagttggccatgccattgaggagaatgtgtcccctg

SEQ ID NO: 265083 - DNA, 602 bp, Homo sapiens
ttccaccattcattttaggtatgatagtatttaagggttacttttagcaacatttatagagcaaaatgctttatatttttgaatagtccaaattaatgataaatgtaattggataaagctgcttcttatcttctctaatagaacccctgcccacttgggattagagaccggcctttggaggattgtcaactgtgttcactggggactattaggaatcactccccacctcatgtcattctgtagtgtgggccctargcagtgcaatctagaattaattgtaagttggctatgaaactaagaaacagcttatttaaataactaccccactttcttgatcccaaggaaggcaatcattttacattcagggatgagtctgctttcctagatgagcacattgaagaagaaaccctgagtttcctggggcacgtctggactgaactgtgagctatggttgacctctagttggccatgccattgaggagaatgtgtcccctgtactgttgggagtgggctgagcagttctctttctctcacagtgctcgttgtagcgaacattgcatgtttaacaagtgagtcgaggctgcaagatgccctagttgatc

SEQ ID NO: 265084 - DNA, 652 bp, Homo sapiens
ttgactcttggcactagtacctttcacgtcagaatgccatcagcttgtggtggcagaacttgggaataatgataggaattgtggcatgtttttttttctcacttacgtagttaaatcagatcttgcctcaaggcctattttctctctgtttgttatgtgtcacctctgaaaacattcccagacgtttactgttctctttgtttactcctcaaccactagaataaagcagacttgaaaataagcagtcttccattccctagttgggtgagactatccgaaaagcctttgaacattttcttagtgaaatgaagaggagtcctgttctctgcagtggaggatttggagacaagtggctcggcattcggctcttggaattttaacttaactactaattagcaatggctctctccaggtgaaatgaaaacaagttaatgaacataaaaccaacttattaatcccygtttcttaacttttaggagcaactgtgtttttaggaaatttgtagggcattttctttctgaatttgtgttcattgagtctagtgatatttggaattacacaaaaatacagaggtattagtgaatgagagtgaccagcacaaattgaatggatcagtgcagcttttttaaatagggctaagtgtatctgaaaa

SEQ ID NO: 265085 - DNA, 604 bp, Homo sapiens
aatgtagtcttaatttaaaagagaaatgaaagtaatttattataaaataacttcagtttgtaagtgatcaggtacaactcatcagaaaacaaaagtacatggtcaggtgtttgcgtgtatgcgtaggatcacggtgggtgtgacagctgccattgcaggctctcttgagttaaagacttcagtaacaccattgacattgtccttgggctcatgattttccaaaggggcaactaactcttggtaaatatctgaacaaaacaaagtatttcatttgtatgacatttgcattaccggaaaatacagggaatgaatacaacagtgcaataactattttgagtttatrtataaattggagttaaggtctaggctcagataactagaaatagttttttcaaccacatcaatatgtaacaggacctttgaaggtcctgtgggacaattctttactgagtgagacagtgtggtacattgcagatcatctgaatcccaggaaggccccccattcttatggcactcacaaatgcccaccatttactgtccacctgcagagtagttgggtctgcctctcccaggcagctgcactagccaggcctggcttatatgc

SEQ ID NO: 265086 - DNA, 534 bp, Homo sapiens
tcatcatttgcagaatgcttttcacatatattatttcatgtaaccccttaaaaaacccatggaaatatgtgaaattattgtcattattttatgctggaaaacagaaatttagagaggttaaggtaactccacagaggcatacagctagtttgtgagagggccaggaataaaatccaggtstgactaaatctcatgtcttgtctgctatagaactctaactcccaaatagaaaaacaaaactcagttaatcagaaggctgacattatattttatgggcaggctttagctttctttatttcataagaaactagatttttaaatcccttctgttaacagtctattctcaaaactcattctgtggtttccattcattttgggatgcaacgtacttaccaaggagatcaggctgacaatacttatatcaaaactaacattctggatggcatatgccaatggcttagggtccatagtgggaaaggtcagtaaccaggcagaaacgtacatgatgggagcagacacaaatgtgcttatcac

SEQ ID NO: 265087 - DNA, 545 bp, Homo sapiens
tcctccagtataacttaattctgtactcttggctttttctaacatatttaggggccaagggcccccccaaaggtttgctgaaaaaaatcaactcacaaaagacagattggttgaagagaaagcrtatagatttgtttggcatatatatgtgacaatcttcagagtaaagacccaagatacagggaaaattgttcatttttatgcttaggttcaacaaagtatgaacagccttgtaaaaaactacagatacaattgaacgctagtagactgtgtggggaaaggagcaaggcctgtctgcctagattcttcttcacctccctgagtatgcatttccatccttctgggtgtaggggtcttataacctatagtccaacaaggaagttcagagaatttcttcatggccagttttcacacagtaaagtggagaaaaaattagaggaatatttttaagtgttatggctggctttgatgaaaatgggctgtggtttctggggcccaccttggggaagaaagattctagtttctatagccagcctaaagggaaa

SEQ ID NO: 265088 - DNA, 545 bp, Homo sapiens
tcctccagtataacttaattctgtactcttggctttttctaacatatttaggggccaagggcccccccaaaggtttgctgaaaaaaatcaactcacaaaagacagattggttgaagagaaagcgtatagatttgtttggcatatatatgtgacaatcttcagagtaaagacccaagatacagggaaaattgttcatttttatgcttaggttcaacaaagtatgaacagccttgtaaaaaactacagatacaattgaacgctagtagactgtgtggggaaaggagcaaggcctgtctgcctagattcttcttcacctccctgagtatgcatttccatccttctgggtgtaggggtcttataacctatagtccaacaaggaagttcagagaatttcttcatggccagttttcacacagwaaagtggagaaaaaattagaggaatatttttaagtgttatggctggctttgatgaaaatgggctgtggtttctggggcccaccttggggaagaaagattctagtttctatagccagcctaaagggaaa

SEQ ID NO: 265089 - DNA, 554 bp, Homo sapiens
tgcagccagcacttgaggggaagaggagcccgcactctaagagcactgagagaaagcacagctgcaaacatgaggagatgcagaagagccatgtgactgagcaagagcctacctactggccattacgttaaccgccatctacccgatcgcagtctaaagttcaacaccaaaaatactttgctaatacaacccctcatgaaaccaaggacaagaattcagctaaaaataaagaccctgcacaaaactttggcatgctgaaaacattcagaaatgaagtcagctgattatattttcaaattacactacagttaaggaacatcagctcacacagatgagaaagaatcagtgcaagaactctggaaackcaagcctagagtgtcttttttccttcaaatgactgcactggttccctagcaagggttcttaaccaggttgaaatggctagaatgacggacatagaattcagaatatggataggaatgaagatcattgaaattcaggggaaagtcaaaactcaatccaaggaatgtaaggattacaataaaatgatacag

SEQ ID NO: 265090 - DNA, 594 bp, Homo sapiens
tttctaagaaagaattagccagactgacttggcagaaagagaaaagaagaagatggatgtctttgaattcttagaaatgctttgaagataaaagctccacctgggggaaaacacgagagacctttgagggttcaccttccagtagggtgaccaattgtctcaatttgcctaggactgagaaagttcccaagacatgggactttcaacttcaaattaggatggtccttggcacaccagattgagttggtcatcctattcctgaccagtgccagtatcattcagtgtggtgttgaataaaagcttttatatttctatggggctcttttgacactccaagtcaacttggcctggatcatcttgaacaggcatttcaaaaagctgttgggattttagtcaaaggggttgagacttttataagtagggcagaatgctacatataagagtggttggccgggcgcggtggctcacgcctgtaatcacagcactttgggaggccgaggcaggtggatcacctgaggtcaggagttcgagactagcctggccaacatggcgaaaccctgtctctactraaaatacaaaaaatagccagacatg

SEQ ID NO: 265091 - DNA, 612 bp, Homo sapiens
tgaacttaactgtgaaatatccagagacaagtgtttggtaacctctcttctgtggaatatgaataatgagctggaattaagtcctcaagacctttatacaaccagaatagatgtcgtgcatttacatgagaagatagaacctcctataactctagaacggatttatttttaatggagatgttgttgcaacagatttgtttatttaggtttctagccatctgcaaactggaggcaataaacccaaagtttgtttctagactgatacaagaacatcartgcagaatgactatggatactttgatagtacagaaggagagaaaaataaaacacaaaaatttgccaaagtaacaaaggaagcatagtggcctggggcaatttaatgtaggggcaactcattctatgcatttgttattgttttatacccctatgtaatgagatagtttaaagatgaccctaaatcatcaagaaaaagttagatacatttagtgtaccttgtttgagaccaaggaaagtatttaacattttagaaagaatttccaacaaactcttacattgagttttcagttaatctgaaaattgacttctgtggaataactttattccataaactat

SEQ ID NO: 265092 - DNA, 612 bp, Homo sapiens
tgaacttaactgtgaaatatccagagacaagtgtttggtaacctctcttctgtggaatatgaataatgagctggaattaagtcctcaagacctttatacaaccagaatagatgtcgtgcatttacatgagaagatagaacctcctataactctagaacggatttatttttaatggagatgttgttgcaacagatttgtttatttaggtttctagccatctgcaaactggaggcaataaacccaaagtttgtttctagactgatacaagaacatcagtgcagaatgactatggatastttgatagtacagaaggagagaaaaataaaacacaaaaatttgccaaagtaacaaaggaagcatagtggcctggggcaatttaatgtaggggcaactcattctatgcatttgttattgttttatacccctatgtaatgagatagtttaaagatgaccctaaatcatcaagaaaaagttagatacatttagtgtaccttgtttgagaccaaggaaagtatttaacattttagaaagaatttccaacaaactcttacattgagttttcagttaatctgaaaattgacttctgtggaataactttattccataaactat

SEQ ID NO: 265093 - DNA, 631 bp, Homo sapiens
acattgcaggtcacccgcaggctttatcttctatgactgacatttaaacgggagagctcatttgatgctgttccaggttcgctgctgggtgtttctaattgtgtgttttaattaatgtttttattgtacttggtcccagagactgtttcaacagaccagcatatatttagaactctctaaataaataaatgtaaaacaaaggaaaactgactctggtggaattgtgagaattaytgtttctaaaaagatagggtaaagtttcagactctactgcttgaaaccaactccttggcaatatcagggcctgtccacctaaacacatcctatgggtatagcaaagcatggcttgagactcttatccagtgtttgggtttagaagtctatactctgggtcttgagacagttgggagacactgtaaaatttattgtgttgggtttttttttctgtatttaacaaataaatagggatattggcagtggtagcaaatatctgaggcaacatttatttgcacctgtgtaggtctctttctgttgctaggtaaagaaggtaactagaattggctagttcctttgcaccccttattgttgtctcttgaattttgttctcccctttaaaagggacagtaacacc

SEQ ID NO: 265094 - DNA, 434 bp, Homo sapiens
tggataaatctaaataagtactgactgcctaaaacaataatagtaaagtattttgggatttataaaatatttagaattaaaatacatgagaataatagcatatatagtttggcaggaagaggaatagagtttaaatattttaaggtccttgaatcacgcaggaagagttaaaagtactaattgatcttaaattttgataagtcatggatgcatgttcaaatgatctgtaggaaaaacaataaaggaatggtaaaaaaaaaaaataaaactacaaagctaatagaggggaaaatagaataatacaaaatactccatcaatttaggaagaaggyaagaaaacaaaaggaaactaaaatgtgcaggacaaatgaaaagcaaatagaatggtaggtagttttaaacctaaacatatcagtggttatagtaaatgtaaa

SEQ ID NO: 265095 - DNA, 574 bp, Homo sapiens
acttaaattggtagtgggatcagggtggtacttcwgctatatacagatggaaggaagcaagaacactgcaggaagttggggtttttaatgtaattttctatatactttcacattattaaatatcctacctttgttttgttgcttagtgtcatgttttcaatatggtctttatgactaacacccaatcaacaggagcatctatggtatgaccttcccctcctttggcatattccagatgaatggatacaagaacaggcaaacacagcctttcttgctaaaagttatttctcattaggaaaattgaaaacattcaaacaaaacaaaatctgtcaaaacaaaacaaatctagtatcttctgcatttcataatatttgattccataaaatcagtcctatcagaggaaaggactgttgatggctacagaatcgcttcatggcaatgaagtattaatatttataaagactacctagcacacataacattaactagagctctaattagaacctacatgtaattctgagagagaactattgtgtgaacaagttctagctatgaaaaagatatgaaaaatgta

SEQ ID NO: 265096 - DNA, 574 bp, Homo sapiens
acttaaattggtagtgggatcagggtggtacttcagctatatacagatggaaggaagcaagaacactgcaggaagttggggtttttaatgtaattttctatatactttcacattattaaatatcctacctttgttttgttgcttagtgtcatgttttcaatatggtctttatgactaacacccaatcaacaggagcatctatggtatgaccttcccctcctttggcatattccagatgaatggatacaagaacaggcaaacacagcctttcttgctaaaagttatttctcattaggaaaattgaaaacattcaaacaaaacaaaatctgtcaaaacaaaacaaatctagtatcttctgcatttcataatatttgattccataaaatcagtcctatcagaggaaaggactgttgatggctacagaatcgcttcatggcaatgaagtattaatatttataaagactacctagcacacataacattaactagagctctaattagracctacatgtaattctgagagagaactattgtgtgaacaagttctagctatgaaaaagatatgaaaaatgta

SEQ ID NO: 265097 - DNA, 567 bp, Homo sapiens
aaatgggaacttttgtctcttgcttagtttcatggggtttccaccaccctttgctgccaaagactactttctggaatcctcttgagcattcaagcataaaaacattccactacaggagaaaattctattaattagtaagagagggaaatatctgtgatttatagctatagctgttacaatgtaatttgtattggagaaacagtatctaaccaaaggagaaaaatgtatttttgaaaagtaaccacatgcaaatttgactctatccagattataccccatttgctgctgcagaaagtagaagatgaagaatccattagacatatcagtttcttggtaggaaggatactgtcagctactggaagacaggttctgcatacatcaacaaaaccagggagcttgttagaaatgtrtaatgtcatgccttaacccagacctacccagaatcagaattttcattttaacaggatccccagggaactgatatgttcattaatatttgagaagcactaatctataatgcataacacacaggagattctaaaaaacatattaaacaattgaatccca

SEQ ID NO: 265098 - DNA, 650 bp, Homo sapiens
aaatatatatgcatgtatacatatatatgtatacatacatatatgagtggacagttggtaattacaatatcttatgagatactttaggagaatctacttttgattggtatagtcttgtgattgctcattgtcctcaactcccttgtcttgctctctttctccctcccagttacattccacaactttttttctgcctgtcatttctcttacagggggtcctgtctttcagggtaagargcagcgcctggaagataaaggtatggctcagttgtttgctccgtttttgctttttctccacaaatgtatgtttgaatatagtcctggcccctaccctagcaggtactccctgaatttttgctttttccttagaagactgattttcatacttgagtgctgtgtggtggtggtaggtggtgctagagggtgagtgtcactgaaacttgagatttgcagaagatccaggaagtaccatcaatagcttgagtttttcatgataatagcatgcagtatatattttttaaattgaccaataggcaagcaacaccaagtcatgaattttcagcaattgctgttacccagttgtgatctttgtggttaagagtttgtgatggttaattttatgtgtcaacttgactgggctaagggatgcc

SEQ ID NO: 265099 - DNA, 556 bp, Homo sapiens
atatcacacatttacaaattgtaaaaatacgattctgaggattaaacagcaaactctgaaaaacagacttacactgccctttgtcattctggtatattagaaaatattgggatatataagttttcagaaaatagtaaaaatgttaatttaatggcatgctggtgtgaatgtatgtacaagaggagggctttgctgcaaaatatttcacaagggaaatctaacatcatcattgaataaaaattcttccctaacccrggttgtgacagacttggtctgcaaggtgggcagtgagttggaccccatgagttgtttcccactttggattgtgttctgtggcttcactcaagggagtaggattggattccttgcaacacacaaggctgtttagagtgaaaacttatttcaccaccttccccacaacgatttaactacatgcagttccagctcctgtcatgattctcattttaactaggcacacataaaagcacatgcagtttttatggctgtcttggattcccttccctacgtcactcttatttcacctacagttcaagtc

SEQ ID NO: 265100 - DNA, 639 bp, Homo sapiens
tgttgctggtaaaattgaagccctctgtcaggtagcctaccctaacaactatgtaacttgttttgcctaatrgtaagacagtttgcataagggttcagaaacttaaaatacattgtattatacaattatcttccgtgatttaatgattgtctgtcttaaatattgtgaaatacaaatggttattcctgatgatttttatattggaatataagttgtcaggactagaaagtttattcgtattttggcacatattcctgcacagttgttggtggaagagaacagagcacttgcatttttgcctttaggtcctcacaaggagaagtagcaaagtatgattcctgttgattgcaggggggaagaggattgatagatgttggttataagtcagtgatgaagtgactggttcacttcatcagtcatgaaacatcctggttctaatctattagtccattcatattaggtctcctagaacaaaagtttgttatcaaggaagattatggcttcactatactactattaaatttcaaaactttatttaaatttttgtatggaaatatcctctgtaggaggtagaattctgtatatctggtttcttgaatacttttctcccacttcaaatacctgattgttatttttgtc

SEQ ID NO: 265101 - DNA, 639 bp, Homo sapiens
tgttgctggtaaaattgaagccctctgtcaggtagcctaccctaacaactatgtaacttgttttgcctaatggtaagacagtttgcataagggttcagaaacttaaaatacattgtattatacaattatcttccgtgatttaatgattgtctgtcttaaatattgtgaaatacaaatggttattcctgatgatttttatattggaatataagttgtcaggactagaaagtttattcgtattttggcacatattcctgcacagttgttggtggaagagaacagagcacttgcatttttgcctttaggtcctcacaaggagaagtagcaaagtatgattcctgttgattgcaggrgggaagaggattgatagatgttggttataagtcagtgatgaagtgactggttcacttcatcagtcatgaaacatcctggttctaatctattagtccattcatattaggtctcctagaacaaaagtttgttatcaaggaagattatggcttcactatactactattaaatttcaaaactttatttaaatttttgtatggaaatatcctctgtaggaggtagaattctgtatatctggtttcttgaatacttttctcccacttcaaatacctgattgttatttttgtc

SEQ ID NO: 265102 - DNA, 639 bp, Homo sapiens
tgttgctggtaaaattgaagccctctgtcaggtagcctaccctaacaactatgtaacttgttttgcctaatggtaagacagtttgcataagggttcagaaacttaaaatacattgtattatacaattatcttccgtgatttaatgattgtctgtcttaaatattgtgaaatacaaatggttattcctgatgatttttatattggaatataagttgtcaggactagaaagtttattcgtattttggcacatattcctgcacagttgttggtggaagagaacagagcacttgcatttttgcctttaggtcctcacaaggagaagtagcaaagtatgattcctgttgattgcaggggggaagaggattgatagatgttggttataagtcagtgatgaagtgactggttcacttcatcagtcatgaaacatcctggttctaatctattagtccattcatattaggtctcctagaacaaaagtttgttatcaaggaagattatggcttcactatactactattaaatttcaaaactttatttaaatttttgtatggaaatatcctctgtaggaggtagaattctgtatatctggtytcttgaatacttttctcccacttcaaatacctgattgttatttttgtc

SEQ ID NO: 265103 - DNA, 471 bp, Homo sapiens
gatcccatgtggtaattagaagctggcataacctcacaaagttctgaattgaggcaaggggctggggctgtgtatcttcacagcaatcagtcattgaatgtgggctacctctggggagggggcgaactcaggacaaactgctcctttgccaaaggcgatttctggcaaggggttcaactatgacctggcagaagccaacattgctggtatctaggggaatgattatcctggtagaggaggatctgggtggcattaccacatccactacactgggcccacttcaggccagattgaggaagttttgctttatttggtaggccttgggatgccattggagatgtttacacagataaatcatgtgagtcagagctgtatttgagaagattagtctagttgtatgctcagawtggattggaggtggtggataaactgcagatagagaggccattgggagactattgaaatagtcca

SEQ ID NO: 265104 - DNA, 578 bp, Homo sapiens
agaccttaatgcagtttacttacttatgatgtcttccagccctacttttggtttattgctgttagtctaaatcacagagagaggccctctaaaagaaaatgatatttatttgggaatagagcattgcaatgggaattgcacagtctttttttagctttgatgaggcaacctttgcttacatgtgccatggtaaactatgtgcatactcaggcgggtaaaaggaagagaaaactttttaaaggaaaaataaggaaaattacataattgttttgagataattatccttggctacaaggatcaacaacaatgatgacagcagcccaaagttagacaggcacttgctggggaaatgtcctcraagaagtatttttgtgtgtgcaagtctgcagtttttgcaaaatcttttgtgatagtttttatcattcatttatgaatgagaactgccctcttcatatttattcctggccttatttgtcagggttttttttttttttaacacgggtgactatattttgattctaacaactctcatattttcacccactgctgccattttttttttttttttttgagagaga

SEQ ID NO: 265105 - DNA, 578 bp, Homo sapiens
agaccttaatgcagtttacttacttatgatgtcttccagccctacttttggtttattgctgttagtctaaatcacagagagaggccctctaaaagaaaatgatatttatttgggaatagagcattgcaatgggaattgcacagtctttttttagctttgatgaggcaacctttgcttacatgtgccatggtaaactatgtgcatactcaggcgggtaaaaggaagagaaaactttttaaaggaaaaataaggaaaattacataattgttttgagataattatccttggctacaaggatcaacaacaatgatgacagcagcccaaagttagacaggcacttgctggggaaatgtcctcgaagaagtrtttttgtgtgtgcaagtctgcagtttttgcaaaatcttttgtgatagtttttatcattcatttatgaatgagaactgccctcttcatatttattcctggccttatttgtcagggttttttttttttttaacacgggtgactatattttgattctaacaactctcatattttcacccactgctgccattttttttttttttttttgagagaga

SEQ ID NO: 265106 - DNA, 583 bp, Homo sapiens
ggttgccgtgtctgtgtagaaagaggtagacatgggagacttttcattttgttctgtacttagaaaaattcttctgccttgggatcctgttgatctgtgaccttacccccaaccctgtgctctctgaaacatgtgctgtgtccactcagagttaaatggattaagggcggtgcaagatgtgctttgttaaacagatgcttgaaggcagcatgctcattaagagtcatcaccactccctaatctcaagtacccagggacacaaacgctgcggaaggccrcagggtcctctgcctaggaaaaccagagacctttgttcacttgtttatctgctgaccttccctccactattgttctatgaccctgccaaatccccctctgtgagaaacacccaagaatgatcaataaaaaaaagaggagggaatgctatcagcaaaacacaccagggtggaaaagcacaatgcatgttcagaaaatgccaagaaccttagtttgactagagactagcatgttaagagtgaagtatataaaaaggtcaaaaaggaggtttgagccagtttaaaagttgtagggaatatggggagtt

SEQ ID NO: 265107 - DNA, 583 bp, Homo sapiens
ggttgccgtgtctgtgtagaaagaggtagacatgggagacttttcattttgttctgtacttagaaaaattcttctgccttgggatcctgttgatctgtgaccttacccccaaccctgtgctctctgaaacatgtgctgtgtccactcagagttaaatggattaagggcggtgcaagatgtgctttgttaaacagatgcttgaaggcagcatgctcattaagagtcatcaccactccctaatctcaagtacccagggacacaaacgctgcggaaggccacagggtcctctgcctaggaaaaccagagacctttgttcacttgtttatctgctgaccttccctccactattgtyctatgaccctgccaaatccccctctgtgagaaacacccaagaatgatcaataaaaaaaagaggagggaatgctatcagcaaaacacaccagggtggaaaagcacaatgcatgttcagaaaatgccaagaaccttagtttgactagagactagcatgttaagagtgaagtatataaaaaggtcaaaaaggaggtttgagccagtttaaaagttgtagggaatatggggagtt

SEQ ID NO: 265108 - DNA, 659 bp, Homo sapiens
actgtgcaactgcaccacaacttgggtgacagagtgagaccttgtctctggggaaaaaaaagaaaaggcaatattttggagaacatgataactcactgaaatctaaaaaaaagtaacatgacatataatcagctcatgctaattatcacgggaaaatatttttgatgtgttttatatgacttgatgtcgagggataggtctttattctgattgaatggtattttcacatatttaatactacagaattaaacaggaatattttatgtgcttgaatttaaaatctgctcttggagttagtgcaacactggatatctcagatgtttctcagctgacacatgattagtatttctatccagtacactacatactttgtgaggatattgactcttaagactttgttctggctcttctagtctaaactatacctaaatcaatccaaaagaggcaacggaaaggtagtacctggtgatgaactgtcaaattatatcatagattttaaatggtatccacttaacagrtttaaaagatggtgccacagtctccggttaaatattaagatgtaagacatgcatttcctctgctcattctcacaatctgactaaggcacataaaaaagtcaaaaacctcaagaacagataatagaaaaagagacaacaatt

SEQ ID NO: 265109 - DNA, 576 bp, Homo sapiens
gtgacagggcaactacatattagaatctgcagttcagagataatttgaggtgattacataattgtggcacctaaatccatagggattaataaaaccaactaaaaaggaactaaaagatagtataacactagttaatgagaaagtgaaaaagtaaagtttatgtagacaacatttcaacaaagttggctacaaagggaaatagaggaatggccaaaaactaagaaatggatatggaggggctttgttttttaagggggagagaggtagggctgtgacttctttattcrttgttgttactttaaatgggagaagtttaaaaaaaaagtgtgtgtggtaacaggaataatccaactgaaatggagcaggtgataaaatacattttacaaatttaaagataaagaagaggggctgcacatttaaccagagttgtggtttggtagtatacagatgagagtgatgggcgcttgtttcaagagcttagggtgaggctgaggtacagatgcttaagttttggagagaaaggatttaggttgaaaaagttgtctgagaagtacagcatacaaactctgccaggca

SEQ ID NO: 265110 - DNA, 550 bp, Homo sapiens
gcaagtgaactgcatactacttataacctataggatatattctaaaagacgaagtatggcttgaaaaacaaaatagaaaaggaaaataatttaaataaattactccgtaaactgccaacaaaagtcacagtgattgtagaaaagttgtatttgtctccccaaccaaatttaaaactctattcaagtatgacagttccaggacaagatgtggaactgatgagcagccataaatcacataaatactagactgtgaatcagactttcaggataagaggtctggatctgtttcatttatcagtgtgtgaaactgagtaaatcatttaaaacttgttttgtcatttgtaaaaatggagataatatcacctayggcagaaagtaactaggtactcaccaatcttgttttttataccataagtattatttcccagcctcccctgcactttggccagaactagtcacaaggccccagcctatgtaatgtgggcaaaaatgatgtatctacttctaagtttgacacttaagaatctcctgaaagatccacagctcactc

SEQ ID NO: 265111 - DNA, 561 bp, Homo sapiens
gggtcacaattggggatgtatttgactccacagtcatctgggatgagctacttctcagccaccatgtctccaacttcattcaaattgaacttgataaagcaccacttctttgagatgtggatcttctggcagccaggaacttgaacttggcactgtgtagggcctcaatcacatgctccttgttctgcttggtgcagatggacctgatgacttggccaatatgaacccaggctatgatactctgaaactttccaaaggcagcttgcacacctctctacagcctacactgggacagcataaggtcagagacatgaacatacactggaaagggctgccttcaaggtcccttagaggcaacccatacaagaagcaggctgcatacactaccaaggaatctgctgtttgcagccattgcacaccargcccccaggaggaaaagagctcggtcaactcaattggctgcagacaaataggcttttttatttgccactattaaaatcaaactttaaacagattcttggacttgtggctcatatccatcagctcattcaacgttagcac

SEQ ID NO: 265112 - DNA, 561 bp, Homo sapiens
gggtcacaattggggatgtatttgactccacagtcatctgggatgagctacttctcagccaccatgtctccaacttcattcaaattgaacttgataaagcaccacttctttgagatgtggatcttctggcagccaggaacttgaacttggcactgtgtagggcctcaatcacatgctccttgttctgcttggtgcagatggacctgatgacttggccaatatgaacccaggctatgatactctgaaactttccaaaggcagcttgcacacctctctacagcctacactgggacagcataaggtcagagacatgaacatacactggaaagggctgccttcaaggtcccttagaggcaacccatacaagaagcaggctgcatacactaccaaggaatctgctgtttgcagccattgcacaccaggcccccaggaggaaaagagctcggtcaactcaattggctgcagacarataggcttttttatttgccactattaaaatcaaactttaaacagattcttggacttgtggctcatatccatcagctcattcaacgttagcac

SEQ ID NO: 265113 - DNA, 583 bp, Homo sapiens
ggcatatcttgggaagatatttgatgttgctgcctaggaagtgtcatgatattcatgtttctgtccaaagatgggtggaggaatcatctaggaataaatttggagatgcatgtcgttagggaagcaggagcttaggaaagctgaagtaatgccattttaagtaaaaccccatcttaaaactagcaaggcacattccttgccagttacaacccatggtcctaagatgtttatagctaaggaagcagcttagtaatgcttgcaaggacaagctcctacaacagaaagtccagatgttccaatacccatgacaatatatgctttcaagataattatagttrtgctttgatgtccttacacactaaaatgtcaaggatagttttctttaaatcaatagaataataaattttgtcatgctgtcagcccacccgcacgtaggcacagcttagtttagtctttacatttttcttttttatataagaacaacttaaaacaaaggcagtgcattcctccccttgcttttctaaagatgtcctcctctgtaacagactagctctcaataaactatctcttcccgctaaactct

SEQ ID NO: 265114 - DNA, 503 bp, Homo sapiens
tggagtttctgcctgtcttcacttattcatctcagtagcaggagcaatgtagctgggatgggagtaggtgcacctgctggagactgtgtgctgttgcaataaatgtggtgttagcatgtggtaggatgctgaccaatgaaggtttgaagccttctttttgccccctaaagaagaagtgattgttcagaatgtgggaggatacactgttctctgcacagtgttagcataaagktagcagtgagtctttttggctctctgcccaccaaagctttatctacaatggcagctgctgggttggcaggagcatactgcattcccgtttgctagtgggccaagcaaagccaaatctgcctttgaagacatgtgccagtaaagtaatatgaggagttgccatgttttcgagggaaagtgcagtgtgggaaagaaacatgtgggctgctgcagtcataggggctgcctagctgttgctcttcaggagttatatgtgacctaccagtgcagat

SEQ ID NO: 265115 - DNA, 330 bp, Homo sapiens
actctcctcattagattgggctgtgcacagagtatggtatactcacatatggctgcactagggtcacagatgatggaactcctttgctgggaccttatcctaaaaagggtattgtgacaaatctcttggcctatcctctaggtgatataacttgctgcttgagtcctgccacatggagcattgtgacataagtgtgaaaactgtaactrtttgttgtaactctctcacccatgtcctgtcctaagggagcattgtgacatatctcaggaaccagcataaaggtgaagtgactcttttgcctgacttctcctgatatgttagattgtgtta

SEQ ID NO: 265116 - DNA, 593 bp, Homo sapiens
ttacatattgcagagcccagcacctacgtggagtaactctcctcttatgcttcttccctgtctatagcaggcttggtgacatactatttcagggtgtatccaggttgtgtgattttccaaataggcccagcctacaaatgagattataatgtatcactggctcagcacccagatgatgtgactcttctgccttgtccctgctcacaggtgaaactatgacatatgtgtgggttaagcacacatacacaataataactctcataactggaccaactcagtagaaatatgttaacactctgggttaagcacacacgcacaataactttcatacctggacccagccagtagaaatattatgactctcatagcagtctcaggtccatgtgtaaattcctgtgatttttacttgtataaagttcacaaataattacaagactcagttatatcatataaacacttaatggtacaaagagtgtcataaaagagatcagcaacgaggtaagaatgtgactcttttatgcaygcctaaaaagcagtcgaaggttgaaataattactcttatacctgcatgttaatcacaagtggtttggtaa

SEQ ID NO: 265117 - DNA, 565 bp, Homo sapiens
caatatattacactctgtaaaatacccgtggggtttatgaaacctgcgtgagaattgcaaacctctctgaggcctacatgctcatagggactcacagtcatacatattatcctaaacctaggtttggtagtcaacatctctcccgcagacagggttaagggggaagacctatgattaagcctgtgagctgggtccagaaatgaatcaccattttccctgtggccagatccacatataaaagtcacagttcacactttgcgctgtattcccttgttagactcaagatctcaacagtgggcactgtaaatgtggaatggtgacaacttttattttcaactggttgtgtaagcgagagtcataatctgaactttttgctgggccctgttatgcaactctctaccaacaaagagtttatacaatgcaagttattgttgaaagattctatgagcttgrtacaaatatgcaacccaggatttaacctattgcactaagcctaatgatgaaaggcaaaatatcttttattgggtgaatcccaatataaagttcgtcataatgcctgtgaagt

SEQ ID NO: 265118 - DNA, 528 bp, Homo sapiens
ctcctgtctgaaccctgcttcctgtgaagagtgtagcatttttaagcactgcatccaaatgacataaccctcttgcctaaccttttcaatagtaggtattgtgacatatttctgtgccatcatttaggtggtatgactctcctttcctgcctggacaatctccataggaggcattatgccatagagttgggttaacaccccatatttgtgagatttctgttcgtgttttgcctacaaagagaatattggaatatttctggcttaggatttaggtgacatggttttcctgcctgtttaataaccacaaaggggatggtgacatatacttaggcacagctaaaaggcataataatgactctcataggtggaccaagccaataggagaaattttgactcttctaggttcatgtacctgagtgatttccaggatcttcttctgtaaaatgtcacagaagattacaaaactcacrcatatcttataacacccttgggttgtatagagagtgtcataacagggcctagcacaca

SEQ ID NO: 265119 - DNA, 602 bp, Homo sapiens
acttacagtattccttacttagtctaaagttatctcaaacattgcttcataatattttatttcagagttaaggagagttcagccaggagcaatggctcacgcctgtaatcccagcactttgggatgctgagtcaggaagatcacttgagttcaggaatttgagaccagtctggtcaacctggcgaaaccccctctctactgaaaatacagtaactagctgggcatggtggtgagcacctgtagtctcagccactcggagggctgagatacaaggatcatttgaacctaggaggtctaggttgtagtgagccttgattgtgccactgggmaccagcctgggcaacagagtaagaccctatctcaaaaagaaataatctaagtgtgtcccagaaggtttatttttattctagatctaggttcatttctgggagcccttcagacaacctgggacaattttggagtatactgggtctggggtaaatgtcacaggcaaaaactgaaagaagaaaaaaaaaccttctcatttttaatatagaatgttgctattttcaaaagtcttctacgtatacaactctttcactattataaatagtgtgatctct

SEQ ID NO: 265120 - DNA, 526 bp, Homo sapiens
aggttcatttggagctttactttagaattacctagaaaatgaatccaatcttccacttcatcttacaaaccacaatgtccaaaacctctggatacaaatgaatctgtgccagttctcctgtttgctctggagttgagcaccctgcaaagtctcccccaagtatctcttakattctcaggggtggtagcatcttgttgtgctcagcaacaagtatactcccactccactgacccaacctctcaccaaggcaccaagccactgactgtaagcaagcaacctctggaggaatgcggttccactgtgctcatcagctctccactgacagctaccctaatccctgagaatgccaaagcattctagtcatgggtctactatttgaactctcaaactcatgaagtatttcataaacacatgtagtactttttttctggtttcagcactttgggtagataataatattgttcaggcaatattaactcctccctccctcctgacaggagaatatgttctcacccattgatgttgg

SEQ ID NO: 265121 - DNA, 542 bp, Homo sapiens
gatcttgtggctatgtcaaagtaggctgtggtcctttattaggttcaaactagtcacatttggtatataaaagagcaaggtctatatccaagggaatcaatcaagctgttcaggaagtcaataaaaggaaggacagaagtctagcctggaatagggtggccagagatataacaagagacagatggatttgaaggctgagtggagaactaatttcacaaacgtaactggcacacagcccattatttttgtcagctgattggtgattctcttggagctggaaacatactcttaaagagacaaaaccaagggcacggtccgaccatgacccaggttgagttattttgctctgtcctttttatcctcctaaatgccagagaatctacatcagytcttcaaacatgagaactgccaagaagttaagaataggttagaaagagcttgattagaatgcagacaaatcatcaaagagtacaaaatattaaactgtcctcagaggaattccaaataggctctaaggcaaatggcaaatggcacactacatt

SEQ ID NO: 265122 - DNA, 514 bp, Homo sapiens
gctgttcaggaagtcaataaaaggaaggacagaagtctagcctggaatagggtggccagagatataacaagagacagatggatttgaaggctgagtggagaactaatttcacaaacgtaactggcacacagcccattatttttgtcagctgattggtgattctcttggagctggaaacatactcttaaagagacaaaaccaagggcacggtccgaccatgacccaggttgagttattttgctctgtcctttttatcctcctaaatgccagagaatctacatcagttcttcaaacatgagaactgccaagaagttaagaataggttagaaagagcttgattagaatgcagacaaatcatcaaagagtacaaaatattaaactgtcctcagaggaattccaaataggctctaaggcaaatggcaaatggcacactacattatggaagtaaacttatttaaytggcaaatatttgttgtgtgcttagtatgttccaagcactgtgcttgacatttta

SEQ ID NO: 265123 - DNA, 588 bp, Homo sapiens
cccaaagtgttggaattacaggtgttacccaccattcccggcctcagcattaatttttttcttgagttttaatataatagaaacaaatcacaaggatgaattcattcattcattcattcattcattcacataattcagccaacactgattgagcagctaccatgtggcagtcatcatcttaggcatgaagatatgcaaaagagaagactcttgcttttgttaatcttgcagtctaatgggggaagccagcaataaaatcactaagtactctacattgttgaaagcactctaaataagataagggcaaggtgatgtgggtagtcacccagctcagagaatgaagaaaacctccgcgaggcactgactcaggatcctgarggaggaataggcactaactaggtggacatgggctataaaaacaggaaacagcatgggtcaggcactgaggtgtgaaaaggctttatgcctttggaaaattctaagtaggtctctttgaagcttggataagtaatgtttgcacttgtattagtctgttttcacattgctgtaaagaactgcctgaggttgggtaatttatacaggaaagag

SEQ ID NO: 265124 - DNA, 608 bp, Homo sapiens
gtcatctttgactggaggtctggaagaatgacatgaatatgagttaaagctgtaaaggacctggagccaaatcagatggggtttgtagaccattttgatgggttttaaaaggtaaagtgatttttatttgcatttaaaaagactgctgtctgctgcatggagaaaagcaagtgtagaagctgtgagaccaattatgagactattatgatggacaagataatggtggcttggacagtattgaatgaaatagagatggaaagaattgaattgatttgagatacatcttagagttggaattgacatgatccatcaagattgttgcatttcatggaccagtggaaaaggaagggctattaaaggagattgagaaacattagccagagaagtgggaggaaaactactagaaattggtgtcatagataacagragaaaaaagtgttccaataatcagggttgatcagaaatttagaaagatgagattttaaaaaatgtatgagatttgtggccaggcacgatggctcatgcctgtaatcccagcactttgggaggctgagatgagcacctgaggtttggagtttgagaccagcctggtcaacattggtgaaacc

SEQ ID NO: 265125 - DNA, 454 bp, Homo sapiens
ctttgtggagtttaaagcttaaacaactattgtgtgattaagggtgaaaacataaaaccctacaaaattacaaatgtcagactagtaacagagcttcagaaagggtccatacaaacttctttagcttcggtaaataaaaatctgcctctgactatgttgagataaatgcaattgtcagacaacaagactattgcataatcatccctaaaaacagaaaggacaagggagaaagatgagatgttgggaagtccagtttggcctgaaatgaaggtgttgaaagacaggttgtgacagtgagtggttctggcccacagttaggtatgaggggcacctctggagtggacctgagttgtgrtctgagatcaaagggacaagcagaaagcacattcctgctgattctgagaattgttttggaatactaaacctaaatgagatgatgtgatctcggttcatg

SEQ ID NO: 265126 - DNA, 548 bp, Homo sapiens
attctaaccttatactgagaagaatttcatttccagaatactgttgctaccactataattaataagcatactcactaattatgatcgtaattaaaaataaaataaaccagcagatatacaatggcgcagcctcttgtgtgtggcaccagtgtctgtgaatttgtattcggggtgggtgccacaagtcctggtgaggagaaaaaaaaataaaagcctgccaaaagagcctactaaattatccaacttttcaaggttgactgaatagcacagacaaatagtatgtctatagaacrtagtggtaattattgcatataagcaaaagttagattgcatttttttaaaaaagatgtgaatattccactctaagaaaatgaagtctttatttatacacccaggactgagaacactatttttcctgagtcctttccttttgctcctacagaaagatatatgcatgttcatttgtaagaagagaaattcattcaccagtaatcacttgacagcctaattctggtttgtttctcatctctcagtgttgtgcttgttcc

SEQ ID NO: 265127 - DNA, 573 bp, Homo sapiens
ggacctttctgtctttaggtcacctccttgaatggggactatatcataagtggtccaaggcccggccatttggcagccgtagaatgactatgttaatggaattggtctcagtccaggtcttagtcgacaggtgctcatatcataagtgacgtttattgactcccaactctttcaacttggaagacagtggaccatcactgagatagtgatgaagacggagtaatttataatatattcaggctccattgaaagccaaggaattcagccccttgagctggcaccttgcaaatattgtacttgtctcatgggttctgttagyttgagaaataaaaaatagaaatctaatttaaaaggatttctaataactcagaatagctaatgttggtttcctctgaggtcatatgagcctctcgtgttggtgcttttctcttcattgtgtattatagtgattagatattggctatgaaaattattacttttcatttgtttgtgtgtttggaggttgattacctagtcacttgtttataacaaaagctgtaaatgatactctttgacagagttaaataaggctat

SEQ ID NO: 265128 - DNA, 614 bp, Homo sapiens
gaaacactagataactgtcaacactacttttaggcccagtgagaagattcatctcactagaagcattcagagaaaaaaatgtatatttattttttgttgttgttgctagtttcaccccattttcttaccttaaaacaatcatcttgctcaggcaaattcttctaaaytgccttccagtggaaagacttgttttcctgtttgcctcaaactggcattcttacttataacaggaaacacacacattgaatcctgccatgtttctgttggcaagtgttgagctatccttgtcagaacctgccaacaaatttcttagtaagcaagtagaaagtaaaacaagcagctcccagacgaaacacaggacacacttgaactgcagcaaagacacttgggtgcccctgaggttagttccctgctaattctggtggacatgggccttggtttccagttgagctgttacccacttataattttataaccgatcctatgactgtacctgtaataatgctaattcaagatactagctaacttgtaaaacagacattaaagtaatgcattttatttactacaaagagtaaggattgctgtatgtttcagtataatgattaaaaagttgc

SEQ ID NO: 265129 - DNA, 509 bp, Homo sapiens
ctgggtttctgacagccgacaatgtacacagatacccctgtacctaacagagcagactttagaaagatttacgytgttgctgctgccgctactgctgtgggaaaacagtcacttaaaccttcaagtctcctatttcttaccatggaaaggaggggcagagatcagccgctttctgtagatcagtggttgagaatgagggctctaggaccagatttttgaattatgaccacatataagctataacttggagcaagttattcaaactctctgtaccttatcttcttgatctataaaaatgaggataataatagtacctgtctcatagagtttttgtgaggtttacatgaattaagtcctgcaagagatttagaacaatgctcagcacatcataattactcaataaatgctagtttcgtgtgtatgttgttacagacatgtggcatagagggaggatcacatacttttgagccaggtggacttgagttttaaatctcattttatggctttgg

SEQ ID NO: 265130 - DNA, 596 bp, Homo sapiens
ctctctgtaccttatcttcttgatctataaaaatgaggataataatagtacctgtctcatagagtttttgtgaggtttacatgaattaagtcctgcaagagatttagaacaatgctcagcacatcataattactcaataaatgctagtttcgtgtgtatgttgttacagacatgtggcatagagggaggatcacatacttttgagccaggtggacttgagttttaaatctcattttatggctttggtcaaattatttaatttctttgtrcctgagtttccaagtctgaaatgtaagggtgatcattataactacttcagagagttatagggatgaaatgatgtcaggtgtgcgtgtatgtgcaagtgccttgcccaggagtttactggcatctgatttgctcctttccccattctttgttttgtggcaattcacagggcctcagttttcatctgcttaagcagttaataattcagtgaaaactaaattaactcttttctacaaagaaaactcaaccaaaccattttgagaaccccaatgtgttttcccatttagcattagcataagatcagctgaatcttttggctcagtgttttg

SEQ ID NO: 265131 - DNA, 596 bp, Homo sapiens
ctctctgtaccttatcttcttgatctataaaaatgaggataataatagtacctgtctcatagagtttttgtgaggtttacatgaattaagtcctgcaagagatttagaacaatgctcagcacatcataattactcaataaatgctagtttcgtgtgtatgttgttacagacatgtggcatagagggaggatcacatacttttgagccaggtggacttgagttttaaatctcattttatggctttggtcaaattatttaatttctttgtacctgagtttccaagtctgaaatgtaagggtgatcattataactacttcagagagttatagggatgaaatgatgtcaggtgtgcgtgtatgtgcaagtgccttgcccaggagtttactggcatctgatttgctcctttccccattctttgttttgtggcaattcacagggcctcagttttcatctgcttaagcagttaataattcagtgaaaactaaattaactcttttctacaaagaaaactcaaccaaaccrttttgagaaccccaatgtgttttcccatttagcattagcataagatcagctgaatcttttggctcagtgttttg

SEQ ID NO: 265132 - DNA, 588 bp, Homo sapiens
tcttagcatctcagagacgcgaaacccttaatcacaaggatatcattagtgctctgaagcatttaattctgatgcttgacagcattttaaaatgcacaaacctttgataagaagcaaatcagagctggggtattgaattgagaaagaaatgggaacwaaaaccaccttaagctccaagtaattaaatttaaatatgctatttgcattaagcagagatatgtataaatggtgggtttatatttttctatcaatgaaagaccccttgagtaaatatcatctgtttaaatccagatcctggggaggggaaaggtaaccctgctgtggttaagaagccatctctcctgcaaacactggccattgtgtaccactgacatccatggcttcaggtgtcttgactttcataaagggctgttttcactcctccttgcccacaggctggagacctttcattgcatctgtttatttcctagctcacctcctccaccctctaatttgaaccagtaatgaaatgcagtcagcctacttcagctgttttctttttcctccaaagttccccccaaactgtttttaattcactgcttgtgatac

SEQ ID NO: 265133 - DNA, 539 bp, Homo sapiens
ttaccaaagtgtggaaacataccaatggtggcatcagagatgattttagggaacacaccgatgagatrttatgtaatattgaattgccctgtgtacagtatagttcattttcaattctttctcagtaattctgagtactccaaggtcagaatctcaagcgggtgcccatatatcctttgtttctctagcactggctaatctccatttttaacaatccttggagaagtaagagtgtccagcaaacattgataacattgttttatttacatgcaatgttcatttaatttcaagtaattatagggtttcattgataccagtaaatgggaaatttctttcaaatacaactgttgaagttaaagatactgcatttattaaagaaaatattacttaaatcatcttacaagctgcagagggatgtggcagcaaatgtgtggcatggaagtctgatgcttgggaaacactgcggtagggggaaaattgcaaaatgtcattggcaaatgcctcatctagggaaatgacccataggcaggcacacacag

SEQ ID NO: 265134 - DNA, 539 bp, Homo sapiens
ttaccaaagtgtggaaacataccaatggtggcatcagagatgattttagggaacacaccgatgagatattatgtaatattgaattgccctgtgtacagtatagttcattttcaattctttctcagtaattctgagtactccaaggtcagaatctcaagygggtgcccatatatcctttgtttctctagcactggctaatctccatttttaacaatccttggagaagtaagagtgtccagcaaacattgataacattgttttatttacatgcaatgttcatttaatttcaagtaattatagggtttcattgataccagtaaatgggaaatttctttcaaatacaactgttgaagttaaagatactgcatttattaaagaaaatattacttaaatcatcttacaagctgcagagggatgtggcagcaaatgtgtggcatggaagtctgatgcttgggaaacactgcggtagggggaaaattgcaaaatgtcattggcaaatgcctcatctagggaaatgacccataggcaggcacacacag

SEQ ID NO: 265135 - DNA, 622 bp, Homo sapiens
gggtgcccatatatcctttgtttctctagcactggctaatctccatttttaacaatccttggagaagtaagagtgtccagcaaacattgataacattgttttatttacatgcaatgttcatttaatttcaagtaattatagggtttcattgataccagtaaatgggaaatttctttcaaatacaactgttgaagttaaagatactgcatttattaaagaaaatattacttaaatcatcttacaagctgcaragggatgtggcagcaaatgtgtggcatggaagtctgatgcttgggaaacactgcggtagggggaaaattgcaaaatgtcattggcaaatgcctcatctagggaaatgacccataggcaggcacacacagtagggtgatgccttctagatgtaaagttgaaggctgttttggaaatggggtagaaagggtgagggaaaagcccatatgtggcttatgatgtggagaacatccaggttgcctcctttccaaagtggcagtatggcaaagcccagattttctcaaactccttcttactagagaaggtaagctctccacatacaatgcagttgtatgttttaggtacatttcccaacctcacttggtcatggatt

SEQ ID NO: 265136 - DNA, 539 bp, Homo sapiens
ttaccaaagtgtggaaacataccaatggtggcatcagagatgattttagggaacacaccgatgagatattatgtaatattgaattgccctgtgtacagtatagttcattttcaattctttctcagtaattctgagtactccaaggtcagaatctcaagcgggtgcccatatatcctttgtttctctagcactggctaatctccatttttaacaatccttggagaagtaagagtgtccagcaaacattgataacattgttttatttacatgcaatgttcatttaatttcaagtaattatagggtttcattgataccagtaaatgggaaatttctttcaaatacaactgttgaagttaaagatactgcatttattaaagaaaatattacttaaatcatcttacaagctgcagagggatgtggcagcaaatgtgtgrcatggaagtctgatgcttgggaaacactgcggtagggggaaaattgcaaaatgtcattggcaaatgcctcatctagggaaatgacccataggcaggcacacacag

SEQ ID NO: 265137 - DNA, 599 bp, Homo sapiens
aatgaatgtaatgagcacatttccgtttttcattttcctcagatgttcagtggcttccatatgtctgccgcatgcagctttgttcactggggttggtattactaaccttgggattgcctttgatggaggacatgtgtatctactgtatctttcccttgtgtttttgcctgagatccaatctggaatagctttgggactgagagagaggaaaaaaaaatagaggggtgtgtgtgtgtgtgtgtgygcgcctgttaccatccctaacagagatgctgggctgtcaaataaccccctccaggagacagtctctaccgtactggatttagctggaagactcccttgtgtgactatggtgtgtctgcttggcttccctgccatcagtatactcgtcagacatggtcaagcaggtttgaagcttttcccataccattttcagtgacaatgtatttcactttttatctttgttccttggagttaggggttggcattcatacgcatgtattgcaaaagggcaggaggatgacccagcactaatttatccttcctcagtggccagtttttgacatttgtttccccagtttgggaataaaagaatatat

SEQ ID NO: 265138 - DNA, 599 bp, Homo sapiens
aatgaatgtaatgagcacatttccgtttttcattttcctcagatgttcagtggcttccatatgtctgccgcatgcagctttgttcactggggttggtattactaaccttgggattgcctttgatggaggacatgtgtatctactgtatctttcccttgtgtttttgcctgagatccaatctggaatagctttgggactgagagagaggaaaaaaaaatagaggggtgtgtgtgtgtgtgtgtgtgcgcctgttaccatccctaacagagatgctgggctgtcaaataaccccctccaggagacagtctctacygtactggatttagctggaagactcccttgtgtgactatggtgtgtctgcttggcttccctgccatcagtatactcgtcagacatggtcaagcaggtttgaagcttttcccataccattttcagtgacaatgtatttcactttttatctttgttccttggagttaggggttggcattcatacgcatgtattgcaaaagggcaggaggatgacccagcactaatttatccttcctcagtggccagtttttgacatttgtttccccagtttgggaataaaagaatatat

SEQ ID NO: 265139 - DNA, 564 bp, Homo sapiens
ttcttcagcctcttaaagttatagaaaggcattatttttacaaataacttgtctctcttacaggacagaattttgaagagagctatttgcattcaaggttgtctagaaaatgaacagttgtcttctttttctttttaaagataatcacttattggcttccttattaaaagtagaaaagggacaggattttcccattgaaaccatgttacaacacattttacattttctagacagaaaatagaaaaagataagggaccttctcacagttatttcttttaaattgctgggtrtggaactagaaaagccaccaaccatcatttaatgttcctttcaaaaaaaaagagtaggaggaaagatctggatatggtcagcgtcaataacaatcatacctgaatttgcatttctttcaacaagtaagaagtaacaatagtacttataacatccaagagaatacaggctccagagagtttattcatctccatttactttcagtttctgagttgactggcttgactcctttaatattgcacctagtaagtaagcaggagatttattttgccacct

SEQ ID NO: 265140 - DNA, 644 bp, Homo sapiens
tgttggccaggctggtctcgaactgatggcctcaagtgatcggcctgcctcggcctcccaaagtgctgggattacrggtatgagccactgtgcccagcctattttttattttttatttaatttttattttaagttcagggctacatgtgcaggtttgctacataggtaaacttgtgtcataggagttcattgtacagattattttgtcaccctggtattaagcctagtacctgttagttacttttcctgatcctctccgtcctcccaccctccaccctcatgtaggcccagtgtgttttcccctccatgtgcccatgtgttctcatcactagttcccacatctacgtaagaacatgaggcatttggttttctgttcctgtactagtttgctgatagccaatctttgactagggaggaggctagctcttagcataaacagaaaagggccagagagtcctgtggaaaggtacttaaaatgacagcaactcattttcttgtgttctttttacttccctctctaacacctattttgcttttgtttcactcttcattgcgccctgtatattggtgttcatgctcagatagaattgtgaatacaggacttttactccaggttccttagagttcattacatgagagtgtta

SEQ ID NO: 265141 - DNA, 644 bp, Homo sapiens
tgttggccaggctggtctcgaactgatggcctcaagtgatcggcctgcctcggcctcccaaagtgctgggattacgggtatgagccactgtgcccagcctattttttattttttatttaatttttattttaagttcagggctacatgtgcaggtttgctacataggtaaacttgtgtcataggagttcattgtacagattattttgtcaccctggtattaagcctagtacctgttagttacttttcctgatcctctccgtcctcccaccctccaccctcatgtaggcccagtgtgttttcccctccatgtgcccatgtgttctcatcactagttcccacatctacgtaagaacatgaggcatttggttttctgttccygtactagtttgctgatagccaatctttgactagggaggaggctagctcttagcataaacagaaaagggccagagagtcctgtggaaaggtacttaaaatgacagcaactcattttcttgtgttctttttacttccctctctaacacctattttgcttttgtttcactcttcattgcgccctgtatattggtgttcatgctcagatagaattgtgaatacaggacttttactccaggttccttagagttcattacatgagagtgtta

SEQ ID NO: 265142 - DNA, 583 bp, Homo sapiens
attctcccacctcagcctcctgagtagctgggattacaggcacccgccacgacccccggctaatttttttgtacttttagtagagatgggatttcaccgtgttagccaggatggtctccatctcctgacctcgtgatccgccygcctcggcctcccaaagcgctgggattacaggtgtgagccaccgcacccagccagtagaagacttttaaatggacagtggttggtgactatccaggagagctgtccactagaactttctgagataacattgttctatatctgcactgtccaaaatgtaagccaatagccacacaagctattgaatacttgaaatgtagctaatatgactgagaaagtgatttttaaatttaacttatttatatttagatagcctcatgtaacaagtcactcacatattagtgcagaaagatagaagaaagattggccgggcacagtggcttatgcctgtaatcctagcactttgggaggccaaggagggcagatcacttgagatctggagttcgagaccagcctagccaacatggcaaaactccgtctctacaaaaaataactaaattag

SEQ ID NO: 265143 - DNA, 583 bp, Homo sapiens
attctcccacctcagcctcctgagtagctgggattacaggcacccgccacgacccccggctaatttttttgtacttttagtagagatgggatttcaccgtgttagccaggatggtctccatctcctgacctcgtgatccgcccgcctcggcctcccaaagcgctgggattacaggtgtgagccaccgcacccagccagtagaagacttttaaatggacagtggttggtgactatccaggagagctgtccactagaactttctgagataacattgttctatatctgcactgtccaaaatgtaagccaatagccacacaagctattgaatacttgaaatgtagctaatatgactgagaaagtgatttttaaatttaacttatttatatttagatagcctcatgtaacaagtcactcacatattagtgcagaaagatagaagaaagattggccgggcacagtggcttatgcctgtaatcctagcactttgggaggccaaggagggcagatcacttgrgatctggagttcgagaccagcctagccaacatggcaaaactccgtctctacaaaaaataactaaattag

SEQ ID NO: 265144 - DNA, 551 bp, Homo sapiens
tcagtttttctaccctaaatatgttcagatctgtaattttggcagtttatatatatgtattttatatatatatacacacatatatataaaaaaacaatatatatatataaagaattctgttgttttgaactttcagttctctggctttatccacgaaaaggcatctgaagccatttcttgctcacaaataatattgatctattatttgtctctgtgttggattctatgtagaacaggaatcaataggaaatgtatctggggaattactttgatgcatagaattaatttggcatatggtaaatggagtgaaagtaactgttgaaaatatgtcaaacttagcaagttttttgtttagtttaatcctctkccccccaaaatatttagtagtaaactgagaaaatatgctttgctaacctatgagccatcttccaagctggcagtggatagggagcttatgaaagagcattaatcagtctgaggggttataacaatttatgttccgctggcatcagcccagtgttgctttcattctcctcaattcagtgcaaaat

SEQ ID NO: 265145 - DNA, 611 bp, Homo sapiens
tcaaccactactatcacatagcatctgctttgccccaaggtacagaacaagttgaggtattagatacactattatcagttctaaattctttttgctgatggtacttaaatagctttgaagcttattatggcttacctataatgagatgtagtataacatggtatgtgattcagcacaaaattaggctaacatcatggtgtgctaccaagagcacagaggcttccagaacaagcttaagaaccacccttaaagttaattgacatcgagtgaagataytttcattgtaaggtcattttgaccttgtcggtgctcagagcctacatcttcctcattaatgcttttggcttaaagtcagaagtaaatgcaaactattggcttttgtctaataacaaatattattgctatatatccacactcaattaaatgtccaaaattctatgtggtaacatttgttgttgactcaaaattgaaagaataattatatcttgattatttttgctgtaaacatttacagaattgtacttagaaaatcaaacttatattgaaataatggacacaaaagacaggttacaatggcaaggtattatttggacacaaaactgactgataaa

SEQ ID NO: 265146 - DNA, 614 bp, Homo sapiens
atactaaaacttagagaagcaaggcaactgtaagaattgaacagttgtcagcacagaaaaaggtgacttcaaagcttgtgctctttgtacagcacctctctgcctctgaattttgtgcatcttgtgttggcatgccccatcctgggaaacaccctacatctctaggctaaacattagcccagacatcaagtacctcatccattttgacactggtcattaactctgagaaccgaaaggtatctgtttgtgttgtgaactgctgtgttttgaaaaacatctgtgtgtycctggtaaaaattagagatataaggattaacttagtcattcccattagtagtatggcttgcctggtatatttttctcattgtgctatcacataactatgttttcggttgcaagcacaaccacccacttgagttaatttaagctttggtgattcagaagagtaactgctaaacaagaatggggagggtaaagaatcaggattgaaaaacagaaagcaatcaaggaaggctagggatgagaatctggaaagaacatcatccccactgccactgcacagctgtgacaccactgaatgcaaaccccacagtgccaccacttctgctgagtta

SEQ ID NO: 265147 - DNA, 566 bp, Homo sapiens
ttagcagcttaccactgcctacatggcagggctcgaatgtcctatatctggtattcgcggtgctttataatcaacctatctccttggtttatccagcattagtctccactgctgatgaacttacacttccaaactgactcttcaragtcccccaatacccttggcacctgccacacttctctctactatacataaaatgcctgactcttctgataaacaggtctggtcctgcccatgttttcaggaacggcaccagattgctgtcctggggaagcctcttcagcctgccaaagttaattcaagctttcccacctcctaaaatactcgccacatcagtcagctcttttggacacttagcaaataggagagtctttcatagttatttatctttttatgtggacaagttttgttttgttagtatctcagactcctgggcctaaatgaccctcccacttcagcctcccaatttgctgggattatagacgcttgccactgtgcctagcatattttttagtgtcctgaaaaatcccgggaatggtgatagcagatttcactctctgtatctg

SEQ ID NO: 265148 - DNA, 567 bp, Homo sapiens
agtaatttcttctccaatgctaggatgaattatttatgctttgacaacattatgtgtctctaaagcagcttttagttattcgccacttctgggctacagctgatcctgctgcccattcttgtaattacattaacctcttgactttacatgacaagttttcctgtgcgctgcgatcaatagcccataactacacctctttaatagggccacagttacacttcagttcagatacaattaacttttgtcccccttttcattttggtagggcatggaataaaatttckgattttaacatctgaaacaaaggagatcattttgaaggaaaaaaatacataaaaatatgcagatcagataggaagaagtgagtgcaataataaataggccagttgaaaatccatttctgcaatcccatgggattacaaaccctgggagaagcagtgaatttcaaaaccctacatttgtgtagtggcctttaaatctccactttgataaactttgtagtttcaggaggattaaaggcaccgtggaccacctactttcctactcaagctatgacaattaattata

SEQ ID NO: 265149 - DNA, 567 bp, Homo sapiens
agtaatttcttctccaatgctaggatgaattatttatgctttgacaacattatgtgtctctaaagcagcttttagttattcgccacttctgggctacagctgatcctgctgcccattcttgtaattacattaacctcttgactttacatgacaagttttcctgtgcgctgcgatcaatagcccataactacacctctttaatagggccacagttacacttcagttcagatacaattaacttttgtcccccttttcattttggtagggcatggaataaaatttctgattttaacatctgaaacaaaggagatcattttgaaggaaaaaaatacataaaaatatgcagatcagataggaagmagtgagtgcaataataaataggccagttgaaaatccatttctgcaatcccatgggattacaaaccctgggagaagcagtgaatttcaaaaccctacatttgtgtagtggcctttaaatctccactttgataaactttgtagtttcaggaggattaaaggcaccgtggaccacctactttcctactcaagctatgacaattaattata

SEQ ID NO: 265150 - DNA, 539 bp, Homo sapiens
atctggattaaccaccttaagaaataactggtggctgcttaaatcctgccagactgccctaattttcttttatgacactgtcaggcttgctatattgcagaaaagtgatctacataatacagatgtttatgcctatacatattacaaaatcagcagatttaatgtgaaaarggatcttcagtaggtgcagaatcgatagaagggaagtaaagtgtagttactaccaagagaaactaagcatagagaattccaatgtcctagggctcaagcagcctctgttcaagtgggaaaatgggaccgcatacatcaatatctactagggtgttaattaaatatcaaacctctgggccctagttcttaacccactgatcaaatttcatgaaatgattcttatgcctgcttgaaattgggaatgactgctgttgggttgtatttctcaaatgaggaaagtccaagaaatagggaactttcagcatatactgagtgacaccagaactcctctgcaacctgtgagagccacctcttgctcacactcttgg

SEQ ID NO: 265151 - DNA, 539 bp, Homo sapiens
atctggattaaccaccttaagaaataactggtggctgcttaaatcctgccagactgccctaattttcttttatgacactgtcaggcttgctatattgcagaaaagtgatctacataatacagatgtttatgcctatacatattacaaaatcagcagatttaatgtgaaaagggatcttcagtaggtgcagaatcgatagaagggaagtaaagtgtagttactaccaagagaaactaagcatagagaattccaatgtcctagggctcaagcagcctctgttcaagtgggaaaatgggaccrcatacatcaatatctactagggtgttaattaaatatcaaacctctgggccctagttcttaacccactgatcaaatttcatgaaatgattcttatgcctgcttgaaattgggaatgactgctgttgggttgtatttctcaaatgaggaaagtccaagaaatagggaactttcagcatatactgagtgacaccagaactcctctgcaacctgtgagagccacctcttgctcacactcttgg

SEQ ID NO: 265152 - DNA, 539 bp, Homo sapiens
atctggattaaccaccttaagaaataactggtggctgcttaaatcctgccagactgccctaattttcttttatgacactgtcaggcttgctatattgcagaaaagtgatctacataatacagatgtttatgcctatacatattacaaaatcagcagatttaatgtgaaaagggatcttcagtaggtgcagaatcgatagaagggaagtaaagtgtagttactaccaagagaaactaagcatagagaattccaatgtcctagggctcaagcagcctctgttcaagtgggaaaatgggaccgcatacatcaatatctactagggtgttaattaaatatcaaacctctgggccctagttcttaacccactgatcaaatttcatgaaatgattcttatgcctgcttgaaattgggaatgactgctgttgggytgtatttctcaaatgaggaaagtccaagaaatagggaactttcagcatatactgagtgacaccagaactcctctgcaacctgtgagagccacctcttgctcacactcttgg

SEQ ID NO: 265153 - DNA, 559 bp, Homo sapiens
ggactgggattctaatttgcaaagaagattacttttttatttaagtaacttctcatccattgagaaaatgagctactatattctaaaattaataccctaaataagatacttttgttcatgtcaaccttacaagcatacrtttcagtattaaaattactgtaatctcttgtctgttagtgagaaagtacaacaggttatgtggaaaagaaaataaagaagcagaggttactatttactacattctgtatggcaggcactgtactgaatgctttgaatatcttctctcattggaatcatttcaacaatatgaggtaggtgttataaaggcccgtgttattgatgaggacactgagggtcagtgagattgtgtacctttactaagatcatacactgaataagtggaactaggatttggacacaaatatgtttgactttcagccccttcttgtaactataatgccaataatatgcctttaaaaaaaatcaagcatctgttaagcactaactaagttccaggcaaggaacatgctgctaacggcacaaaaggggaactagatga

SEQ ID NO: 265154 - DNA, 510 bp, Homo sapiens
gtagccctttcagattgacttctttcatttagcaatatggatttaagtttcctccatatctttacatggcttggtagctcatttctctttaatcaataaataacaatccattgcataaatctaccactgttttatccatttgcctgttgaaggacatcttggttgcttctgagttttggcgattatggataacactgctataaacactttcgtgcaagtttttgtggggacataygtttttaattcatttgagtaaatatctaagagtgctattgctggattgttctggtaaggctatacttagctttttaaggaactgccaattatcttccaaggtggctgtaacattttgcatttttaccagcaacgatgagatttcatgttgcctcatatcctagtcagtatttgttgtcagtgttttggaatttagttattctaataggtatacggtggtatctcactgttctgatgtgcaatttcttaatgacatatgatgatgaggattttgtt

SEQ ID NO: 265155 - DNA, 510 bp, Homo sapiens
gtagccctttcagattgacttctttcatttagcaatatggatttaagtttcctccatatctttacatggcttggtagctcatttctctttaatcaataaataacaatccattgcataaatctaccactgttttatccatttgcctgttgaaggacatcttggttgcttctgagttttggcgattatggataacactgctataaacactttcgtgcaagtttttgtggggacatacgtttttaattcatttgagtaaatatctaagagtgctattgctggattgttctggtaaggctatacttagctttttaaggaactgccaattatcttccaaggtggctgtaayattttgcatttttaccagcaacgatgagatttcatgttgcctcatatcctagtcagtatttgttgtcagtgttttggaatttagttattctaataggtatacggtggtatctcactgttctgatgtgcaatttcttaatgacatatgatgatgaggattttgtt

SEQ ID NO: 265156 - DNA, 600 bp, Homo sapiens
ttgttttagctctcaaaacagaacaatctaacctatttcatggttggcagctatgactgtgccttaaatgtatttcattgggaaatgttaaacacagtttaagtgttgagctcaatggatctggtttattaatgacattaataggagagtatagcccaaatcaagacatctcaatatttcaattttcaaatatcttccagtccctactgggaatagcaagtgaatagtccttgcccattcttaatggtttccttatatatrttttttctgtttctataacttttaataacagaaattttaaaatagaacttctagaagcaccatagctttgcttctgtttacattcccaataggactttttttttttttccaactgcaggttttatagtcttatatatttctcgtaattgaatttagaaaaaaatattggagaacatgaatctcctggcaataagacacccaatggtacaaaattctacctaggaaacacagttcattcccagtgtgccttcgaaatgctgaatacttaacccaaagttggtcttagccaatagcctagttattacaaataatagaaagaattcgccacctgaaaataat

SEQ ID NO: 265157 - DNA, 524 bp, Homo sapiens
taaaataatatacagcatattctaaaaagcacactggaaatctcatgctcactaggtaagagttccaggactgtacttgagagaggaactgcactagttcagcagtagatggtcttagcttaagtcatggtcagtagttgaagacccatgctgatcctttgaaagcttaggaagtcgtccgtagtcaaggtcacagcttgatattagccaacttcaagcctctgcatggagacagcaagtagctgtatccttctctcatggtcaaaaaggtggccagagatctttagttatctgaaccctaagataccctaagattattctccagaataatgrccaaagaaatacactaatggaaacaatggttcctcaggggtgctagtttcagcaaacaacttctaatatatactgtcattccaagaataacctgataaagaatggttatgctccttacaggtaaagtttatttagaaaaaatcagagcatctcaaaagcaacagtagcatcagaaagagccaaagtgacta

SEQ ID NO: 265158 - DNA, 500 bp, Homo sapiens
tttgaagcctggctcacctgcactgcagctgaaattctatcctctgtggcagacgataggctcaccctatcgttcggcgataaggaatctcccactggctctgactgactggggaacgaatatgattcatgagaagtctagacctgcaaaatcaaatgtgtagccaccagctttggctggctgtggagcatctgacatgggctaccccaagttgggtcatgctgatgtgtaaaatgactaatttcaaagacttggtctccctcccaaaatgtaaaacacagtatctcaataataatgtttrtattcattacacattgaaatgatgatttggggctattacatgttaaataaaataaaatatgtttaaaagtgagtttatctttttattcttactatttctttaaatgtgacttctagaaattttgaatttatatacatggcttgcatttgtggcttgtgttatattcctgttgttcagcactggcccagaagcttgatga

SEQ ID NO: 265159 - DNA, 537 bp, Homo sapiens
ctgatgtgtaaaatgactaatttcaaagacttggtctccctcccaaaatgtaaaacacagtatctcaataataatgtttatattcattacacattgaaatgatgatttggggctattacatgttaaataaaataaaatatgtttaaaagtgagtttatctttttattcttactatttctttaaatgtgacttctagaaattttgaatttatatacatggcttgcrtttgtggcttgtgttatattcctgttgttcagcactggcccagaagcttgatgacctgatttccctatttttaggactatctccttataatctatatgcaggggccctgattacttttggattaagccatttaaatttcctagaaataaactaatatgttcctgacagtcacacatattgagtaaaaatctattacctttttcagtgtcaacttttctttatgttttaagctgtcttggaagattcaggaaagtcataataggaaggggaaaggaagctgaaaaacacatatgaaactgaccatcatgccag

SEQ ID NO: 265160 - DNA, 537 bp, Homo sapiens
ctgatgtgtaaaatgactaatttcaaagacttggtctccctcccaaaatgtaaaacacagtatctcaataataatgtttatattcattacacattgaaatgatgatttggggctattacatgttaaataaaataaaatatgtttaaaagtgagtttatctttttattcttactatttctttaaatgtgacttctagaaattttgaatttatatacatggcttgcatttgtggcttgtgttatattcctgttgttcagcactggcccagaagcttgatgacctgatttccctatttttaggactatctccttataatctatatgcaggggccctgattacttttggattaagccatttaaatttcctagaaataaactaatatgttcctgacagtcacacatattgagtaaaaatctattacctttttcagtgtcaacytttctttatgttttaagctgtcttggaagattcaggaaagtcataataggaaggggaaaggaagctgaaaaacacatatgaaactgaccatcatgccag

SEQ ID NO: 265161 - DNA, 564 bp, Homo sapiens
attgggtgcaaactgtacccaacagggctgtagggctcagagaggagataatacaggcttgagttactcttggttaatccatattaccactggccttgatgttttgattttgtcctttaggcacttttaattttctattgcatacatatttatctacatgtacgtacatatctatgcaatatgtatactgcatattttcagtagcaagaaaaaggcagctgttgttttattcaggaaggtgagggggaacataatattttggtggaggtttatttttttgttgttgttccaggaaccctgattagtactttataaacatcaacttccttaattctcacaagaagacaaaagtacaattattattatatagatgaagaaattgaggtttagagaactcaaatacttgcccagactggaacagttgattggtaggtggaggagttgggattttctcctaggtctgctaaaatccaaagccatgttttcctccatgaatcaggaaataaacacagartttgagagcatgggattcagggtcaaaatatctaggtagagagattatac

SEQ ID NO: 265162 - DNA, 407 bp, Homo sapiens
aatgacagtgattattaattcactaaataacgcatgtttcaaataacttctcctttggacaatgaattagtcctagctgaagaatctgccagcttctaccccaggatttggagtcacatttttgcctgatgagcttctaatatgcttgtctggctcttgcacacagcagctgtcttggcccctgtcttcctatcttgtatgctcccttggtcttggaaaagtccagccttaatcttttgtaaatctagcttgaaaatgcatggtcttagaatattttacaaaccttctctactctccaactaactgctckaatgaagagaaaaatggtaattgaaatgagactaattagattgtcaattacctgcctcctcgcataggtaattgaaatccccctaattatggtgtct

SEQ ID NO: 265163 - DNA, 231 bp, Homo sapiens
aaatattggaagtgggatttgcagatgaggcrcaaaaatgtacacaaaattaaatatatacatcaaacaaatgacttcctctgagtgcccactaggaagagcttttattgaagtggcttcaagggtgagtagagaaggcaattttgattccaggaaaaatattctaataatgaaatccttagagttctcgtggctaggaaggtgatttttgactttaagcaaagtgtgttc

SEQ ID NO: 265164 - DNA, 592 bp, Homo sapiens
tattacttccagacttcctgttatttgcttaaatcctgtaagccaggtgaggcttgaggggctgtgtctcatggattacctgggggcccgtgcacataggcaggtttcccatctccacccattctagctccaccatctttcacctaatcctctagcaggttattaggctgttatcacttctgtgagctatcaggagaccttggatctttcaaaccttcttggtctaattttttcccctttattactacttaaaaagagtttcacaaggaaacacgaaaggaaaacaaatcagaaggtataattctacaaaatatgtggcttcagatgaggtagtatgtgataacttcctggcatatagcaggtgctcaataaatgttgatttactttccccttgttccattaaatccaaagctgctgatgttaagcagttgaagaccagtcacaggatcgtgtggtggtgcaggttttggggcaaaagagctattaattttcattaatttggcttaaagaaaaccrttcaaagcctttccttttcaatttatgagactttctcctcccacacactccttcatgtggtattgttgaaagaaca

SEQ ID NO: 265165 - DNA, 575 bp, Homo sapiens
tattctcttcattgaataaaactttattaaatatgtaaagtattacaatgattttttgtggccattgctatattcttgaaaatggagagaagccttgaatatgaatggcttttaaacttaaaccaaaccaaacaaaaaaggctctctctaaagttagaaccaaggggccaggggaaagacagcatcagaactttcttcattctatctctagctaaggcagggtcttatcagtgaatcagaaagaaagactgaattatgatcttcaggagaataatgccttgttccatgttggcccttgatatctagaaccatgagtagtgtatatcaggtgtttcgtaaatatcatttaagtgaatgggcgactgggatgagcagctttttaaatcaattgcttagaccacaagcaggtattatagatccagatagcaatagcagatcaaaacataaattttacctcacaatataaggtgattgggaygagcttttcaacctacgtggacccaaaacttccccaaactctcatgctgataaagaaacattgaatgaaattctttcttcaattgatcatcagtcga

SEQ ID NO: 265166 - DNA, 548 bp, Homo sapiens
aaaaattagccaggtgtagtggcatgttcctgtagtcccagctacttgggaagctgaggtgggaggattgcttgaacctggcaggtggaggttgcaataagctgggatcatgccactgtactctagcctgagtgatgaattgagaccctgtctcaaaaaaaaaaaaaaaaacccactgccatagcacttttgtatgtcacaaaagctaagcaaaataataataataataataaagagagaaaaaatggcaatcacatgctaaaatgtaaaaaaaaaaaaagaaaagaaagaaagaaaatcaagtctgcaaccaagrcaagaagacagttgatagaaaaaccaaagtctctggtctcatgtgatagagtagtttccagagctatcacagacatctaatacttaactgatttttaatcgccattttaaaattcaatgcctgggctatgaaattcattctggatgggaaatggagcatcccccaagagcatgggcagaaaggtaactctcccatgatcgatgtatttaagcactgctgtcacctcactaaa

SEQ ID NO: 265167 - DNA, 497 bp, Homo sapiens
tcagggaataaaaaaggggtccaaaaattatttaatgtcagagaagcaaaatgtgggagagytttaagaagtattttaaaaatttgaactgggtgcgaatctttaaagtttggctgaagagagcaaaggacttcaaatatttatttagatggatgaataaaatattgacaagtaaattgacttctttggggttgttgatatttcttggtagtatctggataccaatagcgtaaaacttagaactcaggactgctaactcaaatggtcattatatccatcacaatttttaaatgtggtgattcagacataatagtccaaatgaaagttataagagtaaagatataccattttttaacttaaatgtaataacacataactaggcagccttgcccagttttataccaattatttgaagagaatgaatatctatatttacacacatacatattgtgtatgtatatatatgcatatatatatatataatatttttatttgtt

SEQ ID NO: 265168 - DNA, 497 bp, Homo sapiens
tcagggaataaaaaaggggtccaaaaattatttaatgtcagagaagcaaaatgtgggagagctttaagaartattttaaaaatttgaactgggtgcgaatctttaaagtttggctgaagagagcaaaggacttcaaatatttatttagatggatgaataaaatattgacaagtaaattgacttctttggggttgttgatatttcttggtagtatctggataccaatagcgtaaaacttagaactcaggactgctaactcaaatggtcattatatccatcacaatttttaaatgtggtgattcagacataatagtccaaatgaaagttataagagtaaagatataccattttttaacttaaatgtaataacacataactaggcagccttgcccagttttataccaattatttgaagagaatgaatatctatatttacacacatacatattgtgtatgtatatatatgcatatatatatatataatatttttatttgtt

SEQ ID NO: 265169 - DNA, 623 bp, Homo sapiens
ggcacccactcttgtcagaagttggctgatgagccaacagctgaatcttttcttctccagggcagcatttaggttttagtccccagttgtgcctgcctgtaagccaagaaaaaaacaacaaaaaaagcacaatgtgttttaaataatgcaaccaaatccatttttgggcaaaggcagttagagatttataaaagacagcagccaggaaatttctctgctggtgtggttggaaaaaaagcaatcttcccatccttattagcctgtttccatttcttagacaccaaagaagcaccaagaggaggaaattggtatattggtataccaattagaggaaaatgctaacatctgttagcatgggtggtgagtattcatttgtttgttacattgatctttatagctttctgaatgtgtgagaatttttgtaattaaaaaaattagatgaatttggaaccaagccttgggcttcaaatccccatcaccttactttctagctatagtagcctggggccagttatttcacttctcagagtcccagctccctcatcaacataatatgaataataattcccamctttggggttgatgtgagtatctcagatcatgtatatagtggctgacaagtg

SEQ ID NO: 265170 - DNA, 629 bp, Homo sapiens
taattattatcatcaaatagttactaattccagtttaactagaagctttgccagcgtgaatagataagggagaatagccacattgagtggaggaataaaattagaaaacctctgtgctgaagtcccaggagatcacttattaggcttgagcttgctaatggaagtggtgatcgtttaaccatgtggttattgtagtggtgargatttacacattaaataagtcttgggcatctgaagcttgaaacactttcttaatgaaatcttgccgttgaatctgtacttactggtaatatgtcattggttaaaatatatttataaaatgtataattgaccagcaggttaatacatttttatcattaatttgaaatttatcaaaatgagaatatacagtacctgacagtagagtttgatcttaatttgatttgaaaattatgatcaggaaaataacctgaatatatgcttaataatataagactttcagtttgcaaaacagaaatcctgacttgactaaaatacacttttcatttgacggagacctttagttaaggaaagattagttttagcattcaacataactaaatacccagcattatgttttacggtttttttcaacaatgatttatgtgtcg

SEQ ID NO: 265171 - DNA, 629 bp, Homo sapiens
taattattatcatcaaatagttactaattccagtttaactagaagctttgccagcgtgaatagataagggagaatagccacattgagtggaggaataaaattagaaaacctctgtgctgaagtcccaggagatcacttattaggcttgagcttgctaatggaagtggtgatcgtttaaccatgtggttattgtagtggtgaggatttacacattaaataagtcttgggcatctgaagcttgaaacactttcttaatgaaatcttgccgttgaatctgtacttactgrtaatatgtcattggttaaaatatatttataaaatgtataattgaccagcaggttaatacatttttatcattaatttgaaatttatcaaaatgagaatatacagtacctgacagtagagtttgatcttaatttgatttgaaaattatgatcaggaaaataacctgaatatatgcttaataatataagactttcagtttgcaaaacagaaatcctgacttgactaaaatacacttttcatttgacggagacctttagttaaggaaagattagttttagcattcaacataactaaatacccagcattatgttttacggtttttttcaacaatgatttatgtgtcg

SEQ ID NO: 265172 - DNA, 632 bp, Homo sapiens
tggtgatcgtttaaccatgtggttattgtagtggtgaggatttacacattaaataagtcttgggcatctgaagcttgaaacactttcttaatgaaatcttgccgttgaatctgtacttactggtaatatgtcattggttaaaatatatttataaaatgtataattgaccagcaggttaatacatttttatcattaatttgaaatttatcaaartgagaatatacagtacctgacagtagagtttgatcttaatttgatttgaaaattatgatcaggaaaataacctgaatatatgcttaataatataagactttcagtttgcaaaacagaaatcctgacttgactaaaatacacttttcatttgacggagacctttagttaaggaaagattagttttagcattcaacataactaaatacccagcattatgttttacggtttttttcaacaatgatttatgtgtcgtgtttggtgttgcctccaaacagtacctaggatagctgatgcttttactttgagtctttttctttagttggaacattaattgcaagcttttggttggtaatcattttttatgggatgtatttactatatggtcctcatggagacacattgttatctggagaaccaca

SEQ ID NO: 265173 - DNA, 646 bp, Homo sapiens
  misc_feature (1)...(646): n = A,T,C or G
tgtaaattagggttgantaaggatttgcagctctttggcgttggaaacttncaaatatgtttttctaccatgtccctgtcaagcttcggtaatttttcattgcctttttctaatttatactgatgatgactgccttgtttatttattgtgtttttagagaagctcaaattagaccatcygtatgtttaaaaagaaaaattgaagaactgcgtaatattgggagcattttagcttcatcgaatctgtgcagcaaatgtatccacagatttacctaccataatatgagtctggtccttccaatctacacctcttttgatttgtcatcagtgtacaaggtcataattctcgtctaagagcctagagatttccccagtcaactttgttttattctaatgtacctgactagtggagtctgcaatatttctataggttaaagaaacactaatgttttatttttaagtgaaaaattcaaggaaagctacatcttttttgctttagtgttcagaaacacaaatttttgatatttataatgaatactgactaataaagactacggattgtataattttgatgtttgatgttagtttgtttatttgagacagggccttgcttgctctgctgcccaggctggagtgcaataacgcaa

SEQ ID NO: 265174 - DNA, 461 bp, Homo sapiens
  misc_feature (1)...(461): n = A,T,C or G
catgcaacctgtagataacccaaaatccaaggacttaggccagtatgccgggtgctaaccaatgtaaattagggttgantaaggatttgcagctctttggcgttggaaacttncaaatatgtttttctaccatgtccctgtcaagcttcggtaatttttcattgcctttttctaatttatactgatgatgactgccttgtttatttattgtgtttttagagaagctcaaattagaccatccgtatgtttaaaaagaaaaattgaagaactgcgtaatattgggagcattttagcttcatcgaatctgtgcagcaaatgtatccacagatttacctaccataatatgagtctggtccttccaatctacmcctcttttgatttgtcatcagtgtacaaggtcataattctcgtctaagagcctagagatttccccagtcaactttgttttattctaatgtacc

SEQ ID NO: 265175 - DNA, 609 bp, Homo sapiens
aacctactgatgcaacataaattttagaaaagtcatcttcaactgccaggctggccgcagtactatttaaaacatgatttggggacctctatttcaatttccattactcacaggtcacaagtcttcacctttgtttaggcaagtcctagactaatgctctcaccgaacagaatagttctgctgtcatccacaggttacttgacctctctctactatagtttgttttcgtgtaaattgggaactgttccatctgcaattcactcagtaggcattttgtgatgctgtttgtcatggtggtcctatgaggaacccatgagtgtttcatggtcctgaactttattgaagttacagaatgggccctccttctgatttcaactcttactcaccacaggcattgcagaggccctgagccatgccaagtctcatcttccttcctttrtttatttatttatttatttatttatttatttatttattttaagcagggataattgtagatgttcctcatagagttgttgtgaataggaaatgaaatagtatgtgtgaaaacttgccacagtgacagtcacagagtgagatcctcatgggcagtagatgcaactgagcaga

SEQ ID NO: 265176 - DNA, 609 bp, Homo sapiens
aacctactgatgcaacataaattttagaaaagtcatcttcaactgccaggctggccgcagtactatttaaaacatgatttggggacctctatttcaatttccattactcacaggtcacaagtcttcacctttgtttaggcaagtcctagactaatgctctcaccgaacagaatagttctgctgtcatccacaggttacttgacctctctctactatagtttgttttcgtgtaaattgggaactgttccatctgcaattcactcagtaggcattttgtgatgctgtttgtcatggtggtcctatgaggaacccatgagtgtttcatggtcctgaactttattgaagttacagaatgggccctccttctgatttcaactcttactcaccacaggcattgcagaggccctgagccatgccaagtctcatcttccttcctttgtttatttatttatttatttatttatttatttatttattttaagcagggataaktgtagatgttcctcatagagttgttgtgaataggaaatgaaatagtatgtgtgaaaacttgccacagtgacagtcacagagtgagatcctcatgggcagtagatgcaactgagcaga

SEQ ID NO: 265177 - DNA, 544 bp, Homo sapiens
tataaatgccaatcattttgaatgtgataatcttgtatttattttgtaattaataatcttgtaataattattgtttgttttttgttgattcatataatttgatttgcatatatagtcattgttgaaaaattggcaaagagaaaacggaggcagagatatctccacagatagattctatcactgctacctacaaccattttaaattactgttaaaattttggtgttttttgctttcatttttattaacacaatcaatattttcactgatataattatatatacttatacaagttttatgataccttcttcattctataatgaaagataaacacttaatattgctattacaaatactggcaactattaatkaatattttcagtctgtatgtaattatttttatctatttagaaactatagatagtaaattaagaaaaaatcagtatttgtaattctgtacaccagagagagccacattttaagatattttcttctgtttttttttttatatgcgtagacctatgatttaatctaagttgccagtga

SEQ ID NO: 265178 - DNA, 507 bp, Homo sapiens
tatttattgtagtatcagtctcggtcatacattaaaaatagatgcaaaattaattgggtaacatattcctcggacaaaaccacattcacagtctgtctctcttgactcctgtttggcttattcacatctgtgtccaacatggtgtggtcttctgtgctgctgtttctcccaagtaaacaatcttttttcaatgttgaatcacagcataatattttaaagccattttaaatagcaattaaacttaaaattgactcataaaataatgaagctgtgcccagctttgcccaagtctacacagttttcatgtggccaagcacaatcatatgaggaccaacagtgacctattgacaggagggtgcaccccagttttaggcatgctacmgtgcaaaaaatatacacagctagaacaacttgaaaaattacatattttttcctttagggtgctttatttagttttatctctcttttttttattcccattcaatattgagaacatttcccagtatc

SEQ ID NO: 265179 - DNA, 606 bp, Homo sapiens
aaaaatgcaataatgaggtagtagagacagagctaaagtataaagtatatgaataagcaaaaagaataattgttattttagtttttaaaaataattttattggtgaaaattgttttatttcttaagtttaaaaatcccaccaatataataaagtcagtttgtgattcagcaaataaatatttttaaaaatttttaaatttttttatacttgaaaatcatctctcatatggtgtttaatatgatatttaaccctttccttactgtagatcatttaggatagttctacttcctctactgtactcaayagaaatgggtatctctccctttgcaattctgatcattttgttaggatagattccaagtactggaatttctaaatcttacaaaaatttcaaaactgaattgcattgagtggtattctctgaatatcaagaaataaaaatattaaaattccaatgcataatttaattctatgcataatccaatgtagttaataacaatccaatgcataattgaaacaaaaatattttgaaataggttttaaataactaaaagaatatcaatagcactttgtagtaacataatgttcagcaaattatatgaata

SEQ ID NO: 265180 - DNA, 606 bp, Homo sapiens
aaaaatgcaataatgaggtagtagagacagagctaaagtataaagtatatgaataagcaaaaagaataattgttattttagtttttaaaaataattttattggtgaaaattgttttatttcttaagtttaaaaatcccaccaatataataaagtcagtttgtgattcagcaaataaatatttttaaaaatttttaaatttttttatacttgaaaatcatctctcatatggtgtttaatatgatatttaaccctttccttactgtagatcatttaggatagttctacttcctctactgtactcaatagaaatgggtatctctccctttgcaattctgatcattttgttaggatagattccaagtactggaatttctaaatcttacaaaaatttcaaaactgaattgcattgartggtattctctgaatatcaagaaataaaaatattaaaattccaatgcataatttaattctatgcataatccaatgtagttaataacaatccaatgcataattgaaacaaaaatattttgaaataggttttaaataactaaaagaatatcaatagcactttgtagtaacataatgttcagcaaattatatgaata

SEQ ID NO: 265181 - DNA, 606 bp, Homo sapiens
aaaaatgcaataatgaggtagtagagacagagctaaagtataaagtatatgaataagcaaaaagaataattgttattttagtttttaaaaataattttattggtgaaaattgttttatttcttaagtttaaaaatcccaccaatataataaagtcagtttgtgattcagcaaataaatatttttaaaaatttttaaatttttttatacttgaaaatcatctctcatatggtgtttaatatgatatttaaccctttccttactgtagatcatttaggatagttctacttcctctactgtactcaatagaaatgggtatctctccctttgcaattctgatcattttgttaggatagattccaagtactggaatttctaaatcttacaaaaatttcaaaactgaattgcattgagtrgtattctctgaatatcaagaaataaaaatattaaaattccaatgcataatttaattctatgcataatccaatgtagttaataacaatccaatgcataattgaaacaaaaatattttgaaataggttttaaataactaaaagaatatcaatagcactttgtagtaacataatgttcagcaaattatatgaata

SEQ ID NO: 265182 - DNA, 583 bp, Homo sapiens
ttgcattaaattgcacttttctctggaggctggtaattatgctactatcccacatagcatatttattcaagaaatatttagtgataccttgttttctgcgtactagacactcttctgatcccaggaaaagagtcttgggcacaacagataaatgcaatagcaatacatgaaaaaaaataaggtaatattttaagtaatgagaagtattataaaataagtaaaacaggaattttttttttttaatcctcaggctggagttcaatgtaaacatattctgaattaacacagcaggggtctctcttaaaagatgatatgtggactatagagtccagccatctttagtaccagaggagaagaaatctaggyagtggaaaccacaaaatgacaagtgcaaaagccctggggcaggatcaagcttggcagtttgaagaactggaggaaggccagtacctgaagttccagaacagaataaggatgagatgggtacaagaagggaatgtagaggtatttggaggcttataggtctttgtgaggagctcgaatttgatgctaaatgctatgcgcagctactggaagtttttag

SEQ ID NO: 265183 - DNA, 534 bp, Homo sapiens
tatggaatggattatgtggtgtacagaggcctaccaggtagatacctcagtttcagccttgtatgctcgaatatatagagaagactttctgacttttctttcagwacaatattatttgagaaatgagttaattttccttctgattgtccttatggcagtggttactgaggacagcgaaaatcacctggttaccattgaataggtctgggagacaaaattgagtgtggatcttcttctgtctgtgtatttatagatgttgtttctgtgtgatacaaatgagttttcattaattgacttaaaaataattagtgcttacaacaaatattttgtcaggaaagtaaaggaacaaaagaacggctactccataggcaaagaagccccaagacctgctgtttgcctattttatgtttatttctaaacaaaaggtggattattcatgagttttccaggaatgaggtggacaattccagaactgagggttcctcccaattttagaccatatagggtaacttcctgacattgccatggcagtta

SEQ ID NO: 265184 - DNA, 534 bp, Homo sapiens
tatggaatggattatgtggtgtacagaggcctaccaggtagatacctcagtttcagccttgtatgctcgaatatatagagaagactttctgacttttctttcagaacaatattatttgagaaatgagttaattttccttctgattgtccttatggcagtggttactgaggacagcgaaaatcacctggtkaccattgaataggtctgggagacaaaattgagtgtggatcttcttctgtctgtgtatttatagatgttgtttctgtgtgatacaaatgagttttcattaattgacttaaaaataattagtgcttacaacaaatattttgtcaggaaagtaaaggaacaaaagaacggctactccataggcaaagaagccccaagacctgctgtttgcctattttatgtttatttctaaacaaaaggtggattattcatgagttttccaggaatgaggtggacaattccagaactgagggttcctcccaattttagaccatatagggtaacttcctgacattgccatggcagtta

SEQ ID NO: 265185 - DNA, 534 bp, Homo sapiens
tatggaatggattatgtggtgtacagaggcctaccaggtagatacctcagtttcagccttgtatgctcgaatatatagagaagactttctgacttttctttcagaacaatattatttgagaaatgagttaattttccttctgattgtccttatggcagtggttactgaggacagcgaaaatcacctggttaccattgaataggtctgggagacaaaattgagtgtggatcttcttctgtctgtgtatttatagatgttgtttctgtgtgatacaaaygagttttcattaattgacttaaaaataattagtgcttacaacaaatattttgtcaggaaagtaaaggaacaaaagaacggctactccataggcaaagaagccccaagacctgctgtttgcctattttatgtttatttctaaacaaaaggtggattattcatgagttttccaggaatgaggtggacaattccagaactgagggttcctcccaattttagaccatatagggtaacttcctgacattgccatggcagtta

SEQ ID NO: 265186 - DNA, 546 bp, Homo sapiens
tccacagaggatgagctgaaggaaacaagcttaccccattgtaaggatgcagaggaaattcagtgctggagctaaaaataaagaaaaggattagaatggctgggcgcggtggcctgtaatcccagcactttragaggccgaggcaggcggatcgcctgaggttgggagttcaagaccagcctgaccaaggtggagaaagcccccgtctctactaaaaatacaaaattagtcgggtgtggtggcacatatctgtaatcccacctactagggaggctgaggtaggagaatcacttgaacctgggaggcagaggttgcagtgagccaagattgtgccattgcattccagcctgggcaacaagagcgaaactctatctcaaaaaaaaaaaaagaaaaagaaaaagaaaaaaagaaaaggattagaatttcttttgccttgtgttttcatcatctaaaaaaggggaaaagtataaattccactatgaatttttttgaaaaataaatttcagcataaaggagtacctgctcattagagtaaattcaaaacaa

SEQ ID NO: 265187 - DNA, 546 bp, Homo sapiens
tccacagaggatgagctgaaggaaacaagcttaccccattgtaaggatgcagaggaaattcagtgctggagctaaaaataaagaaaaggattagaatggctgggcgcggtggcctgtaatcccagcactttgagaggccgaggcaggcggatmgcctgaggttgggagttcaagaccagcctgaccaaggtggagaaagcccccgtctctactaaaaatacaaaattagtcgggtgtggtggcacatatctgtaatcccacctactagggaggctgaggtaggagaatcacttgaacctgggaggcagaggttgcagtgagccaagattgtgccattgcattccagcctgggcaacaagagcgaaactctatctcaaaaaaaaaaaaagaaaaagaaaaagaaaaaaagaaaaggattagaatttcttttgccttgtgttttcatcatctaaaaaaggggaaaagtataaattccactatgaatttttttgaaaaataaatttcagcataaaggagtacctgctcattagagtaaattcaaaacaa

SEQ ID NO: 265188 - DNA, 575 bp, Homo sapiens
tcttgtcagggagacaaatgaaaggctcatattttatatgtctccagtgcacttggcataatcaagagtgtagtataattaaaattgtagacaaaggaatgaagaggattaatgtgttacaagtttgttgactaggctggagaaaagaaaaagagacagctgactagtgtggagtgtaatatcacagaataatgatatggtaaactgggccttgtaagggcaaagggaattgtttccttcccctctgaagttttgagtttgcaggaggaaatagacaatagattaactggagaaaaggaatacaaatttttaacatacaaatatgtgtaattgcctgatgggtttttcgtgctcactgtacagacaaaaccaattcactgagaccatgacattgtattaaagagtttaattgatgtgcgggcaacccacatggggaaactggagtcatctctcaaatctgtttccccaaaggcttggaaggttaggtttttgtagacattttggtgggcaggggkgagggaatgggtgatgccgattggttggagatgaaatcacaggggtgtggaaagtggttt

SEQ ID NO: 265189 - DNA, 530 bp, Homo sapiens
aagttgacaaaaccaaaatctcttgaatggagacagagctataatgtattgtggcagcttcattgggaattaagactgagattatatcacaaagaagtaaagccatattkaaatttattcatacaccctgtcatctctctcagaaaccctagctcctgctctgaataatttgttcagatatgcttcttaagtatgacatttgaataaatctggtttttgatttgcattttgtttttctttgccaaaaaaaaaaaaaaaaaaaaaaaaggaaaagaaggaggggaggaaaaaaaaaagaaaggaagggaaggagaatgaaaaaaagaggagaacaaaaccaaaaccaaaaacacaaaaacaagctttggtcagtttgctttggctatatggttctcaggttaattaaggaattataaagaagcacctttggtttaacactcatcaaaactcttccttaaatatattcaggcatgtacagacaatgaagtctgatgtggaccaatcccaggacaattctcaaagttgtttag

SEQ ID NO: 265190 - DNA, 559 bp, Homo sapiens
acagacctgggttcacatcccgagtccactgcrggcaacttactgacttgtagttctcagtttcctcatttccaaaatgcccagaaacagcataggatgtgacaaaagactgatgtgaaaacatgcagctggatcattttctacatccaataaatattctctctgctctcctgcttggaaaattaggattatttaataaaggagtcagtagttgacatgagcctgaagaataactacaatttaactaaacatgtggaactagcaataacagtagttaacacttatataggtcacatactgtgccaaaacttcatacttcatgctagaactgttctaagcaatatctaaacactatgtccatgtatatggcatgttacttagaataattctggcataaattattagcatacatgttaactaatatgcatgcatatatttatatgtctacacacacacgtgcacgcacatacacatacacactcaccatcctcttgagaaatgcactctggtccctattttaaagttgggcaaatgctagaacagaaaagctaagtgtgtg

SEQ ID NO: 265191 - DNA, 571 bp, Homo sapiens
tgcctgaattctcacattcagtaagtgggagagcaatgactaaacttaggcaatgtgccccagagtccatcatcaacaccttgctacagtaccatgcaggaatagcaccaagaccctaaaacaagactgcttgtaatgtgtctggccaatgacattgagcagtctaattttttggagtttatagtacattcagggattgtgagaaataagactcaaagcagaacagggccagcttataagaccttgcaagtcaagctaaggaactccatatgcctgtctggcttgattcaaacattgtcaacaatgagatcagaccaagtatagaattaccaagctggatagtctgaaaatcactatttaaacttgggagtgaagcaaagtataaacagggcctgagtgttccttaacacagcaaggtacaaatacrtttatccagcgttaattccctgcattcgatatggggcatacagacctccctggtattggtgcagaggagctgctggaagcatgattaatatcagcagtggaagcactgttgcaaactattggagaaggctaatcaattcacagt

SEQ ID NO: 265192 - DNA, 641 bp, Homo sapiens
gatataactgatggtttaggaaggggttccaggagtgtattaggagactctatattgataagatttgcatcagaaataactttcacaggggtaaaagaataacaaagtggtccatgttaggatcccttcatatttcattttctgaagtggccacatcaagcttcaggagaatgaatgacagtgaaggccaggacaaggagactaggaggaaaatgtcaagttgaccactggtggcacgggagcacatgtgtcacagaagatgtgccaaggctgggctgggaatgaggaagcactaatacccactgaagggaatttttactgccagagacagaggcataracaaatacaccttcagtgtcccaggtacacaactccaacagagtaagagcacagagtcgatagcgactccctgagagaagggagagaacatgagcacgtgattgtcactagcacagctctgagagcctatacccacacaactggtggtgagatcagactggaatgccagcttttctctagtgttggctgaaatccttgtgttgtttctctaatctggaggtcataaccaggcaaagcaagcagggtggcaagtggtgccaatcagtcattcccctcttgccaactgttaagatacaacagga

SEQ ID NO: 265193 - DNA, 607 bp, Homo sapiens
gatttcttctttgacctacgggttacataaaactgtgttgattaacttccaaatatttgaggtttttctagataatttattattgattcctaatttaattcaattgtggttaaaaaacaaactgtacggttttaactaagacctatcttattgtgcaggatatggtctcagtgaakgtactgtgtggactttaaactaatgtataatctgtagttgttgaatggagtgttacatgaatgtaaattaggtcaattttactgataatgttatttgaatctttcatatcctttctgattttttgtcctcttgtataattccattttctgtactttccatcctttttggttttgttcgcatatattttccttctacatgccttgcaaacattacaagatattattttttgaaaaactatgaactgacttttaaaatgtttaagaaagaaaaatagtcttttatatttaaccatgcagttttcatttgatttttaaattgatgggtaatacttgtacatagttatggtgtgcatgtgatattttgatacatacacagaatgtgcaaagatcaagtcagggtatttgggatatccatcagctcaagcatttat

SEQ ID NO: 265194 - DNA, 392 bp, Homo sapiens
aaagagaaacctatatatcttgccttttgaatgcccctaaaatcatactgtgtggcctaatatgcctgagggaaaaactaaccttgacctggatatttaaacaatgccttaggcctcttcttttactaggacagctatagatcattgaaagatacaggacagaaaccttctgctatttaataggagccttgggaycctgtctcaaattgagacaaattcaatgtgatagccctctattcaggctggctaattgcaaaaccacatgatgaggaggaggagaaggaaagggattatagaaaatttgttactggctactaatcaaaagatttgaacatcaccatttggcacaaaaaaaaagttccaagaaagaagcgaatttcatgtacttcatc

SEQ ID NO: 265195 - DNA, 570 bp, Homo sapiens
ctttgcctacataaagggacaaacccaccttcctgttgttcctttcttagctgatctagctttttgtatttgactgcagtccccccttaaattgtgttttccaccagcttccactgtgttgtggaaacaccctcactccttctcatgaacatttgggaggtctatttttttcattttttctaagccctgctgaatcattaccagcatatggggaggagggaggcagaaaccaagtatcactcccctgaagctactcaaacaggacagtgtctgtttggacacatagccagagtgttatggaagaaattcttgtaaactatgtattcagtcatgatacacatttctaaatggtgagtttcaaaaatagatgattccaccttgcaaacttgtgcaaatgtatataacagacagagaagcagcagcctrtccatgtcaacagccatagaaaatgtctgacacttcctctgaggctagaaacagctgttgatggagctcacagcaaccaagacaggtgttcaagttagaatcaaacagttgtcaaaatttctacttctctctgtttctttaaaa

SEQ ID NO: 265196 - DNA, 547 bp, Homo sapiens
cacttgagcccaggagtccaaggttacagcaagctatgtttgggacattgcatttcagcctgggcaacagagtgagaccctgtctcaaaaagataaaaagtaaatacaaataatcataaattttattaatgccaggaactatgctaggtcctagggagatatgatgctcaagacaaaggctctaactgtatatattgtatactttagcaactttataagttgtatactttggcaacaaggataattgaataaataactaggcaaatcattagaaacataagtaattataatttctatgctaaggagaagtactttgmaaagggagaatttataaattgagcccttgacctagggctggggaccaagaaacacttctgtgaagcactaacatttgtgctaagatatgaaatatgagaggggataaccacagggagaaatggcaaagtagactctgcaagaaaacagatgatataaaaacactgaaccaagaattgttcattagaattgcagaaggttataggagccagataggaaggggccagatcct

SEQ ID NO: 265197 - DNA, 525 bp, Homo sapiens
atcttggctcactgcaacctccgcctcccaggttccaatgattctcctgcctcagcctcctgagtagctgggattacaggtgcctgccaccacgcctggctaatttttgtatttttagtagagacggggtttcaccatgttggccaggatggtctcaaactcctgacctcaggtgatcctcttgcctcagccttccaaagtgctgggattataggaatgagccactgcagccagcctggtttcccatctaattctctttctcccgtggaggcagggatgaagaagattatcttagtccaggatgctattagcctggatggcttgaataacaaacatttgcctttcatgactctggagcctggaagtccaaaatcagggtgccagaatgattgggtttttgcttactgccttcttactagctatattgtcacayggcccttccttggtgagacagagagaaagagagagagagagatcttgtgtctcttcctctttcataaggacacaatcctatcatggtgctcc

SEQ ID NO: 265198 - DNA, 489 bp, Homo sapiens
ttgggtttttgcttactgccttcttactagctatattgtcacatggcccttccttggtgagacagagagaaagagagagagagagatcttgtgtctcttcctctttcataaggacacaatcctatcatggtgctccattctcatgacctaatctgatcctaattagctcccaaggtcccatctccaartaccattacactggggattagagcttcaacatacgatttggggaaggacgctaacctactgtctacaacaaagctctactcactgaaatcacctacatttgcttctcctagaactcatcttgctgggcattgcttccaccttcaatttttgttaccaaactggagcactgtatccaggacctgaaatctgtgaactcaagggtttttggctttagcctcagccattatttttctattggttgtattctgatataatgtgaccccagattcagaaagtaggaagacaagttcttgctttggg

SEQ ID NO: 265199 - DNA, 595 bp, Homo sapiens
ccaagtaccattacactggggattagagcttcaacatacgatttggggaaggacgctaacctactgtctacaacaaagctctactcactgaaatcacctacatttgcttctcctagaactcatcttgctgggcattgcttccaccttcaatttttgttaccaaactggagcactgtatccaggacctgaaatctgtgaactcaagggtttttggctttagcctcagccattatttttctattggttgtattctgatataatgtgaccccagattcagaaagtaggaagacaagttcttgctttgggggctgaaatgcaaactgaaggtgaaggaaggacaatgaatgctcagttggcatttcttaggtytcaagcaaagaagaagagatacaggtggggaagcaagtgatgatgtagcaaccagattatgtagttgttgatactcactgctttatttcccccactggccctccatagctttaccagagtcttccctaaacctggctggcagctgattagaaatgccaaatttctaatgccactccaggcctgctggatcagaacctacaatatatgacaaagctggcgggtcatt

SEQ ID NO: 265200 - DNA, 570 bp, Homo sapiens
caaagctggcgggtcattcacaacaactttacagttagagaaacaccgctctgaaagtctgagtgccaggtactctgtggttcagggtgtggggagagatttgagatcctacacttggctataatgttaatgggacrtaattatttactaagctcctcccacaagcaaagtgaatttcaaggaagaaatgttgggcttacatgaacgtctcttctctttatggaaagttacttttcattgctaatattggaagactttttttttgtaagaaagttatattttctttcctgtagaccaaggttagttgtgacctcacatacctaaactgccagtcttggtcattaattcacaccccaactctgcttacaaaccgtttatccatcccctgccctggtttctaacatgattctttattacctgctcagctagcagactaaatttattcaattttcttttcctttggcacaatcagccaatcccaatgttgcaaactaaaatcaaaccagatgtgctaagaattttattgactattttatgtaacaagctgaatgaccagaaggctcaaaccaa

SEQ ID NO: 265201 - DNA, 615 bp, Homo sapiens
catggctcactctttactcctttaaccccccttttwtttccagacctcacactctgcaaatgcgtttgcaatgaacctctttaacgttgcaacctgcctcacttctgtcacctcagcaattgagctttcctaaccctgctcacctttttattttttccacatcacccaaacccttctatcacacgatatcattatcttacttattttgtctctgcctaaacttctgctagtcatataagctccaggagggcataaatcttttcccaatgtatacactgaggttttccaagtgtctcaaagaatgtctggcacagattaggtactcaaggaaccctcagtaaataaataaatagatgaaagaatgaacacatttagtgattctttatttctaaagcaagaaagagatatcatgatgccagttaatttcctgagatagaattccttacaatacattggattcagacattaactgcattaagtataataccagaaagaaaataaaaagtaccagaggagaaaaaggaaattaatggaggataatacagtagagctttacttctaagagttgtgagacagagcagagcagtgtgcttatcttcctagggcattcctcat

SEQ ID NO: 265202 - DNA, 500 bp, Homo sapiens
ggaaacactgaaacagttggccctgcatgtccctttccaatagtaacaccattgggaagcagagcaaaagatttgctgtaattccttagacctgaatttgagatccagctttactacctcttataaaagtttcctgggaaagttcttcctactttgtgaaactcccctttatgcattcctaatatgagactgacaattaacttaaagattatataggtcaatgcacatgaaagatctaaaagacacccgtttcataacagtatgttaataagtgtatgctgaatctgaagatcccattcttaaatcttagatctttcatctttaccaggagctcttgcatcaaatagtcaattatgagtaagtactggagctaagtgattatatttcttatattcttaatttacaagtggtgcctgggatgcatttttaaggtcatgtaacttttttcttattcaattgcttgtttatcctataayccctgttacattacaggtattttt

SEQ ID NO: 265203 - DNA, 633 bp, Homo sapiens
atgtggagcacagagagtgtcacgctggacatcgcatgcctttcaaatgtgtctataattcagttatatggaactataggtgatttttttcccatataagtaaggttgcaaatgctggttagattcccacactagcccatgcgttagcctcgtaagcttaggttgaaacaaacaattgcaataataaatagcaagtttgattagtgcaatcctgatattatgtaataaaatatagtataagaaaaacacaggagaaaatggttttagaaattagtttgtaaagcttgattctgtaaggagatacacaaaaatgaaactatgctgaaatgccatttccattcatctgattgacatacagatcaaaacttctgtaatacgcagcgtttttgaggctatgaggagagtcagataytcagatgtgctgctcggaataaaaatcagtacaactgctacagaagccattttggcaatatctaccaaaattacaaatatgacccaggaagttcatttacagaaatctatcttagaaatatacttcacatggacaaactcatgaaatacattagtttagaagttagtctataataataaaataattgggaaaaaaccaaatacctatcagtagaagggtgg

SEQ ID NO: 265204 - DNA, 540 bp, Homo sapiens
taaaatgaccaggtaaaaattattgtctgctttgtttgaggcagtaaaagacacaaataacactgcggatgtttttaaaaaggtgaattaaaacaaacaaaaaaaatctttgagaatctagttcagagcacaagagaactagagagacagtgatttgggatctttagtaatgtctactgacaaatctccaaaaacaacgaaaaacacactttgccaaaggaaaattaaatgtattggacctgccataataaagagaaccttactttgtcagtcctggtagtgtctagaaggcaggggcagatatttttagtagttagggcccaaagtgtattattttaaagctaatcttgccagatgggaaattggctgggactggacagagtttttgacctaagatctttggattgatggccacagaaaatcaggaatcttgacgtgagtctctatgagtaagctgycagtcttgagcaaaagctatttgagccagttctcagttttatcttatgaaacacgtatttcctggggcaaggtctaagccac

SEQ ID NO: 265205 - DNA, 554 bp, Homo sapiens
tatatattgatggtgatgagattctcactctcaaattgttttctgaaattggtagggttaaaatactatatcaaacagtgatcaatactcaggatgttctaggcccaacgtggcagaataaatgtgtataaatcatgaagatcagagagcatctcccagagartttggaagtcactcaaggatgaaatcggggaactgatgaccaaaatgtataatccattgcttgaattgacctctgtgtgagaaaactgccaggtaacaaatgcaagtccttcatgttaagacagattccagaaagttacaggaaatcacagaccatcagagtgcacaggccaaaagcgtctataataaaggactatatggctgtctgtttggggagaggcaacataattttaataagagaaaactgcaagtttaatattaataaaatatagaatattcacaggagatgatagggtagagaaggggactgacatgagctatgtgatgaatagctgaggatgtggggacattgaattagggcagaagaccctcactgacagtgtgggaattgt

SEQ ID NO: 265206 - DNA, 604 bp, Homo sapiens
ggaaagatagatgagagattttttttttttttttaaatgctgggaaggctttaaaattatttactgtcctcattatcattaggaagcagacattatctgatctatctctccagttttttatggtaaaactctattttaagattcataatttttaaagactgcctgcccctgaatggaatatgcaggctgcacggggaggagtgatacctgatggggtgtcccactgccatctcaaaagcatacttgaaaagttgagaaaacattttctaacaggatgtgaaaactgagtcttgaacggagtggatactgctcagaagaatatttgcgaaggaatgactgctgaatttatgtagtgtgaacatttaaagtaaaaattcaaatcctcacctttggggtcatggtgattaatttccattccaaaygtaactcttcttataggcaagaaatccagtaaatattcccctgtgaccaacaaccccgtgagctgttggcagaattattaaagctgtcaggatttctttgggatattgcacgtctccctgtatgtcatttaattcgtgaagtgtaaatatgcatatggcccatcaggaagactaaatatatt

SEQ ID NO: 265207 - DNA, 548 bp, Homo sapiens
agtgcaggattagaaggtgtgaaggaaacagtagtgtggctgacattctggaggggcatgtctgggccaggagactgcaaccgaagcccatttcatggtcagagaggcctggagatgggggttggctagaaggcaagagaaaaaggtggcctctgggtaacgatgtaacaggatgaatgtgtggtttgggaaaatgcactattaactgcatgcaggactgatggaaggaaaaggtaatggagtcaacaaaatctgatcagggtctytctgaagttatacttcttaggttttcatcagaaaaactttggcttggaaaagatacagctttaatttccttcatttagtttttttttaatctatctatctatctatctatctatctatctatctatcatctatctatctatctatctatttattgagacagagtcttgctctgttgcccaggctgtagtgcattggcacgatctcggctcaccgcaacctccacctcccaggttcaagtgattctcctgcctcagcctcttgagtacctgggattacaggag

SEQ ID NO: 265208 - DNA, 579 bp, Homo sapiens
tagcaagaacagctctaatggaggcagggcatggatttgtcttttgccatcagaaatccaggcaattcaaggctgatagggcaaacatcaagaaactagtaagtgcaggagctatgattttaatctagattcatttgcagtcagggtccatgcattagcaatcaccaccatgcggatatgcagaaggggccagcctcaggaaacaggtcattccataactgcccttgttaccttcccatcaagtgcccctgttctcccagcagaggaaacagccacgtcattgtgttaagctatcagtgccagttcctcctccagtgggtatctgcaacatcttcactgggggagattactgttaaaaacgctgaaagaaattttaagacrgagatggcagatttcacaaatacagatgaagcccattcttaagttatatgggataataagctcattggagttgcacaaaaaatccaagatcatcaaggcaatggacccaatgctatatttaaggagagacattaaaaataagttcataataagatataagcagattctactcatttaattaatttctaccaaaagaat

SEQ ID NO: 265209 - DNA, 593 bp, Homo sapiens
ttctgtgtagtatgagctcatataacagaggtaatgataggtaacattcactgrctctacactatatgtaccagactctgtgctaaaggccctcaaacttcattcaaacctcaccaatatccatatggtagggaaggacatttatttctattttcttattgaagacacagattctgataagtaaagttagttttacttatcaggggatccaaccataacctctctggaacctaactagggaatgatgcatattgactcactgcatctaaaaagtgctaccaattacacagaatctcttctcacccggctgtaaatagggtagagagaaaggatgtgagaggagtcacaaccattgcatttgatgagcttgtgtggtttcccactttctggtgaaacctgttggattcagggattcatcccttaccacccatactccaatctccttaccttcaccctccccagtccctacatatacatattatacctttgtcacctaaaaaaaataaaaaatgtacatttaacctctgttccatgcctttcgtcctcctaatatttttctttactttatacttaaacatgtaacttaaatatcc

SEQ ID NO: 265210 - DNA, 593 bp, Homo sapiens
ttctgtgtagtatgagctcatataacagaggtaatgataggtaacattcactggctctacactatatrtaccagactctgtgctaaaggccctcaaacttcattcaaacctcaccaatatccatatggtagggaaggacatttatttctattttcttattgaagacacagattctgataagtaaagttagttttacttatcaggggatccaaccataacctctctggaacctaactagggaatgatgcatattgactcactgcatctaaaaagtgctaccaattacacagaatctcttctcacccggctgtaaatagggtagagagaaaggatgtgagaggagtcacaaccattgcatttgatgagcttgtgtggtttcccactttctggtgaaacctgttggattcagggattcatcccttaccacccatactccaatctccttaccttcaccctccccagtccctacatatacatattatacctttgtcacctaaaaaaaataaaaaatgtacatttaacctctgttccatgcctttcgtcctcctaatatttttctttactttatacttaaacatgtaacttaaatatcc

SEQ ID NO: 265211 - DNA, 567 bp, Homo sapiens
acatttatttctattttcttattgaagacacagattctgataagtaaagttagttttacttatcaggggatccaaccataacctctctggaacctaactagggaatgatgcatattgactcactgcatctaaaaagtgctaccaattacacagaatctcttctcacccggctgtaaatagggtagagagaaaggatgtgagaggagtcacaaccattgcatttgatgagcttgtgtggtttcccactttctggtgaaacctgttggattcagggattcakcccttaccacccatactccaatctccttaccttcaccctccccagtccctacatatacatattatacctttgtcacctaaaaaaaataaaaaatgtacatttaacctctgttccatgcctttcgtcctcctaatatttttctttactttatacttaaacatgtaacttaaatatccatccagcatttgcttctagaaatttagtgttctctcaactatatcagaaaattcctactgcatgtgtttcaagacctgattgtcatccttaacctcttatttctgtttaaa

SEQ ID NO: 265212 - DNA, 560 bp, Homo sapiens
acagtataggatgaatgttttactgaattttcctactgatatagtaaayatttatcagataaattttacccaaatattatattatcctatgtgatctggccaattccatgtcccatccaagagcctttcccatccatgcacaagtcaaggatcagtcttagccatcaagtctattgagaaacactacccctcagacaagttcatgtccaatatcctccttgaagaatgaagcctaaattttaaagatagggtgaaatttgtggcgagaaaaaagagataaatctcaggacaggaaaggaaacaaaaggaaaacagccagaatgttctgaaatgtcagatggagaaaaagggaaatgtaaaactgtgctgcatttaaaaacggaacaacaacaaccaaaaactcctacatactagctatatgtcttaaaaatatgaaacccacaaagtcttgtaggaaaatttcagtattgctaagggatgcatgatgaaatctgtaagtgtaccttcttcctacctaaaactctggatccagaccacaagggtatctcatcaaatttctc

SEQ ID NO: 265213 - DNA, 580 bp, Homo sapiens
ccaagtaaaagtgtctagtactattgtgacaaattatcctggtttctagactgtcttattctagcgctgaaaatctatcactgaaaagcctcaggtagtcagtacatttaaggaggcaaaaaatggtttggagaccttggttttcaacaagagtttacgaatgcgaatatacctatgattttgtgttctgtaaaggagtaccagggagatggttgtttctatggctcattcgtctctcactgttagttctctgctctttaaaaaaatctggtttgcctattcacttatataaattatggcataagtctttccacatgcatctgcttcataatatacattaaacacttgaaaaagaagccaggaataactgggcatgaataattaaggcataaagtttatatttcttgatattatctcatacacactaaaataaaaaactctgtgattttgattttrgtggttttttattttagtgaaatcatggtaatttgatatttttatagtatgtattaaataataaatcttatgcaaattaaaattatgagtcaaattttgtaggacactgattcattttattgag

SEQ ID NO: 265214 - DNA, 657 bp, Homo sapiens
ctttctttctaggtatatttatcccagtggtgggcatgtttgcttcataatgtgtgctcggcttttaaacgctgcttttgtacctaagaatgccacagccagaaatactttttttttctagtgaacaattgcaaagcatctatgtcaatgcacacaatgaaagactttatttttcagactgtgaatgtgcaaaacaaggaaaactagttctgatayggaaacaatctcaactgatacatacacttttatgtttaattttactaaaatatcaaacatcatatcctcactatgaactgtgacaaacagtagttttgcaaagatgagagttgaatcactaagatcttggcaattgaattttttacttttttctttaaccacctgcaggacaaatgggtaggaagaaatggatgtaacaacgaagggagggatggaggaagagagggaagagactcattctttccaataggaaaaaccaaaacagaaatatgttttcatatagcctacaatgttcacgtgctaattttttccggagaatcaggttcttgaaatatatgtataaaactaatttgaactgccatttttatgtgcttgctgctgaaattcaataagagattattagaattttcagtatgttagttataaatttgaaataagcat

SEQ ID NO: 265215 - DNA, 600 bp, Homo sapiens
tatatatcccagctattgccataaatttgagagactttattattcaaatgagaattctctggacctcataaacaatgtttattttcatatgactttatgtatacacaaatatgattgcctttcaacatttgtgctcacaaacacctgttctacctatgaaatgaaactgcaatatttatccactkatattacaaactttcaatttttcatgccttatagttttttcataaattctaatctttttatttcattccatctttagtcctttgtttttctcgtagatggccagtatcatttttctttttctagattatctgcaagttagatgttgttttttagtgagacatgatgaattatgcatacaattgcataattcgcaataatgaaaatgtactgtttgtttaaagttttgaaacaaatgttacaaagtttggaagcaaagtcttaaaatctttgcttcataattgtcaatagaacttgatcaggatagtgaattatttcactgaaaccataacataatcataaaaatcaaagaagtgaagagtgtaaaattttaaagcttcctgctctcagttttgagatattttaatttttgtttaa

SEQ ID NO: 265216 - DNA, 600 bp, Homo sapiens
tatatatcccagctattgccataaatttgagagactttattattcaaatgagaattctctggacctcataaacaatgtttattttcatatgactttatgtatacacaaatatgattgcctttcaacatttgtgctcacaaacacctgttctacctatgaaatgaaactgcaatatttatccactgatattacaaactttcaatttttcatgccttatagttttttcataaattctartctttttatttcattccatctttagtcctttgtttttctcgtagatggccagtatcatttttctttttctagattatctgcaagttagatgttgttttttagtgagacatgatgaattatgcatacaattgcataattcgcaataatgaaaatgtactgtttgtttaaagttttgaaacaaatgttacaaagtttggaagcaaagtcttaaaatctttgcttcataattgtcaatagaacttgatcaggatagtgaattatttcactgaaaccataacataatcataaaaatcaaagaagtgaagagtgtaaaattttaaagcttcctgctctcagttttgagatattttaatttttgtttaa

SEQ ID NO: 265217 - DNA, 657 bp, Homo sapiens
ctttctttctaggtatatttatcccagtggtgggcatgtttgcttcataatgtgtgctcggcttttaaacgctgcttttgtacctaagaatgccacagccagaaatactttttttttctagtgaacaattgcaaagcatctatgtcaatgcacacaatgaaagactttatttttcagactgtgaatgtgcaaaacaaggaaaactagttctgatatggaaacaatctcaactgatacatacacttttatgtttaattttactaaaatatcaaacatcatatcctcactatgaactgtgacaaacagtagttttgcaaagatgagagttgaatcactaagatcttggcaattgaattttttacttttttctttaaccacctgcaggacaaatgggtaggaagaaatggatgtaacaacgaagggagggatggaggaagagagggaagagactcattctttccaataggaaaaaccaaaacagaaatatgttttcatatagcctacaatgttcacgtgctaattttttccggagaatcaggttcttgaaatatatgtataaaactaatttgaactgccatttttaygtgcttgctgctgaaattcaataagagattattagaattttcagtatgttagttataaatttgaaataagcat

SEQ ID NO: 265218 - DNA, 554 bp, Homo sapiens
atgtgatgagcacattttgcatggaggatagatgtaaatctttggggatcagagggtagattgtgggtgtgattaaagatattgagatggaagaattttcctggattatttggatgagccctatatgtaaccttgagtgccttataagaaggagacagagggagatttgacacagaagaagaaaaggcaatataactactaaggtagagattgaagcgatgtagccacacatcaagaaatgctggtagctaccagaagctgaaagtagcaagcaatgaattctcctttacagcttttggagaaagagtggccctgtccccaccagactgayttttttcccattgaaactgatttcagacttctacttttttcccattaataaaaagaaaagtcgagcatcaaaataaaaaaaaatgctcttatttgacccatgtcatacatgtatctgcaactaaggctatctcacttcacagaaaggtttttggaattcattctattctaaatacccttctatatcgcatgccccaatgctagacaaaattgattctgccctc

SEQ ID NO: 265219 - DNA, 586 bp, Homo sapiens
gaaagtagcaagcaatgaattctcctttacagcttttggagaaagagtggccctgtccccaccagactgatttttttcccattgaaactgatttcagacttctacttttttcccattaataaaaagaaaagtcgagcatcaaaataaaaaaaaatgctcttatttgacccatgtcatacatgtatctgcaactaargctatctcacttcacagaaaggtttttggaattcattctattctaaatacccttctatatcgcatgccccaatgctagacaaaattgattctgccctcaccactccaatgatactgctgtcaccaaaatcactgggtaagaagataatgcttttgtcaaaagcattagaaacacaagctttcaagttacaaatacaatttttcaactaaaaatgaaacttttggaaagtaattttacttcccagaacctttattttttctttaagaaaatggtggtaatagtaacacctattatgacattcatggtctttgaaccacattttattaatcttatagtccaccaaagaggctggagctccaatcagaattttttgctattcagtttatgcga

SEQ ID NO: 265220 - DNA, 568 bp, Homo sapiens
tttaatatatggaacagataatgatatagctgttgtgcgtcagttctgtaactctgttcctcacttcccttgatatctgctgatggttctatgtggaactatttagactctgtagaccacaatgtaaatatatctaggttagaaaaataagataactttgaatgttgattgatgaccttctgtggacagctaagtggtaggttaagaaaatcctagcacacccttaagtattcacggttaaatatctctgtagccaataaggctgtcattgatagaaaagtacttcccagtatatctcaagatgaaatgatagattaaaattctctggtttctatagctctcagccgcagagctccttgatgtacagaaagccagagtcaactactgagtttgagttgtgagaggccaccctacagatatggtcattaccttctgcataagtgaaatcaagctgcagttccttggaaattaagcaatatttttgcacacatccccttcttttttttwaaaaaaagacccaaatattatcaatgcatttacctttgtttttttcagtaggggaagtcca

SEQ ID NO: 265221 - DNA, 582 bp, Homo sapiens
ccacctactattttcagacatgtacatattttggatccctctgcaatatcaattctatcattcatttattcagaatttatttattgaacrcccattatgtgccaaaaatctatttatgtactgtgaatatggcaggacataaaaaagcaaaaatcttgtcattctttgagtttatatttcagagtcacaggcagacagtgaacatgataaataaataattacatacagtatgttagtagatagacatacagtataaggaggaaataattaaacatgaaaaaggaattgacggtatcagggagaaagataaaatttttcaacaaggtggttagagaggtactcactgagaagatgagaacggaatgagagaacatgtcattgtgtagcttagggaatggcatatcagatagaggacacggcaagttcaaaattctgtaggcaagcaggagctggagttttcgagcagcaacaataagcccagcgtgcagagtgaacaagtaagaaaataaagtagataaaatcagagaggcagttgcaggagttagagggagggagatcaaggaagagattttagatcagagc

SEQ ID NO: 265222 - DNA, 582 bp, Homo sapiens
ccacctactattttcagacatgtacatattttggatccctctgcaatatcaattctatcattcatttattcagaatttatttattgaacgcccattatgtgccaaaaatctatttatgtactgtgaatatggcaggacataaaaaagcaaaaatcttgtcattctttgagtttatatttcagagtcacaggcagacagtgaacatgataaataaataattacatacagtatgttagtagatagacatacagtmtaaggaggaaataattaaacatgaaaaaggaattgacggtatcagggagaaagataaaatttttcaacaaggtggttagagaggtactcactgagaagatgagaacggaatgagagaacatgtcattgtgtagcttagggaatggcatatcagatagaggacacggcaagttcaaaattctgtaggcaagcaggagctggagttttcgagcagcaacaataagcccagcgtgcagagtgaacaagtaagaaaataaagtagataaaatcagagaggcagttgcaggagttagagggagggagatcaaggaagagattttagatcagagc

SEQ ID NO: 265223 - DNA, 492 bp, Homo sapiens
caagctaagttttgtatatggtaagaagagggatcatgttttgcttttttgttttatcttgagatagtctataattctaatatcattcattgcaaagaaaaatactggtttttatttggtttgcttttttgttgtaataaggtcgtgcttactgtgtgcaattccaaaaggacacaacttrttcctccagctaacagttgatagggcattgggtcctaacatagtgttcacgttttgtattttaacactttcttattgtctttatttatttacttactttcttatattttaaatttaaattttattttatttattcatttctttttgagacaaggtctcaccctgttgcccaggctgtagtacagtggcacgatcatgggtgactgcagactcaaactccagctcacgctatcctcctgcttcagcaacccgattagatgggactacaggcatgtgccaccaggctgagaggtgacagagtgctggcagccc

SEQ ID NO: 265224 - DNA, 590 bp, Homo sapiens
aacaattaatatagtttattgtaatgaatttcttcttcacccttaaaaaagtatgtgtgtgtgcatgcatttgtgtgtgtaataaaagcatagcatataaatatatgtattcatttttagtatacagttttccagttctaataagttatcaagaaggaattaattatcaggccatgatacgagaggtgagggaaaacctacttctcagcagttaggtcagcatcaaagagaagctgattgaattgacttggaacatagcagaaaatggaaagtaacatcaggagctcaggaagacagagtagagttgataaatcagtcccgaacatgcaaagtcattattgtaaagggcagtgaaaagaccaagaagtgagcatgatagagctggatgaatcagtggttagccaggaggcctaaagatctgaaattgttagttgagccttgagtgttacctgcttctacacctttctacttcacgagccaaaccacttttaaaaaaaggcagaatgtytcctactctaaaagaatgtagcagagaaaatcaagacatgatacttcacacatcatttttcatgtcatgtttagaaaaatgt

SEQ ID NO: 265225 - DNA, 595 bp, Homo sapiens
aaggcactcaattttgtttttccacaggaaatttggaagtaacttctcttaataggcaamatgcagttttgaacccttagctctggggtatccactgatgagaacagttggtgaaataaagatcatgctcccaaccgtagttattttcaagtaggtctactcggcaatttgttttagtggttcctgtggctctctgtaagagaggaccacctcgaatttcacttcgagtctctctggtggaggaggaaaaacctctccttttattcagcttttatattgtatttatagatgtttgcctagtttagctctggagtagaattaatatattttacttccataatataactatagaaaacagtcatatatctataattgtataaaattgtatgattttaggtgttcttaaagctgttgggttgttggaatcacaccttattcctgtattatgaaattctgttctcctctaagagtccaccattataaggtgttttccctataatttaagatttaatttccagtaaaataaagtcatctggattatatgaccatttaagtgtcctcagttgcttacaccatatagtatttgaaagatatg

SEQ ID NO: 265226 - DNA, 595 bp, Homo sapiens
aaggcactcaattttgtttttccacaggaaatttggaagtaacttctcttaataggcaacatgcagttttgaacccttagctctggggtatccactgatgagaacagttggtgaaataaagatcatgctcccaaccgtagttattttcaagtagktctactcggcaatttgttttagtggttcctgtggctctctgtaagagaggaccacctcgaatttcacttcgagtctctctggtggaggaggaaaaacctctccttttattcagcttttatattgtatttatagatgtttgcctagtttagctctggagtagaattaatatattttacttccataatataactatagaaaacagtcatatatctataattgtataaaattgtatgattttaggtgttcttaaagctgttgggttgttggaatcacaccttattcctgtattatgaaattctgttctcctctaagagtccaccattataaggtgttttccctataatttaagatttaatttccagtaaaataaagtcatctggattatatgaccatttaagtgtcctcagttgcttacaccatatagtatttgaaagatatg

SEQ ID NO: 265227 - DNA, 597 bp, Homo sapiens
ggttctttctactcaaatcccaatataattatgcattaaacaattttattttcaaaaagaaaaaattactaatacaagttaactcatttaattattatcacttagctagtcaataatgactccacaatttgatttaaagatgtgatatgcccaaaatgacctacaattgtatttaatgctccactatactatggctagaaataatagtgatatattagtctagaaatgtccatagctcctcatcctaaataactagaaatttattaccatttcataattaattgatkcgaacatctagtttagttacaaagaaaatatttcaaaaaactatttcaactaaaaaaataccgaactggtaccaaacattaagaataatggctatacagatatgccctgcaatgtctttgcaatagtgagattcctcattcttcctttcttgttttgttttaaatctttatgttctgtgatttaaacagacttcttccaaatataaagcaaaactataaagtgtaagaaaagggtcaaataaaataagtgcctttaatggaaagaatacaaatgattattctctaattgtctcagaaataaaagaaatat

SEQ ID NO: 265228 - DNA, 605 bp, Homo sapiens
ttgtttttcttttgttaaatcaggtgctataaactatagaaatatgaatgaaaatttttattagcctaaagtgtcaactgtcatgattaatgtattatgacaaataaattagttaaaattatacttatatgttctggattgtcttattcatttttagatttaattttttttcacttatatggctcagtaatctacttacttctagcaggaatcctctaatgtagatatcagcagktttagtggcatatgcaactctaacaaggatgaaaacactcatgtggtccttactacttgaagctgaaattatttagtagctaaaaacatgaattttcacattacgtagatgagtataaatccatatttccctataatgggatcttaggcaaataattcaaactcactaaatcttaatggggcacagtagctcatgcctgtagtctcagtgcctcagaagctgaggtgggaggatctcttgagccccggagtttgagttaaacttgggtaacatagcaagaactcatctctaaaaaataagcttcaaaaaagaaagaaatacaaacaacctacaaaatatcaatatctcatatgttgaaaatgtggataat

SEQ ID NO: 265229 - DNA, 609 bp, Homo sapiens
ccaagagaaaattatatttttaaaggaagctttataactttaatggcttcaaaggtcaagttatttcttttcttcaatttaaggacatgttcttgagtcaatcaatattaattcaacataagaccttagtccccaatttcacctcttatgttagctaacataattaaacctgtgttgctgagcaaaatgycaaatacctttttcttaggacaaagtactctatctgggttttctttttcaattttcattaatttaaacaagcaaatttatttttattgtattgagcatcaaataaaagcaattactcagcatgcttctggatttggtaatgaatatttttttctgaatttgagaatgaggctttccatgtgccccctccccatctgtcaggcatagaattggttggactgtggtgagcagcagtcacttgggatagtgtttgcttagtcttaggttccaaaccctcagtaaaactcatttaaaaactgactgagacagagctcaatgcactaaaaagtcttcttgactctttctcaatctctcttttaataccatgagcactgacctgaattagactgactattctttcttggtatttaatttctgcat

SEQ ID NO: 265230 - DNA, 506 bp, Homo sapiens
atattttcactttaatcatttctggctgctttttatgttcttatgttggctttaggcttctagaactcaatccagtctttgaaattgagtcagtgtctggttaactctccctgaatttctaccctgcaataggtagtatttgtagcgctatgctcgatataaatgactgaacttattaaagcattgttagcccagtagtttcagttagttccttgattcattgagcaataactgttttagatgaatgcatgatattcagagtgcatattttttwaaagtgaaaataattacattaaccccttggaagttagatatcatccctaaatacatgctctaattaattttctttaaaattttaaacttggacccatcagtagaaattaatatactcacagatgacacatttgtaggctatacgactagaggacatggatttcttttttttgttttttgaaaaattaagtaattttgtgttcagtaactgcaaagtgaactgaaaattggct

SEQ ID NO: 265231 - DNA, 506 bp, Homo sapiens
atattttcactttaatcatttctggctgctttttatgttcttatgttggctttaggcttctagaactcaatccagtctttgaaattgagtcagtgtctggttaactctccctgaatttctaccctgcaataggtagtatttgtagcgctatgctcgatataaatgactgaacttattaaagcattgttagcccagtagtttcagttagttccttgattcattgagcaataactgttttagatgaatgcatgatattcagagtgcatattttttaaaagtgaaaataattacattaaccccttggaagttagatatcatccctaaatacatgctctaattaattttctttaaaattttaaacttggacccatcastagaaattaatatactcacagatgacacatttgtaggctatacgactagaggacatggatttcttttttttgttttttgaaaaattaagtaattttgtgttcagtaactgcaaagtgaactgaaaattggct

SEQ ID NO: 265232 - DNA, 580 bp, Homo sapiens
acatggcagcagacaagagagaatgagagaaccaagcaaaaggggcttcaccttatcaaaccatcagatctcgtgagtcttattcactaacagaagagcaatatgggagaacctgcgcccatgattcaattgtctcccactagctccctcccataacatgggaggaattatgggagctacaattcaagatgagatttgggtggggacacagccaaaccatgtcagcatccaaaaaacgaaataagtcaaattacctctcattgctgattatataattctgtatgtagaaatctctaaagactccacaatcagagcctagtcctgtcttttatgggagratattaattattgattcaatttttaaaatgtgtacaaggatatccatgttttctttttcttcttacgtgaagtttagcagtttctctttaaataaattgatctatttcatttaagataccaaattttggacatatattagtgttcctttatcattattttaatgtctgcaggatcaagtagtgatgactcttttcatttcttgtttgtagtttgtatctttactcttttatgttgattagat

SEQ ID NO: 265233 - DNA, 556 bp, Homo sapiens
tagtcatgttttctattcactccttgcattaattttgtaaatttatttattctgaagttttggctttgatctgtaattgtcaaggttaaattgcattttttaaaacaagatattttatctttctgattactatacaaatcattgtttttgcttttttttttttttttgagatggagtctcgctctgtcrcccaggctggagtgcagtggcgcaatctcggttcactgcaagctccgcctccggggttcacgccattctccttcctcagcctcccgagtagctgggactacaggtgcccgccacgacgcccggctaattttttgtatttttagtacagataggttttcactgtgttagctaggatggtctcgatcttctgaccttgtaatctgcctgcctcggcctcccaaagtgctgagattacaggtgtgagccactgcgcccagcctgtttttgctttttaaccataatcacacacatcaatatcatcatttaagctgaagtgtatctttagctgtattaaatgcactgtggtaattattttatacaaaagctt

SEQ ID NO: 265234 - DNA, 556 bp, Homo sapiens
tagtcatgttttctattcactccttgcattaattttgtaaatttatttattctgaagttttggctttgatctgtaattgtcaaggttaaattgcattttttaaaacaagatattttatctttctgattactatacaaatcattgtttttgcttttttttttttttttgagatggagtctcgctctgtcgcccaggctggagtgcagtggcgcaatctckgttcactgcaagctccgcctccggggttcacgccattctccttcctcagcctcccgagtagctgggactacaggtgcccgccacgacgcccggctaattttttgtatttttagtacagataggttttcactgtgttagctaggatggtctcgatcttctgaccttgtaatctgcctgcctcggcctcccaaagtgctgagattacaggtgtgagccactgcgcccagcctgtttttgctttttaaccataatcacacacatcaatatcatcatttaagctgaagtgtatctttagctgtattaaatgcactgtggtaattattttatacaaaagctt

SEQ ID NO: 265235 - DNA, 603 bp, Homo sapiens
tgtcagtgttctggattttagccattctaatatgtgtgctgtgatatcgtgttgttgtttaatttattgtcaagaacaacctcccaggagtggtatgacattctcttgtcatccacattggtgtcatggtcttctttttctttagaaaagaatccatctgttgctgttctgagtgcaatatgtaatactttactttttgggaaaagatatttgtgactctccaatagtttttttaaagagaaaagtcaaatataagtaaaagagacaaaaaatctcaagtgaaataaagtcgatttgactgtctgacactgggttcaacatgacactcaaagtaaacaatttttcagtcaatttttttattagaccaagatgcaatatttgaactaatgttatttttcgtgttacagtataaccacagccatgacctctacttattttactgagaaaagattaayggtgcttcagggtgtcttttgtttccatatccagaaaccaagaagtgcaggctgaagatattgttgttgttgctgctgctgatgccactgttgttattactattttggcaagttctcatataatgctttgtcaggttctcctaattaa

SEQ ID NO: 265236 - DNA, 569 bp, Homo sapiens
aacaattcatggatttggtcactttacataattccatatttctcaaaggctgttttttaaaaaaactcttttttctttattctggtctgattgggttagttcaaaggactagtcttcaagctctgaaattcttttttctgcttggtactattaatgaaatttttaattgtattttgaaattccttaagtgagtttttcaattccggaagctctgactgatctctttttaagatgtttatctcttccttcatttcctggattgctttagaagtttgtgttggttttcaacttcgtcttggatctcattgagcttccttgcaatctatgccttgattctttatctgtcgtttctgagtttccattttggttggggtgtattgctgcagagctagtgcaatcttttggtggtatcattacttgaagattttgccagatggacctggctggtctggccccgcccatcgtggcccytatccaccaataattctggtgccagaattcttgtgctggctccttctcatctggaaacactggcacttctcgattttgtaattattttcatgcaggta

SEQ ID NO: 265237 - DNA, 636 bp, Homo sapiens
agcagccatgaagattctgggtgtgtgttttgagtcaagaaacagaaattgtgctttgtcttctagatgatagaaagccttctaagagttttcagctagagagtagcatggctgtatggcaagtcgctggatccttctggaagaagcargcatctaaggaagccagcccaggagagacaggactcctgcagaggctcaagggaaagatggaagagtctgaaggaggagagggggagtgggaggtgaagagtcatttgagaaggatttcagaggcaaacttgggaggacctggcaggtgatcatagggaatgaggaatatgagtgaagagggtcacagggaaatgttagttttctagactggatggccggggtggtgatcatgtctactgagatagaaaacatcagaggaataggctggtttttccagtagaaattttttaagttaaaaaatatgttattattcaacataaagaactaaaataaaagaagtacatgaagattaaaggttcaaaaaaattttaaaaagcactcacactctctctgagtaaaatttgtatttcattctgaatacctacatatgtatatacaaacataacagatatagataaggtataaatgtcatatatgtatatagct

SEQ ID NO: 265238 - DNA, 636 bp, Homo sapiens
agcagccatgaagattctgggtgtgtgttttgagtcaagaaacagaaattgtgctttgtcttctagatgatagaaagccttctaagagttttcagctagagagtagcatggctgtatggcaagtcgctggatccttctggaagaagcaagcatctaaggaagccagcccaggagagacaggactcctgcagaggctcaagggaaagatggaagagtctgaaggaggagagggggagtgggaggtgaagagtcatttgagaaggatttcagaggcaaacttgggaggacctggcaggtgatcatagggaatgaggaatatgagtgaagagggtcacagggaaatgttagttttctagactggatggccggggtggtgatcatgtctactgagatagaaaacatcagaggaataggctggtttttccagtagaaatyttttaagttaaaaaatatgttattattcaacataaagaactaaaataaaagaagtacatgaagattaaaggttcaaaaaaattttaaaaagcactcacactctctctgagtaaaatttgtatttcattctgaatacctacatatgtatatacaaacataacagatatagataaggtataaatgtcatatatgtatatagct

SEQ ID NO: 265239 - DNA, 568 bp, Homo sapiens
aaaggccagaaatgaatgcaaaacaagatacaatggtcacattaataatgctacaatgtaatttcctaataaaaattgataaacctcaaataagatttaataggcaaaaatgagagaaagtataaccaaatattgggaataaaaaagaaaacattgctaaatagatagtagagatctaaaatatgagaatattttgatcaaccttacatcaatacatttaaacaaaacagagaaaacagaaaactttcttaaaataataatgttccaaagcagactcaataagaaatggagaaaaagaacagttttataagcattgaagaaaatgaattagtagctcaaaatattttcaggaaggaaatgacaagcctagacagtgtgataagcaatctctaacatcctaggaataaataattctaattataggtgaacattcccagagagtaaaagaggagggaatattttccaattaattttgtaaagatrgtacaactttgacaccaaaactaggcaaagttagtacaagaaaaaatattaaaagtaaatttaatttttaaatatatgtgggaaa

SEQ ID NO: 265240 - DNA, 561 bp, Homo sapiens
gcttccatgagggatggtagttaaatgcctaaacctggcatcacacttcctagcaggaccyttgggctctcacactgcctatgtctgtcaacatagacaccacagtgatccagggcttatcttggcttcaacctgccattcttttattttagttctcaacttgttctgaaccctggtgaagaaaaatttccctatctacatggagatccttcagaaactcaacaccgacctaaagtctctattattctgcactgttctaagtgttgaatttgtagagtgtaaatacatttgcttgttttaaatttctagagaaaacactctagtattaccactagccgcccccactccctgcattgtcagagcaagttcaaagtatgcaccaagggtgatggggaccatggcacctgcagctctagaggaggccaccatccatgcctttgccacatagcctccgagaccacagccttcagggttaacccctgaagacactaacagggccctaagaaagcactggcattgccttgtggcaataactaggaggaaacctgggaagtaaccaca

SEQ ID NO: 265241 - DNA, 561 bp, Homo sapiens
gcttccatgagggatggtagttaaatgcctaaacctggcatcacacttcctagcaggacccttgggctctcacactgcctatgtctgtcaacatagacaccacagtgatccagggcttatcttggcttcaacctgccattcttttattttagttctcaacttgttctgaaccctggtgaagaaaaatttccctatctacatggagatccttcagaaactcaacaccgacytaaagtctctattattctgcactgttctaagtgttgaatttgtagagtgtaaatacatttgcttgttttaaatttctagagaaaacactctagtattaccactagccgcccccactccctgcattgtcagagcaagttcaaagtatgcaccaagggtgatggggaccatggcacctgcagctctagaggaggccaccatccatgcctttgccacatagcctccgagaccacagccttcagggttaacccctgaagacactaacagggccctaagaaagcactggcattgccttgtggcaataactaggaggaaacctgggaagtaaccaca

SEQ ID NO: 265242 - DNA, 582 bp, Homo sapiens
agcttgaggtggcgatttcattgcacccaacgtttctattttgtctcaagttttgttttaaagcttcatgtgaaattgacattattttcataaatggtaggaggcttatctcaaatctccagctccatgtcatcctgtattctcataaagtttatgtttctcctagtacttcyatttctgatttgctactttcacctaattattgacaaccctgtgtcttggttttcagctgttctctgctgtcttcctaaatgtggcaaagatgaaccataatgtcctgttgacctttttttgtaatccctacaaaatgctgccaaaaagtctccacccaaggcatatttttattgaagtttgaggataatgatggggatgatgaggtgggcaaggatcaccttcagcatagcttggcaaacgactggcattttcatattgcatgatatgattcttaagagtcctttcctctccagtgctccacaccctgagctgcttgttgctatagacccagtgaggcaccatgcctttggcttccggataccatctagcttgctactgataacatacccatagaacatgacatctacc

SEQ ID NO: 265243 - DNA, 539 bp, Homo sapiens
cttcacattgcctatttcttcctatgtgtattggcaggttataactttcaaggagctggttcttttcatctaggttatcaaatttgtggttctagactattcatkttatttcttttatatcattttaatgtccatgggatctggagtaatgtcacctcttccatttttgatattggtagtttgttttttttcttttctttcttacttagccatagtagaggcttattaatttttttgcttttctttagtttcctacagtgctagtttaaaccattgattttagatcttcctttttctaatatattcattcaatgctataaatttccctctaagcattgctttcactatattccacaaattttgatacattgtgatttcattttcatttagttcgaagtttttttttattttgattgacattttgtctttgatctattttaaacagattaaaatttttaaattttaaatttgttaaggtgtgttttataacacagaatgtggtctattttggtgaatgttccatgtgagcgtgagaagtg

SEQ ID NO: 265244 - DNA, 539 bp, Homo sapiens
cttcacattgcctatttcttcctatgtgtattggcaggttataactttcaaggagctggttcttttcatctaggttatcaaatttgtggttctagactattcatgttatttcttttatatcattttaatgtccatgggatctggagtaatgtcacctcttccatttttgatattggtartttgttttttttcttttctttcttacttagccatagtagaggcttattaatttttttgcttttctttagtttcctacagtgctagtttaaaccattgattttagatcttcctttttctaatatattcattcaatgctataaatttccctctaagcattgctttcactatattccacaaattttgatacattgtgatttcattttcatttagttcgaagtttttttttattttgattgacattttgtctttgatctattttaaacagattaaaatttttaaattttaaatttgttaaggtgtgttttataacacagaatgtggtctattttggtgaatgttccatgtgagcgtgagaagtg

SEQ ID NO: 265245 - DNA, 469 bp, Homo sapiens
aatttgaacttccctgctattctgggagatcatgagatatactcttgttctattcctgaggtgtgcataaaatgagttctcttatcaattctgcctgcccagtacagataatttagtgacagaacagagagcttctttgtgtgaattctacccagttgcctttgcaaatgcggcatgtgatttcatgkactttttacttttttattagaagttactgcatttgaattagctacaatccctctttttaatagattgtatcaaaaatgtctacgttccatagcattggtggaaccatgcattatgtctgaggacaaggacgggaaccttccgtggcgtgctatcagcagctttaaataggcattgagtttgaagatagagcacatgatgaaggaaagtcagaccccagtcggctatttagctttcagttctgaggaacctgtcattgcttgcttctgtaaacccagctaat

SEQ ID NO: 265246 - DNA, 591 bp, Homo sapiens
ggaattcagcagtgaggagggtaaggcagtgactagaaaaagagacagtgacgattaacttgttctggtgcaaacaagaaagctggtgctgtaagaaatacaacagggcccagccttgaggcacctgatctggcacagaatgttaacccttacagcactggctaggctctccaggaagatgctttccactctgtgcccagagttcatggatttagttccctcagctgttggtagcgtcatattcatcactctgttgttcccattctctctatacctttgtccacagatattgcatctcagtttactctctccaacatttacccttcaccttgatacatgttcctaaatctgcttctctcctctgcctccctccttccgacattttcatctttccacggtgctcagtcttgttcaccaaacctctaccttatctgctcatgacttaaccaagccttcccctcagtttctcctgagttactcccactgacccacctcatgaaagaggtcagaaarattaaaaaaaaaaaagaagacaactaatttcctctagctacagagactcagcagcgtattttcatttattaataatta

SEQ ID NO: 265247 - DNA, 581 bp, Homo sapiens
ctgcagcttgggctaagtcattcagcatccaggccaaagataaagctactatctggcatacattattctcatggtggctcacagaacttcaagaggctggagaaaagttgcaatgactcaaaacgtgtgtacttaaattggtataaatcatgtcagctcatattctgttggccaaagcaagtcgctttgcttcatctgagcctgggatctaagatctgtgcctgtgcttcttccgtaacaggaaacagtgatttgatggttagtatacagtttaccccagtagggcatgacccaagtactacaaaagattggactgctctggcatcttaccagaatctctgagctgagtgggtatatatttcaaaaaagtgccaggtgtttcttacactcttcttaatcctccagtggagatatattttcattgtcttctcatttaaaactcaccagtgcaatgtagtatttaactatttagaaaaatgttcatcatgtatctctcctsgtttcaaaatatttcataaatatggtccttaaattatgaatatagaaaatttaattgtttttctgcgcgataggacaaatca

SEQ ID NO: 265248 - DNA, 552 bp, Homo sapiens
gctgttccactttataagttttgacaaatgaatgaatgaccacgatcaaaatrcagaaacgttccatcatggccccaaattcctttgggctggctctttgtcattaactccttctcccattcccaaactgattttcaccactctgcatttgtgccttttgtagattcttacgtaagtggaataatatagtctatagcctctttacttttttcacttagcaaaatgcatttgacaatcagccctttttattgctgagtaataatctatgaatgtactatagctttttattcatttacccatagaaagatatttggttttctcccgattttttttttccaattagagataaggctgctgtcaacattcacttcccggtttttgtgtgaacataagatttcatttctcttgggtaaatgcctgggagtgggattgatgggctatatagcaagcctgtgtctatgttttaaaaaattgccaaacaatttttaaagtggctctacaattttgcatttaccccagcaggcacagtgtataaaaatttcagttttttca

SEQ ID NO: 265249 - DNA, 524 bp, Homo sapiens
tttgcgcaggctcttctaaatgcttcacatcgatacatttgtttaatttttactgccatcctatgaactggtatgctattggcacccgtatattaccgatgaaacaatagccagagtttatggttagtaagtggtagagctaggatgtgtacagctcagtctgactccagrtctggactcttcacccctagactccactgccaattcaattcaagtggcctgtgagatattctatgtaagtggaaactttatgtaggttgcccaggtgggagttatgggcaattcggtggagaaatcctgagcattccggatgagaggaaacccttgcattatgttgtttctgtgccctcgtgtagttccaggtacactgatagtgacgtgtgcccagtgggtgcagggggtattttccattcttcccatttaaatgtgaagacactgaggccccaagtgtttcagagactttcccaagccaccctgtaaagggcagggccagataagctcctggttttcctggcacttgctcc

SEQ ID NO: 265250 - DNA, 524 bp, Homo sapiens
tttgcgcaggctcttctaaatgcttcacatcgatacatttgtttaatttttactgccatcctatgaactggtatgctattggcacccgtatattaccgatgaaacaatagccagagtttatggttagtaagtggtagagctaggatgtgtacagctcagtctgactccagatctgkactcttcacccctagactccactgccaattcaattcaagtggcctgtgagatattctatgtaagtggaaactttatgtaggttgcccaggtgggagttatgggcaattcggtggagaaatcctgagcattccggatgagaggaaacccttgcattatgttgtttctgtgccctcgtgtagttccaggtacactgatagtgacgtgtgcccagtgggtgcagggggtattttccattcttcccatttaaatgtgaagacactgaggccccaagtgtttcagagactttcccaagccaccctgtaaagggcagggccagataagctcctggttttcctggcacttgctcc

SEQ ID NO: 265251 - DNA, 524 bp, Homo sapiens
tttgcgcaggctcttctaaatgcttcacatcgatacatttgtttaatttttactgccatcctatgaactggtatgctattggcacccgtatattaccgatgaaacaatagccagagtttatggttagtaagtggtagagctaggatgtgtacagctcagtctgactccagatctggactcttcacccctagactccactgccaattcaattcaagtggcctgtgagatattctatgtaagtggaaactttatgtaggttgcccaggtgggagttatgggcaattcggtggagaaatcctgagcattccggatgagaggaaacccttgcattatgttgtttctgtgccctcgtgtagttccaggtacactgatagtgacgtgtgcccagtgggtgcagggggtattttccattcttcccatttaaatgtgaagacactgaggccccaagtgtttsagagactttcccaagccaccctgtaaagggcagggccagataagctcctggttttcctggcacttgctcc

SEQ ID NO: 265252 - DNA, 585 bp, Homo sapiens
aactctgctgctggcaaactggggactcrgcagtggcatagccaggtcagccttggtgagtgggagtctgtgttgctgagaccatgaataactttcatcactgccacaatggccactttgttcatgggcccattgagcagtgacaggggtggcttgggaaggatcctgagtggtgtccatagaatgagtctttctgtccagttgattattaaaatcctcctctgctgaggccatgtgttggtgaggactcacatgagatacaaatatcctctcagtttttgaccattcagagaagtccatccacatacgtcttccccagatttctttgtcaccaattttccaaccatgcttcttccaaggccctgaccacccagccaaaccattggctacagcctgtgaatcagtatataatcacacatctagccacttctctttccaggcaaagtgcacaaccaggtacaccacttgaagttctgcccactgggaagatttcccttcaccactgtccttcaaggatgtcctagaaaggggctgtagtgtggcggctgtccattttcgggtgatgcctgcatattgtgcagagcg

SEQ ID NO: 265253 - DNA, 610 bp, Homo sapiens
tctggtaggtgagccaagtgaattcaatatgtaatgaaactgtacttcataacttccctgagaacatttgtatttcaagtgtctgtcccagaacagatcaaagccctctgctaactgggattacagatgggaaaggagtggctctccatcgatcctggtgtttgtatcctgcctggaacagctcactttagggacagcagctgcttgtaggtgtctgcagaagaggcactcccatctctgcctagatgggggcatggcttagtaactctccagtaccctgttcttggctgtcgccctgtatatgccagatagtgacagtggcatcgttttgcaggaccaagtgttaagcttgctgcattttttggagttgagaaagagttggttcctggcrtcgtgatatgaactctacatttatttcccctcttcctaagccagtgcaggttagttgactgcaaagagacaatgtcctgagctgtgtctgcctgtgggctcagtggggtcccggggatcacccaggcatccttttcagcctgctgggctgaaagcttggatttacaagtgattcgttttcttactcttgcacttctgctggggtagtgacggtggtcaa

SEQ ID NO: 265254 - DNA, 610 bp, Homo sapiens
tctggtaggtgagccaagtgaattcaatatgtaatgaaactgtacttcataacttccctgagaacatttgtatttcaagtgtctgtcccagaacagatcaaagccctctgctaactgggattacagatgggaaaggagtggctctccatcgatcctggtgtttgtatcctgcctggaacagctcactttagggacagcagctgcttgtaggtgtctgcagaagaggcactcccatctctgcctagatgggggcatggcttagtaactctccagtaccctgttcttggctgtcgccctgtatatgccagatagtgacagtggcatcgttttgcaggaccaagtgttaagcttgctgcattttttggagttgagaaagagttggttcctggcatcgtgatatgaactctacatttatttcccctcttcctaagccagtgcaggtyagttgactgcaaagagacaatgtcctgagctgtgtctgcctgtgggctcagtggggtcccggggatcacccaggcatccttttcagcctgctgggctgaaagcttggatttacaagtgattcgttttcttactcttgcacttctgctggggtagtgacggtggtcaa

SEQ ID NO: 265255 - DNA, 610 bp, Homo sapiens
tctggtaggtgagccaagtgaattcaatatgtaatgaaactgtacttcataacttccctgagaacatttgtatttcaagtgtctgtcccagaacagatcaaagccctctgctaactgggattacagatgggaaaggagtggctctccatcgatcctggtgtttgtatcctgcctggaacagctcactttagggacagcagctgcttgtaggtgtctgcagaagaggcactcccatctctgcctagatgggggcatggcttagtaactctccagtaccctgttcttggctgtcgccctgtatatgccagatagtgacagtggcatcgttttgcaggaccaagtgttaagcttgctgcattttttggagttgagaaagagttggttcctggcatcgtgatatgaactctacatttatttcccctcttcctaagccagtgcaggttagttgactgcaaagagacaatgtcctgagctgtgtctgcctgtgggctcagtggggtccyggggatcacccaggcatccttttcagcctgctgggctgaaagcttggatttacaagtgattcgttttcttactcttgcacttctgctggggtagtgacggtggtcaa

SEQ ID NO: 265256 - DNA, 544 bp, Homo sapiens
aaaaccaaacaccacatattctcactcataggtgggaattgaacaatgagatcacatggacacaggaaggggaatatcacactctggggactgtggtggggtggggggaggggggagggatagcattgggagatatacctaatgctagatgacgagttagtgggtgcagcacaccagcatggcacatgtatacatatgtaactaacctgcacaatgtgcacatgtaccctaaaacttaaagtataataataaaaaaaaaaagtgcatcttatctgctccaagctkccgcccagagcatggatgcagcgttctgcttgcccacaaattgttcccctcctaacttctggccaagtgctcctgtgagcatcctagcagaacatcttcaatatcatatattacaatgcaaatttgcgaattaaatcaatgtggctacacacaagtccaatgtgcaaaaaggtaattatgaatattcaattttcaaatgtgcacctcccagcagtggaaactaaatgtgaatgttccctcatgaagagtacaacaggta

SEQ ID NO: 265257 - DNA, 544 bp, Homo sapiens
aaaaccaaacaccacatattctcactcataggtgggaattgaacaatgagatcacatggacacaggaaggggaatatcacactctggggactgtggtggggtggggggaggggggagggatagcattgggagatatacctaatgctagatgacgagttagtgggtgcagcacaccagcatggcacatgtatacatatgtaactaacctgcacaatgtgcacatgtaccctaaaacttaaagtataataataaaaaaaaaaagtgcatcttatctgctccaagcttccgcccagagcatggatgcagcgttctgcttgcccacaaattgttcccctcctaacttctggccaagtgctcctgtgagcatcctagcagaacatcttcaatatcatatattacaatgcaaatttgcgaattaaatcaatgtggctacacacaagtccaatktgcaaaaaggtaattatgaatattcaattttcaaatgtgcacctcccagcagtggaaactaaatgtgaatgttccctcatgaagagtacaacaggta

SEQ ID NO: 265258 - DNA, 544 bp, Homo sapiens
aaaaccaaacaccacatattctcactcataggtgggaattgaacaatgagatcacatggacacaggaaggggaatatcacactctggggactgtggtggggtggggggaggggggagggatagcattgggagatatacctaatgctagatgacgagttagtgggtgcagcacaccagcatggcacatgtatacatatgtaactaacctgcacaatgtgcacatgtaccctaaaacttaaagtataataataaaaaaaaaaagtgcatcttatctgctccaagcttccgcccagagcatggatgcagcgttctgcttgcccacaaattgttcccctcctaacttctggccaagtgctcctgtgagcatcctagcagaacatcttcaatatcatatattacaatgcaaatttgcgaattaaatcaatgtggctacacacaagtccaatgtgcaaaaaggtaattatgaatattcarttttcaaatgtgcacctcccagcagtggaaactaaatgtgaatgttccctcatgaagagtacaacaggta

SEQ ID NO: 265259 - DNA, 487 bp, Homo sapiens
taacaatactgtactgtctacttaaaactgctagcagagtagatctttyttttttttttttgagatggagttttgctcctgttgcccaggctggagtgcaatggcgcgatctcagctcactgcaacctctgctttccaggttcaagcaattctcctgcctcagcctctgaagtagctgagattataggcaagtgccaccatgcctggctaattttgtattttcagtagagacggggttatatcttatagtaaggattcttaccaaaaataataacaatgttaataacaaaggaggcaggaggcgatgcacaactctgagaggtgatgaacttgttcacggtcttgatggtggtgatggcttcacagactcacccccagactcatcgagatgtagaaattaagtatgtaaaatatgcccagctttttatatgccaaccaggcctcaacaaagtggtttttaaaaaactaaaataccaagcaaaacaaa

SEQ ID NO: 265260 - DNA, 487 bp, Homo sapiens
taacaatactgtactgtctacttaaaactgctagcagagtagatctttcttttttttttttgagatggagttttgctcctgttgcccaggctggagtgcaatggcgcgatctcagctcactgcaacctctgctttccaggttcaagcaattctcctgcctcagcctctgaagtagctgagattataggcaagtgccaccatgcctggctaattttgtattttcagtagagacggggttakatcttatagtaaggattcttaccaaaaataataacaatgttaataacaaaggaggcaggaggcgatgcacaactctgagaggtgatgaacttgttcacggtcttgatggtggtgatggcttcacagactcacccccagactcatcgagatgtagaaattaagtatgtaaaatatgcccagctttttatatgccaaccaggcctcaacaaagtggtttttaaaaaactaaaataccaagcaaaacaaa

SEQ ID NO: 265261 - DNA, 493 bp, Homo sapiens
tcacataatgtgggaggcagcgtcaagcctgagcagactctcaggaggggcaccctacccctttcccaggctgtgagaatgaggatggaagatgaatcactcaacaatacagcctggccgcacccaaacacattgatttataactcaycccactttcttctaaatagtattcacagtaggtatgcaagagactaagctgaccagcacctccgctggtactgcaaggcccctccagggtcctcacggagctcctaatgattctccagggcattgcacacttactttccatttgcaacaactccctttcctcttgatgtcagaaacaaccttcccgtccacttttttaagcacatgtcctaggtgtcacccatcccagtggcatcactgcatccttcctcctacccggttgatagcacgttggggaccctctactctcattggcaatctgtccctctggatctctctccaatcacttgatatgctgtctacagct

SEQ ID NO: 265262 - DNA, 493 bp, Homo sapiens
tcacataatgtgggaggcagcgtcaagcctgagcagactctcaggaggggcaccctacccctttcccaggctgtgagaatgaggatggaagatgaatcactcaacaatacagcctggccgcacccaaacacattgatttataactcaccccactttcttctaaatagtattcacagtaggtatgcaagagactaagctgaccagcacctccgctggtactgcaaggcccctccagggtcctcacggagctcctaatgattctccagggcattgcacacttactttccatttgcaacaactccctttcctcttgrtgtcagaaacaaccttcccgtccacttttttaagcacatgtcctaggtgtcacccatcccagtggcatcactgcatccttcctcctacccggttgatagcacgttggggaccctctactctcattggcaatctgtccctctggatctctctccaatcacttgatatgctgtctacagct

SEQ ID NO: 265263 - DNA, 493 bp, Homo sapiens
cagtagattttcaggatacaaattcaacatacaaaagtcagtagcatttatacacaccaacagtgaataatctacaaaataaaacaagaaggcaatcgcatatacaatagctacaaaaactataaaatactgaggaatccatttatcctacgaagtgaaagagctatacaaggaaaactataaaacactggtgaaatatattgaagaggacacagaaaaaatggaaagatgttccrtgctcctagattgaaagaattaatattgttaaaatgacagtactatccaaagcaatttacagattcaattcaatccctattaaaataccaatgatattcttctcagaaatatttttaaaaagtaaaatttaaatgaaagaccctgaataaccaaagcaaaaaaacaaagctgaaggcatcacactacctgacttcaaaatgtactatgaagctatataagcaaatcagaatggttatggcataaaaacagacaacac

SEQ ID NO: 265264 - DNA, 493 bp, Homo sapiens
cagtagattttcaggatacaaattcaacatacaaaagtcagtagcatttatacacaccaacagtgaataatctacaaaataaaacaagaaggcaatcgcatatacaatagctacaaaaactataaaatactgaggaatccatttatcctacgaagtgaaagagctatacaaggaaaactataaaacactggtgaaatatattgaagaggacacagaaaaaatggaaagatgttccgtgctcctagattgaaagaattaatattgttaaaatgacagtactatccaaagcaatttacagattcaattcaatccctattaaaataccaatgatattcttctcagaaatatttttaaaaagtaaaatttaaatgaaagaccctgaataaccaaagcaaaaaaacaaagctgaaggcatcacactacctgacttcaaaatrtactatgaagctatataagcaaatcagaatggttatggcataaaaacagacaacac

SEQ ID NO: 265265 - DNA, 493 bp, Homo sapiens
cagtagattttcaggatacaaattcaacatacaaaagtcagtagcatttatacacaccaacagtgaataatctacaaaataaaacaagaaggcaatcgcatatacaatagctacaaaaactataaaatactgaggaatccatttatcctacgaagtgaaagagctatacaaggaaaactataaaacactggtgaaatatattgaagaggacacagaaaaaatggaaagatgttccgtgctcctagattgaaagaattaatattgttaaaatgacagtactatccaaagcaatttacagattcaattcaatccctattaaaataccaatgatattcttctcagaaatatttttaaaaagtaaaatttaaatgaaagaccctgaataaccaaagcaaaaaaacaaagctgaaggcatcacactacctgacttcaaaatgtactatgaagctatataascaaatcagaatggttatggcataaaaacagacaacac

SEQ ID NO: 265266 - DNA, 570 bp, Homo sapiens
atgcaataaattatctttaaccatattccccttgcagtgctgtagagcaccagaattccttccttctatctagctgtaattttgtatctgttaaccaacctctccccaacctccccagccccctaccgttcccagcctgtaatagtcaaaattctactctctacttctattagcacagaatttttttagcccccacacatgagtaagaacatgcagtacttatctttctgtgcctgggttattttgcttaacataatgtcttcctggctcatccatattgccatgaatgacagaattttattcttttttatggccaagtagtattccattgtgtatctcacattttctttctattcttctgttgatggacattttggttgattccatacattggctattgggaatagtactgctataaacatgggaatgcagatatccctttgatatactgacttctttcctttggataactacctaatagaattaggtagmtccagtagaattgctggatcatatggtagttctatttttagttttttgagaaacctccacactattttccacaatggg

SEQ ID NO: 265267 - DNA, 559 bp, Homo sapiens
gtactgctaaaatcccctgtcctccttccatgggcaggcactgctstcatgtcctcccaccatacccttctaccctcgactcaacatcaaactctagaccgtgaccattttgagaccgaaattatgcccttgagttacaggcaaatattaggttctttagattttctgcagaattaattgaatgaaaaatgaacgaggccaacaagtaaaaggagacaaatgagacaggcaacatgaagactgaagggtatgtaaagaagggtagggaggttagccagccccagccgatcttacttctaagatgttgacagaagtgtgtgcgtgcatgtgtgtttgcatgggagcagtagtagcccagggaaggtgaactttaaacttgactgcatagaaatacttccaatatagcaggtacgaatgtcactgtgccactttctggtgtgtaaatgtgacagaaaaattagttctgtactttcactcatgtgacggtagaaaattcaatctcagtaatatttggcggctttggtgttcatccaaaaatctcctagtgtttggagtgaca

SEQ ID NO: 265268 - DNA, 559 bp, Homo sapiens
gtactgctaaaatcccctgtcctccttccatgggcaggcactgctctcatgtcctcccaccatacccttctaccctcgactcaacatcaaactctagaccgtgaccattttgagaccgaaattatgcccttgagttacaggcaaatattaggttctttagattttctgcagaattaattgaatgaaaartgaacgaggccaacaagtaaaaggagacaaatgagacaggcaacatgaagactgaagggtatgtaaagaagggtagggaggttagccagccccagccgatcttacttctaagatgttgacagaagtgtgtgcgtgcatgtgtgtttgcatgggagcagtagtagcccagggaaggtgaactttaaacttgactgcatagaaatacttccaatatagcaggtacgaatgtcactgtgccactttctggtgtgtaaatgtgacagaaaaattagttctgtactttcactcatgtgacggtagaaaattcaatctcagtaatatttggcggctttggtgttcatccaaaaatctcctagtgtttggagtgaca

SEQ ID NO: 265269 - DNA, 596 bp, Homo sapiens
actctctgtatcatctttgcagcttttctataaataaaaaattattccaaaacaaaatgtttatttaaaagaaaaaggcattctggatccaacacttaccagctgtgtaacctcagatgagttatttaatctttcagtgcctcaatcttgtgttttgtaaaatgaggggttaatagtaaaacttcccatagggttgttgtaaggattaaatgagttaacatatgaattgcttaaaatagtgcttggcaaaaggtaagttgttaataagtgttggctctgattgtaatagtttcttcttttaaacacaacttgttttcatggctatttgctcagtgtgtgataagtcaccccatagaycagtgttctccaaagtggggtacagctggggttgcataagacccattgaagggtaaaaggaaaaagtagaacttctgtttttatactgtatttatttcatcctctctgttttcgtgtatgtgctgaaatgcatatcttgatcaagtagaagaggatatgatatataaatacgtatataaggtggggtgcaccaccatttttattgatagggtaaagcctgggcacacaggccatgttat

SEQ ID NO: 265270 - DNA, 596 bp, Homo sapiens
actctctgtatcatctttgcagcttttctataaataaaaaattattccaaaacaaaatgtttatttaaaagaaaaaggcattctggatccaacacttaccagctgtgtaacctcagatgagttatttaatctttcagtgcctcaatcttgtgttttgtaaaatgaggggttaatagtaaaacttcccatagggttgttgtaaggattaaatgagttaacatatgaattgcttaaaatagtgcttggcaaaaggtaagttgttaataagtgttggctctgattgtaatagtttcttcttttaaacacaacttgttttcatggctatttgctcagtgtgtgataagtcaccccatagatcagtgttctccaaagtggggtacagctggggttgcataagacccattgaagggtaaaaggaaaaagtagaacttctgtttttatactgtatttatttcatcctctctgttttcgtgtatgtgctgaaatgcatatcttgatcaagtagaagaggatatgatatataaatacrtatataaggtggggtgcaccaccatttttattgatagggtaaagcctgggcacacaggccatgttat

SEQ ID NO: 265271 - DNA, 562 bp, Homo sapiens
tatgaccttctttgggctcaaagacacagccacttaggcaaactaattgtgcattaagccctaatgcctgtgccatttacatctgcatgaaaataatattttagtccagaaagctgaaaatgttgaggttgattcaatatatacttactacccagtgttccttcagygtggattgtttcaatttgttccatcacttgacaaaatctctccacttacttctgagaatctaaattttccccactggctcactctcgaccttatttattttttcacaatagctctctcaagttattcaaggcatagtaagttaaagagtctaaaagcattttggatctagatggtgatatttatagcaagatagaatggtattttttgaggcatggaacaacataaccgacattaattttaagtttcgtatgcattcgttgcttcacaatcatttgttgaaatgctgattttgttttgttttgttttgttttaaagcccaagttcttagaaacagtcagacctaggttcaaatcctttcttaatcagttgtatatccttggacaatttctgtttt

SEQ ID NO: 265272 - DNA, 585 bp, Homo sapiens
gcttaaaattcagtggaaaaatatcaaaaggcaataatagcactcctattagatcattgccagattcaaaagggaaataaaattttataaacctgttttacattcaaaccatcagaaagatgtactgaaatcaggtttcattttggaattgctttwgtggtgtcaacatgtcacataatttcttcagaaaacagcaatttggtctgagaacacctgcaagtctctggaacgctcgccctagtacactactataagtttttaaaataagtttagatgttctcacagattgtgacatatctttgtattatgagcaaacagtatctgtgtatttagaatcagcatgaaagggaaatacatgggctctttgaacacacaccagcagctgttgaggtcagggacctacagggactctcaatccagtgccttgtaggatttcactagcttttactttaatgttggaggaagagactaagacagtagaataaaagttattctattttacttactttagcttcctgcctggggactcccaaacagtaagtctactcataaaggagtcacctttatctccatttgctgccaagg

SEQ ID NO: 265273 - DNA, 585 bp, Homo sapiens
gcttaaaattcagtggaaaaatatcaaaaggcaataatagcactcctattagatcattgccagattcaaaagggaaataaaattttataaacctgttttacattcaaaccatcagaaagatgtactgaaatcaggtttcattttggaattgcttttgtggtgtcaacatgtcacataatttcttcagaaaacagcaatttggtctgagaacacctgcaagtctctggaacgctcgccctagtacactactwtaagtttttaaaataagtttagatgttctcacagattgtgacatatctttgtattatgagcaaacagtatctgtgtatttagaatcagcatgaaagggaaatacatgggctctttgaacacacaccagcagctgttgaggtcagggacctacagggactctcaatccagtgccttgtaggatttcactagcttttactttaatgttggaggaagagactaagacagtagaataaaagttattctattttacttactttagcttcctgcctggggactcccaaacagtaagtctactcataaaggagtcacctttatctccatttgctgccaagg

SEQ ID NO: 265274 - DNA, 552 bp, Homo sapiens
ggagcccaggaggaggctgtttgagaaggcctgtgggtggaggacaattttatagggtttagaacaagcagagacatttggggagcaaaaactatggtgatcaaaattagtacttgatttaatggttgtttaaagcaatgcaaccacgggtatcaagcttcaggagtatgacatagaaaatggaagggcttccagacctacccatctccccatcccgaggaagcaactgacttgaagagcagaacttcccaatcagctactgtacaatgatgccatcaagtcttcaagaagacaagtgaaatattcctgccraagagactaaagcctccaggtcacagtgtgacttccccttcagttctgacttcccctatgacttacctaactcacatagctccttgaggacccctccctgcttcttccttccccctttctccttcctcttcttccttcccttctcatattattctacctaatggtgttttatgaagaatgactaaaatgcataaaatcattttgtaaaaatgcaaaatgccctgtggtttaatgatgact

SEQ ID NO: 265275 - DNA, 566 bp, Homo sapiens
catgactctgcccagtgccctatccctactgtggctgagctggtatccaagatgcaagacaaagtcctctttactcctctctcttctcctcaagtagaaggaaagagtcattttcattgctacaagctgtgctgcctggtttgggggagaggtggtaccatcattctcttagccaccgttactggtgtctcactaggttatgtgctgcccaagttcactggctcccagctcagcacagcactagtacttgcctaggagttgcaatgcttgtggcctagactgcctttcatttatttgggatcccagagcactttagcccatggtggcactcaacttggtcacttgaagtaggtggtgtctgccagagctcttcattataaaggtatctttacctttttgtaatttataagtaatatcaaaggtaagattttgagatcaaatggatatattaatacccaagyacattctcacttaatcttagtattatgcattcataactccttaacacaatggatcagatcctagttctgatctctgagctccaaaaatgtgtaattaatgaagtt

SEQ ID NO: 265276 - DNA, 483 bp, Homo sapiens
gatcttttaaaaaaattgtttgttctttaaaaaaacaacatatgaagggtaaataaaataaaaagttggttttttgaaaggataaacaagattgatagaccactagctagattaacaaagaaaaaagaaagaagatccaaacaagcacaattagaaattaataaaggtgacatcacaatagatcccacagaaatacraaagatcctcagaagctactataagcatatctatttacacaaactagaggaaatgaataaattaatggaaacacaaggaattgaacaaggaagactgaacaaagttgaacaaggaaggaacagaaatattgaatagaacagaagcaagtaatgaaattgaagcagtaattaaaaacctaccagtcaaataagccctgaaatgagaaagagggactcctccttaactcattctataaaacctgtatcatcctgatactaaaaatttagcaaagaacaataaaaaaag

SEQ ID NO: 265277 - DNA, 623 bp, Homo sapiens
ctgcttctgtgaaaaataaccacagacttagtgaccaaacaacacaactttattatctgcagtatctgcagttctaaagagcaaaaatccagaatcagtttcactggactaaaaaaaaggtgttggcaggyttgtgttcttctggcagctctagggtgagaatctgtttccttgtcttttccagttactagaggccacgcactccttggttagtgccccttccttcatgttcaatgccagcagtgtagtaacttctgtcttctctgattcctacttccatctttacatcttttctctctgaatctaatactgttacctccctctatatggactgtatgattacactgggctcccctggaaaatccaggaaccctcccacccccccattttaagatccttaacttaatcacaactgcaaaatccatttccatcctttcctgtgtaacatattcacaggtcccatggattaggatatggcattttgtcggggctgttatttagcctactacagctaatatctaaaattttccctcatactggccagacttgctagagagtctccagctgggaaggtcaaactctgactggccaccagcgttctgagatctgagtgggttaagagg

SEQ ID NO: 265278 - DNA, 623 bp, Homo sapiens
ctgcttctgtgaaaaataaccacagacttagtgaccaaacaacacaactttattatctgcagtatctgcagttctaaagagcaaaaatccagaatcagtttcactggactaaaaaaaaggtgttggcaggcttgtgttcttctggcagctctagggtgagaatctgtttccttgtcttttccagttactagaggccacgcactccttggttagtgccccttccttcatgttcaatgccagcagtgtagtaacttctgtcttctctgattcctacttccatctttacatcttttctctctgaatctaatactgttacctccctctatatggactgtatgattacactgggctcccctggaaaatccaggaaccctcccayccccccattttaagatccttaacttaatcacaactgcaaaatccatttccatcctttcctgtgtaacatattcacaggtcccatggattaggatatggcattttgtcggggctgttatttagcctactacagctaatatctaaaattttccctcatactggccagacttgctagagagtctccagctgggaaggtcaaactctgactggccaccagcgttctgagatctgagtgggttaagagg

SEQ ID NO: 265279 - DNA, 623 bp, Homo sapiens
ctgcttctgtgaaaaataaccacagacttagtgaccaaacaacacaactttattatctgcagtatctgcagttctaaagagcaaaaatccagaatcagtttcactggactaaaaaaaaggtgttggcaggcttgtgttcttctggcagctctagggtgagaatctgtttccttgtcttttccagttactagaggccacgcactccttggttagtgccccttccttcatgttcaatgccagcagtgtagtaacttctgtcttctctgattcctacttccatctttacatcttttctctctgaatctaatactgttacctccctctatatggactgtatgattacactgggctcccctggaaaatccaggaaccctcccacccccccattttaagatccttaacttaatcacaactgcaaaatccatttccatcctttcctgtgtaacatattcacaggtcccatggattaggatatggcattttgtcggggctgttatttagcctactacagctaatatctaaaattttccctcatactggccagacttgctagagagtctccagctgggaaggtcaaactctgactggccrccagcgttctgagatctgagtgggttaagagg

SEQ ID NO: 265280 - DNA, 460 bp, Homo sapiens
gatgtctgttaagctcacagtctccaagcatgtgacaaaaggtaaggcagtgctggcttcttgtgcactttgtctagcctaacaatgcctacctaccttcaccttctttctctcccaaaatggctgaccctttgctgtccctgtaaccctatgacctttctccatccccttccctttctgttgtttttgtggcatttccatgtccccaccatcccaaatctgctccaactgcacctgggttctgatttaagtcaaccaggcactaagaactttacatgtttgaactcaattaatcttcacaacaaccctattattattcctgttttacagactcagaaactgttgcacacagaggttaagtaaacttgaccaaagtcacacacytaataaggcagagcccagatttgaacccaagcaacttgactccaaagtacatctttattccactgtgctataggcc

SEQ ID NO: 265281 - DNA, 567 bp, Homo sapiens
cgcctggccctccagactcttatcttgataatggggttaaaatatctaaccccagagttattgtgaatatttggtaagaatgtgtatacaaacagtttggaacctgtaaagtacaatacagatgtggctttctgttaaatttccctaaacctatctcatacccccatttacccctatctccatctcagctgccagggaaatgagtccctccagatccctcctctagactgttcctagtacatgctctgcacagatcatctagcaatttaaaacaagatgacttgcaatgttgcaggaagtcggggaccccaaatggtgggactggctggagccgcggcagagaaacatraattgtgaagatttcatggacatttatcagttcccaaataatacttttataatttcttatgcctgtttttactctaatctcttaatcctgttatcttcataagttgaggatgtacaccacctcaggaccactgtgataattgtgttaactgtacaaattgattgtaaaacatgtggtttgaacaatatgaaatcagtgcacattgaaaaagagcagaa

SEQ ID NO: 265282 - DNA, 525 bp, Homo sapiens
gtccactgacccccaccttgctccttggctataaattcccacttgcccatgctgtacttggagttgagaccaatgtctctcccttcctgcaagaccccattgtagaggtgcctgaataaagtctatcacaatggtcctgaataaagtcttccctaccatctttaataagtatcattgagtaactttttagttaacaatccctttcctcatcttttcactccttaatcttcagagactgggcttctccccacaccttcctggcgaagatcaaaaattacaccctggacctggcacggtggctcatgcctgtaatcccagcactttgggagactgaggtgggtgaatcatatgaggccaggagttcaagaccagcctggccaacatggccaaccccacctctactaaaaatacaaaaattagccagasatggtggctcacgcctgtaaccccagctacttggaaggctaaggcatgaggataccttgagcccaaaaagtggaggttgcagtgagccaagatcatgcc

SEQ ID NO: 265283 - DNA, 611 bp, Homo sapiens
gtgaacttttgtttgctcatctttaaaatgaagatgactattcctgccttgaccccctctttgggttgttttgaggattagagtggaccatgtttgcaaacactaaaagaccacacatatctatgggtacatgacctctcctgcctcatcttgtccacattgtgttccagctatgttgaacttacatatgtccggaccctccacatgtaggcctctgcatgtgcagtgtgactctcctagaatgcacaaccacaatcgcccccrtttccagtcacaccaatccctacccttcttcagctcccagatttcctgacctcccaagtttagatcacgtgcctttcctatatacttcctgagagtccccatcaggacactgccattgctatgtcatggaaggggaaactgtttatgtcttgttcacagttgtatcctaagctctcaataaatgttcaggaaatgagtaaatgaatcaattgcctttaaggaaatgggcagggggacaacactgagtgtgctaaggccaggaagacctttatctacattctcttctttggtcttcaccatactctatgtgataaaaattattatttgcattttataaactcaggggg

SEQ ID NO: 265284 - DNA, 613 bp, Homo sapiens
atgttttgctttttgtgtatattaacccattcactcaatataattgccctgtgaaataggtacaattgtatttctcattttacagataaggaaattgtaaaggctacataaccaaaataaccaaattactgacaaagaataaattacttctataaagtctcataaatagtaaacggcataatttggattcaaacccaggcattctggctctctaacacttgtgctcttaatctctcaactatattgattagatacatatatatatgattatatacacatacacacatatgcatatatatggataaagagtaatttaaaatttcacatgcagaatttgatcaaatgtagatggcctacagatgcctattctgaaagctgatattagttaataattrctatgaggatagaatactgtgaattacctccttaataaagaacaattatccctccatccctccttccctccttctctcccttccttccttcctttctttctttctttatttcagaaggtttgtgattcttgttttgcttgtgaaacatagtctttatattttgaaataaaaaatcctaccctctttcctagttattttaaagggtggtaattattgtg

SEQ ID NO: 265285 - DNA, 599 bp, Homo sapiens
acttccaggtgctgccatggcaatggtaaactgacatgtcacactggtgggtgtgtcttacagaaagctgcttccactccatccctgttttcaaagctagtcttcaatttggtccagtgtccgagccctgcctccagagtcagatctttcctcctgagttgttcctacctcctrcctcaaaggcaaagattgaggtgatgtttcataagccaaggaatgccaaggattgccggcaaaccaccggaagctaggcgagaggactagaacagattttcccacagccctcagaataaaccaacccctgaccaagctttgatcttggacttctggcctccagaattgtgagaatacatttctattactggagccatctagtttgtagtactttgttgcaacagccctagcaaaagaatacactccggattcagttttctctcttcagagtcagttgctatctgtcttgcttctgagctttcgtacttttgttactgttgttctctcccatgttctccacagccttatgggcttatgcttgaatacaaaacaaaacccaaacccttaggtgttatttaagtgaagacttggaaagggatgcatct

SEQ ID NO: 265286 - DNA, 559 bp, Homo sapiens
aataccattatttatttatttgtttatttttgagacagcttctcacactgttgcccaggctggagtgcagtcatgtgatcttggctgactgcaggctctgccttctgggctcaagtgattctcctgcctcagcctcccgagtagctgggattacaggcgtgcactgcaatacctggctaattattgtatttttagtagaaatagggtgtcaccrtattgaccaggctggtcttgaactactgatatcaagtgatccacacgcgtcagactcccgaagtgctgagattacaggtgtggaccactgtgcccaccccccattattgttatatggccttctgaatgatagtaacagaaataataaaacactctacttactgagcattaatatgtgactatgtttgttatctattgctgaataaaaaaccatcccaaagtatagttacttaaaacaacaacaaattatttctcacaatcccaaatgttgtaggggcagttctgttggtttcacctgaaattactcatgcggctgcattcagctggcagattgactgaggaccag

SEQ ID NO: 265287 - DNA, 560 bp, Homo sapiens
tttgtcttcctgtgaacacgagccagttgtattccatcaacaaacattttgagcattttttatgggcccagaatgattccagatcagaatttctccacctcagcactattgacaatttgggtaggataatcctatgttgtgggggctgtcccaagcattgtaagacatttaacagcatcctgacctcttcccacttgattccagtaacatctaccatsacccagtcgtgaccatcaaaatgtgtctggacattgccaaatgtccccccgagggcaaagttgccctgattgagaaacactgttctggatatgtgggagaacacagggaaaactccggatggtgtttctactgctaagggtctcgtagtgtacttaggagtcaatattaaccgtcatgaatcaatacgtggtcagttaagtactaacttgtgaaatatactgcaatctaatttttagctaatcttgtaattttcttttttgagggaggggtagacagaaatggaagcaaactctattagaaaaagaagattgctttcattggggaaggagaagcatgtggaa

SEQ ID NO: 265288 - DNA, 538 bp, Homo sapiens
aaacttaaatctacttgcaagcccctctgacctctgctaacctcaagttgccaggtgtccccaagcactctatgacccaaaactttggccttcttttaagaaatacctttcatgccctccaccctccttttggtcaactcctactcctactcagaatccaggttaatgctgctgctttagggaggcatttctgtatccccagatagaatagatcctcctactacgtgctctcaaggtatcatatacatccctcttgcagcccttttcttaattctatttaagtagcgaaatagataattatataattagttgtccattgactgcccattccyatcagtgacctccactctcttactcacagctgtatcttccataattcccatatatatcaggaatttaataaatatgggttggactaattaactaataaaagtaatctaaacacaattcacccagccaaaccttgtgattactgaactgtcctccttggtcatatttctgagtgttaaaatggtatggcagatttttagctttccaa

SEQ ID NO: 265289 - DNA, 605 bp, Homo sapiens
actcagttgagaacctagaagggtagragagtagaagatttttccttccctacaaaccaaaaggcggctttttagtcttttatattctgaccaggccagacactcaaaggttttgtttatttctgaataaacaaaaatctgggctcaccattgagttggctttttcaattaacttccataaactttggatttagaccttggacatgctcaccataaagaccccaaggtacttttaaagaccttcctgaagagagagattatcatttattatgaagaattgcccaagtgttgcacatagggaaacatgatgcaaggaaagaaaaatacataaacaagtagacattctcaatattgagcagctttcttgtttaacagagtgatgttattgctttcattcattcattcattcaaacaagtggttattgagccaggcactgttctaagtgctgggttatacctgtgaactaaactaacaaaccatcattttcttcctactgtaacaaaaagatttgtctcttttttttttaaagtaaatgtttgtggcagattaaaagacatttcctcctgaaaatgcatccttgctatttctgtgcttatggacataa

SEQ ID NO: 265290 - DNA, 629 bp, Homo sapiens
cctgtctttgggtttcttttttttttttttttttaacaccatgaccaaatagtatttatttcaggtatcaaagtctggtgcaacatttgaaaattgagtaatgtaatccatcacaccaacagggtatagaggaaaaatcacaggattatatcactagatatagaaaaagtatttgacaaaattcaacactcattaatgataaaaactcccagcaagctggaaatagaggagaacttcctcaacttgatgaagaacatctatgaaaaagtagctaacgtaatacttaaaggtgaggaactagaaactttcccactaagactgtgtacaaagcaaagttatctcctctcaccattccttttctttttgttttcgtttcttcttttttaagttttttcattattttttttattttttattttttatttttttkttatacttttaagttctggggtacatgtggggtacaatgttctgggaacaaagaggggtatggtaggaattagtagcaagtggaatgtttgacacagagccttctagttgtaggctacaactagtgaacatagatatcttgaaaaagcacctcttacagaaatgtagtgctgtttctatacaaaaacctatgtgtgatt

SEQ ID NO: 265291 - DNA, 552 bp, Homo sapiens
gcccctaacaagggagtcagcctgtcctttgaagctttaaagccaggcatagacttctcttcctctctagctacaaaagccttagaagatatcttcttccaatggaagaagatctgttttacttacattgaaaatctgttgttcattgtagccaccatcatcaatgatcatagctagatcttctggctaactgactgcagcttctacatcagcacttgctgcttcaccctgtacttttatgttatggagatacaacttctttccttaaacctcatgaatcaacctctgctagcttcaaacttttctcatggagcttcatcacgtctytctgctttcatagaattgaagagagctggggcctttctcttgattaagcttcggcttaagggaatgttgtggctggtttgatcttctatccataccactccaactttctccatatcaacgagaagggtgtttcactttcttatcattcatgtgttccctggaagtaattttcttcaagaacttttcctttgcgttcacaatgtggctaagtttttggctcaagag

SEQ ID NO: 265292 - DNA, 552 bp, Homo sapiens
aattcacacagtcatattcctatatattaaaaaatgccataagaaacagactgcggtgttcaactagaaataaaatcaaacattccaactataagaccatagtgagtggcatgaataactttcccaggagattctttaaaaattaaacagttccatataaaattgtagacatttcaactgaaagatacgttagagaaaaacctaataattcagtgtagtgttatttgaaattcaaaaattgggtcatcccactcttccctcttcctttttaaaaacaacaacaacaataacaaaaaaacaagtttgcataccatgaagtgaaacaagaaatgaaatgaagctgtgttcagtggcctggagtgtgatgctcaagggctcccaagaacttgcaaaagtcaatattatgtagttatgaattttcagaaatataagtaaagtcaacttgtaacrtttgatttaaccaataggaactgctccaacaactcaatgtatcaactctgaaaacaaattactgtatcccctgcctaccctagtatttagaaggtcagtgcc

SEQ ID NO: 265293 - DNA, 508 bp, Homo sapiens
gcagtatttttttctttctatatctggcttatttcacttagcacaatgtcctgcaagttcacccatgttgttgaaagttgaagaatttacttatttttttatgacttaaatatttcacatatatattttctttattcatctgtcaatggacacttaatactgaaattaacatggaagtatagatatctcatcaaggtactgatttcatttcctttgaatgtattaaacccagaattgagattgctagattatatattagttctagttttatttttttgaggaagcttcatactgttttctataatggctgtactcatgttaaaggcattcccaccaacagtgcgcaagggttcccttttctccacacccttgacaatgtttgttatctcttgtctttttcataatagtcatcctaacaggtgtgaggtgatatggcaytgtggtcttgatttgcattttcctgatgattagtgatgctgagcaccttttcataaacctgttggccact

SEQ ID NO: 265294 - DNA, 678 bp, Homo sapiens
gccttctcattttgtcaattgtttcctttgctgtgcagaagctttttagtttgatgcaatcccagcaagtcattttatgggtgtcaagactgattttaaagtttatatggaaaggcaaaagatccacagtagccaacatgatgttgcaggagaagagcagcattacagcactgacactgtctgatctgacttcaagacttactataaaagctacagtcatcaagacaatatrgtattggtgaaagaatagaacaatagatcaatgaaacagaatagagcccagaaatcgacccacataaatataggcaagtgatctttgacaaaggagcaaagtcaatataatagagaaaagacagtttttttcaataaatggtgttgaaacaactgaacgtcacatgccaaaaaagaaatccagacacagaacttatacctttcacaaaaattaactcaaaatggatcattgacctaaatgtgaaatgtaaaattataaaactcccagaagataacattgtagaaagcatagatgacctatggagatgactttctaagatataacacccaaggcacaatctataaaagaaataattgacaagttggacttcactaaaattaaaatcttctgctccacgaaagactctatcaaaaggaatcagaagacaaataacagattggaagaga

SEQ ID NO: 265295 - DNA, 678 bp, Homo sapiens
gccttctcattttgtcaattgtttcctttgctgtgcagaagctttttagtttgatgcaatcccagcaagtcattttatgggtgtcaagactgattttaaagtttatatggaaaggcaaaagatccacagtagccaacatgatgttgcaggagaagagcagcattacagcactgacactgtctgatctgacttcaagacttactataaaagctacagtcatcaagacaatatagtattggtgaaagaatagaacaatagatcaatgaaacagaatagagcccagaaatcgacccacataaatatagkcaagtgatctttgacaaaggagcaaagtcaatataatagagaaaagacagtttttttcaataaatggtgttgaaacaactgaacgtcacatgccaaaaaagaaatccagacacagaacttatacctttcacaaaaattaactcaaaatggatcattgacctaaatgtgaaatgtaaaattataaaactcccagaagataacattgtagaaagcatagatgacctatggagatgactttctaagatataacacccaaggcacaatctataaaagaaataattgacaagttggacttcactaaaattaaaatcttctgctccacgaaagactctatcaaaaggaatcagaagacaaataacagattggaagaga

SEQ ID NO: 265296 - DNA, 486 bp, Homo sapiens
tccaagtcgatagaatatacaayagcaagtgaactctaatgtacattatggacttttagtgataatgatgtgtcagtggaagttcatcaatcacaactaatttactgctctgatgcaggatgttggaagtgagggagattttgtgtgtatggaggtggctgcagggttgggggtggggaaagaaggtatatgtgagctgacccctctttgctttcagttcaatgttgctgtgaacttaaaagtgatcttaaaactaaatagctttttgtctgacatcttagcgaggttaaagtggttgctgctgtcccctgggcatcgcgatgctgcccaaggacgacaggaagaagaaagacactggaaagtcagacaagaaagacagagacccaatgaacaaatctggtggcaaggacagaaagaagaagtggtccaaaggcaaagtttgggacaagctcaataacctagtcttgtttgacaaagctacatatg

SEQ ID NO: 265297 - DNA, 472 bp, Homo sapiens
tgtattgtaccaagtggctattgagaacatatctacttgattatttttgtaaatatctcctgaaaaaatacactggagttcctcttagatagatacctagcaagataacttgaccatataatgtgtttgtagcttacaaaataatttgtttttcaaaatggatgtagcaattgacacttttgccagcagttgagatatcctgtcactgtgcatcctctttaacatttggtattattaaactcttttatttttgcattcagaataagcattaaatattattttgatcttggttgcaaaaagactggaaattactaaaktgacattatttgaagattatatgatcaaccatattgaaaccatgaaataatatattcaaataaattattcaaataataacagatttaagaaaggtgattgaatttaagatcaatatgcagatgtcaatttcatatataacagaaacaaataacta

SEQ ID NO: 265298 - DNA, 472 bp, Homo sapiens
tgtattgtaccaagtggctattgagaacatatctacttgattatttttgtaaatatctcctgaaaaaatacactggagttcctcttagatagatacctagcaagataacttgaccatataatgtgtttgtagcttacaaaataatttgtttttcaaaatggatgtagcaattgacacttttgccagcagttgagatatcctgtcactgtgcatcctctttaacatttggtattattaaactcttttatttttgcattcagaataagcattaaatattattttgatcttggttgcaaaaagactggaaattactaaagtgacattatttgaagattatatgatcaaccatattgaaaccatgaaataatatattcaaataaattattmaaataataacagatttaagaaaggtgattgaatttaagatcaatatgcagatgtcaatttcatatataacagaaacaaataacta

SEQ ID NO: 265299 - DNA, 502 bp, Homo sapiens
gtagtggccagtagttgtctttctttttcatgtttagcactcccttcaggacctcttataaggcaagtctgttggtaaggaattccattagcatttgcttccctgaaaagggtgttatgtctccttcacttatgaagcttagtttggtgggatatgaaattcttggytggaatttcttttctttgacaatgctgagtacaagcccccaatctcttctggcctgtcagatgtctgctgaatggtccactggtagcctaatggggtagcctttgtaggtgacctgcctcttctctccagctgactttaatattttttctttcatttcaaacttggagaatctgacaaccaggtgtcttgagatagtcatcttgtatagtacctggcaggggttctcttcatttcctgaatttgaatgtaaccctctctagcaaggttggggaaattttcatggatgatatcctgaaatatgttttccaagttgcttgctttctctctctctctt

SEQ ID NO: 265300 - DNA, 502 bp, Homo sapiens
gtagtggccagtagttgtctttctttttcatgtttagcactcccttcaggacctcttataaggcaagtctgttggtaaggaattccattagcatttgcttccctgaaaagggtgttatgtctccttcacttatgaagcttagtttggtgggatatgaaattcttggttggaatttcttttctttgacaatgctgagtacaagcccccaatctcttctggcctgtcagatgtctgctgaatggtccactggtagcctaatggggtagcctttgtaggtgacctgcctcttctctccagctgactttaatattttttctttcatttcaamcttggagaatctgacaaccaggtgtcttgagatagtcatcttgtatagtacctggcaggggttctcttcatttcctgaatttgaatgtaaccctctctagcaaggttggggaaattttcatggatgatatcctgaaatatgttttccaagttgcttgctttctctctctctctt

SEQ ID NO: 265301 - DNA, 553 bp, Homo sapiens
cttgatgttttcaattttattaatctttgttttctctactaaattgaaagcctcttagggcaagagtgacaacttctttgttcacctttgtattcttagtctatgcaactgtgctgggtttatagtaagccctcaatacaatttgttgatggaatgcctgatgactgaggtgtagggaacaccagaaagtagaattttgtatagccacagagaatacaaagggagctaaaacaaacagctggaaagttaaaatgttaccaggtgtaaaatagaaaataccaactatggcatttgaactttgttcygtagacattgggaggcactgatgatttagagcaggggagtggcttcattctctctcttcttcttagtgatcttctggaagctccatgcatgttgattcacaataggagtaactgagatggagagatacattaggtggctgttgcaactattgcagttggaggtaatcagatctgaagtatgacacaacagaaaaaggagggaagggaatatgatgggaactatttcaggaacataatagaaaaggaca

SEQ ID NO: 265302 - DNA, 603 bp, Homo sapiens
gaaaaacatctaatagaagtacaagaaaaaatagacaaatccataaatatggtcagtgatttcaatacccctctcacaataattgatagagcaagtagaaaaccagtaaagatgtaggaaactttcattatcaaccaactagagctattttacatttccataacacatcatccaacaatagcaaaatgtacatcctttttgaatgcacatggaacattactgaaatggaccctattctgaaccacaaaataagcctcagtaaatgtaaaatatttcagtttatacaaggtgtgttctctcatcacaattgayttaaattagaaatcaattacaggccaggccaggtggcttacctgaggtcaggagttcaacaccagcctgagcaacatggtgaaacctcgtctctactaaaaatacaaaaattagctggctgtggttgcatgtgcctgtaatcccagctacttgggagcctgaggcacaagaattgcttgaaccccggaggtggaggttgcagtgagccaagaccgcaccactgcactctggcctgggcaacagagtgactctgtctcaaaaagagaaaaaaaaagtaaccagtaacagaaa

SEQ ID NO: 265303 - DNA, 604 bp, Homo sapiens
cttgcaatcaacacttctattcaatattgttctagagattgtagcctgcttacagtctctgtttggtacctacttattaggaacaaaaaaagcattcagatcagaaaagaagaagtgaaactatgtcaacatgggaatggataattaaactgtagtatagccatacaatggtgtaaaaagcaaggaaaaagaaggctattgatacaattacgttgaygctacaatgtgaatggatttcaaaatacttaggctgagtcaaggacgtcagacaaaaaagagaacttactgattcaattcatctgaaagtttaaaacatgcaaactaatctataataatagaaagcatctttgttgttaggctgagataaaagataatggtggggacgagatgagtgagagaaagtgactgcagaagtaggagagaaaactttgggggttgatgaatatattcactatcttgattatgatgatagtttcacgagtgtatatgtatgtcaacatttaaaactgtatgctttatatgtggattagtttatgcatattatgcctgaataaaaatacttaacaaaatagaaacaataaggatagccaaagaatggggaaaa

SEQ ID NO: 265304 - DNA, 622 bp, Homo sapiens
ttgtctacattaacagtggatgttgaagaaacatgaggtgaagactttttccagaatcttgcagtgccaccactggccctgctctgtaacttttgtaattcttttatggaaaagataaactcttatgtttaaacctttgttatttggggatttttctattatgtgcaaccaaactgaattgcacttgatatagtttgctttctctgatgcactcaagagtttagaaaccaaaatgtataatctattaggctatagtatgtcactgatgtttatctatgacagtgagatgaattaacctaaaacaatttgtagacccaaaacaaatttactttagcttagtcccaagagcttagaattcttttcatagagagatgtgaaaatttttctaagaaagtggtaaatttgagccgtcaggaattgacctgctaccgcaagccacttgagaaattgttttggtttccatttggcttagcaaaattaagagaagattcattctcttgtacctttaacaccagtcatttcayttttattgtcaatgttcctaggaaaaagatgtattgtggtaagtaggtaattaaaccaaagcctctattcttccagacctagctccccaggtgctatg

SEQ ID NO: 265305 - DNA, 587 bp, Homo sapiens
ctggaaaagaatcaatggataaaaatttagtgaaacagctttcagatattggaggactgtgggctatgaagataaaactacatattccatatcctcaaggaacacaaaagagagaagaggtatacatgtaggcagatgcataccaaataatatgatgcttgcagtactacactgctataaatagttgctgtgcccatgtcagctgcactcacacaaaataccacttactctaccttcaaaacactataggcattctggatttctagaatccaactcttttgttatctcctttgttatctctctggtctaagacactataatatctcctggattattgaagtgacttgctgattcattgagttcttgcctaaacagtctgttctctacatagcagtgagagatcctgttaaagcacaaggcagaaatttcatatctaggtatggaaaaagacctgatacagatagagatttcttgctgtatgtatgtgcatatayatacacacacaatataactattttctgccatcacttctttgctcaaacccttccagtgactccccatttcaatccgtgtaaaataagaaaagt

SEQ ID NO: 265306 - DNA, 592 bp, Homo sapiens
cagttacatttactgtgatatcagaaaaccaatgtaaataattgtcatgtgtcctacaagtagtctgttattaacagcagtacagatatatgaatgttgtactttggattgtataagtaaagtggatccaaggttaattcagtaataagtttgctcttacttacttgccttctgatacatttttttgartgggtcagaaaaagtttaggttaatatgaatgtacatcttaagtctacatgtactagtagtatgttgcacagattcatgccttctgtcacgtgttcttccacacagtaaaggtagagaagtgctgctgtgagttatacctgagtgtttaagaaaatgtggtacagatggaatatgcagccacaaaaaagaatgagatcatggtttttttaaggaacacaaatggatctggaggccattatccttagcaaactaacacaggaacagaaaatcaaatactgcatgttctcacttgtaagtgggagctaaatgatgaaaatttgtgaacacaaagaaaggaacaagagacagtgaggttggagggtgggaggagggaaaggagtaggaaaaaataaccattgggtc

SEQ ID NO: 265307 - DNA, 613 bp, Homo sapiens
ttgcaattgctgtgtacttcttgtgtttcatatattgatctgatatctagcaaacttaatgaacatcttttgtcatcctaacatttaatatgtatatttcttggcttttctatattacatcacctgtaaataatccagtttggattatttttcagtacttttcattatttagtttttgattatrtgataccagctagaatctccagttaagtggtgatagggttttgctgtgtccccacccaaatttcatcttgagttgtagctccccaaattccctcttgttgtgggagggacctggtgggagataattgaatcatgggggcaggtgtttccaatgctgttcttgtgatactgaataagtctcatgagatctgatggtttttataaaggggagttccccttcacaaactgtcttgcctgtggtcatgtaagatgtgcctttgcttcaccttccacaatgattgtgaggcctccccagccatgtggaactgtgagtccattaaacctctttttctttataaatttctcagtctcaggtatgtctttattagcagcatgaaaacagactaatacagtaaattgttactgggagaggagcattgctgtaaaggta

SEQ ID NO: 265308 - DNA, 610 bp, Homo sapiens
aaatattgtgcagcaaattttcaggacttatttattttgcataactgaaattttatcctcattcatttgcatctccccatttccccttccttatggataaatggatttaaaaattgcagtataaacatacaatagtatattatttcaccataatttagaaagaaatcccgctacaggcaacatcatggatgaaactggagaacattatgttaagtgaaataatccagtctcaaggacaaatattgcatgaggtggctaaaatcttcaaattcattaaatacagagagtagaatggtgatattcttatatggaactcttatatcaacttaaggattaaatgttatctctgcttttccataaagaaactattaagggaaaagtgagactttgagcatgctttcaggttcatgatctctacattatgcccaggcccaccttagacacctctgtctatgcatgataatatgaggcttggataggcaggacagagaaaaagaacaaartcaggatgcctaggccatcccttagagtatatagcacctgcaacagatgccctaacacactgtataatctaaaacaaaaaggaattggtctttaacataattgcctt

SEQ ID NO: 265309 - DNA, 617 bp, Homo sapiens
ttgacctaatttattgctagaatcatagactcattgttaaattcagctccaaggtaatattaaggatcaagtaggtgccagacrctgtgctagttgcactcagaggcaagtaagcaattgcccttgcattctaattggaatacaggccaccattttcatgtgccctcattccccctagtattagataggaccctcccacacattttcttcatatcacattttatgataagattttgttcctgtttaatattcttaaataccttgagcaagaaagtggctaagaagggctcaggaataggataaaagataattttagccttagcagatatcagtaagaaatgactctagagaatggtaatgagaagcagaataagtactgcatttgcaggtattaaaaatgttgcaaaaattacctgtacaaatgaacctacctgagtataaatattgagaaattgggatagggaaggtgtcaccagcatggtgcacaggaaggaaaggctagaatggtgatcttgcttctgttgggggaaaggagactggatatctagccagacttctgctcctctgctctgagactgactgcacaggtatgccagctggcagtacacatggagaaa

SEQ ID NO: 265310 - DNA, 388 bp, Homo sapiens
agctccaaggtaatattaaggatcaagtaggtgccagacactgtgctagttgcactcagaggcaagtaagcaattgcccttgcattctaattggaatacaggccaccattttcatgtgccctcattccccctagtattagataggaccctcccacacattttcttcatatcacattttatgataagattttgttcctgtttaatattcttaaataccttgagcaagaaagtggstaagaagggctcaggaataggataaaagataattttagccttagcagatatcagtaagaaatgactctagagaatggtaatgagaagcagaataagtactgcatttgcaggtattaaaaatgttgcaaaaattacctgtacaaatgaacctacc

SEQ ID NO: 265311 - DNA, 584 bp, Homo sapiens
cctgagcatttgaccatgctcctattgaattagtctaattttcccactaagtggcagatgaagaaacctcatctggtgggcggagacttgggatctgcagaggggaactaaagatcctgcaggaacagaacctttctcccaggcaccacaatcaggtacctactcccactctccaagggctgagtgtgtcagattggtgagaatacagtgtcaattcrtatagttctgtcctgcagggaggaatgggagtcctctctcctcactccaagcttgaggcatttgagtaagggcttccctctatgggaagcagtacttgcttctagaggaggcttccctgcactcactcaggacatgctggaaaagctttatttccataaagtggcagattctaggaatctcttgtttagggaggactggtggtgagtcactgctgataactacagagagaggcagaactgctgtcttgaatcagaaagcaatcaaagtaacaagatctaacatgtattgagcaaatgctacattacctctaaccatcacaatcgccctgtgtggtgggtgtctttatgcctattttacagataaga

SEQ ID NO: 265312 - DNA, 465 bp, Homo sapiens
atttaagagcttcccagcacctaagaattggtgtgtctggcagcttttatttaggttcagacccaggtcttctggcctcacttgtctccagggcccttgccacttgttccacatcatgcacctctttgggcacaggatctgcatgtgctatcaactcttacactctgtggctctcaaatagacactgcagcatccgcctcatctcacaggctgacctggcccacctgtggctattgccccctgctctctagttctgtggcatracttgaatcagcttcacccagagggtgaccctttgggcttcctcagaatctgctgaaggggccaggtaataatctggaagtgcaaaaggattaattcctctgggatgaaagttggccagtagcagccaggaggaaataatctgaaaattttcctatctctcccattccctaaaagcaagactgttccaatgagcagcagcct

SEQ ID NO: 265313 - DNA, 527 bp, Homo sapiens
acatggaccacatgagtaactaattttgaaattgctttgcatttacaattagaactcctgtggtgtcygaggaatccaattatggctgggaagtcatataatagtatggaacctattctgatcaaaatgagattttactaagttcgttgaagattaagattgaataatgctgaagtgtgaaatcctcaattatacgttcagctccaaagaaagaggtgcctttttaccagatatttgtgatttttctcaccctagaaatattgattatgaactctctcagattttttgaaaatgccattctaaacatgaataaacaaggcagaataaaaagtgatgtagggcagtggaggagaatgactgactcaggaaacctggctttagtccttgctctgcttgtcttttattaccatcttactctgagcatacaactccacctctccgtgcctcagttccttctctgttaatggcatgatagcactatgagatcatcaacagttccttagcttcatgattgaattgttctgtag

SEQ ID NO: 265314 - DNA, 575 bp, Homo sapiens
tccttgctctgcttgtcttttattaccatcttactctgagcatacaactccacctctccgtgcctcagttccttctctgttaatggcatgatagcactatgagatcatcaacagttccttagcttcatgattgaattgttctgtagttcttggcatgaaatagtaatattattactccggggttttccatatgggatttcttaatcaatacaaattaaacagcaaacatacaaaaagtctaacatacaactttcagcttttgctttttcaaagtaaagtaactttttaaaataatttcatctttaaaaaaatcccataattatattatatatataattataaaagaaacaacaatttagcatcaaaactaaaaarggaggaaagatcatctctaatataaaaaagacaaatttgtagcaactatagggcatgcacattcatacacatacacacccacaatggttcagtttctttttgcatggtctaatgagaattttattatgcactagaatttgtaaacctttgagggtaaaatgcatataagtaaaatagacaaaaatgtattaggaagttca

SEQ ID NO: 265315 - DNA, 597 bp, Homo sapiens
gacatgttttttgtttgtttgtttttgataaaacacttcacgtgatgaatatcccaattaacctaaattgattgtacaaatgtatcaaatgatcacatgtacccccaatatgtatattcaatgtgtatcaatmaataaataaatttttaacacacttcataaaataattttaaaaatgactttatctgataatcaaatacttgatgaacatttagagattcataataaatatttataaaatgatgtatttatctataatttgtcttgttactgaaaaaatctgagtaggttataagattacataaaataccagaaaataaaaataggtaagattaaataaaatatgggtgagaaaggacagtaaacctgagtacaaatatgacataaagcaggaataagtttaatggaaagttagtctccataaacgtccaatatttcttactgcaagagtagagaagattcgtatacaaggctctgagagctccaacaggattacaagaaaataattttgataaatccttgcagtaaaaatgactaaaatgctcagaaaagtgtaagtgactcagacagaaatgtgcagtgaaaactaatgaacaa

SEQ ID NO: 265316 - DNA, 597 bp, Homo sapiens
gacatgttttttgtttgtttgtttttgataaaacacttcacgtgatgaatatcccaattaacctaaattgattgtacaaatgtatcaaatgatcacatgtacccccaatatgtatattcaatgtgtatcaataaataaataaatttttaacacacttcataaaataattttaaaaatgactttatctgataatcaaatacttgatgaacatttagagattcataataaatatttataaaatgatgtatttatctataatttgtcttgttactgaaaaaatctgagtaggttataagattacataaaataccagaaaataaaaataggtaagattaaataaaatatgggtgagaaaggacagtaaacctgagtacaaatatgacataaagcaggaataagtttaatggaaagttagtctccataaacgtccaatatttcttactgcaagagtagagaagattcrtatacaaggctctgagagctccaacaggattacaagaaaataattttgataaatccttgcagtaaaaatgactaaaatgctcagaaaagtgtaagtgactcagacagaaatgtgcagtgaaaactaatgaacaa

SEQ ID NO: 265317 - DNA, 609 bp, Homo sapiens
agtaggcagaagcattgaaaggagggaaggctttatgagaaaaagaagactgaagcaaaagaaagaatgagtagaatttggatttgtggagaaaacaagaaaatgctacttttggcaaaacaattttaaccacagctatagccacttatatattgatgcctaacatattaatagtttgtgcctatattgactttcataaactcaatggtttggagtcccttattatacaaagtgaaaagcccactggcagttgaggtaagctaagaaagagaaaacagtacatacatgttattttgcctagaycaaaatgggaaaatagtaatcacaaattagcaacaatattatgataataacaaataccttttactgagtgttaggcactgcaatatgacagttgtatatattatgtttaattctccaagcagccctccagaaagatagcattcttttaccaacgaataaatggaagcttaaaaagttatttgcccaaccattaatttctaagcttgattcaaattcattttattcactcaacataattttactgactacctgctatatgttactctccaaacttacaactggcatagattgtgaacaagacagaga

SEQ ID NO: 265318 - DNA, 511 bp, Homo sapiens
gcctgctacccctaaggtcactcattccattgctgtgtagattttctttgtatatggtccagatgccctctaaagcatcctctccttcattctggcwtctgtttgaagttatcgtgaataaatgtacaattttattctattcatttatttcatttttcaagagcagcgtaaatctttgcagatcaattattaacccagctaaatcatccctgaattttagctattcttttatttttattttatagtttaaaaactcatagaaataaaactatagacatcatagaagataaacttttggagaaaacaattttatatataaccaatattaacatatgatataatctcccatactttgtcttatgcttaggtgtatacatatgataatttctaaacaaatattcattcaagtttatacaatacactctatattataaactttctgcatcagtaaacagcaatttaagatttcattttatggctacatattacaccgttgtgaacactataatgt

SEQ ID NO: 265319 - DNA, 566 bp, Homo sapiens
cacaaatctaatctaggaggcatcatatcacaaaggagataagagtgtggtttttgtttttgtttttgttttttgttttttgtttttgttttcgtttctgtttgaggcagaatctcactctgccacccaggctggagtgcagtgtgcagtggcacgatcatggctcactgcagcctccacytcccatgctcaggtgactctcccacctcagcctcccaagtaactgggactacaaacacatgccactatgtcagctaatttttgtaatttttgtagaggtgggattttgcatgttgtctaggctgatctgaaactcctggacttggcatccacccatcttggcctcccaaagtgctgggattacaggtgtgagccactgcacctggccaagaagtggagtttctgatacaatggccttggtggaattcagaatttagaatagcagtgagagtctggtgagagtccagtgatggcaaggggcctgataaaagtggccaatgaaaggcagaagaagatggaagaagaagcaattggctctcacaagactaaaatcctagggccttcag

SEQ ID NO: 265320 - DNA, 571 bp, Homo sapiens
tagtttgttgaggaaacatctgcactcccatgttcattgcagcgctcttcagagtagccaagatatggaatcagttaagcatctatcagtggatgaacgratttttaaaatgtggtatatacataacggaatacgattcagtcttaagaaatgaaggaaattctgtcatttgtgacaatatagatgaacctgaaggacattgtgctaagtgaaataagccaggcacagaagaaagacaaataccacatggtgtcacttgtgtggaatgttaaaaagacaaattcacagaaacagagagtaaggtggttttaccagggcctgggggacaagggggattgagaagatgttggtcaaaggagacacaattttaattagacaggaagactaagtttaagagatctactgtacaacatagtgactataattaataaatgtattgtgcacttgaaaattgctgaaagagtagattttaagtgttcttacaaaaaaatgctaagcatgtgaagtaatgcatatgttaattagcttgatttagccattccacaaagtatacatatttcaaacaatcatg

SEQ ID NO: 265321 - DNA, 571 bp, Homo sapiens
tagtttgttgaggaaacatctgcactcccatgttcattgcagcgctcttcagagtagccaagatatggaatcagttaagcatctatcagtggatgaacggatttttaaaatgtggtatatacataayggaatacgattcagtcttaagaaatgaaggaaattctgtcatttgtgacaatatagatgaacctgaaggacattgtgctaagtgaaataagccaggcacagaagaaagacaaataccacatggtgtcacttgtgtggaatgttaaaaagacaaattcacagaaacagagagtaaggtggttttaccagggcctgggggacaagggggattgagaagatgttggtcaaaggagacacaattttaattagacaggaagactaagtttaagagatctactgtacaacatagtgactataattaataaatgtattgtgcacttgaaaattgctgaaagagtagattttaagtgttcttacaaaaaaatgctaagcatgtgaagtaatgcatatgttaattagcttgatttagccattccacaaagtatacatatttcaaacaatcatg

SEQ ID NO: 265322 - DNA, 479 bp, Homo sapiens
aattgtaaagggttgatgaaagaagttgaagargatacaaataagcaaaaacatatctcacattcacggactggaaggaataatattgttaaaatatccatgctacccaaagcagttcacaaattccatgtaatccctgtcaaaattccaatatcatttttcatagaaatgtaaaaagaaattttaaaatccatatgtaaccaccaaaaacccaaataagtaaaaaaatcatgggcaaaaagaacaaagctgcaggtatcacactacctgttttcaaactttaatacgaggttacggtaattaaaacagcatggtatggcaaaaaattagatacatcaatcaatcaatggaacagaatagagagcccagaaataaatatgggtttattcatggtacatatggtctatcaactttcaacaaaggtgtcaagaatacttaatgggaaaaggatagtctcttcagtaaatgctgttgggaaa

SEQ ID NO: 265323 - DNA, 457 bp, Homo sapiens
attaaaaaataaatttcacttgtgtgggatctggggccattttctccatgtaaatttctgaataaatcaggacttaagaaatggccttttgcactgggaaaaatagtctctgcttaaaaaaaaaaaaaaaaaaagtttgtggggaagatttgtggagtattaaaagatgacttaaaaacaaatattcccataacattagaggcaaaacggtgacctgtttttagtttgcttttaatatatttcatatttgagcttaggctgaacagcacattaattcagcagggagaaaaacagctagctagttccaaatcggctccaaatttatggaggacaaagtatctcataaggccctgggacaaaggctcaaatccaggaaagacccagttggcctctgggaattccgtcccaccagggtttgaatgctgcggttgcctrggctattcaatccctgcaagag

SEQ ID NO: 265324 - DNA, 601 bp, Homo sapiens
attaaatacgtggctagaggtcctggaaaggatgtaaacctcatgaatgagaactgcaaagaagggctttaccctacttcacttctgcagaattccagagcttgcttactctgtcctaattgaaaaaatgaataaacacaaagtctctacctcaaggcccactcttaggagtggtgtctattcatgtgttcagcctctttctgggtgctttctctgtgttacttattttactcttttttttttttttttgagacagggtcactgtctcccaggctagagtgcaatggcacgatctcagctcactgcaacctccgcctcttgggctcaagcgattctccttcctcagtctcctgagtagctgggactacagatgtgcaccaccacaccyggctaatttttgtatctttagtggagaaggagttttgccatgttggccaggctggtcttgaactcctgagctcaggtgatgtacccgcctcagtctcccaaagtgctgggattacaggcgtgagccaccgtgcatggcaacttattttactcttaaagataaattgtgaactgtaggtgatactgtccccattgttatagatgaggaaatgga

SEQ ID NO: 265325 - DNA, 601 bp, Homo sapiens
attaaatacgtggctagaggtcctggaaaggatgtaaacctcatgaatgagaactgcaaagaagggctttaccctacttcacttctgcagaattccagagcttgcttactctgtcctaattgaaaaaatgaataaacacaaagtctctacctcaaggcccactcttaggagtggtgtctattcatgtgttcagcctctttctgggtgctttctctgtgttacttattttactcttttttttttttttttgagacagggtcactgtctcccaggctagagtgcaatggcacgatctcagctcactgcaacctccgcctcttgggctcaagcgattctccttcctcagtctcctgagtagctgggactacagatgtgcaccaccacacccggctaatttttgtatctttagtggagaaggagttttgccatgttggccaggctggtcttgaactcctgagctcaggtgatgtacccgcctcagtctcccaaagtgctgggattacaggcgtgagccaccrtgcatggcaacttattttactcttaaagataaattgtgaactgtaggtgatactgtccccattgttatagatgaggaaatgga

SEQ ID NO: 265326 - DNA, 586 bp, Homo sapiens
aaagatatgccatttagtctatccattttataatacacagccttttaaataccagttttctggattacatgtatataataagtatgggttagcaaagtgctgttaaatacatgcatttaaagacttcaattaaaagataacaatgcatttttttcagcatattatttcttttaagaagcctctagaatactcaataggttccctgaaacagaaaaaaaacaaaaacaaaaacaaacaaacaaaaaaacrcaaccctggatattataatgcattgtgaatatccttttcaacccactaccaaaagctactatgaatgtaaatttctgtttagcctaaatgcataccaagttctatattgatggaatccaaatgaatgagattttattatagatgaaatataaatactggattatctgacaccacacacacaaaatcaactcaaaatagattgaaatgtaagagccaagactgtaaaactcctagaagaaaacaccgaggaaaggcttcttgacattggtctcagcaatgatgtcatggatatgacaccaaaagcacaggcaacaaaaagaaaaataaacaagtggga

SEQ ID NO: 265327 - DNA, 471 bp, Homo sapiens
tattatcaaaaaaacaaaagacaggccagacacagtgcctcatgtctgtactcccagcactttcagaggccaaggcaggtgaattgcttgagctcaggacaacacggtgaagccctatctctagaaaacatacaaaaattagccaggcatggtggcgcatacctgtggtcccagctacttgggaggctgaggtgggagactcccttgagcccaggaggcagaggctgcagtaagctgtgatcacaccactgcactccagcctgggtgacagagtgagatcctgtctctaattwaaaaaaaaaaaaaaaaaaaaaaaaagacgtgttggtgaagatgtgaagaaatggaacccttgcacagtgttagtgggcatgcaaaactgtatagcttctatggaaaaaggtatagaagttcctcaaaaaatgaaacatagaactatcatatgatccagcaatccaacttctgggtatt

SEQ ID NO: 265328 - DNA, 471 bp, Homo sapiens
tattatcaaaaaaacaaaagacaggccagacacagtgcctcatgtctgtactcccagcactttcagaggccaaggcaggtgaattgcttgagctcaggacaacacggtgaagccctatctctagaaaacatacaaaaattagccaggcatggtggcgcatacctgtggtcccagctacttgggaggctgaggtgggagactcccttgagcccaggaggcagaggctgcagtaagctgtgatcacaccactgcactccagcctgggtgacagagtgagatcctgtctctaatttaaaaaaaaaaaaaaaaaaaaaaaaagacgtgttggtgaagatgtgaaraaatggaacccttgcacagtgttagtgggcatgcaaaactgtatagcttctatggaaaaaggtatagaagttcctcaaaaaatgaaacatagaactatcatatgatccagcaatccaacttctgggtatt

SEQ ID NO: 265329 - DNA, 471 bp, Homo sapiens
tattatcaaaaaaacaaaagacaggccagacacagtgcctcatgtctgtactcccagcactttcagaggccaaggcaggtgaattgcttgagctcaggacaacacggtgaagccctatctctagaaaacatacaaaaattagccaggcatggtggcgcatacctgtggtcccagctacttgggaggctgaggtgggagactcccttgagcccaggaggcagaggctgcagtaagctgtgatcacaccactgcactccagcctgggtgacagagtgagatcctgtctctaatttaaaaaaaaaaaaaaaaaaaaaaaaagacgtgttggtgaagatgtgaagaaatggaacccttgcayagtgttagtgggcatgcaaaactgtatagcttctatggaaaaaggtatagaagttcctcaaaaaatgaaacatagaactatcatatgatccagcaatccaacttctgggtatt

SEQ ID NO: 265330 - DNA, 530 bp, Homo sapiens
cccttaattcctatcattagctcctgacatgtccaaatgattctttggctacttgttaataatggaatcaaaaggcactaatctcattatcgcctgtcagcaagcactgtcagaatgctgttggccattagttgcctgctgctacagtcagtgacttgcaaagcacccaaaaggagacaaaaaattacccacagtttagtttttctgtctcatatatctttcaccaccccatgccaaatccttcacagcctaaaccacaygctaccttcttcaagagaccaccccagacctcactagcccaacaaaactcctattctctgaatgatttctgcatttattcattcactcatctacccatccacacatccacctaaacattcactgagcacccaccatgcaccaggctgtgtcctcaaaatacaaattgagtaaaacataattcctttcctgaaggtggtcatgttattgtatggggaaaaagacacaaaaaaaggcttagaatgatagacacatacatggagagcagtaga

SEQ ID NO: 265331 - DNA, 530 bp, Homo sapiens
cccttaattcctatcattagctcctgacatgtccaaatgattctttggctacttgttaataatggaatcaaaaggcactaatctcattatcgcctgtcagcaagcactgtcagaatgctgttggccattagttgcctgctgctacagtcagtgacttgcaaagcacccaaaaggagacaaaaaattacccacagtttagtttttctgtctcatatatctttcaccaccccatgccaaatccttcacagcctaaaccacatgctrccttcttcaagagaccaccccagacctcactagcccaacaaaactcctattctctgaatgatttctgcatttattcattcactcatctacccatccacacatccacctaaacattcactgagcacccaccatgcaccaggctgtgtcctcaaaatacaaattgagtaaaacataattcctttcctgaaggtggtcatgttattgtatggggaaaaagacacaaaaaaaggcttagaatgatagacacatacatggagagcagtaga

SEQ ID NO: 265332 - DNA, 583 bp, Homo sapiens
ctgacacatttattaccattattaattaacagttttctgagatggaattaaatcaatatgctgctctgatatcattttaactagttatgcaaatcaaacatttagagcccatgaacagatataaatgccattcaaaattcacttcacacttattactgtaatatcagaactttcaggctttgctagtaaaaaaaaaagaggacttaatgctcatttaattacactcagacataaagcttatggaatgaaagttgaaatagctgattagttaggaagtcgttgtgaggctataacactcgggatagacagtgagataataacgtgaaaatgcagggctctgcayacagcgattctggcagatcctattagaaagagcaatgacatgtgtaggagaacatgttttaaaattacaaagttgaggaccctttcttaaatccagaaaggagaaggggaggaggaggaagagaaagaaaaaagaaaagattggggaaagaaaacctacaattcatcatttatattaatagaaaacttccagcttcacttgcccaccatttcttcccaactagatgaagatgatgactgc

SEQ ID NO: 265333 - DNA, 579 bp, Homo sapiens
gcacatgaaggataggaacagggctaaattcattatatttgtttctacttttcagaattattcacatctgtatgattccgtaattgtttcttctataaagttattggagtaattttgctccgtatattcccgatcaattccccctctcaagtgcacagttgaaaagtgatatttgaaaacggcctctgatagattgcatggttagtcagcagcagagacaaacaacctaatccagcacaaattagttcggctgccagcgatagttttatacaaagatgtaaattatgttgtcaaaatcggttgctttctagcttgctgctcagctaamaagaaaccactttggctgataaagatgaacactaagcttccctctcttacaaatttgcaaatctgccatttcagcattctgttagccacaaacaaacagtctgctataattgcttcttttcttccgtggtggtatttttcctccttgtgctgttcttccaggctgctcttgaaaataacaacaacaaagaccaaaaacaccacaacaataaacactagcaactctcagactcgaatttaagaaaacgctga

SEQ ID NO: 265334 - DNA, 582 bp, Homo sapiens
cctaatgtgtgtattccctatgtagatctaactctgggcttagtttagacccctattcccaacagcatggtgttataggaatcctaaaatggatgggttccatggygaggactgctggggagccccacgtcaaacaaaattcaacacttgtcttgactatagggctccttagaatatactcaggggcccatgtgtgtctttaagaggagagtagggtatacagtctttcctatctgtctcttctcaggaactctatcagggaccctcctgtggatatcgaatagtccgtaaagtttactttggccagtactgttctaacctctgggaattggtccagcctccactctagaaaatgtagctgtttttatccttggtctagatcgctgactcatgtgttctgtctctgggctgactggctcctctttctcaaccagtcctgcctgtctctccctggaatccaaaactgtgtgccacttacctttcatacaatgacaaacccaagtgacagaaatctctccatttccttccttgcagagtcaggcagtggcatcatttatctattcacaatccctgtattaggta

SEQ ID NO: 265335 - DNA, 598 bp, Homo sapiens
ccataaaagaaaagtgcgggatgttatgagaacacctaacggagagattttttatgtgaggaaggtcagaaaagacttccctaagaaatgtagctgaaacctgaaatctgaaagacaagtaggaatgaagcaggtggaaaggtrggggtaagagacttccaagcaaagagaacagcatgtgcataagtccccatgggaaaaaggagacatgaccagctcaagggcatttaagaaaagaatggtgtggctgggcagagagagggagaatgtggtgcaagatgaagagagataaggaagcagaaccatgtcaaagagtttgccttcatcctaacagcataaaaccattaaaagatgccgagcaagaaaatcgcataatcagatttgcctctccaaaagatctctctctgaggaatagaggatgcgtgagtggacctcttaagaggttactgcaaaagtccaggtgacagatgacgatggcttggactaacatggttgttgatgaagatgaagagaactaaaagtgtttagaggacattatgtggacagaaaagcccaccattctatcaaatctttcttcccaaggtcactacctacctcc

SEQ ID NO: 265336 - DNA, 581 bp, Homo sapiens
tgctggtcaacctcattgtgaaactctgtacttcaaatgaggttttaaactctaaatcatgggggtcatgtatgattaaaggacagaggaggctgggcacaatggctcatgcctgtaatgccagcactttgggaggccraggtggatggatggcttgagaccaggagtttaagaccagcctaggaaacatagcgagaccacatctctataaaaaatttaaaaattagctgggtatggttgtatgtgtctgtggtcccggcttcttgggaggctgaggtggaagaattgcttgagcctggaaggtcaaggctgcagtgaactgagatcatgccactgcactgcagcctgggtgacagagtgagatcctgtaaggaactgaaatcatgtactggatttccccttaacacacttatcaaagttctctgggtaagcttttaggatggagggcttctttaaaacacagcagtatcaatgctttcttcttttgattcttgattcccacagcactcacagtttatattatctgtctcattgctcgttccttctcctcttctcctctaccaaacttcctgaaagagtta

SEQ ID NO: 265337 - DNA, 581 bp, Homo sapiens
tgctggtcaacctcattgtgaaactctgtacttcaaatgaggttttaaactctaaatcatgggggtcatgtatgattaaaggacagaggaggctgggcacaatggctcatgcctgtaatgccagcactttgggaggccaaggtggatggatggcttgagaccaggagtttaagaccagcctaggaaacatagcgagaccacatctctataaaaaatttaaaaattagctgggtatggttgtatgtgtctgtggtcccggcttcttgggaggctgaggtggaagaattgcttgagcctggaaggtcaagrctgcagtgaactgagatcatgccactgcactgcagcctgggtgacagagtgagatcctgtaaggaactgaaatcatgtactggatttccccttaacacacttatcaaagttctctgggtaagcttttaggatggagggcttctttaaaacacagcagtatcaatgctttcttcttttgattcttgattcccacagcactcacagtttatattatctgtctcattgctcgttccttctcctcttctcctctaccaaacttcctgaaagagtta

SEQ ID NO: 265338 - DNA, 581 bp, Homo sapiens
tgctggtcaacctcattgtgaaactctgtacttcaaatgaggttttaaactctaaatcatgggggtcatgtatgattaaaggacagaggaggctgggcacaatggctcatgcctgtaatgccagcactttgggaggccaaggtggatggatggcttgagaccaggagtttaagaccagcctaggaaacatagcgagaccacatctctataaaaaatttaaaaattagctgggtatggttgtatgtgtctgtggtcccggcttcttgggaggctgaggtggaagaattgcttgagcctggaaggtcaaggctgcagtgaactgagatcatgccactgcactgcagcctgggtgacagagtgagatcctgtaaggaactgaaatcatgtactggatttccccttaacacacttatcaaagttctctgggtaagcttttaggatggagggcttctttaaaacacagcagtatcaatgctttcttcttttgattcttgattcccacagcactcacagtttatattatctrtctcattgctcgttccttctcctcttctcctctaccaaacttcctgaaagagtta

SEQ ID NO: 265339 - DNA, 645 bp, Homo sapiens
tgttttctgttgccttcagagttaagtctgatcggttcagcacaggcatcaaggccttccacrttcaggtgcccttgccttccttcagccaccttttccaatattccctgcaagtgctctatgctaggccaaactgtggcccatttcctttctgtggcatccccctactaactaatgattacttttagaatctggagtgagattctaataccaattatcacagggatggatagtgactagcagttgtttaggagccagtcttgggttggttgcaaatagatcaggccaaatgatcttcctttttttgttggttttttgacttaacagataaggaaaatgtgttaagcaccaagcatttaaagttcaggaagacattcaaaacgggatttttgccaaacaactctatcaaaagagggcacctaaatgaagctatgttggtttggaggaacttggttttgtgcctgattcttggcaaaagaaccagtgacttaggtgaagatacagaaaacgcatgtattatatttgtgggacacagagctgcccagggcagttgaatcaggtaatagaatcatgatcccccagtattttatcagttagaacttatgggacaaatcagaagaagataaaattaagaaagatatactt

SEQ ID NO: 265340 - DNA, 537 bp, Homo sapiens
gtgctgcaaaagttactcaggattgcttggagactggtgaggtgagctgtgctcagcttgccagtgagaaaccacattttaatgtctttgctgatgggatagttcacatatatggaggcagttttgttgaaggcatggccaatgctgttctccaggctgatagactgaagtggcatggataacaaagtaagcagataacccacaggagacttttgctttgctttggggtgtacacagtatattagcaatagcttatatttatatggccattttcagtttaaaaagtgctgttttgcactcatggcccaatagctggaacaccaatgaggaaagccaggcattagtcccaattttgcccttagagatacatgacgttaggcaagtcactaagtcactttctttttcctcatctataaaatggaagtaaataaatggattcttcctagattgtaagagactatgggtttgargtaatagttttgaaagtatcttgaaaggttaaaagcactatactgatctatttacttacttaaatac

SEQ ID NO: 265341 - DNA, 649 bp, Homo sapiens
gttttaaaacatgagtgactgaccaacaggcccaaatgtagtggccatgggttcagaaaggttagaaatgagatcattccactgggcttggcaattaggatatcactcacccctttagtgagagatttcaaacttcaattaagctctagcaacacagcagattacactgtataacctatatcacaacactcttaaagaaatctggataaaacataactctcccctaaaatcttagtacatagaagagcattgagagagagagaaagaaattaccaagtaagtgggaaaagaagactaaaatcaaagcctataccacaggagcccatggcaatatcagacctggatataagccctaggatctgggtgtttaatgccttcagagggataggacatgctgctttgaattcacacagtatggggaactggaactaagagctctgcataaagctggatatctaagggctacccaatatataaaaagggggacaaaagaaactctactagtccaggaggcatgctgtttctcatgcctctgggcagaaaaaaaaaaagsccttctgcaagaaacaaaaaccccaagcctgttctattagtgtatgtaaagtcatggtatttgaactccaagctgaaaaattgcataaaactggta

SEQ ID NO: 265342 - DNA, 611 bp, Homo sapiens
ggggacaaaagaaactctactagtccaggaggcatgctgtttctcatgcctctgggcagaaaaaaaaaaaggccttctgcaagaaacaaaaaccccaagcctgttctattagtgtrtgtaaagtcatggtatttgaactccaagctgaaaaattgcataaaactggtattagatctatgaaactcctaattttcaaaaatagtgatccttccagaacccaagacctgtgacacacctcttaacaaatataaactcacagttaaaaaaacaaaataaaaattataaaccacacaaggaaacaaatcactatgaaaagagtcagctaatcaagtagaactgaatgttattttttaaatctgaaacaagttaaaaaggcataggaaccattaggaaataagacacaatgggggaaacatttttaaaaagaataaatagaacatcttaaaaaacagtcttcaaaattaaaatatgatggatgggctcaacagaatataagatacaactgaaaggagaatttgtgaatcataggctaaaactgaaaaaaatgatccagagctcagcatggggagataaagagatggaatatataaaataaagataaattgctagga

SEQ ID NO: 265343 - DNA, 456 bp, Homo sapiens
ccacaaatgatcagttgggcctcaaagatgtggatagaccatgcgatggtctcctgatggtctccacatgaccagatgcatggcaggctggcctagcaaggcacctgycaagggaactggcaatcccaacagcatggtcaacctccatgaactgcagccatcacaacctttaccaactttgtgcttcactgtttagaagtgatatgtatctcagaaatgtcaaaatccttagagaagtatggtgataaaatgaataggctgtttgctctccatactgatacacccaatttcagactgtcaaagtgcttttagttataataggaaatgtacaaagttagctttgcttgttttgacaaccacaaaaaggatttatcagttacatgtacccgttaaaatgtcgaggttctcaaagtaaaaatggattatagccaaatcctaatattattaatgttttca

SEQ ID NO: 265344 - DNA, 456 bp, Homo sapiens
ccacaaatgatcagttgggcctcaaagatgtggatagaccatgcgatggtctcctgatggtctccacatgaccagatgcatggcaggctggcctagcaaggcacctgccaagggaactggcaatcccaacagcatggtcaacctccatgaactgcagccatcacaacctttaccaactttgtgcttcactgtttagaagtgatatgtatctcagaaatrtcaaaatccttagagaagtatggtgataaaatgaataggctgtttgctctccatactgatacacccaatttcagactgtcaaagtgcttttagttataataggaaatgtacaaagttagctttgcttgttttgacaaccacaaaaaggatttatcagttacatgtacccgttaaaatgtcgaggttctcaaagtaaaaatggattatagccaaatcctaatattattaatgttttca

SEQ ID NO: 265345 - DNA, 456 bp, Homo sapiens
ccacaaatgatcagttgggcctcaaagatgtggatagaccatgcgatggtctcctgatggtctccacatgaccagatgcatggcaggctggcctagcaaggcacctgccaagggaactggcaatcccaacagcatggtcaacctccatgaactgcagccatcacaacctttaccaactttgtgcttcactgtttagaagtgatatgtatctcagaaatgtcaaaatccttagagaagtatggtgataaaatgaataggctgtttgctctccatactgatacacccaatttcagactgtcaaagtgcttttagttataataggaaatgtacaaagttagctttgcttgttttgacaaccacaaaaaggatttatcagttacatgtacccgttaaaatgtcraggttctcaaagtaaaaatggattatagccaaatcctaatattattaatgttttca

SEQ ID NO: 265346 - DNA, 590 bp, Homo sapiens
ggcacatcacatggcgagagcaggagcaagagagagagagtgaggggaggygccacacactttaaccaatcagatctcatgagaactgactcactatttagagaacagcaccaagccatgagggatctagccctgttactcaaacatctcccaccaggccccaccttcaacactggggatgacatctcaacatgagatttggagaggacagacatccaaactatatcatacatgttgtcaagtgaaaaagcaagctaggactctatgtggcatgacccaacttattattggcaaaaccaagtcaatatatatggaggtaaataaacagaaaaaggctttgaagagtccacagcaatctgttaataatagttctctctggggcaggaggatgtggaagtagggggtggtggcttccttctagccactcagctaaggctgagttttactctttatatatattggtatggtttgatttcttttttcttttggtatcaccagaatgtacttacatattaattttgtaaatccttttaaaaaggaggttgtttacaatgtcacttgctcagtgaggccaagaaaggactgcaaga

SEQ ID NO: 265347 - DNA, 545 bp, Homo sapiens
cctctcttggctgctccagtttttgctaagatgggattttgcttgggctgttggctccctacccaggttaaacacaagagaaattatagagggaaacatgaaagccaggaaataacaacagagaagaaacycctgtggagctgacaggctgtttagaactggggagtgtgtgcctgcatgtgggagtggggggtggttgcagcctgagggaggtggctatgatggtaaggatgaaggaagagaatagtgattgactctctactcttgcctctcctgcacctttgcattggccagtcatcacttgccctcacggcagaactgcagaggctcagaccactcgctggtcaggatgtccatggggatgaactcagggcagcgtagatccctgccagggtgaggagttgaattagggaacaaccatttttgagcaatccctccactctttcccctccaaatcaccagcctggcccatcccatcagtggagacagcttccttctagccacagggtggaaagtgaaaccaaggcccctgggcaggatgagaa

SEQ ID NO: 265348 - DNA, 571 bp, Homo sapiens
tgaccacacagaaacaaaaataattacaaggaaatattacaaattgaacaatttggatgaaatggacaaattcccagaaagatacagattattaaaactgactcaagaagaaataaagtctgaataggcctatagcaagtaaataatgggattagtacttaaaatctccccacaaagaaaaacccagtcacagaacactttactagtgaattctatcaaataatttaaaaacacataataccaatctttcacaarttatttcagaaaataggggaagaaagtacacttccgaactcattctgtgaggccagtattaccctgattcaagacaaagatatcatatggaaaagaaagctacagaccaacatcctttttgaacacagatgtaaaaatccttagcacaaaattagcaaataaaacccagcaacacatacatagaagcgtataccatgaccaagtggctttatcccaggaaagcaaggttgagttaacatctgaaaaccaattaagatgaatcactgtattaataaaataaaggacaaaatcatatgatctcaacagatgcagaaaa

SEQ ID NO: 265349 - DNA, 571 bp, Homo sapiens
tgaccacacagaaacaaaaataattacaaggaaatattacaaattgaacaatttggatgaaatggacaaattcccagaaagatacagattattaaaactgactcaagaagaaataaagtctgaataggcctatagcaagtaaataatgggattagtacttaaaatctccccacaaagaaaaacccagtcacagaacactttactagtgaattctatcaaataatttaaaaacacataataccaatctttcacaaattatttcagaaaataggggaagaaagtacacttccgaactcattctgtgaggccagtattaccctgattcaagacaaagatatcatatggaaaagaaagctacagaccaacatcctttttgaacacagatgtaaaaatccttagcacaaaattagcaaataaaacccagcaacacatacatagaagygtataccatgaccaagtggctttatcccaggaaagcaaggttgagttaacatctgaaaaccaattaagatgaatcactgtattaataaaataaaggacaaaatcatatgatctcaacagatgcagaaaa

SEQ ID NO: 265350 - DNA, 571 bp, Homo sapiens
tgaccacacagaaacaaaaataattacaaggaaatattacaaattgaacaatttggatgaaatggacaaattcccagaaagatacagattattaaaactgactcaagaagaaataaagtctgaataggcctatagcaagtaaataatgggattagtacttaaaatctccccacaaagaaaaacccagtcacagaacactttactagtgaattctatcaaataatttaaaaacacataataccaatctttcacaaattatttcagaaaataggggaagaaagtacacttccgaactcattctgtgaggccagtattaccctgattcaagacaaagatatcatatggaaaagaaagctacagaccaacatcctttttgaacacagatgtaaaaatccttagcacaaaattagcaaataaaacccagcaacacatacatagaagcrtataccatgaccaagtggctttatcccaggaaagcaaggttgagttaacatctgaaaaccaattaagatgaatcactgtattaataaaataaaggacaaaatcatatgatctcaacagatgcagaaaa

SEQ ID NO: 265351 - DNA, 563 bp, Homo sapiens
gtgagtctgctgtgcacctggcagtcccttcagggaagagtctgatcacagtgcccttactgagctggcctgaggttatttctaccttgggaacaatggtggccagagaggagagggacttggctggccacatgaggcctctgtatggagctgggccccggcctctcaggagcagtaagtggggcctcccaaaacggggctcccaggggcagccagcacctccgagaagctgcagggtggggagggggtatcacaggccactgtgacctttggttcacctggtagtggrgaagggagcacagcccttactcatgggactccagcatgggagctggaagagagctcagacaaggaaactggggtttgcagagggagagctgcacactctcactacccagcacttagtggagggtgtgctctgtgtggtttccattagacccgggcagcccacagagctgtaggatttggggtaaagaagaggtggcatttggagccctgtgtgcaccccggagtttctgtggaagtgcctgccaggttttagtgagatggggacattgggcttc

SEQ ID NO: 265352 - DNA, 594 bp, Homo sapiens
tcttctaacacctgccaggtaaatgacatggaactggcagggctcrgcttttgtctcagaaacaagttggaaaaacaatgattttaagggccttgtgtgagaaccccagtggactggaagatgggagacctaggttctagtcctggctctgccttactaagtggcttgaagcagccatttcacctctgtaaaatgagggtgataaaatcatgcagttaaagacaaggtaaagtgaaactagaactattatattcagagtatggtgacacagttggaaaacccttttccctagagcctcctccaccctgatgcctcctctcctctccaagtgcccaccacagcagcctgcctcacacactggcacacaggagctgtgtgggcctcaagccaacccctgctgtctccccgcatccaccgcctaccccatcttttgatttggtatctacagtaaaactgcaagccagacataattgcaggacaggatacagcctcttatcaggccagaagatgattcttatcacctcctctggcaccatgcctggcaccagcaacctttggagggagcccaggtcctcattcatgagttccccctgc

SEQ ID NO: 265353 - DNA, 565 bp, Homo sapiens
ccactaaagagttgtgtgaccttggacaggtcattccacctcctgagaccccagtctccatattcgcaaaaatggtgatccccctgtctgccctcagggaagaatgaaatgaggtgatactgggaaggcacccttaaaagtaggccaaaccacacagaaagatgtgggtttattgtctatcaaaggccttttacaggccatcatcagccccatataagtgaggtggcccaggaccaaaaagcaacaaccctgcccaggaggaaggagagaaccygcaagatgacctctctcaggggatctctggcaggtggaaaaataaagaaattccacttaacccatccccctccccagtgtgctcctaaccccatattcaccctgaccaggagactcaggttgaggaagacaaaaccaagtggcgatggtcccctctgccaaggtctcagttcagaccccacaacagggggaaacaaacaataacttccctgccaggctcatgggaagtacagaactgtgtggtgagaacgttgcatttgggaacaaggagggagggaagaaaaaacacaac

SEQ ID NO: 265354 - DNA, 569 bp, Homo sapiens
ctttgggggtatagcttgagtctgcctcttattagctgtgtgaacttgggagtgtttcttcaccactcccagctttaattttcttatctgtaaaatgggggttaaacatgtgtatgtcagagagcatcatgaatattaaatgagrtaatgtatgtaaatcctctggcacagagctggcacacggaggtacttgataatctgggcatttcattccttctaccaaataaaaactccatggagttgcaggcatcagtgagctgggaagaaaggtacttttggaggagagaggctgtctgggtgctagctctctcccaagcctcatcctctgctctttcccccaaatcacattgtatcaggaatctcagataagtacaggaagcacattttgccagcagtgaagattgctagtcattgtaggacacatggaccagataattgcccttgtttctccttccttgaagttgcaaatttcaaatgtaaagttctcagatccctcagtttggaatatgagtgtattttggggtgaaactcagtgtcattttttttcctatttttttccagttaagttt

SEQ ID NO: 265355 - DNA, 569 bp, Homo sapiens
ctttgggggtatagcttgagtctgcctcttattagctgtgtgaacttgggagtgtttcttcaccactcccagctttaattttcttatctgtaaaatgggggttaaacatgtgtatgtcagagagcatcatgaatattaaatgaggtaatgtatgtaaatcctctggcacagagctggcacacggaggtacttgataatctgggcatttcattccttctaccaaataaaaactccatggagttgcaggcatcagtgagctgggaagaaaggtacttttggaggagagaggctgtctgggtgctagctctctcccaagcctcatyctctgctctttcccccaaatcacattgtatcaggaatctcagataagtacaggaagcacattttgccagcagtgaagattgctagtcattgtaggacacatggaccagataattgcccttgtttctccttccttgaagttgcaaatttcaaatgtaaagttctcagatccctcagtttggaatatgagtgtattttggggtgaaactcagtgtcattttttttcctatttttttccagttaagttt

SEQ ID NO: 265356 - DNA, 594 bp, Homo sapiens
ttggcctttggtctaggctgttgcctcagatactctctggaagtctctttgagtttcccttctttctactttccttgaccttcccctggatcaaggctggacatctgagaagaggaaagctggtgtgagcctccaaactccagccactagagattgcacactgggtcttagcatacccgtttcctttcaaataattttcttcactaggagtcatctgtagatttgagaagggtgattgcatgaggccgttttggcattgagctgattgtaagtgaagctgcaggagccaactccctgattagaactgagatcctgaagccagatgaattaataatgaggtgatggggagaaagagagactccgtgacagctctcttgtttatgttaagagaaatgttagttgctttcacttgaaaaaaaagattatttctctaaattttaaaccaccgatgatgactagagcaattaagctmatcttcccggagtatggcccttcaggaaaatcattttcctaagcactgttcattataggttgcataggattgaaaggtaagacttctggttaatgcagattataaaatgagggaggaaagag

SEQ ID NO: 265357 - DNA, 594 bp, Homo sapiens
ttggcctttggtctaggctgttgcctcagatactctctggaagtctctttgagtttcccttctttctactttccttgaccttcccctggatcaaggctggacatctgagaagaggaaagctggtgtgagcctccaaactccagccactagagattgcacactgggtcttagcatacccgtttcctttcaaataattttcttcactaggagtcatctgtagatttgagaagggtgattgcatgaggccgttttggcattgagctgattgtaagtgaagctgcaggagccaactccctgattagaactgagatcctgaagccagatgaattaataatgaggtgatggggagaaagagagactccgtgacagctctcttgtttatgttaagagaaatgttagttgctttcacttgaaaaaaaagattatttctctaaattttaaaccaccgatgatgactagagcaattaagctcatcttcccggagtatggcccttcaggaaaatcwttttcctaagcactgttcattataggttgcataggattgaaaggtaagacttctggttaatgcagattataaaatgagggaggaaagag

SEQ ID NO: 265358 - DNA, 515 bp, Homo sapiens
ggccatatacatccagtggaagttctggaaaggaacttccactagaagtttgagaatatggaagtcacaaawaaatcacagaaataattgaagatgattttccaaaatgcaaataatcacagctgatatggtttggttgtgttcccacccaaatctcatcttcaattgtaatcctaattataatccccatgtgttggagaagggacctcatgggaggtgattagatcatgggggcagtccccccatgctgtttttgtgacagtgagtgagttcacaggcgatctgatggttttataaggggcttttcccccttcactctgcatttctccttgctgccaaccatgtgaagaaggatgtgtttgcttccccttctgccatgattgtaagtttactgaggcctccccaggcctgcagaactgtgagtcaattaaacctctttcccttataaattacccagtcttgggtatgactttattagcagcatgagaacggactaatacaacagcttacctaat

SEQ ID NO: 265359 - DNA, 559 bp, Homo sapiens
taaaccacctgaggtatgcctcctgtcagatcagctgcagcattagattctcataggagcatgaaccctattgtgaactgtgcatgtgagggatccaggttgcatgttccttatgagaatctaatgccctgtgatctgaggtgaaatagtttcatcctgaaactatcccctcccccatccacatctgtggaaaaactgtcttccgcgaaaccagtccctggtgccaaaaaggttggggactgctgaagtacaggacagcagtggtactgctaaacattttacaatgcayagaacagcccctgtagacaacacacaggatggccccagggacagcccctgtgcactgtaaaataatgaaggaattatcctacccaaagagcctatagtgctgaggttaaccatgagttagatccatactggttaacatgaagaaatttccaaaatgttaactgagaaaagcaagatgtagagcagtgcatatacaccacttttaatatgacacacacagaaaaactatgcctatgaatctgataaacagttataatttacatgaaattag

SEQ ID NO: 265360 - DNA, 432 bp, Homo sapiens
tagaactgttctcaacaaattctccagtgacctcctagttgcctgattcaattgtcatttttagtcttgaccccaaattatctctttggaaaccctgttgttgatcttgaccttcttgaaattcttctctggttttcatcatctgctctctcctgcttccctctctctggaagctccctctcaatctcctggtccttggtaacatctcgctcattttttttttttggcacaatacagtctacctagataattttaccacctccacaactccaatcccttacrttgacactgaaaacatgcagatttaaatttctagtttcctatctctttttaattaacaaatcatagttgtataaatttataggctaaaatgtgatgttttgatacatgtctacaatgtggcatgattacatcaagctagttaacttatgt

SEQ ID NO: 265361 - DNA, 480 bp, Homo sapiens
tgaaatttataatacattattattgactatagtcaccctgctgtgcagcagatctcaaaacatattcctctgatctagctgaaactttgtacccttcgatcaacaactccctttgccctccttgcccctggtaaccattgttctactcttcacttctatgagttcaactgtattagattctacatataagtgagatcatgctgtatttgtctttctatgcctggcttatttcacttaacataatgttctccagattcatccatgttgtaaaaaaaaaaaaaawgacagaatttccccctttttaaggctaaatagcattccattgtgtacaacgtatgtaaatgcatgtaatgtgtgtaaaatgtataacattttctttatagattcatccactgatggacacttaggttgcttccataccttggtaaataacgctgcaataaacaggggagtagagatatcccttcaacatattgattt

SEQ ID NO: 265362 - DNA, 602 bp, Homo sapiens
ctcggctgtttcctaaggagccgtagtttcattttgtttcttttgttttgttttagtggcagatgatatttagaaatcaagatctgggcgctagatgttctcattgctactggggtgttactgcttccagacccactcagtggacagagctagagactatatatatgtgtatgtacacgcaaacacacttayatctgtatttgcttcaatatccagctatacatattaaagacgatgagttcacactgctatctccaattccagtctaataccacagagtttattctagttttctctgtttctgtatttgcagcttcctgctgtgatggtgagagagatgattcctaatctctttactgtgttatatatttgatcagcctcccagtctacaccagtctcccctcaccatggctgctccactctgcatagacaccctcctctcttcctgctgggttctgacactgtgctgcatctgccactgctctggcctgcacagatgtctcacatcccacttgtgcatcttctgatgctctggccctctgcctggctgttctcttcactccacttgggctctgacaccccacactggacctctttcctac

SEQ ID NO: 265363 - DNA, 602 bp, Homo sapiens
ctcggctgtttcctaaggagccgtagtttcattttgtttcttttgttttgttttagtggcagatgatatttagaaatcaagatctgggcgctagatgttctcattgctactggggtgttactgcttccagacccactcagtggacagagctagagactatatatatgtgtatgtacacgcaaacacacttacatctgtatttgcttcaatatccagctatacatattaaagaygatgagttcacactgctatctccaattccagtctaataccacagagtttattctagttttctctgtttctgtatttgcagcttcctgctgtgatggtgagagagatgattcctaatctctttactgtgttatatatttgatcagcctcccagtctacaccagtctcccctcaccatggctgctccactctgcatagacaccctcctctcttcctgctgggttctgacactgtgctgcatctgccactgctctggcctgcacagatgtctcacatcccacttgtgcatcttctgatgctctggccctctgcctggctgttctcttcactccacttgggctctgacaccccacactggacctctttcctac

SEQ ID NO: 265364 - DNA, 579 bp, Homo sapiens
tagctgggtgcagtagtgcatgcctgtagtctcagctacttgggaggctgaggtggaaagatcaattgagcccaggtcttctaaggctgcagtgagctatgaccrtgccactgcactctagcccaggcaacagagtgagatcctgtctcaaaaacaaaaccaaagaaacacctgagactgggtaattcatttaaaaaaagaggtttaattggttcacagttctgcaggctgggcaagcatgctcctggcatctgcttggcttctagggaggcctcagaaacttttactcatggctggaggtaaagcagaagcagattcatcacatgatgagagtgagagcaagagagagagaggggaagggccacatacttttaaacaaccagctctcccatgaactaagagagtgagaactcactgatcaccaaggggatgatgctaagccattcgtgagagggtcacccccatgatccaattatctcacaccaggccccacctacaacactgggattcacatttcaacataagatttggaggggacatatattcaaaccacatcattttgtccctgaccccacaaat

SEQ ID NO: 265365 - DNA, 557 bp, Homo sapiens
cttgtgtgagtaaagtgtcttgttgagggagaccaccaagaatttaaagggatagccatgaagaagtgttgttcaaagattacgtggaaccatttccaacctrtgtcccccaagagaatgagcaccttataccttgcagagaggttgtacaaagtatgttcacggacacaaattcaagtttatccacttcaatatttgaaaatattttatttggaaattttatataaattcaaaatttaatacctttctgaaacttttacattttacttttcttataatgatataaagtataatgatcttttttttttttttttttttttcaccaaactctaaatttcctttagcttacccagggtatgataccaatgctatctttttttttttgtatgctacaacataaaaaatgtttggaagtttttaaaaacagctttattgaggtatcatttacacagtgtgcagttcactcaagtgtacaattcaatgattttgagtacatttattgagttgtacaaccatcgccatctagtcttagaatgttttccagtaaaacaggaagc

SEQ ID NO: 265366 - DNA, 557 bp, Homo sapiens
cttgtgtgagtaaagtgtcttgttgagggagaccaccaagaatttaaagggatagccatgaagaagtgttgttcaaagattacgtggaaccatttccaacctgtgtcccccaagagaatgagcaccttatmccttgcagagaggttgtacaaagtatgttcacggacacaaattcaagtttatccacttcaatatttgaaaatattttatttggaaattttatataaattcaaaatttaatacctttctgaaacttttacattttacttttcttataatgatataaagtataatgatcttttttttttttttttttttttcaccaaactctaaatttcctttagcttacccagggtatgataccaatgctatctttttttttttgtatgctacaacataaaaaatgtttggaagtttttaaaaacagctttattgaggtatcatttacacagtgtgcagttcactcaagtgtacaattcaatgattttgagtacatttattgagttgtacaaccatcgccatctagtcttagaatgttttccagtaaaacaggaagc

SEQ ID NO: 265367 - DNA, 587 bp, Homo sapiens
tgccctctcccaaacacaaattctcataactttcctcacctcactttctccccatcttttctcacactgttctctccagtgtcagggagtgtgaggatctgggctctgtgtggaagcatgcagttatcaatgagcaatgtttggtgggggtgaggtgtgctatgagatgtctaccatccctgtcttaaaaaaaaaacttaaactgtgataaaacacatagaacattaatctactgtcataaycatgtatgcactttagtagtgttaagtatattcacattgttatgcaatcagtctccagaactcttttcatcttgcagaactgagactccgtacccagtcaacaacacctcgccatgtctctgtctccccaggtcctggtaaccaccattctactttctgtttctgagattgaccaatctaggtatttcatataagtggaatcatacagtatttgtcttcttgtgactggcttatttcacttagcataatgtcctcaaggttcactcacgttgtggcatgtgtcagaatttctgttctttttaaggctggataatattcttttgtctgtatataccacgtttcatt

SEQ ID NO: 265368 - DNA, 485 bp, Homo sapiens
gtgagccctccctctcccttcttgagctgggacatccatcttctcctgcttcagatgtcagatctcctgggtttggggcctttagtctcagaatggaaatcacaccagtagctcctsgtcctcaggcgtttggacccacactgaattacatcactgacttttctggttctccagcttgcagatggcagatcatgggacctcttggcttccataaacatgtgaggcagctcctataatgaatctccatataaaaacttacaatcatggcagatggtgaaggggaagcaaggcatgtcttacatggcagcaggagagagagcatgaagtgggaagtgccacacacttgcaaacaattagatctcatgagaactcaccatcacaagaacagcaaaggggaagtctcccccatgatttaatcacaccccaccaggcccctcttccaacacatggggattacaatttgagaagagatttgagtggagaca

SEQ ID NO: 265369 - DNA, 485 bp, Homo sapiens
gtgagccctccctctcccttcttgagctgggacatccatcttctcctgcttcagatgtcagatctcctgggtttggggcctttagtctcagaatggaaatcacaccagtagctcctggtcctcaggcgtttggacccacactgaattacatcactgacttttctggttctccagcttgcagatggcagatcatgggacytcttggcttccataaacatgtgaggcagctcctataatgaatctccatataaaaacttacaatcatggcagatggtgaaggggaagcaaggcatgtcttacatggcagcaggagagagagcatgaagtgggaagtgccacacacttgcaaacaattagatctcatgagaactcaccatcacaagaacagcaaaggggaagtctcccccatgatttaatcacaccccaccaggcccctcttccaacacatggggattacaatttgagaagagatttgagtggagaca

SEQ ID NO: 265370 - DNA, 485 bp, Homo sapiens
gtgagccctccctctcccttcttgagctgggacatccatcttctcctgcttcagatgtcagatctcctgggtttggggcctttagtctcagaatggaaatcacaccagtagctcctggtcctcaggcgtttggacccacactgaattacatcactgacttttctggttctccagcttgcagatggcagatcatgggacctcttggcttccataaacatgtgaggcagctcctataatgaatctccatataaaaacttacaatcatggcagatggtgaaggggaagcaaggcatgtcttacatggcagcaggagagagagcatgaagtgggaagtgccacacacttgcaaacaattagatctcaygagaactcaccatcacaagaacagcaaaggggaagtctcccccatgatttaatcacaccccaccaggcccctcttccaacacatggggattacaatttgagaagagatttgagtggagaca

SEQ ID NO: 265371 - DNA, 588 bp, Homo sapiens
ctgtttcttaggtaatgctttctcatcctggtcaacctctgctggaaattctccagtatgacaatgtctatctcagcttccattccagataaattttgacagtgcagagaaagtgggtcttaacttgcactgttctgcacactgttagtgttagcaaagattgcagtgacttttggaggtgaccatgttaactccctggccattaggaaacttctgaaagcaaaacaccatcattttcacatgaactgctattaaagcaagtctcttccatctcacatttctgcaggcaatttgatgatttttatctgttcctccagtagttyctttgattaatgtatagtggccctatttgttcctaataatgcttttcaccttaaagtctattttgtcttataaaaatgttgccatattagaatatttttgctaaggtatttcttgaatatcttttgcctttattttctattttcagtattattttgttttaggggtgtctcatatatagtatatagcttgattttttaaaatcttatttgataatctgaatgtgaataggtgagcttatttgtatttgttgaaaacctaatataa

SEQ ID NO: 265372 - DNA, 644 bp, Homo sapiens
tataaaaaacattgagatctgctaaagtagctgcttcaaaaccaaattaatacttttgaaaaatactttgtattcaaccttgagttcagtagtatttcataagttgttgaaaaactcagttttcacttaatgtaagttatactagaatggaatgggcattattctgaaatagatatatcaacaaataattcgtcaagtgcatatttacgtgatagtccttttgttactgatgaaatccaattaatgccatttgaaagtatggcatagttataccaatgtataaatctgtcaattrtactttatatgtttaaggaattggaaatatatattattatttcagtttcttcacaatctcacataacattttatcataagtacctttccatgtacctacgtgatctttgtctttgaaatttttaatgcttatttaatatacagctccctataactgaacatataggctatttcccattttttatcattgtaaataataatacagagaagtattgttaggtagtcagctttgctttttgcttacaaattattattaaggtttaaattacaagtgggataactgggttgagagtttcaacatttttgtagatcttgctatgtgttaccaaaataatgtcagtatgcaattc

SEQ ID NO: 265373 - DNA, 562 bp, Homo sapiens
tcaggtgatccgcccacctgagcctaccaaagtgctgggattaaaagcgtgagccactatgcccgaccctcatttatctttttatcctcacaggcctaacacagtgccttatacactttcatttatttatttatttatttatttatttatttttgagacaaggtcttgctgtcccgtaggttggagkgcagtggcctgatcatggctcactgcagccttgacctgccaagcacaaatgatcaatcatctcacctccctacccccgcccccaaggaagctcggactggagacacatgccactacacccagctaattttatttattttttgtaggcatagggtctcactatgttgtccagattggtctcaaaactcctggactgaagaatcctcccaccttggcctcccaaagtgctgggactgcacagtcttgagccactacacctggccccttatacacattcaacaaatgtttattgaatggacatacaatttaaaaagaatgaaattcatttggccaaaataacaaacttaattgtgaagttctcaaaagcatttcattt

SEQ ID NO: 265374 - DNA, 562 bp, Homo sapiens
tcaggtgatccgcccacctgagcctaccaaagtgctgggattaaaagcgtgagccactatgcccgaccctcatttatctttttatcctcacaggcctaacacagtgccttatacactttcatttatttatttatttatttatttatttatttttgagacaaggtcttgctgtcccgtaggttggagtgcagtggcctgatcatggctcactgcagccttgacctgccaagcacaaatgatcaatcatctcacctccctacccccgcccccaaggaagctcggactggagacacatgccactacacccagctaattttatttattttttgtaggcatagggtctcactaygttgtccagattggtctcaaaactcctggactgaagaatcctcccaccttggcctcccaaagtgctgggactgcacagtcttgagccactacacctggccccttatacacattcaacaaatgtttattgaatggacatacaatttaaaaagaatgaaattcatttggccaaaataacaaacttaattgtgaagttctcaaaagcatttcattt

SEQ ID NO: 265375 - DNA, 597 bp, Homo sapiens
tggccagggtggtcttgaactcctgacctcaagtgatccacctaccttggcctcccaaagtgctggaattacaggcgtgagccaccgtgcccagctaattcatctatttttctaggttcagtggtcctcaatttgtgttacatagtcatatagatttggaaaatattacaaaatacatcccgctttaaaacagcaacttgaacattagtatagtaaatctccaagaaattctgtagtaaaaccaattttctaatctagttatctcaaacttacttgagctcagaatcttgttgcaagaaaggaaatattttctcattccttagaacacagtttgggaaatactgttctagatcattctaaatgttataaatggatcaagtgactccastccttcagaaaacttattaacagttttatcactctcctatattgaaaaacactgtcgtgcaaaattcactattttccttaggggcgttttaaagatattgtcaactgcatcccatatctccttttttcattagggcccaggaggaaaatacgcctctcaggcctcattactggaaaacgccttggttagggcagaactggtttgtttct

SEQ ID NO: 265376 - DNA, 559 bp, Homo sapiens
gcctctcaggcctcattactggaaaacgccttggttagggcagaactggtttgtttctaatcttggaattagaaacaaaatgaaactttgttattttattttatcttttcaagcaggggtctcactatgttgcccaggctggtcttgaacccctgagctcaagcgatccgctcgccacggcctcccaaagggctggaatcacaagcgttagtcaccgcgcccagacaaaacaggctgaaacttatgttgttcctttttctctttttacctagctcccaggaagcccaaggcccaaactgtgactcatctctagtacaggatcttttaaataggaacttggtattatcttttttcttgactttgtgttcttcttytcctgctctacctcaattttcccatttagtttgttttatcctatggtactacatggtcgctagaatgcttcaaatatatagtttctggaactatatattgtacatattgcatcttcttacaatttcatgttgattctgccctccctgcccaattacccaacaacgtcagtgtattcatctttgtg

SEQ ID NO: 265377 - DNA, 559 bp, Homo sapiens
gcctctcaggcctcattactggaaaacgccttggttagggcagaactggtttgtttctaatcttggaattagaaacaaaatgaaactttgttattttattttatcttttcaagcaggggtctcactatgttgcccaggctggtcttgaacccctgagctcaagcgatccgctcgccacggcctcccaaagggctggaatcacaagcgttagtcaccgcgcccagacaaaacaggctgaaacttatgttgttcctttttctctttttacctagctcccaggaagcccaaggcccaaactgtgactcatctctagtacaggatcttttaaataggaacttggtattatcttttttcttgactttgtgttcttcttctcctgctctacctcaattttcccatttagtttgttttatcctatggtactacatggtcgctagawtgcttcaaatatatagtttctggaactatatattgtacatattgcatcttcttacaatttcatgttgattctgccctccctgcccaattacccaacaacgtcagtgtattcatctttgtg

SEQ ID NO: 265378 - DNA, 589 bp, Homo sapiens
tccctgccccccgtagctcatgatgcattaggaagggagggatttccttactttgtctctgagtgatgtgtaaaccaaatgcccacgtgctttcttttggttcttaaaataatgcctatgttcattattcgtagattagtgtttgytactctgagttagctgtatgctctccgtccgtgatggttgaatgtggtcattcccccccagatgacatttgttcaggagctcttcagtttgtctccgtaataaaaacccaatgcaagcaaagcaagtggtccagaagactgataatcaaataacataaccaaattgtggtagcctggggtggctgggagatctatttagggatgttttgtgcacttccacttggggaagtggttaggaaaaaacaatatgatgtaaaagaatgaagtactcacatggacagctagttcaaagggaagcggatgggacaatttaagattgttacagtcaggaagaagatacatcacaaactctcccaaggagggttccaaccacaaagtacaggatacattttttatcggagctatgtggaagagacaccctccacctcctgtgccatgacacc

SEQ ID NO: 265379 - DNA, 676 bp, Homo sapiens
ccttctgccttggcctcccaaagtgctgggattacagatgtgagccacttcgcccagcccaccgttttatttttgtgagtatactgtgggtttatatttataaattgggtggggagaagatccccttgcttcttgagatcatttatttacctttcttgcttagaaagacaaataaatggtctgaaagtgcttatttggggggtagtttttttttttttaatrggaagtgactcaaaagtgaagtctcagttcaagaccttttttttttttaagtcttactcaaaaggaagtgagtatgaggtgaactgcattaacctaaagtgctgcagagataaacttaaagcaggaagcaacataccatgaatgtactgcaagggaacacatttgtgtcatgtgaagagacatgacaaaaacagccctccttaaattatttgtggcaatagtgatcacattcattttaattttgccggaatatttcaagacaccgaaaggtgagtatataattgtaatctagctttcctttcttaatttaaaaaaattagtgtcagctagtggttacagaaaagatcctctttttggacacatgctgcataggctgaagttctagatctgaaaaactaataaaacaagattgcaattttagttgactgttatatagtacagtaacctaattcat

SEQ ID NO: 265380 - DNA, 390 bp, Homo sapiens
tatttgagtttatatggaaggtgaaaggaacacctgtaaggaggtgggaggagtaagacaagaaagggcaggtggcgggtaaagggtgtcttgacaagccagctggacctgtgggtgaacagcgcttaaacyctctgggattctaggaaagtcagcagtcattagttgaaggcttctctggaggatgttaattcttcagcacctctggtctgctgtgcacgcaaggaaccaggctctgacagcagataaaaccctcaggcaaagaaatgtaagtgctggccacaaggagtcaggctagggtatgccgaagagaagattaggagggggcttaggtggagcatcaacggcacctactgcagtatatttaactgaagagcccacaccagcttc

SEQ ID NO: 265381 - DNA, 390 bp, Homo sapiens
tatttgagtttatatggaaggtgaaaggaacacctgtaaggaggtgggaggagtaagacaagaaagggcaggtggcgggtaaagggtgtcttgacaagccagctggacctgtgggtgaacagcgcttaaaccctctgggattctaggaaagtcagcagtcattagttgaaggcttctctggaggatgttaattcttcagcacctctggtctgctgtgcacgcaaggaaccaggctctgacagcagataaaaccctcaggcaaagaaatgtaagtgctggccacaaggagtcaggctagggtatgccgaagagaagattaggagggggcttaggtggagcatcaacrgcacctactgcagtatatttaactgaagagcccacaccagcttc

SEQ ID NO: 265382 - DNA, 450 bp, Homo sapiens
ctggccacaaggagtcaggctagggtatgccgaagagaagattaggagggggcttaggtggagcatcaacggcacctactgcagtatatttaactgawgagcccacaccagcttctgatgcctagaaaaagttcctctttttttttttttttttttttgacagagtcttgctttgtcacacaggctagagtgcagtggagcaatctcagctcactgcaacctctacctcccaagttcaagccattctcatgcctcagcctcccgagtagctaagattacaggtgcgcaccacaattcccagctaatttttgtatttttagtagagctagatttttgctatgttggccaggctggtgccaaactcctggccccaagtgatccacccgccttgtcctcccagagtgctgggattataggtatgagccactgtgcccagttgatgcttaaaaa

SEQ ID NO: 265383 - DNA, 450 bp, Homo sapiens
ctggccacaaggagtcaggctagggtatgccgaagagaagattaggagggggcttaggtggagcatcaacggcacctactgcagtatatttaactgaagagcccacaccagcttctgatgcctagaaaaagttcctctttttttttttttttttttttgacagagtcttgctttgtcacacaggctagagtgcagtggagcaatctcagctcactgcaacctctacctcccawgttcaagccattctcatgcctcagcctcccgagtagctaagattacaggtgcgcaccacaattcccagctaatttttgtatttttagtagagctagatttttgctatgttggccaggctggtgccaaactcctggccccaagtgatccacccgccttgtcctcccagagtgctgggattataggtatgagccactgtgcccagttgatgcttaaaaa

SEQ ID NO: 265384 - DNA, 554 bp, Homo sapiens
cctctgtcttttcttggtaaagaatgttgttgttggggaaggactgtccaaataaatggtgaagctatgctttcaggtcagcaacatgctgcagagtccctctgagtggtccagcaaatagcacattctgtgagcatcagggtgttggcagagttgggggtcattgtatcaaggctgggctctgaacctgaactcatgagccctgccttctcaagctcatcaggatttgctttgttagttatttgggagattacagtttgctttggawgttgtaaaatatctttagaatgcattggtttctctaagtccaatttatttctgcaacatattttatctgagactacaccagggagaaacataaattaaaagctactcaatttgtgccattagcctgaaagaataatagaagagacaacctcttctttgtcttggaaaataagttagcatacttgtttgactactaaaggtgggatttccagatgtgtaatttagtttagataggttgaaataaaaggtacattttcctctgaaataaagtaaaagaggctgtagtg

SEQ ID NO: 265385 - DNA, 554 bp, Homo sapiens
cctctgtcttttcttggtaaagaatgttgttgttggggaaggactgtccaaataaatggtgaagctatgctttcaggtcagcaacatgctgcagagtccctctgagtggtccagcaaatagcacattctgtgagcatcagggtgttggcagagttgggggtcattgtatcaaggctgggctctgaacctgaactcatgagccctgccttctcaagctcatcaggatttgctttgttagttatttgggagattacagtttgctttggaagttgtaaaatatctttagaatgcattggtttctctaagtccaatttatttctgcaacatattttatctgagactacaccagggagaaacataaattaaaagctactcaatttgtgccattagcctgaaagaataatagaagagacaacctcttctttgtcttggaaaataagttagcatacttgtttgactactaaaggtgggatttccagatgtgtaayttagtttagataggttgaaataaaaggtacattttcctctgaaataaagtaaaagaggctgtagtg

SEQ ID NO: 265386 - DNA, 551 bp, Homo sapiens
atgactcattgacattccagacactgaaggagggagagcaagtagcttgaaaagcatgtttaaggatatagtccacaaaaattttcccaatcttgctagagaggtcaaccacatgcaaatttgggaaattcagagaacacctttgtgtcactacacaggacaaaatgctgtggagaaaacrgaatacatatacactgttggtatgaagaaatttgttcagccactgtggaaagtagtgtggatatttctcaaagaccttgaaatgaaactaccattcaacccagtagttccactatcaggtatatactgaaattaaaataaatatttctacctgaaagacacatgcaatagtgatatggtttggctctgtgtccccacccaaatctcatcttgaatgtaatccccataatctttatgtgtgaaggccaggacctgataggaggtgattggatcatggtggtggtttaccccatgctgttcttgtgatagtgagtgggttctcaggagatctgacggttttctaggaggctcttctccctttgctcctttgc

SEQ ID NO: 265387 - DNA, 612 bp, Homo sapiens
gttttaaatggaaataattggttatttgggttaaataaattggcctaattttatttgttaaaatggattcactcagggttttataattatttaattattattccacaaaatcaatagatttccaattctgtaaagaaaagtcaacatcagcttgaggattattactcaggatcatcacttactgctctgaatatctttttctacagttcaatcaaccagactaggaatccttgmctcttcaaagataacattaaatcttactctagtccatagatttgacttttctagtttgtcttcatattgtatgattttgagtttttatcaataaacttaaatttgtcttggcttaggtgggttaggtgcccttgggtgtcttgagtataggagccccacaaaggcaattaagtggtagccacttgacctttaccacggtcagttcagatataccaaactgctcagtgataatactgggctgaatataagctcctattctaaaatcatggaagacatgggaaaataatcaaattagtaagaaaaagcagaagccattaactacagaattaattctctcaagaacttcagataattagattactgattataaaacaattc

SEQ ID NO: 265388 - DNA, 607 bp, Homo sapiens
tttacagtgcaataacctcattcaacatcgttaaccttagcacatgcagtccacttcagtgatttatggaataactttgaaaatcaacatgattcagcccctttcaaatcctgtggattgattattgcacaattacagcaagtacattcaataactgtgttataaattaaattttcctttaaacagatgatttactgtgatagttcaacagtgctgaatttttgttacaataattctgtattgaacagttaaatgctaccaagaaataagatgaaaatgtgtgaaaatgccaattatagaaggatattttatagctttattaaatatggcctatacttyttcttgatttccaaaatgatttatagttctgtgattttgtccctcataaaagaggcacaattttgcatcattttgcttttgattttatgcttacctttcaccctcttaactccaaagccgtgaaaggtctttagactcctcattgagcaaggaaggactcaggctaggacctagaatacagcagggaacaagtgaagctgtattacttgttgatcgattcacacatttacaagacctcacaaaaatgcacacaaataaatgtgatcat

SEQ ID NO: 265389 - DNA, 585 bp, Homo sapiens
ttatagctttattaaatatggcctatacttcttcttgatttccaaaatgatttatagttctgtgattttgtycctcataaaagaggcacaattttgcatcattttgcttttgattttatgcttacctttcaccctcttaactccaaagccgtgaaaggtctttagactcctcattgagcaaggaaggactcaggctaggacctagaatacagcagggaacaagtgaagctgtattacttgttgatcgattcacacatttacaagacctcacaaaaatgcacacaaataaatgtgatcatgtctaagtaagagtagctttaagggacctggctaaatgttattacttacttggtacatttagaacttactataaaaatcacagaaatttaagctgtttctccttctttggaagagtacatgtgttatagacttaggtaatctaaaattggcacaggaaaactctatgtcaaagtattgcaggcatcataaccaaaagaactaatgtttatttattgttttcttaatcccctcataattctttgtataatattgtcttaattcaaacagaggcttgggattcagacc

SEQ ID NO: 265390 - DNA, 571 bp, Homo sapiens
tcagttggcatttcatcaaaatgttaaacatagttgccatatgacccagaaattccactcttaggtattccacttccaaaataaaaacttaggtccacatgaaaacatggacatgaatgtttatatgagcattattcataatagccaaacagtggaaaaaaacaaatttccgtcaactgatgaawgaataagcaaaatgtggtacagtaatgtggattatacttggcaacagaaaggaatagaatattgatacatgttacaacatgtataaaccttgaaagcaatatgctaaatgataaaagccaagcacaaaagttcacatcttatatgatgtccaaatatccagaataggcaaatccataaatacaggaagagaattagtgtattcaggtgcttggggttaggggagaattcggaatagctgctaataagtacagaggttcttttggtgatgaagaaagtgctgtaaaattagatagtgatgatggttgcacagctctctgaataaactagaaacaataattgtgcactttaaaaaggtgagtattataacagtaaattatactgcaac

SEQ ID NO: 265391 - DNA, 498 bp, Homo sapiens
atccagacataatattttattaagtatgaaatttcatagtcagaaatttgtgttgcacgatgtaatttgtttaacmttcttatattttaactttctttggtatcttattttttacattagcaaataatgtaagcttgaaaatttaaagtatttttgcctcttccaagtaaaaactaattatcctaggattctacatccattttcgttcttcttttcatatttattctgagggtaatctcattagaggtagaaataatatttaataacactgctatggggggcagtagaaagcaaataattcaggctctgctctttctgcataacctgaacccctctgttttgtattggcaggtaatgtgaatgccttcacttggatgtgcctcctattactgaagaacccctcatgatgtgtccttgtgtcattcagcacttccacagacctctttggaagtctcagctgctttccccgcaccacactaggggtgctggttttaaaac

SEQ ID NO: 265392 - DNA, 498 bp, Homo sapiens
atccagacataatattttattaagtatgaaatttcatagtcagaaatttgtgttgcacgatgtaatttgtttaaccttcttatattttaactttctttggtatcttattttttacattagcaaataatgtaagcttgaaaatttaaagtatttttgcctcttccaagtaaaaactaattatcctaggattctacatccattttcgttcttcttttcatatttattctgagggtaatctcattagaggtagaaataatatttaataacactgctatggggggcagtagaaagcaaataattcaggctctgctcwttctgcataacctgaacccctctgttttgtattggcaggtaatgtgaatgccttcacttggatgtgcctcctattactgaagaacccctcatgatgtgtccttgtgtcattcagcacttccacagacctctttggaagtctcagctgctttccccgcaccacactaggggtgctggttttaaaac

SEQ ID NO: 265393 - DNA, 561 bp, Homo sapiens
cagacataatattttattaagtatgaaatttcatagtcagaaatttgtgttgcacgatgtaatttgtttaaccttcttatattttaactttctttggtatcttattttttacattagcaaataatgtaagcttgaaaatttaaagtatttttgcctcttccaagtaaaaactaattatcctaggattctacatccattttcgttcttcttttcatatttattctgagggtaatctcattagaggtagaaataatatttaataacactgctatggggggcagtagaaagcaaataattcaggctctgctctttctgcataacctgaacccctctgttttgyattggcaggtaatgtgaatgccttcacttggatgtgcctcctattactgaagaacccctcatgatgtgtccttgtgtcattcagcacttccacagacctctttggaagtctcagctgctttccccgcaccacactaggggtgctggttttaaaaccaagatttaaaacataacaaaatacacaacagctttggtttttgggccctcccctaggccagttgg

SEQ ID NO: 265394 - DNA, 498 bp, Homo sapiens
atccagacataatattttattaagtatgaaatttcatagtcagaaatttgtgttgcacgatgtaatttgtttaaccttcttatattttaactttctttggtatcttattttttacattagcaaataatgtaagcttgaaaatttaaagtatttttgcctcttccaagtaaaaactaattatcctaggattctacatccattttcgttcttcttttcatatttattctgagggtaatctcattagaggtagaaataatatttaataacactgctatggggggcagtagaaagcaaataattcaggctctgctctttctgcataacctgaacccctctgttttgtattggcaggtaatgtgaatgccttcacttggatgtgcctcctattactgaagaacccctcatgmtgtgtccttgtgtcattcagcacttccacagacctctttggaagtctcagctgctttccccgcaccacactaggggtgctggttttaaaac

SEQ ID NO: 265395 - DNA, 621 bp, Homo sapiens
taattgagaaataagaggtacccaaaaagggatcttgatccatatctcacaatgtgtgcaaaaacaaactcaaacgagtcataaatctaagtgaaaaataaaagattataaaacttttagaagaaaatctagaaaaaagactctaggtcagacaaaaaaaaattattagtagaatctcccccagatttaggcctcataacaattaaaaacttcagctctgtgaaaacactgttagaaaaaaaagaaaaaagtaagaaaacactgtcagaatgagaagacaagccacttactggagaaaatattttgcaaatactgtttttgacaaaaacttgtatacagattatgtaagaactttcaaaactcaacaataagaaaagaagcaacytgatgtttaaaaataagcaaaagattttggcctgattcatccaagatgacatatggataggaataaggttatgaaaatatgcttatttttaacagattcatcaaagaagacatatggatggcaataaaagtatgaaaatatgctcaacatatttattaattagctcaaaacattaaaaccactgcatagttagtagaataaaaaataaattggcaatactaagaactgacaagaat

SEQ ID NO: 265396 - DNA, 621 bp, Homo sapiens
taattgagaaataagaggtacccaaaaagggatcttgatccatatctcacaatgtgtgcaaaaacaaactcaaacgagtcataaatctaagtgaaaaataaaagattataaaacttttagaagaaaatctagaaaaaagactctaggtcagacaaaaaaaaattattagtagaatctcccccagatttaggcctcataacaattaaaaacttcagctctgtgaaaacactgttagaaaaaaaagaaaaaagtaagaaaacactgtcagaatgagaagacaagccacttactggagaaaatattttgcaaatactgtttttgacaaaaacttgtatacagattatgtaagaactttcaaaactcaacaataagaaaagaagcaacctgatgtttaaaaataagcaaaagattttggcytgattcatccaagatgacatatggataggaataaggttatgaaaatatgcttatttttaacagattcatcaaagaagacatatggatggcaataaaagtatgaaaatatgctcaacatatttattaattagctcaaaacattaaaaccactgcatagttagtagaataaaaaataaattggcaatactaagaactgacaagaat

SEQ ID NO: 265397 - DNA, 555 bp, Homo sapiens
tcagacaagacccacgaagatccctgccagtgtatacaagtttcctttgagaagagcaccyggtcacaggtcacacacataggcatcgggccacgtgcttggataacaagtatccagtgaaaggcatactggaagcatccatgaccaaatccctggagccccatcaaggcagggatagagatcatagccactctccagagacagagaccccaacatcaaattagaggaaaatacagttgttatagttattacaccatacgttttcattgtcatggcttataacataaacagactttatgtttaccatgtaccataggtagaaactccaagatgactaacatgttagaatccaaaaattcatgatagatttctccagaaagttctccaagaatggggtttagatgctgtttccattgtgttcaaggcatagctgtttgtaattacttatattgctgagcatgaactttacaatgatctattgatatacagatattccatcacagtagaatcattaatgataaaatatatggaaagcaataaatgaagctgctcatt

SEQ ID NO: 265398 - DNA, 442 bp, Homo sapiens
tgtaataagatgaacctaacagaaaatggcagtgcaacatgttgctccaaaagactcaatttgagtaygcctttaaagtaagttgtctttctaaccatcccatcaagtgttatgatatcaaaccctagtgaacaacttgcccttgatccaatgatcctcctaggctcttgtttctttgggctacaaaaattcctaccatgttcttcactgagaagctactgtcatgctcagtacacaattattaccagtttgatggttttgtttacctaaagcagaagagaaagctcttgctcagttggcttttggagacagtcatctgagctatgactcctgtctttacatatatattcccactactggtttagaccactcataagaatttcttcccaaatcataattcctcttttaatatttttcttatattccactctacaatgacaga

SEQ ID NO: 265399 - DNA, 596 bp, Homo sapiens
tgtatgttgagggttataggaagatgcccaccagtctggatgaggacttcaaggtcactaagggatcgcaacctggggcacagccactccagacaccttcccacccacactgcagaccaagtgtactgttgttggtaccagcaagagaagcttcttcctcctgcaaatttcctccagcgccttctcctaagaaagcttaatattgttctcactgtaaaggagaaacactaaaagtatgtctgtccttttttacagagwaagggtatgaaggtatttctggagctgaaagtcaacaaattgagaactggcacacacaccccaaaatatttctgtgctagatacatcttcctacagatactttaaaaaggtaattttttattactatttctttcaaaatttgtgagcgctttgtattaaaaaaaaaaacactctctaattggataactttgtggacgacaacgctgtgctttcagcttttacatctttaaaatgggtttttgtgaagattaaaccaatgatatttgtaaggtacgtagtgcagagtctaaacccaaacaagcattgggcgttaagtgttaagtgttaaaccagattgc

SEQ ID NO: 265400 - DNA, 596 bp, Homo sapiens
tgtatgttgagggttataggaagatgcccaccagtctggatgaggacttcaaggtcactaagggatcgcaacctggggcacagccactccagacaccttcccacccacactgcagaccaagtgtactgttgttggtaccagcaagagaagcttcttcctcctgcaaatttcctccagcgccttctcctaagaaagcttaatattgttctcactgtaaaggagaaacactaaaagtatgtctgtccttttttacagagtaagggtatgaaggtatttctggagctgaaagtcaacaaattgagaactggcacacacaccccaaaatatttctgtgctagatacatcttcctacagatactttaaaaaggtaattttttattactatttctttcaaaatttgtgagcgctttgtattaaaaaaaaaaacactctctaattggataactttgtggacgacaacgctgtgctttcagcttttacatctttaaaatgggttwttgtgaagattaaaccaatgatatttgtaaggtacgtagtgcagagtctaaacccaaacaagcattgggcgttaagtgttaagtgttaaaccagattgc

SEQ ID NO: 265401 - DNA, 257 bp, Homo sapiens
atttttcaatatctttttttaccctcttttcctttgaaatagttcaagcctaattaaaaaaaaattgaggtwtgcattttaaaatgcagaaatgtatctagcttcatccttctaaaccaaaactctttaagaatttgaggttaataaatcttagtattgttcatttgccaattaaagtgcaagagtaactgccaaagagtattaaggtatgaaaagttgaaaacttcagttcttaacaccttttcatttgtaaaaga

SEQ ID NO: 265402 - DNA, 557 bp, Homo sapiens
atttataaagttagtgacagtttcctccaggaaaatctttttctgctctggacagctctagctcctgtatttcagatttttttttttttttttttttttttaaagacagattctcggtctgttgcctagggtggagtgcagtggcatgatctagggtcaccgaaacaacaacctcccgggttcaagcaattctcctgcctcagcctccggagtagctgggactacaagcacacgatgacacgaccggctaattttttgtgttttagtaggaatggggtttcaccgtgttgctcaggctggtttggaactcctgagctcaggcaatccaccagcttcggccttccaaartgcgaggattacaggtgtgagccaccatgcccagcccatttgagatttttttttttttttaaggcatgaggtcttatgaatgtactgaatattacagtgcctgtaattcttaattcagactttgacacccactttgatctcttgcctgctagtttactttgtccagcaagacagaggtgatagcagctctaaagataaacttggcccgg

SEQ ID NO: 265403 - DNA, 463 bp, Homo sapiens
aaagaatgaagttatttgggtatcacagaaactaatgagaaggcagattctggttcaagagaaaatgatttatcatttgatatcaatatttcagaatggatactctatctttgatggaayaattaaatgagattcgatgtcatgacaaaatgtgttcccaacttatttatgttaaaataattgctagaaaattttaagttgaaaacttgctgcattgatgcaagtgatctagccaaattattcaaggtttctctgttatcttcttttgtttaatttcttttttggagagcagacttcaaaaggtaatggattataaaggtaattataattacagaataacaatgtcaattatatctttcaactggaagacactctatttcccttctatttgttaaattttacaaaagaacaaacttgtatagctcaaacaatacttgaatgaacagtaattgaatttcatgcc

SEQ ID NO: 265404 - DNA, 407 bp, Homo sapiens
aatacttgaatgaacagtaattgaatttcatgccccatcagccagtcaaatttaagaatattccccattattgtcacagaggacaaagcatggatttcattatattcaacacagaacaatgtcctttggagctgctgaccttctgagctttgagagactgaaaaaggacaaatgccttttacaataagtaaatcttytgatgtttcatctaacaaaagctgctggtagaattaaatccgccccccacccccgccagcattcatccttcccacacataacactaaaaactaaaggtaaatacctgtatatttccagcattaacagtaatatgcaggtaaaacagtaatgctttaactcaactcctgtaccttccagatatatatgtgtgggcatgtgtgggtgtgtgt

SEQ ID NO: 265405 - DNA, 545 bp, Homo sapiens
cccttaatatgtgctatcttgatatgtgctgaaattgggagggtctccaacggcctaaacacaagttctcctcctgactctgctcccaagaatgaggtcccctaactaccctccttatcaaaggcaccagggcagttcctgctttattccagagtagcagatttcagttctctgccagcccatggaattatttaaacaagccaattacatcctcctgggaaaccagggatcaccccactctttgaatacctcaaagtctgcttcccagagccyttcgttgtgctgtctgtacccaaatgtaaccccaatgtggcctgtatagcttgccatgtcctcctccccaggctgtgaacatctgtaactaataaactgctgttggcctcatctgaccggtgttggatgtcatgtgttggataatccccagaaccctatggcaggaatccttacttcaacagtggcgtaaataagaggcaattgaaacatcatatgctgaacgactctctaatgattccacattacttaggaaggtagtaaagtcagggaat

SEQ ID NO: 265406 - DNA, 502 bp, Homo sapiens
caagtgaacaactttgtcatgagaaaaataatcataacttactctactcgtttcacttattcaagcggcagttgatagtgtttcatatgcaatttgtcttttggaaatgatcttcatatgggtaaaagcacatttttttcatccctgagaattaacaccaaacaccctatatatgtcatattttagaaagatattaatgcataccatccaggctctcactgaagaactttaccagaaataaactttaattaggaaatcaaaccagtgcattcctacactgagaaagtatcagaatccctaaagaggtgtttttgtttttgttttttttttgaggtgcagwtatctgcgctcagactcacacttaatagatcagaataaggagtattatcctcatatctgtgcctatgaaaagaaccccaggtgaatcaaatgaccagtcaggtttgggcatcttgagtccaaggcacaacatattcacctaatcatctaagtctgcgatttc

SEQ ID NO: 265407 - DNA, 625 bp, Homo sapiens
aattttttgtctcttatgtatcctaagcacaataagaacgtacctaacatttaacagatggtaagtatttaaacaaactgtgtgtgtgtacgtgtgtataagctggattacctttcatcttacctttcatcttacatagcatagaataaaaattaaaagttcttattcataacatttttataacagtttcaatattcctttcttattatccttaggaatagaattaagttgatgtttacatgggatatycaagttcacattgaagtatcataaatccttcccaagcctttcaatttcatcaataagatagtcaacatctttctgtcttgaggcaggattagaaaaaaaccattcgcaaaatatttactttgtctccacatggctggtagcttatcatgattgtgccttccatcatcatctgtgctttaatctttggagcaatctgtgtgtaagtgtaaatattattataaagaagttttacaagtaactattcttccttattccagatggctacataactatcattagcttcaagtaaattgtaggcaatttaagaccatcagggataatttttaagaagtagcttagtacaaaaaagcagcaaattctatattcatattgcagc

SEQ ID NO: 265408 - DNA, 625 bp, Homo sapiens
aattttttgtctcttatgtatcctaagcacaataagaacgtacctaacatttaacagatggtaagtatttaaacaaactgtgtgtgtgtacgtgtgtataagctggattacctttcatcttacctttcatcttacatagcatagaataaaaattaaaagttcttattcataacatttttataacagtttcaatattcctttcttattatccttaggaatagaattaagttgatgtttacatgggatatccaagttcacattgaagtatcataaatccttcccaagcctttcaatttcatcaataagatagtcaacatctttctgtcttgaggcaggattagaaaaaaaccattcgcaaaatatttactttgtctccacatggctggtagcttatcatgattgtgccttccatcatcatctgtgctttaatctttggagcaatctgtgtgtaagtgtaaatattattataaagaagttttacaagtaamtattcttccttattccagatggctacataactatcattagcttcaagtaaattgtaggcaatttaagaccatcagggataatttttaagaagtagcttagtacaaaaaagcagcaaattctatattcatattgcagc

SEQ ID NO: 265409 - DNA, 388 bp, Homo sapiens
tttttaattttcacaaaccactgtttcatgagttgtgtaattatctaaacaatgttttgaaagcatttgaaacatctaaaagacaaaggaatcctttaatatgtgaaataacaacacaaactgtgaattttattaccactaaaaaaattcctaccttgccttttttargctttagtttagctaacaatcaccatactccttaaacgcttcatgtttccgatacaactggcaggggccagcattgtgggcagtaaaagtatttaccaagactgttgtgtgtaaagaaaggcaggtttattagagaaagtaccaaaatatgttgtgagagtgcaatgggcagcacagtagagaaggggctgtccgcaaggagacaggggctggagggaag

SEQ ID NO: 265410 - DNA, 618 bp, Homo sapiens
gactgacaggttaatacacacaaagccttctgcatcctctcctctgtgcagattcctcttctctggaatcctatcttgtagattccagctgcttcagaaacmctgcaatctgatttctagaagctcagagagagcattctgtttcagctctagctccttatactagagtcaagaaattgcccacacagagagctatacattgaccctgggattcacttggtgagtttctctttaataacgtataacagtcttgctttgcctattgtccaaagcctgtaaactagtacctcatacaacttgcctgtttttttttctttaaattatggcaagagggctaatccaacaccacttattccatcattgtaaaaataaaagtttccttggaactcttgtgatttttataaacatttcatagtaagttggaaatggcaaaacaagttccatcttaaatggggactcaatttgtagattcttaatttaaaataaaagcacaagaaggaacaaaattattgaaactcatcaggacaaaaattaagtatcagataagccttagactctttagtttcataagagatgttgaggaaaatgaattaacccttttatttaaaacttactata

SEQ ID NO: 265411 - DNA, 652 bp, Homo sapiens
gcaaaccattatggcacatgtataactatgtaagaaacctgcacgttctgcacatgtatcccagaacttaacataaaattaaaattaaaacaaaccagcctgtgatatttataaatgtatgttaacaaaaaactccagcgcatgaaagctcctagcagctttattcataacagctccaagctggaaacaacctagatgtctttcaagggagggatggttaaacaaacggtggtgcatccctacagtgggaatacaactcagcaatgaacagtggtgggctattcatacacacagccactggatgaatctccaggaaactatgctgagtgaaaaaacttagttccaaaaggtgtatatgataccatttataaagcatccttgaaacaatgatattaaataaatggaaagtacattaatggttgccaagtgttgaggcaaaaatgatgcagtgggagaagggaagtaggtgtggctrtgtaatagctataggaagaaacctcgtggtaatgaaaatgctctgtaaatggactgtattaatgtcaatatcctggttgatatattgcgctatagttatgcaagatgttaccactgtggaaaaagtaagtgaaagaaatatggggcctttctgtagtatttttaacaagtgtatgta

SEQ ID NO: 265412 - DNA, 544 bp, Homo sapiens
tatttatttattttgagatggagttttgctcttgttgcctargctggagtgtagtggtgcagtctcaggtcactggaacctctgccttccgatttcaaatgattctcctgcttcagcctcccgagtagctgggattacaggtgcacgccaccatgcccggctaattgtatttttagtagagacagggtgtcaccatgttggccaggatggtctcgatcgcttgacctcatgatcacccacctcggcctcccaaagtgctgggattacaggcatgagccaccgcgcctggtcaaaaaatttatatagcatttattctgtaaccatatattctataaatataatagagatatcaatatttctgcatccaaattatgcttaccagcacatctctcatactgagattataccaaaaaaattcaatatctgctcatgtgctctaatatttagtttaaaaatacaatcttctaccacgaggaaaagataaaacaaaggacgcatctgggataacctgagttgtcagtgcattttattgcactaggtcatc

SEQ ID NO: 265413 - DNA, 569 bp, Homo sapiens
atatttgcccattcttatggtgctaataaaaacatacccaggactgggtaatttataaaggaaagaggtttaactgactcacagttcagcatggcaggggaggcccatgaaacgtacaatcatggyggaaggggaagcaaatatgtccttcttcacatggcggtagcaaggagaagtgccaagtgaaggggggaaaagccccttaggaaaccatcagatctcgtgagagctcactatcatgagaacagcatgggggtaaccacccccatgattcagttacctcctactgggtcctttccatgacacatggggattatgggagctacaattcaagatgagatttgggtggggaaacagccaaaccatatcaaaaggtaagcccagggaaatttgccacaatattaggtgtggagtgtgagaaaaagaggagcgtcctgggtgagaacaactgcaatcttttgggcctcaggaacttgaaaatagaatttacatgttttgagattgagaagactggtagaaacaagttgcatatagaaacattaggatttcagttttgaacatgtcattta

SEQ ID NO: 265414 - DNA, 569 bp, Homo sapiens
atatttgcccattcttatggtgctaataaaaacatacccaggactgggtaatttataaaggaaagaggtttaactgactcacagttcagcatggcaggggaggcccatgaaacgtacaatcatggtggaaggggaagcaaatatgtccttcttcacatggcggtagcaaggagaagtgccaagtgaaggggggaaaagccccttaggaaaccatcagatctcgtgagagctcactatcatgagaacagcatgggggtaaccacccccatgattcagttacctcctactgggtcctttccatgacacatggggattatgggagctacaattcaagatgagatttgggtggggaaacagccaaaccatatcaaaaggtaagcccagggaaatttgccacaatattaggtgtggagtgtgagaaaaagaggagcrtcctgggtgagaacaactgcaatcttttgggcctcaggaacttgaaaatagaatttacatgttttgagattgagaagactggtagaaacaagttgcatatagaaacattaggatttcagttttgaacatgtcattta

SEQ ID NO: 265415 - DNA, 552 bp, Homo sapiens
ttgacatcattttgtgtagtggagaagtttccaccaaattgttgattggaagtgattgatttgctatctaatcaaatgctgaaatgaaaatatcaggagaagaacctaatgaaattttataaattccttttaagtgatgagtgtgccsaattaaaatcacatgctagtggagtgatatcagtatgcttttcacacataagtatgtgtgaaaagacattttcaaagatgaaatacacaaaatctccttatatatcactctatgatgaacatttacaattgattgtggagataggaaacataaaggagctcaactgatcaaaatgttatgcctccccaaaataatttcattcttcacagtggtagaccttattacaaaacatcacactcaattatgattatcatattttaaattttgtcaattaaaatttgtagaaatttgcttcctctcgttatgtaagtacttatataatatccttggtttttacctcttagtctataatgatacaaaatatttcctctttggctctttacaaaaatgtttgctgatcccat

SEQ ID NO: 265416 - DNA, 552 bp, Homo sapiens
ttgacatcattttgtgtagtggagaagtttccaccaaattgttgattggaagtgattgatttgctatctaatcaaatgctgaaatgaaaatatcaggagaagaacctaatgaaattttataaattccttttaagtgatgagtgtgccgaattaaaatcacatgctagtggagtgatatcagtatgcttttcacacataagtatgygtgaaaagacattttcaaagatgaaatacacaaaatctccttatatatcactctatgatgaacatttacaattgattgtggagataggaaacataaaggagctcaactgatcaaaatgttatgcctccccaaaataatttcattcttcacagtggtagaccttattacaaaacatcacactcaattatgattatcatattttaaattttgtcaattaaaatttgtagaaatttgcttcctctcgttatgtaagtacttatataatatccttggtttttacctcttagtctataatgatacaaaatatttcctctttggctctttacaaaaatgtttgctgatcccat

SEQ ID NO: 265417 - DNA, 636 bp, Homo sapiens
gcccttctggtttttagattgtgtctatgaagttagcttttttttttttgagtttgcctgttcaaaatgacagcagtaacaatttatcaatgaatatgtgtgtatatatatgtacttaaatatgattaagtacagatatatcatgcatgacctcattggawcatgaagccagacttaattggatatttgtcagacaacaattatgtagctacagactgtgaagcaacaaattgaatataatgaattatttcagggaatcaagtcccaaaattttcacttatataaatgcttcatataatcaattattttaaaaaaccaataacaaataactcatgtgtaagaatgaattatttgtaatagcaaaatgtcccaaaacacagaaaataagtaatttccatgaagttgccagcaactgtaatagaacacatttcttaagtcacagtaaaattgtcttctttaattcatgaacttttttcttccattagaaaagaaatgtagttatacctgctcagtgaaaaagaacctgtgaaataacaagaatttcttactttcagtggtagcattaaggttagtgaagtgtagaatttgagtacatgaagcattgggctgtgatgctaaaattttttaaatctgatt

SEQ ID NO: 265418 - DNA, 613 bp, Homo sapiens
aattccactttaatttttcccaaagacagtgacatataattcttcaaaaatttaagaagaaaattaagtattcaaattgtaataacaaactgtatcctttaacctagacttgagaacagattatttgctcttataattttcttttcttttcaccatgtaatacatctaattaatcgaagtcatttttccatttaattattctgttacagatgccatctcaatttcatttaatgttattcgcagtaatcaggaaaatgttccatcacaacttttaaaattatgtctgagttaaatcctgactctcataaatcaatttgtttgtgataagagtctacggaactcagaatagataacaacgtttccttcaggaccatcttcagcctgttcccaccttactcatatcctttaatggtggagaccaggatagactccaaagactttaatattcttggttctgacgtcmctgggagccttatttttccactggtaaattagactgactatgatccactttatatagttaataataatgtcactgtcaactgttttttctgtatatcagccacaaagaaggaatgtccatttggagaggcaatcaggttttgtccagttg

SEQ ID NO: 265419 - DNA, 544 bp, Homo sapiens
ttcatattgtaaatagatttcactggactgtyaatcacaaatggggtgttctaatttttcatgctatttagcagagagcggtgagaacgttcccgtgtaactattagtcatttgtttaattcaggaataactatgaatttttaagttaataaggactctacttagctttgatctcttgagcttttatcttgagacctaattataattattattacattagtaagaagccacttctgttattcatagatcatagtgaaatatgtgctttatttaaaatatcactcttatcaggcagataaagggattttgttacattttatttcataatcgctcagactaagaagagaccactctttatataaaagcaaagaatgttgatgaacagcaaaggttttacttatttgttttagtcctaaattaatagactcagaatatcacatattttatgtgtgcattttctatcattttctgttgcatttagtctttatatatacaaaattatgcataaaataaaaatagaatttttttctaataatgacaatgg

SEQ ID NO: 265420 - DNA, 473 bp, Homo sapiens
tgtgggaaaaaaaaaattgttggattccaagtattgtgagaccaaggaatgaattacaggggagagtgacaacattttttttttctaaagattttggggacagctctgtttctggaatgtccgaagatagtccrtccaataggaccaattaccagaatccagcccccagagcctaccatttctatactcattcttctggctaataaagggggttctgcttcacgccctcagtacaggtctttcagccatgacgaccaaggcagaccattctggtttcagctggagtgtttctgttctcatgagacaccagtccacaggggttctctgtctcacatgtggaagggaaagtgaaagtagcttcttttaaaatgaacagttacctccttctcattggcaaaaggccacttaaatttcccaagggggacagaaaaccatcttgcaaagtttagaagatattcgtagcagctgacccg

SEQ ID NO: 265421 - DNA, 473 bp, Homo sapiens
tgtgggaaaaaaaaaattgttggattccaagtattgtgagaccaaggaatgaattacaggggagagtgacaacattttttttttctaaagattttggggacagctctgtttctggaatgtccgaagatagtccatccaataggaccaattaccagaatccagcccccagagcctaccatttctatactcattcttctggctaataaagggggttctgcttcacgccctcagtacaggtctttcagccatgacgaccaaggcagaccattctggtttcagctggagtgtttctgttctcatgagacaccagtccacaggggttctctgtctcacatgtggaagggaaagtgaaagtagcttcttttaaaatgaacagttacctccttctcattggcaaaaggccamttaaatttcccaagggggacagaaaaccatcttgcaaagtttagaagatattcgtagcagctgacccg

SEQ ID NO: 265422 - DNA, 548 bp, Homo sapiens
aagacaagaaacagaggtagcaagagagagatgtyactggtgcaccactaaagaaaaacctcaagctgccaacgtcagctctacagagaaatggggactgaaaccaaagagagggatttcagacctgtgtcagctgaaatctaaaatgcagtcattcatttagacaatagctaggaagttatttttatgtatcagtgactttgaaaatgcaatatcaatcatggtgttatttctcttggacctggggcgaaaggactcaagtggaaggttcccattaccacagcggtatttcagggagtgaggaatttgggagggaggaaaaacagtatgtccctcatctggggattttctctcctcataactgatcttttaaaatcctttatgtagggattttgcaaactgactatgaaaaggaaagccccactatctcttactgtgccatcaactcacactgtaaaaggagcaaaaagtgttttaaaagccaatttgaccagagctgacttattttactttgtttatcgacagatgtcaatatctttatatttctt

SEQ ID NO: 265423 - DNA, 548 bp, Homo sapiens
aagacaagaaacagaggtagcaagagagagatgtcaytggtgcaccactaaagaaaaacctcaagctgccaacgtcagctctacagagaaatggggactgaaaccaaagagagggatttcagacctgtgtcagctgaaatctaaaatgcagtcattcatttagacaatagctaggaagttatttttatgtatcagtgactttgaaaatgcaatatcaatcatggtgttatttctcttggacctggggcgaaaggactcaagtggaaggttcccattaccacagcggtatttcagggagtgaggaatttgggagggaggaaaaacagtatgtccctcatctggggattttctctcctcataactgatcttttaaaatcctttatgtagggattttgcaaactgactatgaaaaggaaagccccactatctcttactgtgccatcaactcacactgtaaaaggagcaaaaagtgttttaaaagccaatttgaccagagctgacttattttactttgtttatcgacagatgtcaatatctttatatttctt

SEQ ID NO: 265424 - DNA, 548 bp, Homo sapiens
aagacaagaaacagaggtagcaagagagagatgtcactggtgcaccactaaagaaaaacctcaagctgccaacgtcagctctacagagaaatkgggactgaaaccaaagagagggatttcagacctgtgtcagctgaaatctaaaatgcagtcattcatttagacaatagctaggaagttatttttatgtatcagtgactttgaaaatgcaatatcaatcatggtgttatttctcttggacctggggcgaaaggactcaagtggaaggttcccattaccacagcggtatttcagggagtgaggaatttgggagggaggaaaaacagtatgtccctcatctggggattttctctcctcataactgatcttttaaaatcctttatgtagggattttgcaaactgactatgaaaaggaaagccccactatctcttactgtgccatcaactcacactgtaaaaggagcaaaaagtgttttaaaagccaatttgaccagagctgacttattttactttgtttatcgacagatgtcaatatctttatatttctt

SEQ ID NO: 265425 - DNA, 584 bp, Homo sapiens
ttcttgtttcttcattacttgtttatctcccttaaaaaaaactatcaggccaggcgtggtggctcatccctgtaatcccagaactttgggaggccaaggcgggtggatcacctgaggtcaggagttcgagaccagcctggccgatatggtgaaaccctgtctctactaaaaatacaaaaattagccaggtgtagtggcacacgcctgtaattccagctacttgggaggcatgagaattgcttgaacccaggaggcggaggttgcagtgagccaagatcatgccttggcactccatcctgggcaacagaccaagactccatytcaaaaaagaaaaaaaaagtatatatattactcattagccaattaaaatttttttctagcattgctgctgtcttaacaactctattcttagaatattagagtgctctctacaccttccttttttttttttttttttaaataataatccctagaaggccaggcacagtggctcatgcctataatcccagcactttgggaagctgaagtgggaggattgcttgaggcaaggagtttgagaccagcttgggcaacatagcaagacc

SEQ ID NO: 265426 - DNA, 590 bp, Homo sapiens
taccacccctttccacggctatgacctgatgtcccaatagttactacttcttccccagaaatttctgcataaactaccccttaatctgaatgttattaaaagctggtataaatatgactgcaaaactgccctgagctgctactctctacctatggggtagccctgctctgcaggagcagtcatggagctataacactgctgcttcaataaagctgttttcttttacctccgtcttgcccttgaattctttcctgggcaaagccaagaaccctcacagactaagccccacttgggggttcacctrccctgcatcagcttggtgctcaacatggggtgaagaaagaagacagcatcgtgatagtccacagtcagtgagcagcagtctgcaaggtggcagtcagtgatcgttgagtggcagtcagtaattggcaagtggcagtctgcaaggtgacagtcagcaaacagcagtcaacgaggcagcagtcggcgatcagccagtggcagcaggcgattagtgggacagtgattggcgggacagtgattggcaggacagtaattgatgggatggcagtcagcaggctggcagtttg

SEQ ID NO: 265427 - DNA, 552 bp, Homo sapiens
ctgggcccctggctgtccaactaaagattatattttctacttctccttactatggtcatgaaattaggttcaggtcaatgagataaacgcagcaacgatgtatgccacctcttgctcaaacaagagggatcagtcaaaatctaagaggggtctttccttaaaaggattggggtgtgccctcttcctctcccttgactctggccttgaatgttgtcatgatggatcttctctgatcatgtagacaaaccaagaataaagtagaaggagcttgagttcccaatacaatggacccatcttctcttctcagccttggaaacattgcactaagtaagagagcatttctayctagttgaactttctaccaggttaaaattcccatcttgttaagtcatgtttggatctttgttagacctgttttcatctaagtattaaataatacagacacctccaaatagtggtcttcaggagccctccctgtcccttatgttcaatcacttgctgccttaatgcttctcacctggctacctctctccattctcactgcccctacct

SEQ ID NO: 265428 - DNA, 568 bp, Homo sapiens
tttttgtagctgcattcactggaggaggcagggtggcgtctggttacttcatcttctatgcttctatcttgctttctgaggattctatctctgccaaacagattgtaaactgatgtagggcagaaagggggtgatccctttcctccccatcataaagtgttatggcctacatccctataataaaaaacaggtcaacaagagaaaagcataacaaatttattacatgcacatgtatgcatgagagtcatacaaaatctgaactcaaagagaggccagatggttgagacataaatgcccccttcataggggagaagataatgggggaatgaataggcccaatgaggacaattattagtaaatgattctttttgggaaggtgaggggcagaaccacacagaaagaaaggttgtcttatcatgcagataaagtyccccaggtaatctctctgaggtgctctctgaaaattctatgaaaagtctgtctgggtgtagtgatgactccagtctcttctcttcttaggtggttgatctttgctggtcatttgatgagattcctagggagagggtct

SEQ ID NO: 265429 - DNA, 562 bp, Homo sapiens
tttcctaaaagggtaatgtttgtagctcatactgtttatctggaattctttcctctgttccctttcatacctaatcragatcctgccaccttcttggtgaagtcttttcagactctttcaggaagatgttctcagtcatttcaatgaagattcactaacgcattgaatcaaatagcacaatgagggtaccacctgtgttacctctgcatgtatctcataattcatcgggccatgaattctttgagtacaaagcctgtgactttattcacttctatattcagactttactgaacatggttgatactcaataagtgcctttttatttttaacctttttaaacttttaggttcaagtcctatgtgtatgtttgtgatataggtaaatgtgtgccacgggggtttgttgtacagattattccatcactcaggtactaaacctaatacccaatagttacttttctgctcctctccctcctcccaccctccaccttcagataggccctccataaagaacagcactaggaaaagaaaagtgctattttaaatgaatgcatgaatgattc

SEQ ID NO: 265430 - DNA, 537 bp, Homo sapiens
atgatgacatggaggatctggagcttgcagaagcaagtattttgaggaggattgagagctctcctgttagacatatacagggatgagaatgagagaagagaatcgggagataaggtaatgcctgagatgaagataggttaggttgtctgagcataagtgatctgcaagagctggattctgctctgtgcactccatggctcagcttcctgacctagcctattcccctcaaatattaaacattcttctcccatcaggtctctgctctgcctttggattttccctctagtgattattattttcagtctgatttctgccattatcctggttgttcctgttttcactgctcccccagctcatatgcccytgacttgctccagccccaggagccagttgattccagcataggcacccctccctagtcgtcttgtccctggtcccagctgtgttagctgtctcactgtgccctccatctgcctggtcttccccttccaccattgccccaagttgtgctcacccctcagcaggaagctcaattca

SEQ ID NO: 265431 - DNA, 545 bp, Homo sapiens
ggacacaggaaggggaacgtcacacaccggggcctgttgtggggtgggggggagggatagctttaggagatatacctaatgttaaatgatgcgttgatgggtgcagcacaccaacatggcacatgtatacatatgtaacctgcacgttgtgcacatgtaccctaaaacttgaagtataataataaaaaaatcctctactatcttaggtctaatcccatcttagtatcttactgaaggatatgcttgtgaaggagaatgcrggagggagctggaggaagttgagagaactaatggaaaatgccagcctgacatctgtaaaggattgagagaggatgctaaggaaagatctataaactttggccttgctgaaacttttagaaagttccatgtgagagtcatggagtcatagttccctgtcagaagtgtgcagttccaaatgggcctattctatgtccctattatgctggatcactgggaacagtttctgggaaatgtggcctcggtaggagcatggggatagtagatggcagcagttaatgctgtca

SEQ ID NO: 265432 - DNA, 603 bp, Homo sapiens
ccctatttttagttttttgaagaacctccaaactattctctagagtggttgtactaatttacattcccatcaacagtgaatgagggttcccttttctccacatcctcaccagcatttgttattgcctgtcttttttatgtaaggtattttaactggggtgagatgacatccctttatagttttgaytttcatttctctgatcaataatgtttagtgccttttcatgcctgtttgccatttgtatgtcatcttttgagaaaggtctattcaaatcttttgcccttttttggttcaggttattagattttatttcctatagagtttgagctccttatctattctggctattaatcagatgcatcatttgacttttttaaagtttttcatcttttttgatgtgtgcagttacagctataaacttccctcatgctgccttcactgtatcctgtgaattttggcacgttgtttctatttgtttcaagaaatttttcaatttaattttgtcattgaccactggtcattcagaagcatattgttaaatttccctgtagttgtatagtttctaaaattcttcttgttattaacttctagttttagttcaca

SEQ ID NO: 265433 - DNA, 603 bp, Homo sapiens
cttcttgttattaacttctagttttagttcacagctgccagaagatgcttgacatttgcattagtcagggttctctagagagacagaactaataggataattgtctatatgaaggggagtctattaaggagtattgactcacatgatcccaaggtgaaatcccacaatatactgtctgcaagctgaggagcaaggaaaccagtccaagtccccaaacctcaaaagtaggggaggtgacaatgtacccttcagtctgtggctgaaggtccctagtaaatcactggtgtaagtccaagagtccaaaagctgaagaacttggagtctggtgtttgagggcagaaagaagcacaggagaaagatgatgtctggaagactcagcaagtctgttttattctagccacactggcagttgattagatggtgccaactcacattaagagtgggtctgcctttccaagtccactgaytcaaatgttaatctcccttagcaatgccctcagacacacccaggaacaatactttgcatccttcaatccaatcaagttgacacttgttaactatcacaacattatttcaactttcttgaatgtgttagcacctgtt

SEQ ID NO: 265434 - DNA, 545 bp, Homo sapiens
ggacacaggaaggggaacgtcacacaccggggcctgttgtggggtgggggggagggatagctttaggagatatacctaatgttaaatgatgcgttgatgggtgcagcacaccaacatggcacatgtatacatatgtaacctgcacgttgtgcacatgtaccctaaaacttgaagtataataataaaaaaatcctctactatcttaggtctaatcccatcttagtatcttactgaaggatatgcttgtgaaggagaatgcgggagggagctggaggaagttgagagaactaatggaaaatgccagcctgacatctgtaaaggattgagagaggatgctaaggaaagatctataaactttggccttgctgaaacttttagaaagttccatgtgagagtcatggagtcatagttccctgtcagaagtgtgcagttccaaatgggcctattctatgtccctattatgctggatcactgggaacagyttctgggaaatgtggcctcggtaggagcatggggatagtagatggcagcagttaatgctgtca

SEQ ID NO: 265435 - DNA, 438 bp, Homo sapiens
atagagatatcaccttgatgggcttggaaaagatccaggagaattctcttaattaccaggtagactgtcatctcttctttctcccaaatagtctgttttttggtttttgtttcttttgtttttttgacactcytgctctgtcacccaggccggagtgcagtggtgtgatctcagctcactacaacctctgccttttctgagccaagtaaagcttggggttgagtgacacaagcattcctgtgtctaccacaactatgagaactgaagccagtacagcactgggtcttgcccaaggcctgctataactactccttggctactacctatgtttgtttaaggtcctgggcctctacagttggttggtaaagcagcagacttgtctccttcccttcagggaagcaagatgccctgggtgggtccagaggtactgtccaaaag

SEQ ID NO: 265436 - DNA, 513 bp, Homo sapiens
attaataaatttctatgtcctcaatctatgcctaactccaggatcaagttgagtcacattttatttaattttctctatcgtcttgacaataagaggtggtcattcctccatctttatcagggtctctgcagtccaatgtctgaatctaactattgagagaagataggcttctgtgaacataattttagtgccaaatgtaatctactgattagtatcttttcctcaactccaaatagaagtctgggccgaaacttattttacagatgatctcctaatygtaagtccaggcattggagaagatgatactcaagtccaacagtagcaccagtgctgaggaaagtgaccaggaccttttctcacaggagatctctttggcataatgcctaaaatctttttataccatgtaaagcagagtgtgcatatagtgcggggctcttaaaacctgcccttaattaaaactagtaggattagtattatactaaaaacttcctgaaagaataaccttagaaaacc

SEQ ID NO: 265437 - DNA, 469 bp, Homo sapiens
tgccttcagctttttctacatcagccagaatgggtctttgaataaacataaaatgagtcatagacaacagccacattctaccaaatccaattaacattgatcttagttgattcyagttcataattcattctgatacaattttcaaaacacccccaggagtttttctatcaccttcatgtgttagatttaaaactgcagtagaggatgaaatggccttttacagaattgtcacaatggaagtcacatgaaagaggaatgccttctgcttgctgttccctgtctggccttcaagccagatgtgtcttgttctgtaacatatggtgctgcctcacatcatgacctgtgggcactgaccctcctggattttctggtattgttgatccactgaaatcagtcgtaggatcctggaagagaccagctggtccacatctgtctggaacccatccttcatcgtgactgcaggactctg

SEQ ID NO: 265438 - DNA, 469 bp, Homo sapiens
tgccttcagctttttctacatcagccagaatgggtctttgaataaacataaaatgagtcatagacaacagccacattctaccaaatccaattaacattgatcttagttgattctagttcataattcattctgatacaattttcaaaacacccccaggagtttttctatcaccttcatgtgttagatttaaaactgcagtagaggatgaaatggccttttacagaattgtcacaatggaagtcacatgaaagaggaatgccttctgcttgctgttccytgtctggccttcaagccagatgtgtcttgttctgtaacatatggtgctgcctcacatcatgacctgtgggcactgaccctcctggattttctggtattgttgatccactgaaatcagtcgtaggatcctggaagagaccagctggtccacatctgtctggaacccatccttcatcgtgactgcaggactctg

SEQ ID NO: 265439 - DNA, 542 bp, Homo sapiens
caaaacacccccaggagtttttctatcaccttcatgtgttagatttaaaactgcagtagaggatgaaatggccttttacagaattgtcacaatggaagtcacatgaaagaggaatgccttctgcttgctgttccctgtctgsccttcaagccagatgtgtcttgttctgtaacatatggtgctgcctcacatcatgacctgtgggcactgaccctcctggattttctggtattgttgatccactgaaatcagtcgtaggatcctggaagagaccagctggtccacatctgtctggaacccatccttcatcgtgactgcaggactctgtgcaaactagccagtatgatcattgttgctcttagccaagttcctcatctcgctgtgccccaggagcgctcagaattcaccccacagcactgggagtcttgggagcctcagcttgagggtgttgggggtgtgctgatcccaacgaatgtctcctctactgccaggcaccagaggatcttttgtgcttaacctaatctgaagccaggaagaaaaac

SEQ ID NO: 265440 - DNA, 542 bp, Homo sapiens
caaaacacccccaggagtttttctatcaccttcatgtgttagatttaaaactgcagtagaggatgaaatggccttttacagaattgtcacaatggaagtcacatgaaagaggaatgccttctgcttgctgttccctgtctggccttcaagccagatgtgtcttsttctgtaacatatggtgctgcctcacatcatgacctgtgggcactgaccctcctggattttctggtattgttgatccactgaaatcagtcgtaggatcctggaagagaccagctggtccacatctgtctggaacccatccttcatcgtgactgcaggactctgtgcaaactagccagtatgatcattgttgctcttagccaagttcctcatctcgctgtgccccaggagcgctcagaattcaccccacagcactgggagtcttgggagcctcagcttgagggtgttgggggtgtgctgatcccaacgaatgtctcctctactgccaggcaccagaggatcttttgtgcttaacctaatctgaagccaggaagaaaaac

SEQ ID NO: 265441 - DNA, 608 bp, Homo sapiens
aaagattagggaacatttgaaactctttagagattaagtggttgtggccagaatgctggtaaaaatatgaagtgtaagggccattctgataaggtttcagatagaattgagggacaaattattgaaaacaggagtaaagatcatcgctgtcataaattggccaagaacttagctaaactgtgttcatgcccaagggcttcgtgaagggccagacttgacagtgataaactagggtacttggctgaagaagtttctaagcaaaatatagaaggtgcttcatgggggttaattttggccccttacactgagattcaggagcaaaggcataatttaaaaacaggatttatgattaaaaggaaagtaaagtggaaagatttggaaaactctcagcctcttgatgtaaagaatgaaaaagtgtgctcaggagaggaaaccaagagtgtagcccagacgtggtttgctacagagattaacatggattgaaaagaaccaggtgcattcctcaagacaatggaagtataatttgagagaccaaaatakatgcccctttatcaactgatatggaccctaagtttaaggaaacaaaagttacctactggttgaggatt

SEQ ID NO: 265442 - DNA, 575 bp, Homo sapiens
ctggcatcttctactctgcctgttatcttctagtctgccattgtgatgacatccagtattattttaagatgtcaatatttactataatccaggaattctattaaaattatttaatctgataaaaattgtagttataaactcaaaatgrttttaaaaactatacatctcttcatgcacttaaggagttcatggcaaatgttggaggatctctctaaagaacatgttcagccctggtgtttgatctgaaacttccagaatgggaaagatttagatgatcccattatcagtctacaaatatttttaaaaactcttcacccccactttaggactttagtgttttcagtttcagtccttcttgaagttaagcagtaactgaggatctaatattgtatgcaaaacagtgaaaatatttgattgttaataattgccaagtccgttgccaagcatttggcttgggctgttggtagaacgatagctatctatggctctaagatttttttttcctgaagcctcaagacagaaacatcctaattgtatcaagatataaactccatggatgatatacaatttaactg

SEQ ID NO: 265443 - DNA, 596 bp, Homo sapiens
gaagggtaaatgagtgctacgatgaaaaggccaagacaccaaaaatgaatagcaaacctggccgggcacggtggctcaagcctgtaatcccagcactttaggaggtcgagagttcgagaccaccctgaccaacagagaaaccccatctctactaaaaatacaaaattagctgggtattgtggcacatgcctgtaatcccagctactcaggaggctgaagcaggagaatcacttgaatttaggaggcagaggctgcagtgagttgagattgtgccattgcattccagcctgggcaacaagagcaaaacygtcttaaaaaaataataaaataaaaatgaatagcaaaccttccctccctgcaaaatgaaacctatggcccctagggagaagcagatctaagaagaattcttcatgaataagtaaccagtgctgagaatatgaaaaaatggtgggagcactattgcctaaagtcactctctacctgcttttcatggctttcatgagcacagggcttccctgctgccctgaatgtatttctggggacatacgaaccagggctctgagttcatgcaagtgttaactaggcactgtttgttc

SEQ ID NO: 265444 - DNA, 596 bp, Homo sapiens
gaagggtaaatgagtgctacgatgaaaaggccaagacaccaaaaatgaatagcaaacctggccgggcacggtggctcaagcctgtaatcccagcactttaggaggtcgagagttcgagaccaccctgaccaacagagaaaccccatctctactaaaaatacaaaattagctgggtattgtggcacatgcctgtaatcccagctactcaggaggctgaagcaggagaatcacttgaatttaggaggcagaggctgcagtgagttgagattgtgccattgcattccagcctgggcaacaagagcaaaaccgtcttaaaaaaataataaaataaaaatgaatagcaaaccttccctcsctgcaaaatgaaacctatggcccctagggagaagcagatctaagaagaattcttcatgaataagtaaccagtgctgagaatatgaaaaaatggtgggagcactattgcctaaagtcactctctacctgcttttcatggctttcatgagcacagggcttccctgctgccctgaatgtatttctggggacatacgaaccagggctctgagttcatgcaagtgttaactaggcactgtttgttc

SEQ ID NO: 265445 - DNA, 451 bp, Homo sapiens
  misc_feature (1)...(451): n = A,T,C or G
atgctgttctgttcttctgctcttctgttcatttccttgtctgctcatctgctcatatgtttctggagcctggggtctggggcttatatgggtacaggattaggggggcatggcaggccaaaaggcaactttggggcatggaaatgggaatgcctgttcccatttagggccacagttttccaggcttgagagtggggcctttgctgaggaactgccctsttccacccaatatttccctgtctcttgtcggtatcatttccccctctgaagaggcacatctaactgctattagaatatggataacgaccagtcttaactacttcctgctgacagggtggtggttaagggaaaacagcagtcagatttctcccagagttttatttaaagggtcctcagcaaaaggaagcnnnnnnnnnnnnnnnnnnnnnnnnnnnnnnnnnnnnnnnnnnnn

SEQ ID NO: 265446 - DNA, 451 bp, Homo sapiens
  misc_feature (1)...(451): n = A,T,C or G
atgctgttctgttcttctgctcttctgttcatttccttgtctgctcatctgctcatatgtttctggagcctggggtctggggcttatatgggtacaggattaggggggcatggcaggccaaaaggcaactttggggcatggaaatgggaatgcctgttcccatttagggccacagttttccaggcttgagagtggggcctttgctgaggaactgccctgttccacccaatatttccctgtctcttgtcggtatcatttccccctctgaagaggcacatctaactgctattagaatatggataacgaccartcttaactacttcctgctgacagggtggtggttaagggaaaacagcagtcagatttctcccagagttttatttaaagggtcctcagcaaaaggaagcnnnnnnnnnnnnnnnnnnnnnnnnnnnnnnnnnnnnnnnnnnnn

SEQ ID NO: 265447 - DNA, 540 bp, Homo sapiens
atatttttactgtatttcttctaacagcagcaaatgcatttaacactttattgagattctcaacagctgccatttggtttgtatagcaaattgtttacaaagtaacttttttccatttttgatattttaatgaaaattatgttcttcagttttaaagctctgtccctctcccaaagaaaggttaataactaactaccaagtaatgattatttgggaaaagaagaaaagcaaaaccagcttgtaaacacttctggaaygtgggtaaggggccaaagtcaagaccttctgggcccagtgcaggtgctaggcttgcctcgggacaccatcagcacttccccatccacaacatcctcaacagctgggagccatgtgcagaccccagggggcttcctgttccacaagctcccctctctttttcctctccacccttgctgttgggcctcccttccaaatctgcctaacaaaggcagcaggatctttaatactgttcagctttgtcaatggagacaggatactctagaaagttgagagattccctgg

SEQ ID NO: 265448 - DNA, 540 bp, Homo sapiens
atatttttactgtatttcttctaacagcagcaaatgcatttaacactttattgagattctcaacagctgccatttggtttgtatagcaaattgtttacaaagtaacttttttccatttttgatattttaatgaaaattatgttcttcagttttaaagctctgtccctctcccaaagaaaggttaataactaactaccaagtaatgattatttgggaaaagaagaaaagcaaaaccagcttgtaaacacttctggaatgtgggtaaggggccaaagtcaagaccttctgggcccagtgcaggtgctaggcttgcctcgggacaccatcagcacttccccatccacaacatcctcaacagctgggagccatgtgcagaccccagggggcttcctgttccacaagctsccctctctttttcctctccacccttgctgttgggcctcccttccaaatctgcctaacaaaggcagcaggatctttaatactgttcagctttgtcaatggagacaggatactctagaaagttgagagattccctgg

SEQ ID NO: 265449 - DNA, 555 bp, Homo sapiens
agcagcaagactagtacctgggtcacctgcagcagtacatggccacctatcagcagctgacctctgagaaggaggcgctgcacaggcagttactgctgcagacccagttcgtggaccagctgcagcagcaggaagcttggggcaaagcggtggctgagatggccggmcaaaagttgcaggagacccaggggagggagttgctgaggacggggccccgagggggatgacctggcaacctccgtgccttctcactctgtttcccgtccccttaggagcacctagaagctgccagccaccagaaccaacagctagagacccagctaagcctcgtggctctccctggagaaggtacaggagaccactcagaggaagaggagagagccccaggaggaaggggggactgttagcagcataggattgaggggttggaagagacctttagaacagctggtcgttatgccaaccgggtgtccgcactaagttcagcatcaatatggtgacctcctgggagcagggggccaccaggttgcctaaggatgaatgaactggaccaga

SEQ ID NO: 265450 - DNA, 576 bp, Homo sapiens
caccttccaggtttggatcacagtaaagcctctgccttggggatgtgctggccgagacagatggggttgaaccagccatgatacattggccttgggcaagtcatctgtgccttgcttccccagcagccagaagggataatagcacctatttcacccatactcaagtgttcacttgttagcaggaactgagtcccggaggaggtgcaggtggagccattgaggcagcactgcagctggacctgggtctgagtcccagctcctggctgtgatatgcatcactctctccatttatttatctgaaggacagggctgtgctgttctggggtcactgtgasaatgcagctggcctgtgtgagttggtggtggcctcctgtgatagtttgaggtgggctggaggtgtgtcttgaatgccccctcacccccatggggaagacccacttagggaagactcaagtgtctgtatggaggaacccacattccctgcccctcagctgtcctctgtcccttcctagccccctctgctgtcctgcaggctctggcggtggccatccagcttggtggccatctggctgatcc

SEQ ID NO: 265451 - DNA, 608 bp, Homo sapiens
ggacacaatagaccctgcagacctcattgttctcttaaccagcatttgtacgtgttttccaccacggtacaaagcgctttcctgtccattgtgacaattgacagacacaaggacacaagtcctcacacgaaccgacccacccacaagaacacaggcatgtgcctgtgtgtgcatacagccctccactgtgaccgaaacccagcagagaagcaataggaggacctgcactgcacgacttgagatgtgggatctggggaagcccatccccatgccctactgcatctaaggccaaagtcacctgcccggggctgcagctcctgtgaggggagaagaagggctgctcygccaaccttccttacggggaaggaggttctcccccatgtttggaccaggtgtgttgggaaagcggtcactagagcttcctctcaggtccctcaggcggctcccattgggcagaggcgtcctcagccaacaggtcatggggctgccactagctaatgaagctggagaagatgaaagattctgcgcctttctccacagctctgcggtgcctaaggaccccctccccataacaccttaagcccggtcacacaaacgaacttgcacag

SEQ ID NO: 265452 - DNA, 454 bp, Homo sapiens
gattcaaatgtttcctcccacatttgaagtggtcttcccaggtctctgcagctgaaagtggcactttgttggtatatttattatggcatttcatgttttctgtgatgtatttctgttcttgaattttatgctatatcaggctaagagctccttgaaagcagaaacctcccgtttcgttttttgtcaccccgcatgccatgtgatatcttgcacagaggaggtgctcaagaaatagttttgaatcaatctgtttatttggcagatgaaacaactcatacagacattcagctaatctcaggtctatccatgtccaggacttttcayaatatttgatgacttttaatttctctttcttccaccagagaacatcttccaccccgtctcttttcagcctcactcttataaatcagtgccatcgtagcttacatctttaaaattcatgggttttcttttt

SEQ ID NO: 265453 - DNA, 454 bp, Homo sapiens
gattcaaatgtttcctcccacatttgaagtggtcttcccaggtctctgcagctgaaagtggcactttgttggtatatttattatggcatttcatgttttctgtgatgtatttctgttcttgaattttatgctatatcaggctaagagctccttgaaagcagaaacctcccgtttcgttttttgtcaccccgcatgccatgtgatatcttgcacagaggaggtgctcaagaaatagttttgaatcaatctgtttatttggcagatgaaacaactcatacagacattcagctaatctcaggtctatccatgtccaggacttttcataatatttgatgacttttaatttctcyttcttccaccagagaacatcttccaccccgtctcttttcagcctcactcttataaatcagtgccatcgtagcttacatctttaaaattcatgggttttcttttt

SEQ ID NO: 265454 - DNA, 575 bp, Homo sapiens
gtgatctggactgtcctgaccgggtcctggcagagatcagcacgctggccaagatggttgagtgcacagggtctacactgggtggaggaggggtgttgggctggggattgtggctgtagaggatggtgaggtttctctggggctagggcctcagtgctctcagcctgtgctaccatgctttgtgaccttgatcagtggctggcctgctttgagccagtccccaggaagaaggggtgaggtttgccagcctggctgatgtaaggacttcctttccagtcctctgtgaagttgcagctgctctgcagccaggtactaaaggagctgctgggacagggaattgatgtgagtacaagatccagcaccccattgtcccatgaccttatgaccaccactgccctgaaactctgcactaggcccggggagacgggtgagccagcctctcaacctctctgggyacctcccttccttctttccagcctgtctgttccttattgcaggatccaggctgggggtgaggggctggtgagcagggacctggcaccccctgaaggtctcctttccccatagtataagaa

SEQ ID NO: 265455 - DNA, 541 bp, Homo sapiens
tacttaaaatttacaattagttatccatttctgcataattcttttgtgaagtcttgcaacatgtgaagagcatttttcctaaaagttgaggtattcaaagattgagcttgcatatatttatgacacaacttgtttcccctttaaaaaraaaaacattaaaatgtaagtgtatgaaacagttaaggtgggcagtctgtagcctacaggatgctgggcataaagtggctaacaggtaatgatcctgcgcttccatcgccaggcagaagacttctttctgtccttaaacattaagtatcaaggggccgtatttctgcccaatggagtactctgttttcaggaagttactcttccagccaaatggagagcaaccagacaccctcccatccttatcctggggcaagacagagatggagggggagcctggccggaaagagaggaaggagcctttgcagggggcacagaacaagcagcagacatttctgcagagctttttggaaggagccagactcttacaattaaaatcaggaaagacaggctgggt

SEQ ID NO: 265456 - DNA, 667 bp, Homo sapiens
ttaaataaagcctgtaaagcagaagtagtgaacaagcctgggtactaaagttaaatattacagaggcagataaaataagtctgagraaaattcatgcatttaattctatctattttgcccacatagttatgctgatatttcattcacttggattcaccaacttaaaatttgtaactataatggagaatcttttttctgtatttgaaaaaagtgcactgagcaaattaatagtataaatatgatttcaaggataactaagagaatatttatttctatgtatggttaatcaacatgcccccttccatattccatgtgccctttgactaattatctccaattcatctttcaggtcacaattcaagtataaataataaattagaagtacatattactataaaaaattgacatgtgaattatgaatcaatctcctcaatttgttaaagaatcttctaccaagtactcttttcttgaataaacttttacccatattacagttaccatatctttgtaacaacattaagggagcattgattttactatattaaatagacagttttctatttcaaatagacttggctgaattattttgattagctcaattaaaaaatacaagattctaataagagactttattacttactaaaggcattgtgagctattattaaaa

SEQ ID NO: 265457 - DNA, 667 bp, Homo sapiens
ttaaataaagcctgtaaagcagaagtagtgaacaagcctgggtactaaagttaaatattacagaggcagataaaataagtctgagaaaaattcatgcatttaattctatctattttgcccacatagttatgctgatatttcattcacttggattcaccaacytaaaatttgtaactataatggagaatcttttttctgtatttgaaaaaagtgcactgagcaaattaatagtataaatatgatttcaaggataactaagagaatatttatttctatgtatggttaatcaacatgcccccttccatattccatgtgccctttgactaattatctccaattcatctttcaggtcacaattcaagtataaataataaattagaagtacatattactataaaaaattgacatgtgaattatgaatcaatctcctcaatttgttaaagaatcttctaccaagtactcttttcttgaataaacttttacccatattacagttaccatatctttgtaacaacattaagggagcattgattttactatattaaatagacagttttctatttcaaatagacttggctgaattattttgattagctcaattaaaaaatacaagattctaataagagactttattacttactaaaggcattgtgagctattattaaaa

SEQ ID NO: 265458 - DNA, 667 bp, Homo sapiens
ttaaataaagcctgtaaagcagaagtagtgaacaagcctgggtactaaagttaaatattacagaggcagataaaataagtctgagaaaaattcatgcatttaattctatctattttgcccacatagttatgctgatatttcattcacttggattcaccaacttaaaatttgtaactataatggagaatcttttttctgtatttgaaaaaagtgcactgagcaaattaatagtataaatatgatttcaaggataactaagagaatatttatttctatgtatggttaatcaacatgcccccttccataytccatgtgccctttgactaattatctccaattcatctttcaggtcacaattcaagtataaataataaattagaagtacatattactataaaaaattgacatgtgaattatgaatcaatctcctcaatttgttaaagaatcttctaccaagtactcttttcttgaataaacttttacccatattacagttaccatatctttgtaacaacattaagggagcattgattttactatattaaatagacagttttctatttcaaatagacttggctgaattattttgattagctcaattaaaaaatacaagattctaataagagactttattacttactaaaggcattgtgagctattattaaaa

SEQ ID NO: 265459 - DNA, 642 bp, Homo sapiens
tagtgaacaagcctgggtactaaagttaaatattacagaggcagataaaataagtctgagaaaaattcatgcatttaattctatctattttgcccacatagttatgctgatatttcattcacttggattcaccaacttaaaatttgtaactataatggagaatcttttttctgtatttgaaaaaagtgcactgagcaaattaatagtataaatatgatttcaaggataactaagagaatatttatttctatgtatggttaatcaacatgcccccttccatattccatgtgccctttgactaattatctccaattcatctttcaggtcacaattyaagtataaataataaattagaagtacatattactataaaaaattgacatgtgaattatgaatcaatctcctcaatttgttaaagaatcttctaccaagtactcttttcttgaataaacttttacccatattacagttaccatatctttgtaacaacattaagggagcattgattttactatattaaatagacagttttctatttcaaatagacttggctgaattattttgattagctcaattaaaaaatacaagattctaataagagactttattacttactaaaggcattgtgagctattattaaaa

SEQ ID NO: 265460 - DNA, 503 bp, Homo sapiens
tcattatttgagccacagaaagactgatgcaaattggaatatctaaattcaaaatttaggacatgcagatgtgattacaacatctttctctttggtagcttgagtttacgtatttagataaacacaacacagtattattttttaaaaaatttcctggccagaggaaggattgccttcaagagtccaatatgatgcaaagattaacacatttttccagtctggaggtgctgctgctccctgagtgtaactttctctgtcatgtatttcctacagtttctttttgagaaaaaagaaatgctaaatgctatcaattttcagactgtcccacacttaaacctataccaagacattcagggacataacatgagtaaagattagagaaattgtgagaaaaaatttgaagaataagatgatgrtaacttataatttgatagctgctctaagcttggctgagcgccctctggggttatcttgtacatcctgatcttgtggactaagtacct

SEQ ID NO: 265461 - DNA, 671 bp, Homo sapiens
tagcaggcaacagcatgactggccttttccctaatttgattcaggcctcagcatcactgctagtaaggaataggatccttttctttaacccttcagaaggcaccagggcaaattccacagtgcattcatgagtcaagggacagtatctccatgtgagagatatctgcctggctagaatttctagatggctttcccactataggaatccaagcaaaccattgtcattcttccctctctagcaagagaaaagagaatctcagcctttagagcattcgttctggctcaagaacatgggttttctttcctggaaacaaggactggctcagtgagacctcgaaagttggtgctttgtggtgttgccaaaatgsctgtttctggcaagcagtgggggtaggtgctgcttgagggaatcttgttgcccctccgagtgaaacaacacattcattatttaatagttattcagcatcggagaaattttagctcaagaaaaggctgaacttagaagacttcactaataagagtattttaagaattataaacagaaatcagactacactaaatagtgtgtttctaagctgagtacatgataaattacctaacaggctgaagagggaaataaagaactgagttgtggattcacagtcttgtgaatgtgtctgtaactggtagca

SEQ ID NO: 265462 - DNA, 537 bp, Homo sapiens
ctaaagtcatctacactaaaaggcattaaattttctatttttctgacaaaatattttattttagggctcattcttccctaaaccagttaattagagttctttatrtaaacatcccacacacaacacatataattacatggaaggaaatggatctggtagttgtaagatttttttgtttgccagtttttaagtttctatttcctattttagactatcagtttcttgattacctattccctgccctaaacaattgtcagctaggcaactctaaatttgcatttctaaagggacagctcctaggtgaaacaggatagagaacttatattttaaaagcacagagctgagacattaagccaaaacattgtatgataatagtttctaatatacacaggcaggcacccttaccaatgggggttttcttaaatatgtaaatttctaaattggatttgtggcttcagggtggagcccttcaaggaacagggccaagaaagcgtgcagcttccagggcctgacaggcagagctgtaagatagaacag

SEQ ID NO: 265463 - DNA, 547 bp, Homo sapiens
atctttgactctcatgtccaggtctttttccttttttatcacagtttctgactgagcatagtatacttgtcagacttccatcttcttaagtggcagaaaatgtaaaagcggcccatgggctagacagcaaaatcacatttggctcctttttctactgctgcactctacaggttaattctgtatgtatttagatcatatctctaaatctgttctctctccaggctgagctgactcctacctgtccctgacctcggataaccagcagacttactagcattttcatcaagtattctgaaagcagaatatacttgaaattatagtactgttctrggtttaggattttattgccacaatttaagactaaaacaacacttacagatcagcaaagtaatactgtaattgtatatctcttcccctcatgaatgtcaatccattttagagacatatggactcctctttttagaaaagagcaatgaataattttccttttgctgtttttgcttggggacatatgtggaaatcaaaacaacagcaacaaactagtgga

SEQ ID NO: 265464 - DNA, 622 bp, Homo sapiens
ttgctgtttttgcttggggacatatgtggaaatcaaaacaacagcaacaaactagtggaaaaatcagttagtttgcagaaagtggaactgatcttttgtttttttaaaatggtgacaaaatgaacacttgtaataggattttaacttcaggaaatctttattaccacaggacacaaaagtaaaaaaaaagagaccagagttgtttattttgcaaaacagaagtagcgatacaagggctagagagcgcactgttctctcagggataacaatccctttycccagcagtaacagctcattttgtcctgtttcagtaaagtaattttagtactttggaactttgaaatttatccagaataacagttttatatttccaagcacagatggtcattgccagaaaaaataaacttaatttccaggttattttgggccactgtggctaggttcagattttttgttgagttgaagtggaagaaaaggaaaaagaaagtggtcatacaaatgttagacctagcatcctgggaaagttgtgatgtgtgtgtgtgtgtgtgtggacgtttatgtgtgatgtgtttttaagcaattgtagttttattaaaaccttatgacaaagggaataggaagc

SEQ ID NO: 265465 - DNA, 568 bp, Homo sapiens
cagtatatgagtgatccagtttctccacatctttaccagcatttgatgttgtcagtgatgtgtagtgagtgatatctcattgtggttttaatttgcattttcctaatggctaatgaaatgatgttgaatatcttttcatgtgcttatttggcatctgaatatcctcttatgtgaaaggtctcttcaagtctttttgttcattttctaattagactttttttttctgctgaattttggaaattctttatataatctaggtactagtaagatacgtggttttcaaatattttctcctggtctgtagcttgtcttttaatcctctttgcaaggtcttttacagatcagaagtttttaaatttgatgaaattcagkttatcagattttccatttatgaatcatgcttttggtattaaatatgaggtcttttccagtttagatcctgaagattttctcctattattttcctaaaaatatttcttctaatattttctacttttatattttatatttttgtccctacttgtagaatatgtgaggtttaggttgaggttccttttttaaaaaaaaa

SEQ ID NO: 265466 - DNA, 586 bp, Homo sapiens
actatgaagaacagaacagagaaacaattggaagaaaccaggccctagatgccatcattttgctgctggatcaagctttacctgaaaatgtatcactggaccatttagtaatataaaccattaactttccaatattacttaaaaccagcttgattcaggttttctgtaatttgcaactaaagctttgtaactactatacctatctgttggaagagatttagaaaagaraggatgagaaaaggatgaggggaaaaaaatgtctcaagtgcctttaatgccagtgctcttttctatcaggaaagaaagcataacttttcctcagcaaaaacctctagatttactttgatttgatgagtaaccaccatagtcatgtgaggtgggagaaaagtgaatccatgtacttcttcctgggtctaggagaggtaggaagccttagcagcagggagggcctactctcaactaaggtcactcttatatccctgctccttccaggctgaactgcaacacatgcagtttgcaattactgaaatcatttgaccaccatttctctcagatggtttctaccacctccctctgaagaatgata

SEQ ID NO: 265467 - DNA, 537 bp, Homo sapiens
atctccagtcagatatccaacagatatttttgtaacggagctgcaaagaataattcttgattcctaccttcatctcaaacctgttcctcccttgcaccctgaatttggttctctatctcagtaaacatcgccaccaaacctgaacattttcctggtttcctacctttccctcacccctatatctaattcttcagcaagtttgcaggttctaccrccaaaacatctcaaatccatctactttatctcatgatattgccaacattaagccactgatctcttgcctcaactactctaagctggtcttcttgcttctatctgtttcccataaggcagccagaatgataaatttaaaacataggtaatattgatcttttgcttgaaatcactcaatgtttcccagttgtattttaccaatgttctacaggacttgcattatctagctcctaccaatctctactcccccacctcgtatgtctcttctaccttgcagccccgcagtcatgttgtccccctattctttgaacataccaaggttat

SEQ ID NO: 265468 - DNA, 537 bp, Homo sapiens
atctccagtcagatatccaacagatatttttgtaacggagctgcaaagaataattcttgattcctaccttcatctcaaacctgttcctcccttgcaccctgaatttggttctctatctcagtaaacatcgccaccaaacctgaacattttcctggtttcctacctttccctcacccctatatctaattcttcagcaagtttgcaggttctaccgccaaaacatctcaaatccatctactttatctcatgatattgccaacattaagccactgatctcttgcctcaactactctaagctggtcttcttgcttctatctgtttcccataaggcagccagaatgataaatttaaaacataggtaatattgatcttttgcttgaaatcactcaatgtttcccagttgtattttaccaatgttctacaggacttgcattatctagctcctaccaatctctactcccccacctcgtatgtctcttctamcttgcagccccgcagtcatgttgtccccctattctttgaacataccaaggttat

SEQ ID NO: 265469 - DNA, 587 bp, Homo sapiens
aaaatctgctctagtgcctgcctagagaacacagcaggggattttctgtcttaagtagctaggcacgccatgcatctgaaatgagaagcatgccctaaaatgttcacagcatattgcagttgaatgttttctatcttcttcagaagataagctggagtagttttgttttgttttctccgattaaaaaaaaaaaagtacaacaaaacatgatggggaggggagacaagtcaaacaaacaattccacatgtttcttgtgcatgagccactttcagacagggcaatatgtgtgcaaggctttactctgccatctcacaatgcaagaagatgactgtaaaagtccctggagtgaggtgataaggatgaggcaaagayggagaaaaaaacctgaaacaaagtcgtaatttggggccagaaagtgtgcccacaccagtccagaaaagcagagaattcttgccctcttttttttatccccaaagttctatttctttatgaagtcattaagaaccacaacctatccaaaatgaagaacagaaaatccagtctcagcatttatttttaaataacacatctagtcatattatgggga

SEQ ID NO: 265470 - DNA, 620 bp, Homo sapiens
gttctctcatcaataaaatctcaatgtgtgtttgtgcaagagagaagcatttcataaaaataaaactaagcaactggtactatcatatttgaaccacctaaaaccagccatgttctatccagtatgtatgtgtgtgcctcacattctgacctcatctgtcacagcacccaagaaatgatgtcttaaaatgatattaatataaccttctaaactgctttggtgcaatttccataatttctaaaackgtgaaggtcagctgtcaggcttcctgggggataaagtagtgaagtgaaaagaacatgagatttatagaatcaaacctagatttgactctactctgaatacatctctataattctgaacctctgtttttacctctaaataacaacatggattgcctcactgagctaacatggttaaggcccaaagaagataatagatgcgtgagtgccttataaactataaaggactttgaaaatgttagctgttttacaggtttaaagggcaatcctgtaataatagttctcatatttactatagattttaagcttcactttatacacagatggttgaagagttaggcagttgattgctgccttgatggtttatttaaaccatca

SEQ ID NO: 265471 - DNA, 498 bp, Homo sapiens
ttcctgggggataaagtagtgaagtgaaaagaacatgagatttatagaatcaaacctagatttgactctactctgaatacatctctataattctgaacctctgtttttacctctaaataacaacatggattgcctcactgagctawcatggttaaggcccaaagaagataatagatgcgtgagtgccttataaactataaaggactttgaaaatgttagctgttttacaggtttaaagggcaatcctgtaataatagttctcatatttactatagattttaagcttcactttatacacagatggttgaagagttaggcagttgattgctgccttgatggtttatttaaaccatcatttaaaccattatttaaaggctgagaatcactttaccaactgagctctcccgccttccaacctgtgttacttaatttaaaacataaaagctcctcttccattgctgtctacatttctaccattagtcttttgcattaagcagt

SEQ ID NO: 265472 - DNA, 584 bp, Homo sapiens
aggacagatgaacttttcctctgaagcatagttttgtggatacataaggaagtccattaatttaagcttcttaaaaagagaggagcatttttttttctccgtttaacctctttcttccctttctcgatttttcaactaaagatggcttcagatcatttgtggattccaaagaaactattaatggcttggatgacagggaaaaaataagtagaatggaatgaaattgaagatgacctgctatttacataatgaggaattaatgtaaataaaaacacttttgttttaaaccactaaaatatcagggtcacttgttattgcagcataatttagcttgacctgactgctaatccacccattaattccagaaagcaaagggaaaacagcaatagggatgtttgagaggagaaaaaaagtcaargagattgtgacagcatgagagaggagatttagctgccaattagacatcaagaaagcctccaaagtatataatacaggctctgataggaagattaaggaccagaggatccaaatggaacaaacctgcacagtaactttccttcaggaaataggaggatagtattatg

SEQ ID NO: 265473 - DNA, 527 bp, Homo sapiens
gggatttaaatccagtaagtctaactttagaatccattgggaaattgtttggaacattcccagatgcacactttgaaaatgctactctgagaaatactgtctacattgagttgacagcaaatgtcaaaagtaccctgtagtatcaacctactgtcatcagtcattttgttttccaaaatgtggcagttgaccaaaacattaattagtgaagatataatctatttttttttgagacagagtctcactctgtcacccaggctggagtgcagtagctcaatctcagctcactgcaaccttcaccttctgggttcaagtgatactcctgccttagccacccgagtagctgggattacaggaggattgcrtcaccatgcccagctaatttttgtattgttagtagagacagcgtttcaccatgttggccaggctggtctcaaactcctgacctcaaagaggtgcctgcctcggcctcccaaagtgctgggattacaggcatgagctactgaacccagcatgtctgatttcaa

SEQ ID NO: 265474 - DNA, 584 bp, Homo sapiens
ttggacttctgggatggtatattcagtgtattttcccctccaatatgggtcatctcagtactataccaggccattcattagtatgaagctgttaggttgccttcatggcctccccaatcagggagcatggacagaggtgttcttctctcccttttaattttaatccttactcttggtcatacacaaatagctattaacaccacacactttagctccttctatgctacaggagaaataacttacagatgtaaacattaatgcttattatatagccatttttgcactagcaactttacatgaggcaactatcattttcttcattttaaagtttaaagaattcagatgtgraaatacaagttgcctgccagtgaatgctgcttagacatccatactaaaagaactgagttatgtgtatacacacatcttgtgtaccaaaactcaaggataattgtttgagtattaaacataccttaccataaattcatcccttcactgattgttaaaggactcttccaggttaaaaaaaaaataccctaaattctggaaaaatttattttatctataatataaacttaatggtgaaa

SEQ ID NO: 265475 - DNA, 573 bp, Homo sapiens
acagaaaaaccatagagaaaatctacaaaaccaaaagttggttcttgaatcaacaaaattgacaaagttttatccagattgaccaccaccaccaacaacaaagagaagactcaaatggccaaaactcaagaataaaagaggggttataactaccaatattattagtcactggagaaatacaaagtaaaactaccatgagatactactatacttctatcagaatggctaaaatcaaaatgtaaaaaacctgacaatacaatgttgatgaggctatagagcaactggtgggaatgcaaaaagccaaagccagttttcatggcagttggcagtttcttaaaaagttaaacatgcacttacagaaattgacaagttgatcctaaagttcatatgsaaatgtaagggacctcaaatagctaaaacaatcctgagaaataagcacacaactcagtaatcctactcacaggtattcactcaagaaaaataaaaacataagttctcaagaagactgtacatgaatgtcctagcagctgcgatagtctgaatgtttgtatccctcctcagattcatatgctg

SEQ ID NO: 265476 - DNA, 573 bp, Homo sapiens
acagaaaaaccatagagaaaatctacaaaaccaaaagttggttcttgaatcaacaaaattgacaaagttttatccagattgaccaccaccaccaacaacaaagagaagactcaaatggccaaaactcaagaataaaagaggggttataactaccaatattattagtcactggagaaatacaaagtaaaactaccatgagatactactatacttctatcagaatggctaaaatcaaaatgtaaaaaacctgacaatacaatgttgatgaggctatagagcaactggtgggaatgcaaaaagccaaagccagttttcatggcagttggcagtttcttaaaaagttaaacatgcacttacagaaattgacaagttgatcctaaagttcatatggaaatgtaagggacctcaaatagctaaaacaatcctgagaaataakcacacaactcagtaatcctactcacaggtattcactcaagaaaaataaaaacataagttctcaagaagactgtacatgaatgtcctagcagctgcgatagtctgaatgtttgtatccctcctcagattcatatgctg

SEQ ID NO: 265477 - DNA, 465 bp, Homo sapiens
tttgtttgtttgtttttgagacggagtcttactcggtcgcccagcctggagtgcagtggctcacttcaacctccatctcccaagttcaagcaacactcctgcttcagtctgcctagtagaatgcaccaccatgcccagctaatattctgtatttttaagagatgggatttcgccatgttggctgggctggtctcgaactctgacctcaagtgatccgcctgcctccacctcccaaagtgctgggattacagatgtgagccatcacgccccaccagtcaccctcctctttatactgcttactatgggytacttctcagagatagaagacggtatcaatgccacaatctagggtaaatgaccaactggagtgtggtttgtcctcaaaacttccatgtatgagatagagtcagtagtatacttatttctattttctaaccttcttcccacaaaatattttggacaaca

SEQ ID NO: 265478 - DNA, 465 bp, Homo sapiens
tttgtttgtttgtttttgagacggagtcttactcggtcgcccagcctggagtgcagtggctcacttcaacctccatctcccaagttcaagcaacactcctgcttcagtctgcctagtagaatgcaccaccatgcccagctaatattctgtatttttaagagatgggatttcgccatgttggctgggctggtctcgaactctgacctcaagtgatccgcctgcctccacctcccaaagtgctgggattacagatgtgagccatcacgccccaccagtcaccctcctctttatactgcttactatgggttacttctcagagatagaagacggtatcaatgccacaatctagggtaaatgaccaactggagtgtggtttgtcctcaaaacttccatgtatragatagagtcagtagtatacttatttctattttctaaccttcttcccacaaaatattttggacaaca

SEQ ID NO: 265479 - DNA, 570 bp, Homo sapiens
atcacacctaatatgaaatattttgtcctcaaacttttcctattctattttttatcaccacccccacccactgacttattaacaatatttttatgccctgattccctgaagacagttaacagaccattttaaaaatatattttctcattcgacccttactcaattctgggagatatgcctggtaaggattagtctccccatctgacagctgacttaactaaggctcagaaagatgcagacaactgcctgtaatcctcaagttaataagtcgaaggacagagccaagaacctargtttgctcagttttataccaacgctccatcacaaaattacacatttaaaatgcttcctatgcagacactattcaaagcactgtcactgcctttatataaccagtaagcctcaaacatggaagattttaagaggatttatatagaaataatgtaaaacatacattcaaacaggtagagagtgaagatgggaaggatatttgaccacattctcagctcagtgtttttaaattctggctgcacgctagacttgtccaatgaactttttagaagttctgta

SEQ ID NO: 265480 - DNA, 612 bp, Homo sapiens
aagacaggtttgaatagggcttgtgatcctactttagtccagtgaaacagcacttgattaataaatcatttaaatcttcctaaagttaaaatgatggaaaatgctactttttaaatcaaggttttaaatgagtgtcaatttggtaaagagccataatggcattttttacagatggtcttagcttcaattattcatacatctccttgaattattttagtattacccaagagatgaaataatgttggataaattactgcttctgcttctgtggacagctgagtctaatacttaaaaaacactttaattattttctgttaatattactcttaatataaaatcaggtgcattgatgctgcaagattaggtgcttatcctctacagtttcagagctgatgctagttggaattgcttctttgtggtaatgaggaaacaacgctcttttttgcatatggagagagctgtaccttaggcccaacatgttacttggccaaatgtktttgtgcagtgtaccccctgtacagctgtatgtgattggccaaccttatttttatctcccatagcagccttaatgtctccttgttaactctcatctcacttaaagttacttgttga

SEQ ID NO: 265481 - DNA, 612 bp, Homo sapiens
aagacaggtttgaatagggcttgtgatcctactttagtccagtgaaacagcacttgattaataaatcatttaaatcttcctaaagttaaaatgatggaaaatgctactttttaaatcaaggttttaaatgagtgtcaatttggtaaagagccataatggcattttttacagatggtcttagcttcaattattcatacatctccttgaattattttagtattacccaagagatgaaataatgttggataaattactgcttctgcttctgtggacagctgagtctaatacttaaaaaacactttaattattttctgttaatattactcttaatataaaatcaggtgcattgatgctgcaagattaggtgcttatcctctacagtttcagagctgatgctagttggaattgcttctttgtggtaatgaggaaacaacgctcttttttgcatatggagagagctgtaccttaggcccaacatgttacttggccaaatgttyttgtgcagtgtaccccctgtacagctgtatgtgattggccaaccttatttttatctcccatagcagccttaatgtctccttgttaactctcatctcacttaaagttacttgttga

SEQ ID NO: 265482 - DNA, 605 bp, Homo sapiens
catgttggccaggctggtctcgaactccagacctttagtgatctgcccatccctgcctcccaaagtgctgggattacaggcttgagtcactgcatccggcctaccatatttgttttagtgtctcatggctgtgggttgtcctctcttatttargagatggtaaacttcttgagggcaggcagggaattacctttcttctctggggagggagcacagactagaggttatgggcatgaaccttgcaatcaggtagaattttgttccatttccagggttagctaattgtgttacctgggagaagttgacttactgaccccaagctatgtgtgtgtgtgagtgatttattagctacaggtaatgcttacttcacagagtctgaaaatgatgtaagatgatgtcacacagtggttgatgagatcacacttgaactgcctaactcacaggcttgtgatcaagtttcattcaatttgattaaaagaaaattaagcgtatcaagggtgtaaaggctacaatggtgaacaagtttttgggttcagtccatggaggcttgaacagtgcttggcacccaattagtgccccataactatttgttgaatgaaagacta

SEQ ID NO: 265483 - DNA, 622 bp, Homo sapiens
ctacagtgcagtttctggcacataagttactgaaaataagatttctttcctatctcccatccttcatcccttcttctctactgatgtcctctaattggagtcattagtcctctttctaccaagcaaagccaaaggttcccagacatatacaacctcagaaaaaaaaatgtgaaataaatggcagatactaacatcagatttactattcatttttctttttttttttcatttcatgaaaattacattcaaaccggtttcttgcctggagaaaagcacaaaacaaaatttacataackcctttaaaaatcaaaacacaattaacgttaagtttcttcatgcattctcaaaaatccaacaatatagtttaatagaaaataatgacaagcaacatttattgagcgtatcaagtattaaatcactaattctcatcagaagtccagagggaattacgtgagtcccatttacaattaagaaaacagacacaaagaagttacaaattttgccccaggttacacagttactaagtggtaaagacagtatgcaaaattagaagaagaactactatttgaattcatgatttctttattacaattatctactgctgcgtaataaatcatcccaa

SEQ ID NO: 265484 - DNA, 622 bp, Homo sapiens
ctacagtgcagtttctggcacataagttactgaaaataagatttctttcctatctcccatccttcatcccttcttctctactgatgtcctctaattggagtcattagtcctctttctaccaagcaaagccaaaggttcccagacatatacaacctcagaaaaaaaaatgtgaaataaatggcagatactaacatcagatttactattcatttttctttttttttttcatttcatgaaaattacattcaaaccggtttcttgcctggagaaaagcacaaaacaaaatttacataactcctttaaaaatcaaaacacaattaacgttaagtttcttcatgcattctcaaaaatccaacaatatagtttaatagaaaataatgacaagcaacatttattgagcgtatcaagtattaaatcactaattctcatcagaagtccagagggaattacgygagtcccatttacaattaagaaaacagacacaaagaagttacaaattttgccccaggttacacagttactaagtggtaaagacagtatgcaaaattagaagaagaactactatttgaattcatgatttctttattacaattatctactgctgcgtaataaatcatcccaa

SEQ ID NO: 265485 - DNA, 546 bp, Homo sapiens
tcaacacaggtgccaagaaaatttaacagaaaaagaatcgccttttcaacaaatggtgctgggaaaacttcacatccacatgcaaaagaatgaagttgggaccctttcctatgcaatacacaaaaaaaatggaccatatacctaaatgtaaaacctaaaactatgaaactcttagaagatataaaagtaaatcttcaaaaccctgggtcaggtgaagcctatttaaatataaaccaaaaccacaaacaaaagaaaaaaaatagataaaagttttgygctgcaaatgataccatcaagaaagtgaagatgcaggctaggtgtagcagctcacgcctgtagtcccagtactttgggaacccaaggcagacagatagcttgagcccaagcattcgatattagcctgggcaacacagcaagaccccatctctacaaaaaatacaaaaattagccaggtgtggtggcatgtacctgtagtccaaactactcagaaggctggggtgggaagatcatttggacccaggaggtggtggttgtagtgagccgaaa

SEQ ID NO: 265486 - DNA, 621 bp, Homo sapiens
tgagtatggttttctgcagtgggcagtttccttctccaaggccttcctccacatcattcagcccgcctgacttcctttcacctgcccctgctgcctgagctcctgctgggggttgcagtgatcaaagtcaatacaagcctcactttagaatggcttccataccatcaatccacgtttgaaaaacaaccaccaaaaagacttgtgctcattggtaaacaagagtatccccaccaggcaggcccacagcctaattgggagtgactcagctcatcaatgcaccagactcggccraaaatttctcaacttgttgatacaaagctagacattaaggtggaagcggagagcaaagagaagcatttaagttcgctgggagtcccagggtccaccattaagccccctgttttcggcaatcattttgcattgctaaggacagtggaagacctggccccaatccaccacagtaggcagaatctgaatatgggagtaaaggttccaagcagagagaagtcaggcgattaagggaagaaacaggtctctttaacaattaaagcctaccttatgatcatgttattacacttggaataaatgttacctaggagacatcatgcttaaagcttcaca

SEQ ID NO: 265487 - DNA, 465 bp, Homo sapiens
acttagatcaaagggagtaatcaaagttccaaaagaatttcagattagcttttacattatcatgtgtcccatgattacaattacctggacccaaaaaaaaaaacgagctttctacactaatggatttgtcttggggacaagagataggcagtatacacccatcgtcwtgctttgcacgttattgcaaggacacacgcaacatcgtgtctttcctatgtcaggcatccttggactcattaactcttaaaaatcccatccatcacccaggacataaaaggtaaaagtcacaacatcactaaccaaccttcaagataacttctcactcactacaatgaacatgatgtgtaagaggtagacagaaaacacagtgttataattgggaagaggtgataaaggcgtgagcaaaaattaaaagagtcatgtattatttgcctagtgttagacttgaaaaagggcttagtatat

SEQ ID NO: 265488 - DNA, 465 bp, Homo sapiens
acttagatcaaagggagtaatcaaagttccaaaagaatttcagattagcttttacattatcatgtgtcccatgattacaattacctggacccaaaaaaaaaaacgagctttctacactaatggatttgtcttggggacaagagataggcagtatacacccatcgtcatgctttgcacgttattgcaaggacacacgcaacatcgtgtctttcctatgtcaggcatccttggactcattaactcttaaaaatcccatccatcacccaggacataaaaggtaaaagtcacaacatcactaaccaaccttcaagataacttctcactcactacaatgaacatgatgtgtaagaggtagacagaaaacacagtgttataattgggaagaggtgataaaggygtgagcaaaaattaaaagagtcatgtattatttgcctagtgttagacttgaaaaagggcttagtatat

SEQ ID NO: 265489 - DNA, 595 bp, Homo sapiens
ccccaggtgaaagagcaataaatgcttattgctgtgtgccactgatggttggtggcaatggataactgatcaaccaattcattcagaccaagcaaagattggtaaagaaaggtcaagcagagaaacaagagttaaatatggaccacgaactctgattagaaagagaacaaatacaatagtctcaagagagctaaatttaaattaattacttggaggtgagggcatctccattcttccccatctccaaatataatagtctcaagagagctaaatttaaattaattatttggaggtgagggcatctccattattccctatctccaaatacaatagtctcaagagagctaaatttaaattacttggaggtgagagcatctccattcttccctatctccctcattaaaatttaacctaggttagcatattctcccaagagacagtttttcattattccaaataatttccggttttcctttccttagaaaagaattgtaaagagccaaagagcttcactgattcatcaggtactttgaccacrggaaaaatctgaggacatcaagaataaggctggatgacctcaaaaaggttaatacgt

SEQ ID NO: 265490 - DNA, 528 bp, Homo sapiens
tttctttcttgggtgtgctatcattttctctcttagcttggttgcttcgtattaaatttgaataaacatgtttccctagcctgttctccatatatttcccgtgggagtatgaaaactatctgaccattattccaaagtgactaagcatcataggccacagtataattggacaaaaggagctacatttaagtagctgataagattgagtataaaagtgagtgcttttaggaagtttttgttttagtgtacatggaggtaagttaagcacaaataagataacaaacataaaggtatagcttactgtaactcactcaaatgaattttgtgtttagcatttgaacaaagttcagaggaaatccaagaatgcatttaactattctctttttttgattaaaattctttcctttgtattatagtggtattaatatttatttaagccttcattctaaagtgatgttcagccataatagattaaccgtacctgatttcagaargtttttactcaatttccagatttaggtctatgca

SEQ ID NO: 265491 - DNA, 537 bp, Homo sapiens
atatatggtttcaagtgtggaaataaggaaattgccacttgcacaasactgagcttaatatgtttaaaacatgcacacacacacgttttaaggaatgctttatgttgcagaactgtataacttaaagtgagttatctataatttctcttattctgcccacctccctccctccatctcagctctaaatttataacttagtaagtgggtgtgtctttggggctggtttggatccctcaagtagaagagagcaagccagaaacacatgtgcaagagatttactgggggaaggacttgtaaggggaaagggagtaactgtaggcacagagccttcagacccagtgcaggtgtgatgcctgtggaaggagatggggaggaaggaaggtgggaaggagttgcttccagctgcagccattgggtgggagcagcctggggtgtgtgaatcttccacagatctgaaggggcagtgtctgaaggctgtcagtcatctacgctctcttgaagggagcactgaggggcacagctgcacactgccacagt

SEQ ID NO: 265492 - DNA, 605 bp, Homo sapiens
atcatactgtgaccttattctggaaggtaagatgtgcagattccaaaagtctgattgtttccaaaagtcacatttgtggaaacaaatgtgtcttcctctggagaactgtggattggttcagtgtcccaactgggagggatcttcacattcatccaatagaatttcttacctagtagaggaatcccactccactcctttgatagctsatgcaactgacagccagttctgattggtagaaccttctctgcaacttcaactcaggccaggcttgacttttgcagggcccagggcaaagatgtaagtaaacaaccacatatgatagttaaaagttacacatatttaaatagtcatactatttatatttaaaaattataaatcaagcttaaaaattgtaatataaaataaattttatccttctatcttgactaatacaccttcatgacaacctggaaggccaggtttgtattctgaactctgtgatgcgtcagtttcacactgaaacatggtgatcctgggagagttggctctggtctcaacctaccccactttttttttcacctttagtttggcacactccgcaagaatctctgtgcacagacgtgtgg

SEQ ID NO: 265493 - DNA, 501 bp, Homo sapiens
cctacaaagggaaccccatcacgctaacagtggacttttcatcagaaatgctacaagccaaaagagattggggcctgtactgaacattcttaaaagaaattccaaccaagaatttcatatctagccaaactaagcttcataagtgaatgagaaataagatccttttcagacaagcaaatgctaasggaattcactaccattagacctgccttagaggagatccttaaggaagtgccaaatatgaaaaaggaagtccattaccaaccaccacaaaaacagacttaagtaatagaccattgacagtataaagcaaccacgcaatcaaatctgcataataaccagctaacaagacaatgacaggatcaaatccacacataccagtattaaacttgaatgcgcacaggttacatgccccaattaaaaggcacagagtggcaagttggagaaagaagcaagatccaactgtatgctgtctacaggagacctatatcacacgcagtg

SEQ ID NO: 265494 - DNA, 600 bp, Homo sapiens
caattaaatggctataaaatggtatttcatgatagtcttgagattgaatctcatgagtattttggccacatctgttttctcttttatgaaaagcttatgcaatttgcacattttttgttggtaagaatattcatatattcttgatactgattgttgtycatttctttactactaataccttctcccaatttgtaactcactttcttttatatgtctattgattaacaaaagtttatcatttttaaagcagataattttataaaaatattttaaaggtatcatttcctaccccaagatcagaaggacagtcacctataagtttttagcaagaagtttaaaggtttttaagaagacaaattccaaatccatctgggattgatttttttatattaagtgagatagggttatgacactgattttttctgtttggtaaccatttttccatatctgtttatcaaataactcttccctccctatgatctgacatgccacctctttcactattatgaaagtgtaagagagttctggattcttaattccactggttggtctgtttattcctgcactagtattacactaacttttaaagtttcagatgag

SEQ ID NO: 265495 - DNA, 639 bp, Homo sapiens
ggtgtaggacttgattatttttctatgcagtggtgggctttatcttagcaagagaagtagaggaagaacgatgagataatacagatgatcctggatttatagtggggttacatcccgataaacccattatgaagttgaaaatatcatgagtcaaaatgcatttgatacacctaacctattgaacattatagcttagtctcatttatgttaaacgtgctcagaacacttacattagtctagagttgggcaaaagcttctgacacaaagcctattttayaatgaagtgtcaaatatctcatgtaacttactgaatacggtacacagcagagcattggttgtttactcttgcgatcacgtggctgactgggagctgcagttcactggcaccacccagcatcgaaagagagtatcctattgccttctactgaatatgtatcactttcataccctcttaaggtccaaagattgtaagtgaaaccatcataagtcagggactatctatatatcagaattggtttcagctgtaagaaacagaaaattcctgagtgagagtgactgaaataagaaagattacgtctctctcatgttcaagaggtctagaggcagccagagctgggctggtaaataatctacggggcg

SEQ ID NO: 265496 - DNA, 607 bp, Homo sapiens
cagaggttaccaattagatcttccttgctccagaggaaccagttggtaagttttagttcctttagccatttatttccagcaggtaacatgtattcctcaaaacagatgtcaccactgaccaacacccactgtctgtaaaggaaagctgaataaaaccatgagcayccccataaagtctttcatttggatgggaacaaagatcatgcagtataacgtctccaaggcccatcttccatccaccactgagttactgattctatcattttaaagaaatcagaaagaggcaatcctaaatataatgaattcatggacagcatttattgatgacctcaaggaaaagacttcaaagcaacataatcatgttcttcaaatcacttttttgagtcgtcatatgggagaaacttactctttatggctctgaaaggcagagtttggactaatgaaggtaaaattcagacagatgcatgtatggatttcctaataattagatgtgttttaaaaaatggagcaagaagatcttgagaaacagtgctctcattgtccctggagatgtccgaagaaagattgttcgataacgcatctgcaaagctgcaagaaagtttcatgc

SEQ ID NO: 265497 - DNA, 563 bp, Homo sapiens
ctgcagagaaatacagtaataaatgcggattgagcaactactgtgtgccaggcactgtgctaggcatgggcaagcctgaaggaaacaaatcaaacaaaatcctcgcattcatgaaactcacatctagtaaaacccaggaaataaaaatgagagggagggagaaaacagaagagcatggcccctgaatgctgyctttgggttctgtgagaaactctaatgattctccaataaacttcctgctttgctcacatctactggagctggtttctgttgtttgcaaccccagtgatcttaactgagaccccatactaagtacattgactcagtatccattctcttcacaagcactttggggcaggaaaagaaagggacctttttaagatcaacaggtcagaaactagtgaaaaagaaaaaagatttttttctcaccatcattccatatatcagttctttaatttagggtcttggggtttttagttgccgtaataaggaagaccaagggaagctgtttccccagatattcaggatggcagagcaaaggttatatgataggcagagtttta

SEQ ID NO: 265498 - DNA, 578 bp, Homo sapiens
gatgttggttacggtggtgttggctagttgagtcagcctaatctcaggcttcaggggaagtggttgcagtgagataggtatttccacagttcycagggagctagatgacccacaggacaacatgtatgagttctgaaggggctagactggggttggagttcaggtgctgtctatgatggggtggggcaggctggccaccaggtctccagccaaactaactctcaggcaggggcaggcagaacacttagatggtgggagcccaagggaatatcccaggccagtgggggctgggttttcagaagggctctgggccacagctgaaatgttcaggtagtggcagggaggttaggctatgggcccttcaccagggagggcaggatttctcagctgaagcaatgaagacacacagctgtggggtgcatgacatgctcctgcttcctcccatccaactgatgctggacttcacttttgggggcacgcacgggtgccacaccttactacctctgggagtttttccccagaggaactcagagccatgactgcccacagtgttcaggtgagggtgtggttattgtgct

SEQ ID NO: 265499 - DNA, 591 bp, Homo sapiens
atctttaacctgtgaattaaagtctctattcatggcttttttttttttctttaactatggagaccttaggagctagagagatacaataaaaggaagaagagtttttttttttaatgacatctgcttaaaggaggagaagtcattagatctattatcttcctacatcaaccaactataaaggtaaaataaactatttttcagataaacaagatctcaaaaaatttacttaccatgcaccctttccaaggaaagtactgatrgatgggctccaccagaacaaggaagtaaaccaagaaagagtgaaacaagagattcaatgcaagaaagatgtaaaggaagtctctaaattaatgggaaaggagattccaagaaaacagtaggcaatcctaggtatcgatcatccaattaatgtggtccagaaggttctagaagagacatcttccaaaaagtaaaagtgatagtgtacttaatttgtttgaatgtataaagaggagatttacagggggagtgtttggaaattagtgataaatacatagaaaactaagcaaatggaaaaacaagtcagacattcactttagggaaagaaaatgt

SEQ ID NO: 265500 - DNA, 610 bp, Homo sapiens
gggtcttgagccctagaagattacagaaatagtccacactagctgctttcccttgaaaagaggactcttacgggaatcaaatatgaaaacagatatgaacaaytgctttttaggaaaataaataaaaaaatccacttggtgtatggctaatattattttttgtaacataataatagatatgagttgtcttttggaaaaataaagaataggatccatgtagtctatggttaatgttatttttgctaacggtgctaagtgctagttttccacaattcctccagcacttccacctcaatttttctttttgtagataatccttagtctcaatatgacctttgcttcaatgttttaccgggcccaaattaccaacaagtgtacccattaaaaatacaaaaatcagacttgctagtataaggtgagatagtggaaagatgtgttgatagcagggagtaaacagctacacagaagtattgctgttgttgaaaatcatcatactaaataagtttcattgtgggaaactgccctttgagaggtagaattatagactaggtatgaatcctaagtggacagagtcaaaattttatttaacttgcgcagatctcaaatttca

SEQ ID NO: 265501 - DNA, 559 bp, Homo sapiens
atgtgcacagaaaagagcttgctaactttgagaaattgaaagatcaatatggctagagagcagtgagtgaagagaaggttatcattcatttactgttgtttcatgatctgtcttcctataaaacggtaacaggagacgctcaagaygttttctttcaaggaatgaatggctaaatgaacacatgcaaagacttgatttttttaaacctaagtggaaactgtatataatttcatattgtgctccttaaaacttaataacatgtaatatgtcctttccatataatcatgcttttacttatttatttatttattcatttttgtgacagggtctcgctctatcacccaggctggaatgcagtggcatgctcacagctcactacaacctcaacctcctgggctgaagtgatcctcccacctcagcctccctaatagctgggactatagacgtgtgccaccatgcctggtcaatttttgtattttttgtagagacagggtttcgccatgttgccaagctggtcttaaactcctaggctcaagtgatcctcccactttggtctccc

SEQ ID NO: 265502 - DNA, 637 bp, Homo sapiens
agtcagttcctaacagaccatggtctggtactggtctgtgggctaagggttgggaacccctgccttactatacaaaattatttggtccctgatttagatatccagatcaaataagaataaatattttagaaaatctcttcaattaccaaatttcagatagcaagtatgaagagttcagacagcaaaggatttatcaaagaatttatttgaatctctttggtccccaaggtcagacggtgtagagtaaggagaaagaattgaatggtggaaggtgctactttagacagggtggtcagactcctgaataaactgagaaaacaactgatgcaaatatctgaaggaaagaactccagccagaagccataataagtgcaaaggccctaaaataggaatatatttgctacattcaagcaatagcaaaaaagccagtatagcctttataaaatagcattcccataaccattaaactctctccttccctgacatcgtgttttcttcaaaacattcctcagtatctgacattatatgttgatttgttttttaggaatcctaatttcccaaacacatgtacttgatawtgacataatgacatactttaatagactgatgaaatgatgaacataatgaattcattctc

SEQ ID NO: 265503 - DNA, 541 bp, Homo sapiens
gaacattactcatgcttaactcagaatcccagagcatgaaagcatgccactattggtatagagatgcagctaacctggtggacaaattttgcaggcaaattaccaagctcctaggatcgttattcaactaacttccagggtttgaatgggtcttccagttctaaggattctgggataatttttttatatgtaactatcttctcaacttcagtttatgctccctaaacgaagaaaatatttacatccatctctggactctccctccagatccatmcctccacaatatctaaccagtgttcattcaatatctgccaaatgattctatgagtcaagttgccccttaaaattttattatacaactaaaattaaaatttttgccatgtgaggcaccttttatgtacaacataaatctaaaattgagcagaaagtgtttttctttacatctgaggcatgtgttttgttttacccagtggcctatatgtaaaatcatgcaacattttatctttgattgcaagaagaaaattgttacacaggagaaatt

SEQ ID NO: 265504 - DNA, 492 bp, Homo sapiens
tagccagctctacgtgtattaaactctctctctattgcaattcccctgcatagatacatcagctctgtctgggcagtggacaagatgaacccaccaggcaattacaggatgaactattaaaatgaagttttgagatttaacattctgrttcagatattaattactattaaaaaaaacaagcactgaaatgggaagtttggcaaaaatcaagacaataaatctagctagggacagacaagaatccagatatctattcatcaaataaaggagtaagttcagtttagggagactggcatacctaaattctaatcattcttgtcacaaactagctgtgtgaccacaggacagccaattaacctctcgggaccctagttttctcatctgtaaaataaactattttagattaggtaagcactaagtttccttccaactactgaaaaaaaaataccatgactatgatctgtttgtgtaaactgaaaaatatttgtgagg

SEQ ID NO: 265505 - DNA, 606 bp, Homo sapiens
caaactttttctaaaccaagactaatgactaacactgttgaaacatgaatattcagggagttagctaagcagtatgccaggtgagatcagatctggaacatgtatgtaaaggcatgtatgtaygtatgtagacatgttctcactcttgcccaggctggagtgcagtggcaccatcatggctcactacagcctccatctcctgggctcaagccattctcccacctaagccttccaaaaatcctttaaatgatcaaactgcctgctttcgcctccctgcaagatttacaaaaaaaaacacaaaacaaaataaaaaaacacatccaccctgtggtctagtggctaagactttgtgctttcattgctgcatcctaggttcaattcccagtcagggaagcagtccctgttggtttgatatttgtgtgaatttcaacttgtggggatactgctttgctacttggtaagttacctttggttaaaacagccagaaataagccaggcgtggtggctcacgcctgtaatcccagcactttgggaggctgaggcgggcggatcatgaggtcaggagacagagaccatcctagctaacacggtgatggtgtttagtag

SEQ ID NO: 265506 - DNA, 581 bp, Homo sapiens
aaataagtttctaacacatgaacttttgtgggacacagtcaaaccacagcaatggtatcacaccaaactgttagggcaacttttcttgagcccatgaatattcaacatattaactagctgactactgtcatacacagtggcttctctctctccaggagataagaaatcaaaacaggatttacactaggactgtctagctgtgtcctgtaccacttctgctgttccctggaagaamacagagggaacaaagaagggatcatgatagcttccctctcagttgctcagtctttgtcccttctattataagaacaatttccaaaagtttcattcctatatcaatctttacttaataaagtgaaggggaacttttttctaactaacctatcaaaataaactcttccatctattactccccattacacaaaatatgcttgcatcactgctcatctacaacataaatattctgtttgtaggtttaatgacagtataattttgctttgtgacagtatcaattttcactaatttgactgtactactggtgtctaaattagcttacaatcttttagagggcagaaattctg

SEQ ID NO: 265507 - DNA, 581 bp, Homo sapiens
aaataagtttctaacacatgaacttttgtgggacacagtcaaaccacagcaatggtatcacaccaaactgttagggcaacttttcttgagcccatgaatattcaacatattaactagctgactactgtcatacacagtggcttctctctctccaggagataagaaatcaaaacaggatttacactaggactgtctagctgtgtcctgtaccacttctgctgttccctggaagaacacagagggaacaaagaagggatcatgatagcttccctctcagttgctcagtctttgtcccttctattataagaacaatttccaaaagtttcattcctatatcaatctttacttaataaagtgaaggggaacttttttctaactaacctatcaaaataaactcttccatctattactccccattacacaaaatatgcttgcatcactgctcatctacaacataaatattctgtttgtaggtttaatgacagtataattttgctttgtgayagtatcaattttcactaatttgactgtactactggtgtctaaattagcttacaatcttttagagggcagaaattctg

SEQ ID NO: 265508 - DNA, 542 bp, Homo sapiens
ctgaaaggaagagtcagttgatgcagcaaacttctttgttgtcttattttaagaaaatgtcgcagccactccaaccgtcagcaactgccaccctgatcactcagtggccacaatcacgaaggaaagacactctgccagcaaaaagagcatgacctgataaaggcttgaatgactgttagcatttttagcaataaaatatttaaggaatgtatatttttaaagacataatgttgtatacacttcacagactactgtatagtgtaaatgtaagttttgtatgtactsagaaaccaaaaagttcatgcaacttgcttgattacgatacttgctttattgaggtggcctggaaccaaacctgtaatattcccaaggtgtacctgtaatgaggttgttatccattttatgtaacaagatggagcatatacaaagagttgctaattaagaaattaccttatttcttgcagggatgtttagtaaggtactaaatatctttctgattatctacccttacttgtggagaacttaactccacagacttgtaa

SEQ ID NO: 265509 - DNA, 628 bp, Homo sapiens
aaactgcatttgctgttgaaaatttcataatgctagattacattgaaatattgttgcatgttttgatacgtaaaactcagcagtttaatattttcgcttttgtcatcacagccttttttacatttaatttggatgatactagattaaaagtggcttcaaaacaaattgcctgcacttgcatatatatttagtgcttgcatatggatgaatagktccgtgagttcttcttgtggatttgcttgacctatgtaagttgttctttaggtttaattgtacatttttgtcattgtaagcagaattgcattcaggctttaaattcaaattcttctgtgcagctgcctgggcacacacatgtattttgtctccacaggaactgaaatctaaatgcactcgcttagattatgcattgggagagtttgtgggtaattcagaggtcatgggataagctatgccagtgggagggcacagatgggcttgtctctatgcttttttttttttttttttttgagacagggtcttactctgttgcccaggctggagtgcaatagtgtgatctcggctcactgcaacctctgtctcccgggctcaagcaattcttgtgcctcagcctccagaatggctgggacta

SEQ ID NO: 265510 - DNA, 603 bp, Homo sapiens
aaagtatacttctctgataatatttctttggagaattattaaaattgtttcctttgatgttgggtttggagaaaagtggacaattcatcatgttctatttctacargtttaaaggtgctttgtaggatcaaaagtttcctatatttggtaaaaaaaagtattgatttggattcatagtttaataaaattatatgttagattaattatatatttaacaagtgtttgttaaacacctatatgcagatcacttggacaattctgaaaaagtaagagtcctagcgtctcccatcagggacctatttcctacttgggaatgaaacaatcatacacattaaaccataagcagcaatgcatggtatatgattgccaaactgagggataaaattgtgtaataattcaaggaagagaatactagtgttaaatgggacggtgataggaccagctggaatttgactcaggaggaagactagaagtttgtcgggcagaggtgcagagagaggagtgccaggcaggaagaactgaagaagaaatactcactgagctcagaggagagtagtaagtttactctaacttgggggttccctttgaggagcattgagaatc

SEQ ID NO: 265511 - DNA, 565 bp, Homo sapiens
ctggaatttgactcaggaggaagactagaagtttgtcgggcagaggtgcagagagaggagtgccaggcaggaagaactgaagaagaaatactcactgagctcagaggagagtagtaagtttactctaacttgggggttccctttgaggagcattgagaatcagatggaaaggaagaatggtttcaaaaccacagagattttagtccaaacytaagaggtttatactttacctgcagacactggagattattgaaggctgtcaaacaggaaaattggtctgccaggaaggtaaactcagcagtgttaaacaggctcagtgttgatggatagtggaaagaagctggaggttgagacccatttaaaggactatgaaaatatttaggtgtgaaaatgtggatttgaaagaattggatgaaggttagaatcttgcaagaagaacaaatagcatttagtgactgaacagtttggaagacaaaggagagaaaatggctatgttattttaaagcctcagacatggataattaagggagagatggtattcatagtagaaagaggaaagtgaaca

SEQ ID NO: 265512 - DNA, 580 bp, Homo sapiens
atgttccaacaatgtaatcctaaaatgtgatattacaatgaagatgtgcttccttgtgtcattttaaaaataaatagttctcacacttttaagtttgattttagattctacagtgacaccttacatattgaaacaggcaatctatgttaactaagacaggaatattcattaaaatggcaacaacagcaacattgcacttctaagatacctaacaacggtggtcagcatcaggaggctgacaaataatgtgtgcttgataatgaagaagaatgaaataatttgagattttagacatatgcaacagattttttgtgtttgttttattttttattttttggctttattgaggtataattggcaaataataattgtatacattcaaggtgtacaacgtgatgttttgatatacatatacattgtaaaatgattaccacaatcaagctrattaagatacccatcacctcatgtagttatgtgtgtgtgagtgtgtgtgtgtgtgtgtgtagtgaaaatacttaagatctactcccttagcaaatttcatgtatacaatacattattattaactatagacacaatg

SEQ ID NO: 265513 - DNA, 508 bp, Homo sapiens
ttttgtcaacaacagcaaaagaggcagtataacacayggaccaagagcaggagttctagagattcatggactgtgttcaaattctctaccactgactagctttgtgaccttaagcaagtacttaaccacttcttgcctcaatttcctcatcttttaaatggtattaacaataggatctacctcatagaatttttgtgaatattaaatatgaatatttcattgtaaagtattgtgaagagcttagagcagggcttggtaaactgtagtgagcacctcaaagcaaactgattttaataatcatcatcaccatcatccttccaaagtcaagggtgctctttttatccttgtgaaggaaggattgtggaattcattcttttaggttagagctcttgaggttggcagagccaccacaccttgaattaaatattgtcccctttctgaataccactgggaagtggccttcactagacctaacatatttgaaacattgattcatgtttaaatggtt

SEQ ID NO: 265514 - DNA, 508 bp, Homo sapiens
ttttgtcaacaacagcaaaagaggcagtataacacatggaccaagagcaggagttctagagattcatggactgtgttcaaattctctaccactgactagctttgtgaccttaagcaagtacttaaccacttcttgcctcaatttcctcatcttttaaatggtattaacaataggatctacctcatagaatttttgtgaatattaaatatgaatatttcattgtaaagtattgtgaagagcttagagcagggcttggtaaactgtagtgagcacctcaaagcaaactgattttaataatcatcatcaccatcatccttccaaagtcaagggtgctctttttatccttgtgaaggaaggattgtggaattcattcttttrggttagagctcttgaggttggcagagccaccacaccttgaattaaatattgtcccctttctgaataccactgggaagtggccttcactagacctaacatatttgaaacattgattcatgtttaaatggtt

SEQ ID NO: 265515 - DNA, 379 bp, Homo sapiens
ctaatctttttgtacagtcatttgtttattcttaaatttttctttaattatggtacctggttgtccagtgagtcctgggactttttgggcagaaatttgaggattcatagattcagactctacagaaaatttattacagcttttcacatttaaagctatgctgttcatcattgcctttgaaccataaaaaaagtcaaaaattgtaggagcttttttctttttttttttcttttttttttttgggggaactttttttttttttttttttttattatactttaagttttagggtctgaggkaccgggttcatctcactagggagtgccagaaaggagcttttttcttacagagaaattccaaaatatatgctactggaaat

SEQ ID NO: 265516 - DNA, 505 bp, Homo sapiens
ttttgggcagaaatttgaggattcatagattcagactctacagaaaatttattacagcttttcacatttaaagctatgctgttcatcattgcctttgaaccataaaaaaagtcaaaaattgtaggagcttttttctttttttttttcttttttttttttgggggaactttttttttttttttttttttattatactttaagttttagggtctgaggtaccgggttcatctcactagggagtgccaraaaggagcttttttcttacagagaaattccaaaatatatgctactggaaatggagggcaaactgcccaactcacaggatattagaaggggtatacttgaattatgtggttaaggatttatggttgaaagtaacagtagcccaaagttgagtttccctgagtgtaggtagattcttcctcaaggaagaacttgaagggcaagaccagttataggaggctctggtttccctggagtgtagttaactcctttcaattctcct

SEQ ID NO: 265517 - DNA, 505 bp, Homo sapiens
ttttgggcagaaatttgaggattcatagattcagactctacagaaaatttattacagcttttcacatttaaagctatgctgttcatcattgcctttgaaccataaaaaaagtcaaaaattgtaggagcttttttctttttttttttcttttttttttttgggggaactttttttttttttttttttttattatactttaagttttagggtctgaggtaccgggttcatctcactagggagtgccagaaaggagcttttttcttacagagaaattccaaaatatatgctactggaaatggagggcaaactgcccaactcacaggatattagaaggggtatacttgaattatgtggttaaggatttatggttgaaagtaacagtagcccaaagttgagtttccctgagtgtaggtagattcttcctcaaggaaraacttgaagggcaagaccagttataggaggctctggtttccctggagtgtagttaactcctttcaattctcct

SEQ ID NO: 265518 - DNA, 616 bp, Homo sapiens
atcatatttttataaataaatattgatattataagtagatatattaattgaattgtagccattataaacaatttattttggtatctctctcagccccaaacaggaaaataatggcagggcttgcatttcattttacattgagttactggagtttttaacttggattgttgtgattgaagccttgataggaaaatgactgagtcccygtctcatattcattggcccacagagactcaaagaagaaaagatcgttcattcttctgcatttttctttccttagacaatatctgcaattaagccccacctgacagggctagtaaaatgctgccgattacaatttatctagaaagcatagacgggaaatatacaggtcttcttttacagaattggcagctgatggttattgaacctgagctaacattcccaaatgaaatgaggtggggcaatttgagtcatatgataacaatgttgtcatcctggagaacagtctcggtatgaatcagcacagttctgtgaaaattaaacatgtgaacaccaagcaaatgccacagaacctccttcagttacaggcatgcatacctgtatccataggagggccccccactagagcgtgaag

SEQ ID NO: 265519 - DNA, 612 bp, Homo sapiens
gtaatcctagtgaactgctagcaaagagtgatcaatcaacactttgaaagcttctggttcatcccaatacctgggatgagctttgataaatgatattcttgggactgtgtgaaatttacattgtagaagtagttaaatacatgtggaaacatggcaggctattgtttttgttatttatttatatttaaacaaaatcttttgtttgcaacaaatcctcacttggtccaagattattctgctgcaaactcaagtcactacatttctatatgcacgaacattagtgctctctctatggatttaaagattgccactcatttatacacatttgggggcacataaataataatataaatagaaaaatgttctacatcccattttaaaaacctggataaagggattgaagaacatatcatacacttgttcatggatgagtactaaatttatctcccaataayactttatcctgggtcatcaagattgacattcattttagaaaaatgtaggagggttagagttcttcaaccttcttcacaaaaatcagccacatctttttgaggacctcacaaagttcttttgtgactggtcacagtcaatgtgcccatctattttgtg

SEQ ID NO: 265520 - DNA, 593 bp, Homo sapiens
gtgggagtgagaagagcaagaacgccaaagaaatattcttggcggcaggctggtggacgcagaaggaaggtttagttatggtccctcaacagctgcaataaacttgctctgtaagaagccatgattatgttgtattgtggatttgccagcaagattacatccacacaagttctttgtagaccatcagtaaactcagggcattctgagcaaatrggaattagctacatgggcagagttttcaactgaaatccacgcctagttcccctaaagattgtttaccagcttttcccagagccagttacaaggagcataacatgacttgattcacaaagaagtaatggaattatagtaataaaggagtgaggaaaataaataacaggaatagacttggcacttttgaaacttaaaggtgttttgcctgagatgaacctgagaactgacctacaatgcttctcatactcgtaaacatggtgcaaagtttgttttaatcatacagaatatgtcaccattaattctttaagcatgcaaagagcatatcatagcaaatattagacaccccagaggtgtaaactatagcttagaaaaacaaaact

SEQ ID NO: 265521 - DNA, 509 bp, Homo sapiens
ccaccatggatataagattctgggaactacttatcttggagagatctttaatctgaaatcactgcaagtttcatgaatatttaaggagcaaagactcagagaagacagttaaagggaaaattgctgttggctgatttttaacaaatagatccttcctagaactcctagttctcactaggaattgcctcagagacaatttccacctatagtcattactcaaggattagrgcccaagacaccacactcaggaggcccgtttattgcagacagatggttcaaaaagcagctctcccagcatgaagactgtaaacccgccgcccaaaccgaggccaagaggaggggctgggttccccacccagtgcacacccacgccagagctcctcaagattttccttcccgcccaggctgtggttgctcttccttcctcacctgattctaccaggatcaaaatgttcttggaataaaattaagtaaagattaggcctggagtataagattaggtcacccga

SEQ ID NO: 265522 - DNA, 651 bp, Homo sapiens
tgaaatgtaagatgatgtgaatgagaccctgaaatttaaggaggcagaataatggtttgcaggtgtgaacattattcatattttaaactaaattaaaattttccccattactctaggaaaatcaaataatgtaattaccaagaggtaagatgcttctgatatgtaaaagatatrctaattttgatgacagttttcagtcatgttaatcaagtaaagtatatttataggatttatattactgagaataataccaaggtgaaacttacaaactaatccttcatttatagcctattctgtaaaatttataaaccccaaatacaggatccttttatgtccatttccttcaagtataaatcaatatgatgggggcaacacaaaggaggggggcttagcactgacatcagtgcagcttgtttaaatacccagatgatgtttagaagactgtacttattctaggagatgtcaaagaggggtttttagtgaatatatgcctcctaaatgtcaatgattgctttaaaatgttccctctaggttatcaaatatgaagagagttccactaccttgcctttttaaacacaattggggcccgacaggactagacactccagcaatagctgaacttgaatatatacaatctgtatctgtggcttc

SEQ ID NO: 265523 - DNA, 572 bp, Homo sapiens
ttcatccttcttgaaacatgcacagactctgagacacctcactgtcctggtttttctcctgctgctatggctgtatatgtctgtcatcctaaagggtttcttctttctccttctcaaagtgtgggcaaggcctagggctcagtcttctgccttcttctcctccttaccccacagggggtcccttccactatcacagctttaaatatcatatggaagttgatgactcccaaactcttatctccaacccaraccacttccttaggtgcagtctcacatatccaactgtccacttgatgccaacatttgggatttaacagccatgccaagtttaccatttgtaaaacaaaatttcagatttatccattccaaactggtttctctcttgatatttcatatcattgggcatggttccattgatcaaacaattaccctagtttccctcacactcctttactcctaacatcaataattcttagactttctttctccctccaaataaacctttaataatcccctttgcaatctattaccatcactctagttacagctgcatcatcacctccctagaattg

SEQ ID NO: 265524 - DNA, 527 bp, Homo sapiens
ctggttatttcacttaacaaagtgacttctagttccacccatgttgttgcaaaagacaggatctcatttttcatggctgaatagtactccactatgtatatgtatctcattttctttataaattcatcacatgttctcacttatttgtgggatctgaaaatcaaaacaatagaactcatggacatagagagtaaaggacggttaccagagtctagaaagggtgtagggcaggggggagatgaaaatggttaacaagtacaaaaaagaaagaatgagtaagacctactttttgctagcataacaggttgactgactgtagtcaataatttaattgtacttatttcaataactaasactataattgaattgtctgtaacagaaaagttaagtgcttgagggaatagctaccccattccccatcatgtctttattatgcattgcatgcctgtatcaaaatctctcttgtacttcataaatatatatacctactaaatgcccacaaaaatttaaaaaataagttattgtaa

SEQ ID NO: 265525 - DNA, 561 bp, Homo sapiens
gcgaagtttgaaaaagtaaaattggaatttaaaaattttgtcaaatgggttatgagaaaacagtaaactcacacaggaacttaactgttttccaggtgtaggtttttatgaggcaagagcccagagactaggcagcttaagtaacttactcaaaggactgcttgtagaatccccttccctggctatgaacttagtgattaacctacactaaggcaggtttcatgttatgttgatttcctagatttggagcctggtgaaaagaaatggactaatgmcacaaaaactcaagtatcaattaccctccttggggtgtctactaactgctggtaaatgctcggagtgtgaaaacactgtattctcacaacatccataaaacacccttatgacttaaagacaggcagtaaagctcactccttttgcaggtgaggaaacgaagcctcagagatccttaataactgacttaagaccatgcaggtggagagcaggagagacaagattcaaaccctggcgtctctctccagagcctgtgcttttaactcctgaaagttcacaggagatttc

SEQ ID NO: 265526 - DNA, 610 bp, Homo sapiens
tggttttctcacatgctgttgatctaaaagttgtccatttttgagcaccacattcagcatgacctactccaagaacctctgctttttttttttttttttttttttttttttkgagatggagtctcactctgtagcccaggcttgagtgaagtcgcgagatctcagttcactgcaacgtccacctcccagcccaggttcaagcaattctcctgcctcaccctcccgagtagttgggatcacaggtctgtgccaccatgcctggctagtttttatatttttagtaggcacagggttttgccatgttggccagagtggtctcaaatttctgacctgaagtgatcgacctgcctcgacctcccaaagtgctggggttacaggcatgagctactgtgccaggccacctctatcttactcttctcaaagatagtgtgtgttttccttccttaacatgtcaccattcttactccgtttgtacattttcacctcatatcacaggtaattatatcacacacgaatatatgcatgtatatgtacgcatttcttatgaggactcctgtagatgtgatgaaatgaaaacatagctgagtgttttcacatgtcaactttgtta

SEQ ID NO: 265527 - DNA, 594 bp, Homo sapiens
tttctttccctattcccttgggcgtcttgctggccctgactggcttatctgttgcccagatcaaagagtgacattttctcttttcctgatcttaatcagatccatctgcaccttcctgttgatgcagcctcaccttagttttcagctgactttaaatttctggattttttcatggtcctttgtgcttctctgggctagagagtccgatacaaccttgtctacacgtctgttttcaccacagtgttcctctacagcaggtgcactgaatctcaactcacagctcaagaagttaagaaagggaagagttaattcacagttaagaaaggsaagaggcacagcagaggaagtagaccctttccctctgcgtggcatatcccatatccctttcccgtgctggacagctccagggtgtgctggcacctcctgcacccacatgaacctccgctgggagacccagagagtggagctgaagccctttgtccctgctgtcctctgacactcccttagaacaacccctcctcttttagccagagatgagagaacatcagacatctggctggttttctcctcccaactgtttatcttcttttatct

SEQ ID NO: 265528 - DNA, 594 bp, Homo sapiens
tttctttccctattcccttgggcgtcttgctggccctgactggcttatctgttgcccagatcaaagagtgacattttctcttttcctgatcttaatcagatccatctgcaccttcctgttgatgcagcctcaccttagttttcagctgactttaaatttctggattttttcatggtcctttgtgcttctctgggctagagagtccgatacaaccttgtctacacgtctgttttcaccacagtgttcctctacagcaggtgcactgaatctcaactcacagctcaagaagttaagaaagggaagagttaattcacagttaagaaagggaagaggcacagcagaggargtagaccctttccctctgcgtggcatatcccatatccctttcccgtgctggacagctccagggtgtgctggcacctcctgcacccacatgaacctccgctgggagacccagagagtggagctgaagccctttgtccctgctgtcctctgacactcccttagaacaacccctcctcttttagccagagatgagagaacatcagacatctggctggttttctcctcccaactgtttatcttcttttatct

SEQ ID NO: 265529 - DNA, 594 bp, Homo sapiens
tttctttccctattcccttgggcgtcttgctggccctgactggcttatctgttgcccagatcaaagagtgacattttctcttttcctgatcttaatcagatccatctgcaccttcctgttgatgcagcctcaccttagttttcagctgactttaaatttctggattttttcatggtcctttgtgcttctctgggctagagagtccgatacaaccttgtctacacgtctgttttcaccacagtgttcctctacagcaggtgcactgaatctcaactcacagctcaagaagttaagaaagggaagagttaattcacagttaagaaagggaagaggcacagcagaggaagtagaccctttccctctgcgtggcatatcccatatccctttcccgtgctggacagctccagggtgtsctggcacctcctgcacccacatgaacctccgctgggagacccagagagtggagctgaagccctttgtccctgctgtcctctgacactcccttagaacaacccctcctcttttagccagagatgagagaacatcagacatctggctggttttctcctcccaactgtttatcttcttttatct

SEQ ID NO: 265530 - DNA, 577 bp, Homo sapiens
gtggtattattatggttatttctcttttccttcttttcccaattaacttcaataagagataacttgattgctcctcgtgacagttttaaaaaagtagttggtttttctttttccccaagaagaaggcacaaaagaggaaacctgactggtcaaaaacatgtttataccagccagactcaggaaatgcaaattaaaacacaatgggatgacaatgaattaaagtccaattgctgagcattaaaaattatggaataccaaatgtttaggagaatgcatagaagtggtaattctcaaattgctctagaaaatgtaaattagtatagcaatttgtgaaaagcaaattggtaatatctaggaaagttaaaaratattcctaaatgatgagcaagtacatcatgcatgcatatcataggacatacacagagctattcatcctagaattataacagtggaaaactggaaacaacccacatgtttgttagtagggcgggagatatataaagtttgtaatattcatgtagacattatgctttagagtactttaaataaagtagttgtaaggctttacatttttaat

SEQ ID NO: 265531 - DNA, 575 bp, Homo sapiens
ttgtctgcaatacattctgcaagggctcatcaggtaatcttcctgaaaggctgagataactcccatggcttgccagggtctctctgattaaatataaactgcatgccctgccgtaacaggcctttctctcttataggtcttacttattttaggcttgctttaagttcctctttagagttagacaagcaatgggattgagattctctrttggagactgggagataaggtggttttgatggacatgtaaagagaggagaatgtctgatagtgtgtattgtttgagtgggatggaagtcataaccggggatggaacttaggagaatgtctgatagtgtatattgtttgagtgggatggaagtcataaccgaggacggaaggtaggagaatgtctgatagtgtgttttgtttgagtgggatggaagtcataaccggggatggaaggtaggagaatgtctgatagtgtgtattgcttgagttggatggaagtcataaccagggatggaaggtaggagaatgtctgatagtgtgtattgtttgagtgggatggaagtcataaccagggacggaaggtttga

SEQ ID NO: 265532 - DNA, 636 bp, Homo sapiens
ggtgatgctgatagaaaaggaaattttttttatctgcacatgtggaatttctcatgggacagggtttttattaggtttcccacactgtaatattttggtttctttctttggaatatttctctgaacactgaagtacatagttgattctcagtttaatcagcacrtctttattaaacacttccatgtttcagggccctgtaatcagatttgaggtttataaatgcttctggtaccacaacctgtctgcaatagccagggcttgttggtgtcctggaataaaattacagacgacagatcactgtgtatgaagtattaggaactactgtgaaattcatggtatctggctggacttaacggaaatgaggcaaggcatgtagtaaatgtagcccccaagtaaacatttccataagcaaaagaaaactctctcatcataaaatcttctttgactcagagatccccccatgcccaccgcctaacattcttatcttgcccttggaaaggaatacaaactgtactagacaatgctgctcagaatctacttccaaaaccaccattaacatactgggtcagtactcagagttatatacttctgaatgtcatctggagctaaggtgagaaattttgaaacaaatcatc

SEQ ID NO: 265533 - DNA, 614 bp, Homo sapiens
gatggataaagatctatcaggcaaacagaaaatgaacaaacaggagtagctaattctatattagagaaaacgatctttaaaccaacaacaataaaaaaagacaagggcattacgtaatgataaagggctcaaytcaacaagaagacaactattttaagtagttaagtcactcaacgtgggagcactcatagtcataaaacaagttcatagagatctacagacagacttagacaaccactcaataatactgggagacttcaatactgcactgacggtgttagacaaatcattgtggcagaaaactaacagatattttgaacttaaccttgacacttgactaattatacgtcagagacatctataaaacactccacccaacagtgatagaatatactttcttcttacctgcacatggcacacagtctaagatcaaccacatgcttggccttaaagcaagtctcaataaatttaaaaaaaaattcaattcataacaaccacaaataaaacagcacaaacaaaaatgaagtcgtatcagaaagacccatcagagccatacaattacatggaagttgaacttgacaccaaatgacttttaggtaaagaatgaaattaag

SEQ ID NO: 265534 - DNA, 614 bp, Homo sapiens
gatggataaagatctatcaggcaaacagaaaatgaacaaacaggagtagctaattctatattagagaaaacgatctttaaaccaacaacaataaaaaaagacaagggcattacgtaatgataaagggctcaactcaacaagaagacaactattttaagtagttaagtcactcaacgtgggagcactcatagtcataaaacaagttcatagagatctacagacagacttagacaaccactcaataatactgggagacttcaatactgcactgacggtgttagacaaatcattgtggcagaaaactaacagatattttgaacttaaccttgacacttgactaattatacstcagagacatctataaaacactccacccaacagtgatagaatatactttcttcttacctgcacatggcacacagtctaagatcaaccacatgcttggccttaaagcaagtctcaataaatttaaaaaaaaattcaattcataacaaccacaaataaaacagcacaaacaaaaatgaagtcgtatcagaaagacccatcagagccatacaattacatggaagttgaacttgacaccaaatgacttttaggtaaagaatgaaattaag

SEQ ID NO: 265535 - DNA, 571 bp, Homo sapiens
cctctgataaattcagcacacattcatgttaaaaaccctcaacaaattaggcattgaaggaatatatctcaaaaaaatgatcatctatgaacaccatactgaatgagaaaaagctagaagcactccccttgagaacaggaatgagacaaggatgcgcactttgaccactattcaacatagtactggaagttctagccagagcaatcagccaagaaaaggtgtctcacttcactgacaatgtaactctatacctagaacaccccataaagcctgccagaaggcttctagaactgataaacaacttcagtaatgtttcaggatacaaaataatgtacgaaaattagtagcatttctataccctatcgaagctcaaagccgaattaagaacacaatcctatttaaaaatagcacaaagaataaaatacctagggatataacttaccaacaatgaaaaatatttccacagcaagaattacaaaacactgctgaaagaaatcagagatgacagaaacaratgaaaaccattcagtgctcatggtcaggaagactcaatattgtgaaaatcatcata

SEQ ID NO: 265536 - DNA, 537 bp, Homo sapiens
aagcttggaagttgcaaacttatggacatggaagaagttctggctctctggtttaatgaattaaaataagtaagatactagcaaatgggatttcgcagttcctggtcccataggaaactgttttgtgtgtgttataaattgtcaaagcttccaaatgcttttcatttatatatccatcctgtgtttgccgttccaggagcatatgtttgtacatgtgcacatgcatgtatgcagacatcgagattcattcatttgctccacgcaaattcttgtgttcagcaacatcacgagttctaaaaaagtcaataaaaattgccctctatgcctttcgtgcaaggcacagggccagccacatcagcmattactttcattagagctgctggagtttgaaataggatggctgggatccagactgacctgcaatcttgaagtctttaaatttaatacaacccatattttaggccgttcaggctaatttgccttttttttcagattttttaatggacactttgtttctaagagtttctctctaataga

SEQ ID NO: 265537 - DNA, 537 bp, Homo sapiens
aagcttggaagttgcaaacttatggacatggaagaagttctggctctctggtttaatgaattaaaataagtaagatactagcaaatgggatttcgcagttcctggtcccataggaaactgttttgtgtgtgttataaattgtcaaagcttccaaatgcttttcatttatatatccatcctgtgtttgccgttccaggagcatatgtttgtacatgtgcacatgcatgtatgcagacatcgagattcattcatttgctccacgcaaattcttgtgttcagcaacatcacgagttctaaaaaagtcaataaaaattgccctctatgcctttcgtgcaaggcacagggccagccacatcagccattactttcattagagctgctggagtttgaaataggatggctgggatccagactgacctgcaatcttgaagtctttaaatttaatacaacccatattttaggcygttcaggctaatttgccttttttttcagattttttaatggacactttgtttctaagagtttctctctaataga

SEQ ID NO: 265538 - DNA, 515 bp, Homo sapiens
gaggtggagcctcgggaagtttacagcatttacagtggggaggagcctggccctttctcttcctgtgtggaatcttggattgaaactgcaggcggaaaatgctctagcagagacactctggccttgtgagagtccctgtttccatgttttcttctttttcacccaacagaaccctgctttactcaccccctccaattgtctgtgagcctaaattttcatggctgtgggatggacaaggaccctgtctttagctgacctaagggaaagtcctgcaacatgaaaaaaaaaatccagacacacagatacatagttaaaaaataaatacatattttgayagccttttttagaacatgatggatgttacacttttatactacaccaaaattcaacaactttctcagtagtgctttcttaaaaattaggtaagatgtggaatctgatatctgaaattcttgtactatgtcttaggaaactgtcaaattcattatgacaaagataatttttccaaattacag

SEQ ID NO: 265539 - DNA, 530 bp, Homo sapiens
ctttcctgaggaagaaactcagataaaataaatataaatttcaagccttaagaccagaagggtcggtttctatgtctacacacacacacaaaaatctgtctatgggactattgggtcagtttctttttatttatttatttatttatttattttattatttatttattttttttagtatttattgatcattcttgggtgtttctcggagagggggatttggcagggtcataggacaataatggagggaaggtcagcagataaacatgtgaacaaaggtctctggttttcctaggcagagggccctgccgccttctgcagtgtttgtgtccctgggtacttgagattagggagtggtgatgactcttaaagagcatgctgmcttcaagcatctgtttaacaaagcacatcttgcactgcccttaatccatttaaccctgagtggacacagcacatgtttcagagagcacggggttgggggtaaggttatagattaacaacatcccaaggcagaagaatttttcttagtacag

SEQ ID NO: 265540 - DNA, 530 bp, Homo sapiens
ctttcctgaggaagaaactcagataaaataaatataaatttcaagccttaagaccagaagggtcggtttctatgtctacacacacacacaaaaatctgtctatgggactattgggtcagtttctttttatttatttatttatttatttattttattatttatttattttttttagtatttattgatcattcttgggtgtttctcggagagggggatttggcagggtcataggacaataatggagggaaggtcagcagataaacatgtgaacaaaggtctctggttttcctaggcagagggccctgccgccttctgcagtgtttgtgtccctgggtacttgagattagggagtggtgatgactcttaaagagcatgctgccttcaagcatctgtttaacwaagcacatcttgcactgcccttaatccatttaaccctgagtggacacagcacatgtttcagagagcacggggttgggggtaaggttatagattaacaacatcccaaggcagaagaatttttcttagtacag

SEQ ID NO: 265541 - DNA, 555 bp, Homo sapiens
attaggcacgaggaaaaaaaaaagcatccaaattggaaaggaaaacgttaagttgcccgtttgcaggagatactatcttatacatagaaatctctaaaaactctaaaaaactattgaaagtaacaaactcactaaaagttcaggatacaaaatgaacatacaaaaatcagtatttctgtacactaaaaamaatctaaaacttaaaaaaattctatttccaaaggtatcagaaaaaaaatacttaagagtaaatttaacaaacaaacctacacatttatggtcaattgatttttgacagaagtattgagaacacaccatgagaaaaggacagtctcttcagtaaatggtgctgggacaactggatattcacatgcaggagaatgaaagaagagagcatagaagaaaaactctgtaacatttgtctgggcgatatttttttgaatatgaacctaaaagcacaggcaacaaaagtaaaaatgggcaaatgtactaaatttaactaaaaagcttctgcacagccaagaaaacagtcaacagtgaagagatgacctaaca

SEQ ID NO: 265542 - DNA, 561 bp, Homo sapiens
catttaggacagatccacagccaatatcatactgaatgagcaaaagctcaaagcatttcatttaagaattggaacaagataaggattcccactctcaccactcctattcaacgtagtactggaagtgctagccagagcaatcaggcaagagaaagaaataaaaggcatctaaattggaaaaagagaaaaattatctccctttactgatgatatgattctatacttagaaaaccccaaagactctgcaagaaacttatagcattgataaacaacttcagtagtttcaggatacaaaatcaatgtacaaaaattagtagcatttctatacaccaataacattcaaattgaaaaccaaatcaagaatgtagttttgtttacaagagccacacacataaaaaaatacccrggaatatatctaaccaaggatgtgaaagttctgtgccagaagaactacaaaatactgcttaaaggaatcatagcaatataaacaagtggaaaaacatcccatgctcatggattgaggaagcaatattgttaaaatgtccctactggccaaaacaa

SEQ ID NO: 265543 - DNA, 611 bp, Homo sapiens
tcctcaaagaaaatatatatgtgaaagtcatactcacctgacacttttattatgagtggaaaaaaatgtatacaggatatagataagtatataatgcaagcatrctgttgaatattacaatgtcatcaatagtatgaaaaactatagatcgcatgggtaattgctatattgaaatgaagaagagaatggaatgtacacacatatatgggtatatattgagttaatcaaatgacgtattttataaatagaaacacatatacatatacatacataaaatacttcagagcttttaattctgaatatggtagataaatgtatgtaaattaataaatacccatgtaaccaccctctagcttactaactaaaacatacatgaaataattcaatttaaatttgtgaatttttcttgaagaattgctaggtaagaaaacatatcctaacaatatatttaaccttataaataaatatttttaaattaagatagctaaaacaaagatgtaaggaagtcctgattcaagctcaaatatgcatattagaaaaattgatatatggcaaaagtggcattacaacttagttgggaatttgtggataaattatatgagaaatagtgc

SEQ ID NO: 265544 - DNA, 580 bp, Homo sapiens
aacaatatttattatttgtataaatttaaaggctataagtgcaattttattatatgattatattgtgtagtggtaaagtctttgcttttggtgtatgtatcacctgaataatgtacattttattcattaatytcccatcagtcaccctgcttttcttcctgccattctgagtttccaataactattccatattctatgtccatatgtacacattatttagcccccacttataagtgataaaatgcagtctttgactttctctttcagagtagtttcacttgactgtatgttgttggaaaagacataatttcattcctttttatggctgaataatattcccttttctgtattccatcatccactggtatttatatcaaagtttttaatccaatgcataccacattttcttatccaataccacattttctttattcagtcatccattgattgacacttacgttggttccatatatttgctactgtgaatagtgatgttagaaagatacaggtataggtatctttatgacataattccttttcttttagatagatactcaagtactgggattgctggatcaaa

SEQ ID NO: 265545 - DNA, 580 bp, Homo sapiens
aacaatatttattatttgtataaatttaaaggctataagtgcaattttattatatgattatattgtgtagtggtaaagtctttgcttttggtgtatgtatcacctgaataatgtacattttattcattaatttcccatcagtcaccctgcttttcttcctgccattctgagtttccaataactattccatattctatgtccatatgtacacattatttagcccccacttataagtgataaaatgcagtctttgactttctctttcagagtagtttcacttgactgtatgttgttggaaaagacataatttcattcctttttatggctgaataatattcccttttctgtattccatcatccactggtatttatatcaaagtttttaatccaatgcataccacattttcttatccaataccacattttctttattcagtcatccattgattgacacttacgttggttccatatatttgctactgtgaatagtgatgttagaaagatacaggtataggtatctttatgacataatkccttttcttttagatagatactcaagtactgggattgctggatcaaa

SEQ ID NO: 265546 - DNA, 603 bp, Homo sapiens
ttaatagcaaacattatattatacctctctcaaaacaaaggaggcaattagtccttagtcaatttgtaaccagcgttcagtagtccttgaaatgtttggggattcccattgatttgatatacagttacatgagtatatggccataggtccctttggggagaaattaggataattcctatgtatacttgttagggaattacagaatccttcttggagacatcatctctactctcaayggttcttattttgaaaactggctcagggctggaatatgaaaaggggtgacccgttactgggattaccatgctcagtctcctaatcctgtgttatttattccatttggttaaatagactgagcaatacatgttattatgtataccccaataaatgtcataaaaagactgtccatctaggtcactccttggggtgctgtgttccataaatcatatccatagctttcagtgggccacgcaccctggctggcaatcaaaccttgctacttattattataatagcaccctgctaactgctgatagtccagtactgctacctgacttctatttgcagattttgttatctccattattatcagtgagccacatt

SEQ ID NO: 265547 - DNA, 603 bp, Homo sapiens
ttaatagcaaacattatattatacctctctcaaaacaaaggaggcaattagtccttagtcaatttgtaaccagcgttcagtagtccttgaaatgtttggggattcccattgatttgatatacagttacatgagtatatggccataggtccctttggggagaaattaggataattcctatgtatacttgttagggaattacagaatccttcttggagacatcatctctactctcaacggttcttattttgaaaactggctcagggctggaatatgaaaaggggtgacccgttactgggattaccatgctcagtctcctaatcctgtgttatttattccatttggttaaatagactragcaatacatgttattatgtataccccaataaatgtcataaaaagactgtccatctaggtcactccttggggtgctgtgttccataaatcatatccatagctttcagtgggccacgcaccctggctggcaatcaaaccttgctacttattattataatagcaccctgctaactgctgatagtccagtactgctacctgacttctatttgcagattttgttatctccattattatcagtgagccacatt

SEQ ID NO: 265548 - DNA, 388 bp, Homo sapiens
ggtccctttggggagaaattaggataattcctatgtatacttgttagggaattacagaatccttcttggagacatcatctctactctcaacggttcttattttgaaaactggctcagggctggaatatgaaaaggggtgacccgttactgggattaccatgctcagtctcctaatcctgtgttatttattccatttggttaaatagactgagcaatacatgttattatgtataccccaataaatgtcataaaaagactgtccatctargtcactccttggggtgctgtgttccataaatcatatccatagctttcagtgggccacgcaccctggctggcaatcaaaccttgctacttattattataatagcaccctgctaactgctga

SEQ ID NO: 265549 - DNA, 589 bp, Homo sapiens
ctacaatatatttcctacaatgcccagcttcaaacaacaacaagaattatgtgagatatgcaaaatgtaagaaagtatgacccttactctggaaaaaattctggcaaaagacagtgcctgtgagagtaatcagacatcagtttcaagagaaaataaaactcagtgtagtcattacaaatatcattacaaatatatataaagaactaaaggaaaccatgagtacacatgtaaaataaggaattagaacaaygtgacaccaaatagagaatatcaataaagaaataaaaatttcataaataaagaaatagaaatcatggaattgatcagtacagaagtgaaatgaaatccactataagatctcaacagtagatttcactgacagaagaaagagttagggaacctgaaaatagatagataatggttatgtaatctgaagaatgtagaaaaaaagaatgaagactatgaacagaacctcagagaaatgtgggacaacattaagcacaaaattaatatgcctaatgggtgtacccaaaaatgaagagagaaaagaacagaaaaaatagttgaagtaataatggctgaaacttcc

SEQ ID NO: 265550 - DNA, 589 bp, Homo sapiens
ctacaatatatttcctacaatgcccagcttcaaacaacaacaagaattatgtgagatatgcaaaatgtaagaaagtatgacccttactctggaaaaaattctggcaaaagacagtgcctgtgagagtaatcagacatcagtttcaagagaaaataaaactcagtgtagtcattacaaatatcattacaaatatatataaagaactaaaggaaaccatgagtacacatgtaaaataaggaattagaacaacgtgacaccaaatagagaatatcaataaagaaataaaaatttcataaataaagaaatagaaatcatggaattgatcagtacagaagtgaaatgaaatccactataagatctcaacagtagatttcactgacagaagaaagagttagggaacctgaaaatagatagataatggttatgtaatctgaagaatgtagaaaaaaagaatgaagactatgaacagaacctcagagaaatgtgggacaacrttaagcacaaaattaatatgcctaatgggtgtacccaaaaatgaagagagaaaagaacagaaaaaatagttgaagtaataatggctgaaacttcc

SEQ ID NO: 265551 - DNA, 622 bp, Homo sapiens
gaacctcagagaaatgtgggacaacattaagcacaaaattaatatgcctaatgggtgtacccaaaaatgaagagagaaaagaacagaaaaaatagttgaagtaataatggctgaaacttcctaaatttattgaaaaatacatccaggaaactcaacaaattccaagtagggaaaatacaaagaaattcacaaagtagtatgtcatagtcaaatgctaaaaatcacacaaggagaaaactttgaaagccacaggaaaaaaaaagtcaatcactagaaaacaccattaaaatcaatagctggcttctcagtaaagacaatggaggtcagagtcagtragataacacactcagaatgctcacaggaaaataaaatgaaaagtaaaactgtcaaccaggaatcccatatccagcaaagctattttcagaaatgaaggtagatacccaggcattttcatacatcctctgaaatctaggcagaggctcccaaagctcaaatcttgtctgcgcactaacagcaccaagagaatttgtggctagcagacctaacttataagaaatactaaaggaagttcctcaggctgagcacaagtaaccaaaaatggtaatttaaatccacatttaaa

SEQ ID NO: 265552 - DNA, 608 bp, Homo sapiens
agtatggtcaactgatttttgacaaacataccaaagctattcaatgtggaaagaagaattgtttcaataaattgtcccaagaccattagacagcacatggggaaaaaaatgaaaattgaatccttacctcacacagttttaaaggtttgactcaaatagatcaaggaagacctaaatgttagagttaaaactataaaactcttagaagaaaatatttggataaatcttcatggcattgaatttggcaaagtattgttggatgtgatgtcaaaagtataagcaacaatagaaaacataagtgatttggacttcctcatactaaaaattttgtgcattaaagcataccatcaagagagtgaaaagacaactcacagaaagagagaaaatatttgcaagtcctgtgcctgaggaagaacttttattcagaatgtataaagaacctctacaaatccacaataaaaggacaaatcactcrggaggctgaggacgggggaattacttgaacccaggaggtgaggttgcagtgagcagagatcacgccactgcactccagcctgggtgacagagcgagactttgtcaaaaaaataataataataatcagtaaata

SEQ ID NO: 265553 - DNA, 608 bp, Homo sapiens
agtatggtcaactgatttttgacaaacataccaaagctattcaatgtggaaagaagaattgtttcaataaattgtcccaagaccattagacagcacatggggaaaaaaatgaaaattgaatccttacctcacacagttttaaaggtttgactcaaatagatcaaggaagacctaaatgttagagttaaaactataaaactcttagaagaaaatatttggataaatcttcatggcattgaatttggcaaagtattgttggatgtgatgtcaaaagtataagcaacaatagaaaacataagtgatttggacttcctcatactaaaaattttgtgcattaaagcataccatcaagagagtgaaaagacaactcacagaaagagagaaaatatttgcaagtcctgtgcctgaggaagaacttttattcagaatgtataaagaacctctacaaatccacaataaaaggacaaatcactcgggaggctgaggacgggggaattacttgaacccaggaggtgaggttgcagtgagcagagatcacgccactgcactccagcctgggtgacagagcgagactttgtcaaaaaaawaataataataatcagtaaata

SEQ ID NO: 265554 - DNA, 485 bp, Homo sapiens
ctcgtgggtcaaacagttagccaggctgtgaatgcaaaacaaaagttctgaaaggaaattaaaagtgctactccagtgaacacacaaataataaaaagtcamatagacttattgttgatatggtgacatttgtagtgttctggatggatcaagcctgccgcaacattccatttagccaaagcctaatccacagcaaggcccttactcttgtcaattctatgaaaactgagcgaggtgaggaagctgcagaaaaaaggtggaacctagcagaggttgcctcatgaggtttaaggaaagaagttgctcctataacataaaagtgcaaggtgaaacagcaagtgctaatgtagaagttacagcaagttatctagaatatctagctaagatcattgatgaaagtggctacactaaacagctttttcagtgtaaacaagacaacctgtcattgtaagaagatgccatccaggactttcatagcaagagag

SEQ ID NO: 265555 - DNA, 569 bp, Homo sapiens
ttgtaagaagatgccatccaggactttcatagcaagagaggggaaaccaatgcctggcttcaaagcttcaaaggacaggctgactcatttgttaggggctcatgcatttggcgattttaagttgaaaccaatgctcatttaccattctgaaaatcctagggtcctttagaactggtcaagtctaccctgcctgtgctttagaaatggaacaataagtctagaggataactgttttacagcatgatttcctgaatattttaagctcactgttgagatctttcactcagaaaaraaaaaaaattcttcaaaatatttctgctgattgacaatgtactttgtcacccaagagctctgatggagatctacaaggagatgaatattgtttttatgtctgctaacatgacatccattctgcagctcatagatcaagaagtaattttgacttattattttaaaaaatccatttcataagggcattgctaccatagatagtgattcctttaatggatctaggcaaagtaaattgaaaacctggaaaggattcatcgttctagatgtcattaagaaca

SEQ ID NO: 265556 - DNA, 462 bp, Homo sapiens
gaatctactcctagtgaagattctatgaacattgttgataggacmacaaaggttttagattacgtacactttctcagcaaagcagtggcagggtttgagaggattaactcctcctttgaaagaagttctactgtgggtaaaatgttgctaaaaagcatcacatgctacagtgaaatcttttgtgaaaggaaggggcagttacagcaaacttcattattgtctcattttaagaaattgccacagctaccccaatgttcagcaaccaccaccctaatcagtcagtggctgtccacatcaaggcaagaccttccaccagcagaaagattatgactcactgaaggctcagatgatctttatcatttttaaacagtaaagtcttttttatttaaggtgcatacattgttttaagacataatgcattacacagttaacatactatagtgtaaacataactttcatatg

SEQ ID NO: 265557 - DNA, 549 bp, Homo sapiens
tgtagccttatagtataattcgaagtcaagtaatatgatcggtagtgtgatgcctctggctttgatagtttttgtttttgttgttgtttgcctaggattgcttgctttggtgatttggacttttaaaaaattccatatgaatttaagaatcttttttctaattctgtgaaaaatggcattagtaatttaatatgatctataaattgctttgagcagtacagccatttaaatgatactggattttccaattcaagagcatggaatgttttcccacttatttgtgttatctctaayttcattcagaagagttttgtagttcttgtacagatctttcacttcctttgttatctgtatctctaggtatttcaattatttgcagctattgtaaatgaggttttcttgatttgactctcaccttgaatggtattggtgtatggaagtgctactaattttcatacattcattttgtatcctgaaattttactgaagttgtttttcagttctaagagatttttggccaagtctttagagttttttaggtatagaatt

SEQ ID NO: 265558 - DNA, 549 bp, Homo sapiens
tgtagccttatagtataattcgaagtcaagtaatatgatcggtagtgtgatgcctctggctttgatagtttttgtttttgttgttgtttgcctaggattgcttgctttggtgatttggacttttaaaaaattccatatgaatttaagaatcttttttctaattctgtgaaaaatggcattagtaatttaatatgatctataaattgctttgagcagtacagccatttaaatgatactggattttccaattcaagagcatggaatgttttcccacttatttgtgttatctctaatttcattcagaaragttttgtagttcttgtacagatctttcacttcctttgttatctgtatctctaggtatttcaattatttgcagctattgtaaatgaggttttcttgatttgactctcaccttgaatggtattggtgtatggaagtgctactaattttcatacattcattttgtatcctgaaattttactgaagttgtttttcagttctaagagatttttggccaagtctttagagttttttaggtatagaatt

SEQ ID NO: 265559 - DNA, 549 bp, Homo sapiens
tgtagccttatagtataattcgaagtcaagtaatatgatcggtagtgtgatgcctctggctttgatagtttttgtttttgttgttgtttgcctaggattgcttgctttggtgatttggacttttaaaaaattccatatgaatttaagaatcttttttctaattctgtgaaaaatggcattagtaatttaatatgatctataaattgctttgagcagtacagccatttaaatgatactggattttccaattcaagagcatggaatgttttcccacttatttgtgttatctctaatttcattcagaagagttttgtagttcttgtacagatctttcacttcctttgttatctgtatctctaggtatttcarttatttgcagctattgtaaatgaggttttcttgatttgactctcaccttgaatggtattggtgtatggaagtgctactaattttcatacattcattttgtatcctgaaattttactgaagttgtttttcagttctaagagatttttggccaagtctttagagttttttaggtatagaatt

SEQ ID NO: 265560 - DNA, 476 bp, Homo sapiens
gactgtttctggcttcagatgatgagttagggaggaaccccttcttgatttttttgaatagtttcagtaggattggtgccasttcttccttgtatgtctggtagaatttggctgtgaatctgtcttgtccagtattttttttgtttggtaggtttttcattacttattcaatttcaaaacttactattcatttttttcaggtttttacattcttcctggttcaaacttggaagcttgtatatttccaggaatttatacatttccactagatttttctaattcatgtgaatagagttgtttataacagcctctgaggatctttttgtacttctgtgcaatcatttttaatgtaaactttgtcatttctgattgcacgtatttggatcttcactttcttttttttctgttaatctagccagtggtctataaatcttatttattcttttgaaggaccaattcttgatttttgcttctca

SEQ ID NO: 265561 - DNA, 476 bp, Homo sapiens
gactgtttctggcttcagatgatgagttagggaggaaccccttcttgatttttttgaatagtttcagtaggattggtgccacttcttccttgtatgtctggtagaatttggctgtgaatctgtcttgtccagtattttttttgtttggtaggtttttcattacttattcaatttcaaaacttactattcatttttttcaggtttttacattcttcctggttcaaacttggaagcttgtatatttccaggaatttatacatttccactagatttttctaattcatgtgaatagagttgtttataacagyctctgaggatctttttgtacttctgtgcaatcatttttaatgtaaactttgtcatttctgattgcacgtatttggatcttcactttcttttttttctgttaatctagccagtggtctataaatcttatttattcttttgaaggaccaattcttgatttttgcttctca

SEQ ID NO: 265562 - DNA, 542 bp, Homo sapiens
ttttggaatatatgcatatacatgaaatatgttgggcatcagccccagtctaaacaaaaaatttatgctttatatttctcttatacatatagtctaaatgtaattgtatataatattattaataattatgtgtattaggccagatgcagtggctcacgcctgtaatcgcagcactttgggaggccgaggcaggtggatcacttgaggtcaggagttcaagaccagcctggacaacacggtgaaactccgtctatactaaaaacacaaaaattagccaggcgtagtggcaagtgcctgtaatcccagttacttgggaggctgaggcaggagaattgcttgagcccaggaggccgaggtggcagtgagccaagatggagccactgcattccagcccaggagacagagcaagactctgtctaaaaataaaataaaataaartaaataattctgcgcattaaacaaagtttgtatacattgagctgtcggaaggcaaaggtgtcagtcatttcagccactcattagggcaaactgtggtttttttt

SEQ ID NO: 265563 - DNA, 572 bp, Homo sapiens
ggtgcaagttacacagttgagggatctaagaaaatcatctaacctgccactagaggatcactaaattatactgatctttatgcagaggaagtcaggcttaaagaataagaagttgaaaacaaaacgaaacaaaacaaaatcaaaaggctagtagacaatgtagtggcctcacactgtaaggaatgtataacctacaaaatttgtccagcaaagttgcaaaattaacaaaaagcaatagtatcaagaaacaacaatctctggccaggcagtgggagggtggggatccctaatatcagcattgttacaatatatcaattaaagtgccacattttaataaaaaatcacraaacctgcaaagaaaccaaaaagtaagtcacatactaaaaaatttagccagaacaaacatcctggggggccagatgttgaacttctcagaaaaaaagactacaaaacagctattataaacatgtttacaaaaaccaaaggaaaccaagtctaaagactaaaaaacaaagtatgccagcaatgtctcacaagacacagaatatcaaaagattgtcatttaaaaatcc

SEQ ID NO: 265564 - DNA, 481 bp, Homo sapiens
gcttctgtatctgctagaaaattctgcatatgaaattctgtggtcattcacacacagaaactacattgatgtaggatttttcttctcagtcactttgcaggctggggagccccagccagtgacaccccaccagggtcccacttggccacactggcgtgacccagctcacctgagtgcaggatcttttatggactyagaatggggagtgcatgctgattggtttgtgagtatgcaaaaaatagttaaagcaaagacaccacttgttggggtgatcagactcaacaccaggtcatgggggcaatgaagtccagcggagtcaaaggaatgagaaaagacagtttgagagagaaagtggatccagggggccaatgcaagtatggaggctgcaaaagccctgagctctggaagtccagactatttaatggtgaacaaacaaacagttggtgagaatgtgggggtcgaaacggagcgttgcattaag

SEQ ID NO: 265565 - DNA, 613 bp, Homo sapiens
aaataaattgaaaattcacaacccatctcctcagctgcagaacttaaagccctcttccttggcaatactygtcgtctcactgattggctttctgtgcagtgagcagttaaacctagaccaaacccctggtgtttcagtaacattctaggcctctgttattgttaacattatttctgaccttcttgtacaagtctcccattgtcctgtgtaagagtttcccttgaacatattcctaggagtggaattgctgtgctatgggttatgtgaatggttgattgcaggaaataataaaactgatttaaccaatttacttctccatcagcaatgtataagttcctgtccatttatatattctccaataatttttaagccttttagttattttctgtgtcaatagccgacttgtctccaagaagcagtggaggctgatgcccttaatactattatggactgagctgatttgagactggattgaagtttcattaaaggttagtctccctctggctcaaacttgtttagagggaagaataccccatggctttcaagtgagatcttggtctttcaagaggtcctcttcccttggtagggaactgtaatatgtattcctcagccc

SEQ ID NO: 265566 - DNA, 499 bp, Homo sapiens
acacacactgtctttttcagggcaatgtcaaaggctaggaagaataaaggaggaacaacagtaacaacatcagaaasagaaacaaaattcacatatcttatcttccccttacacagctgttcaaaataatctctgactgtattactccagggttttctcacattttctttctttattttttcttaactgcagttcctcagagaacaatcttgatggagatggagagagatggcagctgtactagtttggagttctggtaagatcctttttcgttcactatttgatttatgctgaatattatgctcctgagagtcatccttgtggatggggtagctgtatttgttttcttttccttccgtaagatattccaatgtatgactttaacaacaagcgtttccatagtcttctgattgatgaaatgtttggttgtttcctccttttaaaaaatatactgcaatttgggaggccgaggtgggtggatcacgaggtcaggagatca

SEQ ID NO: 265567 - DNA, 499 bp, Homo sapiens
acacacactgtctttttcagggcaatgtcaaaggctaggaagaataaaggaggaacaacagtaacaacatcagaaagagaaacaaaattcacatatcttatcttccccttacacagctgttcaaartaatctctgactgtattactccagggttttctcacattttctttctttattttttcttaactgcagttcctcagagaacaatcttgatggagatggagagagatggcagctgtactagtttggagttctggtaagatcctttttcgttcactatttgatttatgctgaatattatgctcctgagagtcatccttgtggatggggtagctgtatttgttttcttttccttccgtaagatattccaatgtatgactttaacaacaagcgtttccatagtcttctgattgatgaaatgtttggttgtttcctccttttaaaaaatatactgcaatttgggaggccgaggtgggtggatcacgaggtcaggagatca

SEQ ID NO: 265568 - DNA, 499 bp, Homo sapiens
acacacactgtctttttcagggcaatgtcaaaggctaggaagaataaaggaggaacaacagtaacaacatcagaaagagaaacaaaattcacatatcttatcttccccttacacagctgttcaaaataatctctgactgtattactccakggttttctcacattttctttctttattttttcttaactgcagttcctcagagaacaatcttgatggagatggagagagatggcagctgtactagtttggagttctggtaagatcctttttcgttcactatttgatttatgctgaatattatgctcctgagagtcatccttgtggatggggtagctgtatttgttttcttttccttccgtaagatattccaatgtatgactttaacaacaagcgtttccatagtcttctgattgatgaaatgtttggttgtttcctccttttaaaaaatatactgcaatttgggaggccgaggtgggtggatcacgaggtcaggagatca

SEQ ID NO: 265569 - DNA, 579 bp, Homo sapiens
aggaacaacagtaacaacatcagaaagagaaacaaaattcacatatcttatcttccccttacacagctgttcaaaataatctctgactgtattactccagggttttctcacattttctttctttattttttcttaactgcagttcctcagagaacaatcttgatggagatggagagagatggcagctgtactagtttggagttctggtaagatcctttttcgttcactatttgatttatgctgaatattatgctcctgagagtcatccttgtggatggggtagctgtatttgttttcttttcctyccgtaagatattccaatgtatgactttaacaacaagcgtttccatagtcttctgattgatgaaatgtttggttgtttcctccttttaaaaaatatactgcaatttgggaggccgaggtgggtggatcacgaggtcaggagatcaaggccatcccggctaacacagtgaaaccccttctctactaaaaaaaaatacaaaaaatcagtcaggcatggtggctggcacctgtagtcccagctactcaggaggctgaggcaggaggatggcatgaacc

SEQ ID NO: 265570 - DNA, 579 bp, Homo sapiens
aggaacaacagtaacaacatcagaaagagaaacaaaattcacatatcttatcttccccttacacagctgttcaaaataatctctgactgtattactccagggttttctcacattttctttctttattttttcttaactgcagttcctcagagaacaatcttgatggagatggagagagatggcagctgtactagtttggagttctggtaagatcctttttcgttcactatttgatttatgctgaatattatgctcctgagagtcatccttgtggatggggtagctgtatttgttttcttttccttccgtaagatattccaatgtatgactttaacaacaagcgtttccatagtctyctgattgatgaaatgtttggttgtttcctccttttaaaaaatatactgcaatttgggaggccgaggtgggtggatcacgaggtcaggagatcaaggccatcccggctaacacagtgaaaccccttctctactaaaaaaaaatacaaaaaatcagtcaggcatggtggctggcacctgtagtcccagctactcaggaggctgaggcaggaggatggcatgaacc

SEQ ID NO: 265571 - DNA, 596 bp, Homo sapiens
tgtgggattttaaagtatattttggatggtgattctgtttttaaaatttttttgttactttcaattttgtgggcacatagtaggtacctcaatatatagggcacatgcaattttttgatatagccatccaatgtgaaataattgtagtttggagaatggggtatccatctcctcaarcatttatcttttgtgttactaactgatatggtttggctctgtgtctccacccaaatctcacctgaaatgtaataactcctatgtgtcaagggcaggaccaggtggaagtaattgaatcatgggggtggtttcccccatgctgttctcatgacagtgaatgagttctcatgagatctgatgttgttataaggggcttttcctgacactttgcgtggcacttctctttcctgccaccatgtgaagaaggatgtatttttccctttccactatgattgtaagtttcctgaggcctccccagctaagtcaattatatctcttttctttataaattacccagttttggacagttctttatagcagcacgctaatacgcaactaatacacaaacaatccagttacacccttttagttattttaaa

SEQ ID NO: 265572 - DNA, 596 bp, Homo sapiens
tgtgggattttaaagtatattttggatggtgattctgtttttaaaatttttttgttactttcaattttgtgggcacatagtaggtacctcaatatatagggcacatgcaattttttgatatagccatccaatgtgaaataattgtagtttggagaatggggtatccatctcctcaaacatttatcttttgtgttactaactgatatggtttggctctgtgtctccacccaaatctcacctgaaatgtaataactcctatgtgtcaagggcaggaccaggtggaagtaattgaatcatgggggtggtttcccccatgctgttctcatgacagtgaatgagttctcatgagatctgatgttgttataaggggcttttcctgacactttgcgtggcacttctctttcctgccaccatgtgaagaaggatgtatttttccctttccactatgattgtaagtttcctgaggccyccccagctaagtcaattatatctcttttctttataaattacccagttttggacagttctttatagcagcacgctaatacgcaactaatacacaaacaatccagttacacccttttagttattttaaa

SEQ ID NO: 265573 - DNA, 528 bp, Homo sapiens
taatcaccctgttgtgctatcaaataataggtcttattcattcttctaattttttgtactcattaaccatccccacttacccttctagcacctactaccctttgtagcctccagcaaccattcttctgctctctatgmgttcaattgttttgaatttagagcccagaaataagtgagaacatgtgatgtttgtctttctgtgcctggcttctttcccttaatataatgacctccagttaatccatattgttccaaataaccgggtatcattatttttgtggtagaatagtactccattgtgaatatgtaccacattttcgttatccattcatctgttgattgacacctgggtcactttcaaatcttgaatatgtaccacattttcgttatccattcatctgttgattgacacctgggtcactttcaaatcttcactattgtgaatagttttacaataaacaggagtgcagacacctctttgatatactgattttttttcttttgggaatacacctagcagaaacatcc

SEQ ID NO: 265574 - DNA, 617 bp, Homo sapiens
cctgttgtgctatcaaataataggtcttattcattcttctaattttttgtactcattaaccatccccacttacccttctagcacctactaccctttgtagcctccagcaaccattcttctgctctctatgagttcaattgttttgaatttagagcccasaaataagtgagaacatgtgatgtttgtctttctgtgcctggcttctttcccttaatataatgacctccagttaatccatattgttccaaataaccgggtatcattatttttgtggtagaatagtactccattgtgaatatgtaccacattttcgttatccattcatctgttgattgacacctgggtcactttcaaatcttgaatatgtaccacattttcgttatccattcatctgttgattgacacctgggtcactttcaaatcttcactattgtgaatagttttacaataaacaggagtgcagacacctctttgatatactgattttttttcttttgggaatacacctagcagaaacatccctggatcctctggtagctctgttttttctttttttcttttgcaggggggagcctccaaactgttcttcatagtggttgtatgaatttacatttcca

SEQ ID NO: 265575 - DNA, 551 bp, Homo sapiens
atgtcttctttggagaaatgtctattcaaatatttcacctatttttgatcagattattatgtatttttttgctatagagttgtttcttatccttgtatattcgagttactactaatcccttaccagattagtttgcaaatattttctcccagtctgtggtatgatgaaagttcttgaagagtcttatctttygcaaataacttcttctggtttgcacctttattcttcaccctttttatggtatccattaatgaaataaatttttacggagtcacttccaagatcatcaaataggaacagctctggtctacagctgccagtgagattgacatagaagatgggtgatttctgcatttccaactgaggtacctggttcatctcattgggactggttggacagtgggtgcagcccacagggggcaagctgaagcagggcagggcatcacctcacccaggaagtgcaagggatcaggggatttccctttcctagccaagggaagccatgagtgactgtatctagagaagcagtacactcctgtccaaatactgca

SEQ ID NO: 265576 - DNA, 551 bp, Homo sapiens
atgtcttctttggagaaatgtctattcaaatatttcacctatttttgatcagattattatgtatttttttgctatagagttgtttcttatccttgtatattcgagttactactaatcccttaccagattagtttgcaaatattttctcccagtctgtggtatgatgaaagttcttgaagagtcttatcttttgcaaatawcttcttctggtttgcacctttattcttcaccctttttatggtatccattaatgaaataaatttttacggagtcacttccaagatcatcaaataggaacagctctggtctacagctgccagtgagattgacatagaagatgggtgatttctgcatttccaactgaggtacctggttcatctcattgggactggttggacagtgggtgcagcccacagggggcaagctgaagcagggcagggcatcacctcacccaggaagtgcaagggatcaggggatttccctttcctagccaagggaagccatgagtgactgtatctagagaagcagtacactcctgtccaaatactgca

SEQ ID NO: 265577 - DNA, 578 bp, Homo sapiens
aatggtagtttgctttcaattacattaaatctatacattattttgacatgtagacaaatagcaattcgatttttatgatattgcattttccactctatgaacatcctatatctctcattttttaagattttatattttaaagtcatttatattgttttacatatatttgctaggtttctagatatgcttatgtaccactgatttcgttttgatattttcaattctatatatgtgtatgtgtatctgtgtatgtgtatgatgcactcactttctactggagaggcaaatatgtatacatacgtgtgttgtgtgtgtgtgtgtgtgtgtgtgtgtgtgtgtctgtgtgtacgcatttcttgtttgctaccagggtatatagaaatgcagaaattccattaaaatttgctaaactttttcgttaattataacttgatcttataccccycttgcttttctgtatctacaggataatataatatgcaagtaagggcagttttaaagtttcttttcattaacaatacagaaattcatgtatattgaatttccaggatctcagctttcggtctcttagctgcctt

SEQ ID NO: 265578 - DNA, 578 bp, Homo sapiens
aatggtagtttgctttcaattacattaaatctatacattattttgacatgtagacaaatagcaattcgatttttatgatattgcattttccactctatgaacatcctatatctctcattttttaagattttatattttaaagtcatttatattgttttacatatatttgctaggtttctagatatgcttatgtaccactgatttcgttttgatattttcaattctatatatgtgtatgtgtatctgtgtatgtgtatgatgcactcactttctactggagaggcaaatatgtatacatacgtgtgttgtgtgtgtgtgtgtgtgtgtgtgtgtgtgtgtctgtgtgtacgcatttcttgtttgctaccagggtatatagaaatgcagaaattccattaaaatttgctaaactttttcgttaattataacttgatcttatacccctcttgcttttctgtatctacaggataatataatatgcaagtaagggmagttttaaagtttcttttcattaacaatacagaaattcatgtatattgaatttccaggatctcagctttcggtctcttagctgcctt

SEQ ID NO: 265579 - DNA, 571 bp, Homo sapiens
ataagaaaatcttattatatttccaaagaaatagaaatgtctatttgatacttkacttcatctctaattttctatcttctccttttaatgaggaataatatttctgaaaagttatacgtgaattattttttaaatttgaggattcagttgcactagatagcttataatttaaaagaatccctcttcaaagtaagaattgattttgaacaatcatcttctgtgtgtctcttctgtccaaatattcctaggttaatagagcttgacattctattttttaatttcctcaattatggaattagtttgaatgtattataaaattaagcagtatatctccaggtaaaactcaaaataatggctacaggtcgattatgatcatcacatacgacattttctcaaattaattacctaaaattactactgctaaaaatagaattctccaaaaggcaaaaccacgattcacatggaaataaaaatgaatatgtatcaaagattcagttcaacttaaagaaaataattagtgtgggttactaataaatgctgaatttgagatgaaactggttaatgttcatag

SEQ ID NO: 265580 - DNA, 571 bp, Homo sapiens
ataagaaaatcttattatatttccaaagaaatagaaatgtctatttgatacttgacttcatctctaattttctatcttctccttttaatgaggaataatatttctgaaaagttatacgtgaattattttttaaatttgaggattcagttgcactagatagcttataatttaaaagaatccctcttcaaagtaagaattgattttgaacartcatcttctgtgtgtctcttctgtccaaatattcctaggttaatagagcttgacattctattttttaatttcctcaattatggaattagtttgaatgtattataaaattaagcagtatatctccaggtaaaactcaaaataatggctacaggtcgattatgatcatcacatacgacattttctcaaattaattacctaaaattactactgctaaaaatagaattctccaaaaggcaaaaccacgattcacatggaaataaaaatgaatatgtatcaaagattcagttcaacttaaagaaaataattagtgtgggttactaataaatgctgaatttgagatgaaactggttaatgttcatag

SEQ ID NO: 265581 - DNA, 571 bp, Homo sapiens
ataagaaaatcttattatatttccaaagaaatagaaatgtctatttgatacttgacttcatctctaattttctatcttctccttttaatgaggaataatatttctgaaaagttatacgtgaattattttttaaatttgaggattcagttgcactagatagcttataatttaaaagaatccctcttcaaagtaagaattgattttgaacaatcatcttctgtgtgtctcttctgtccraatattcctaggttaatagagcttgacattctattttttaatttcctcaattatggaattagtttgaatgtattataaaattaagcagtatatctccaggtaaaactcaaaataatggctacaggtcgattatgatcatcacatacgacattttctcaaattaattacctaaaattactactgctaaaaatagaattctccaaaaggcaaaaccacgattcacatggaaataaaaatgaatatgtatcaaagattcagttcaacttaaagaaaataattagtgtgggttactaataaatgctgaatttgagatgaaactggttaatgttcatag

SEQ ID NO: 265582 - DNA, 630 bp, Homo sapiens
ttgtgtgatttgtgtgagtatgagttgagcctttgtttttagatataatgctgttagaaacctttgttttgtaaacatttaaaatatatgtaaattaaatacttctaaagaggcatacaacatttagctttttagccttgtcttcacttggagatgtatttttgaaataattctgtttagtttctttttttggaaatttgtaatattgcataacgttctttcctatgagttcctcttccattttgataatatccgtttaatttcacattattctctatttaatgttacactggtcacatttttttttccagcataakaattgaaatagaagagaagatcagttagttcctttatttcctggtcttgaaaatgtttattaatatatataaatgccataaatgccaagattgaagttgaggtgaaagggcttactgcaaacctaaggattttgaagtgctcttttgaaaaaaaaaaaatatttggcagccggtcatatggtttataagctgaatttagtttttgaaattttgatatattaatttaaaagtttcaatttacttttacactgctaagaaatgaatggaagcttatacctatgtgggggcctcataataaaaaaaaattgctatc

SEQ ID NO: 265583 - DNA, 496 bp, Homo sapiens
tgtccattgatgaaagtggggtaaaaatatgtttagttctataagaagaccttgtattttgttactcaatattgataccaatattttcttgttggacaatcttggttttgagttagcttttctgatccaatttgagctcgcaatttttaatcattctttttcagcttttttaagcactagctatttctgtttctactagatgaaaaatgatttaagtatgcattttactccaggagttaagcctttcagagtgtctactttgctatcatgttataagatgcagtaatgctacacttttagaagtgaaaatcactccaatatttagattctgstgtgtgtatgtgtgtatttttcatatacacatatacacacttgtgtatatatacatatacacttgtgtatatatacacgcatatatatgtaggtgtgtatatatgtatatatttcttaagagttaaaaatatatatggcatatgtatgtgtgtttttgtatcta

SEQ ID NO: 265584 - DNA, 496 bp, Homo sapiens
tgtccattgatgaaagtggggtaaaaatatgtttagttctataagaagaccttgtattttgttactcaatattgataccaatattttcttgttggacaatcttggttttgagttagcttttctgatccaatttgagctcgcaatttttaatcattctttttcagcttttttaagcactagctatttctgtttctactagatgaaaaatgatttaagtatgcattttactccaggagttaagcctttcagagtgtctactttgctatcatgttataagatgcagtaatgctacacttttagaagtgaaaatcactccaatatttagattctggtgtgtgtatgtgtgtatttttcatatacacatatacacacttgtgtatatrtacatatacacttgtgtatatatacacgcatatatatgtaggtgtgtatatatgtatatatttcttaagagttaaaaatatatatggcatatgtatgtgtgtttttgtatcta

SEQ ID NO: 265585 - DNA, 496 bp, Homo sapiens
tgtccattgatgaaagtggggtaaaaatatgtttagttctataagaagaccttgtattttgttactcaatattgataccaatattttcttgttggacaatcttggttttgagttagcttttctgatccaatttgagctcgcaatttttaatcattctttttcagcttttttaagcactagctatttctgtttctactagatgaaaaatgatttaagtatgcattttactccaggagttaagcctttcagagtgtctactttgctatcatgttataagatgcagtaatgctacacttttagaagtgaaaatcactccaatatttagattctggtgtgtgtatgtgtgtatttttcatatacacatatacacacttgtgtatatatacatatacacttgtgtatatatacacgcatatatatgtaggtgtgtatatatgtatatatttcttaagagttaaaaatatatatggcrtatgtatgtgtgtttttgtatcta

SEQ ID NO: 265586 - DNA, 513 bp, Homo sapiens
agatatactatgaacagttaaatttatttttcaaaagtcaataacatgattgaacatactttttggagttctactttgtgttttttaggaagttgaagtatttccaaggacatagctcctgtaatgcataaaatgagcccctgtttttggrtaaattaccaggaggttgataaagatatgaatatattacttaactctatgctattaatttatttgctgtcatgagcacttattatcctaggaaaataaaggtaagacttaatgaaatttgtgagctggaccatacattcaatttcttttaaactgggctacttatgcctaacccaccttaaccactctgactaccattgagtctggaattcagataacccaaccatactgtggttgcattagaaaatcctgaggacaagtcatacatccatcaccaaaaatggagttctttggaactgtagtggtacagtggcagcaactacagaagtaatagatgatcacctcgggggaataccaacaaaa

SEQ ID NO: 265587 - DNA, 513 bp, Homo sapiens
agatatactatgaacagttaaatttatttttcaaaagtcaataacatgattgaacatactttttggagttctactttgtgttttttaggaagttgaagtatttccaaggacatagctcctgtaatgcataaaatgagcccctgtttttgggtaaattaccaggaggttgataaagatatgaatatattacttaactctatgctattaatttatttgctgtcatgagcacttattatcctaggaaaataaaggtaagacttaatgaaatttgtgagctggaccatacattcaatttcttttaaactgggctacttatgcctaacccaccttaaccactctgactaccattgagtctggaattcagataacccaaccatactgyggttgcattagaaaatcctgaggacaagtcatacatccatcaccaaaaatggagttctttggaactgtagtggtacagtggcagcaactacagaagtaatagatgatcacctcgggggaataccaacaaaa

SEQ ID NO: 265588 - DNA, 507 bp, Homo sapiens
taatctttgcatcttgcatagagtatgtgcacataagttgtagtttattgttatatatatatatatatttagctgtgttccatatagaggacaatcaataaatayaatttctcatgcctgtgttcctcagatgtctggagtgtggtaaggacatgtcacaaggttaaaattcagaatggaaacctcagaacctgtcattctctgcagatctgtaacatctcagggaagcagaaaattccagcatttagagctctgtttctttgttcttttgatgaaacacttattgttcatggaaaaacatctatttttgttttcatttcgctcttgtctgtctacagagatactttcaggcagaggcaagatttcgttatttcagagacctgtgagattctcagtaggcaaacacatctttaaaagacaatatttcagttttgcgtgttaatatattgcagaaaaagaaaattcaatgataaatatatttcattgaactcaaaggtttgtaaatca

SEQ ID NO: 265589 - DNA, 598 bp, Homo sapiens
ataagctatgttatatggagtctttttgttaacaggaattttcctaattctttatgattctctgtgcctatatgaatccaaagctgtttcattttattttgtgcccaaatactttattataatcataataacaagcctacaatwattttgcaggcttgctaatagagagcctacagtttgttgtttatcaagccagcatttgagttaggcctcataaatatgcccacacctgaggcataaattgtatgctaaataggaagggaagcctgtgctctgcagaatagttcactgaggagagcctctctaagctgtgagattctaaaaaaggactaaaaatttggagataattgtctctactccatgcccaatggacacatccatatagaaaatatcccttttattaacttcacttttttttagaacaaacttttcaacacaccccttgccatgagcaaggtggatatgataaggcaaccaacactctgacacaataatagagctctaagccaagacagtttcaatgtgacctttcattttctctaattgcctttctcttattaatcctgatctgcctattattgatagtatcattacgcta

SEQ ID NO: 265590 - DNA, 450 bp, Homo sapiens
gcgtagtgcagcactgagttgatggtgcattgagccatttgcctcctgctcagcaccttggacagcaccagcctgttcaaatgcacggcagtcaggtgtaaatgctgggaaatagatggctgtggaagggattatatggtccagtgtgggtactggcatagaaggaataaattatattggacacgtgtattgagagggtcaattaagaarggagtataagctaactgatacctttagaagtactcctttttttggcatagggtaaaaattattgttacggttctttagacccatgtactctggaaaaataatttttcatagtaaacagagaacagaatttaggaaagttgattctatttttggttcaactcaagagacatgagctcttaaaatacccaaaatcttttagcatatgagttattttaatccatgtgctatcccattcttgaa

SEQ ID NO: 265591 - DNA, 526 bp, Homo sapiens
aggaaagttgattctatttttggttcaactcaagagacatgagctcttaaaatacccaaaatcttttagcatatgagttattttaatycatgtgctatcccattcttgaaggtacatttgagaatctcaaaaagggaagtcatcctctctccagaaaaataaataacacatgcacgtaactatttcacaattagttttagtggttacatgggtgcattttggggtttagtgagtctgtttccaaacctggctagttgtcacaattattggaggtcctttcaaacatgcagattacctgcctccaccatggcagattctgattaatgaatttgataataagccgaatatatttgaattatgctctcacatacaaggtgagatcgaaggaagaaaaagtcaaccaagaagaagtgacaagaaaagtagttaaaggctgtttttatgctgccaagcataaaccagagacaaatgtagatatttgaaaaatatacttcaagagtgattttctcattaaaatatttctctt

SEQ ID NO: 265592 - DNA, 566 bp, Homo sapiens
tgattaatgaatttgataataagccgaatatatttgaattatgctctcacatacaaggtgagatcgaaggaagaaaaagtcaaccaagaagaagtgacaagaaaagtagttaaaggctgtttttatgctgccaagcataaaccagagacaaatgtagatatttgaaaaatatacttcaagagtgattttctcattaaaatatttctcttattttgtctataatactcataaaataaagtagataatgcaaggcaatgggcagaggaagggtttttacaatatagtgtgtagaggaagggcttgcaggaggtaacacagaggggaaggttctctttccayagttggtagcttccatagaatccctggtagtatgactaacctggaggcataaaacttctagaagatgatgttgtgttttcactttgttggtgtgaatagttgagtgaaaatatccaactcattttaggtgaggaggtgattaatcagtcatacaaaaatgatcagtaataatgaagttataagcaacattctctgatgaaatccactcccaccacaaaaaaaaaaaa

SEQ ID NO: 265593 - DNA, 612 bp, Homo sapiens
tgattttggatacattttattttttatctaaaccttaggttccaagttccttgtctatttaaggggaaatgataatgttgcttacttcctgagtttgttgaaaaggttatgtaagattattgttatgggctgaatgtttgtatcttgcccaaatttgttgttaaaaccatacccccattgtaatggatatatggggtgtgtgtgtgtgtgtgtgtgtgtgtgtgtgtgttacatgatcccaaatcaaatgtaggtttamcagtgatttaaactgactgtttgcacctagttcaaattgggagggtgaataagtttttgtttttgttttttttttttttttcattttgatgaatgaactttggtgcattagtctactgaacttggatgggtactcaaaaaatgagcccaaggccatgttttaaccctagaattgatttggtcaagagaacaatttcatgttagatccttgttgaggcagtggttttcaaactgtgttctgtggagcctgagggatttcaaaactccccagctatgaggagagagcagtgctgctgggactctgaagacccctcccgcctcccactgatttcaccagaacagctttgcttgtgt

SEQ ID NO: 265594 - DNA, 421 bp, Homo sapiens
agtatggtggttgatcagtgaactgtttttatttgaatatcttcagttcttaaaactgcctatgacagagccactatatcttgtcacggattcaactcaagttgaaatacactgaggctcatggtctaatatgttttctctctcacttgatttataaacttggcctttatattttgagagccaaggatgttgatgtagactggagacataaatgatgaggttgtttattattctctttcttctccaaagagatagatcaagcaagggttagaagaamtttatgaataaaaatataaaagaaaaagcctcaatggaaatgaactaacatcttcaaattttcaattgactaattttgacttatccatcctttgaaatatcttgtgcatctcgtcttttctattcccaaagcttccatcttctt

SEQ ID NO: 265595 - DNA, 527 bp, Homo sapiens
tcttttatttataaattacccagtctcacatagtatctctatagcagtgtgaaaacagatgaacataagtatcatttcaaaaatgcccagtgtactaaagtaatagactttctctatgtaagcatcagtgtggggctattcaggaagatcatcaatacctcacttcctattagttgggaaagccacagtgggagtgtaccttggtggtgggagagaaggggttaccttaggaacagaayacagagtctgcagtccctgagtgggactgtgtgagttaagtggagtaggtggatgcgtaaacagaggaaaggaagaaaacttcctttctttactggtttatctatgctgcttacgtaaatcatgcttgggatttaatttttgctctaaactacatacttactgtgacataagaatactgaggaaacttaaccctttcaagggaaaaatagccattaaatctgtttaaatgttactttgaatgatctcaagttggttcatgggctgtatactgtgtttgtagaattggt

SEQ ID NO: 265596 - DNA, 622 bp, Homo sapiens
attattaacacagtctatgctcaggccacagttcaaacgttgctggaccctctgctcaattaggtcaaactccaactggattactgaccctgtcctcttggagtcagagtgcaaacattccaagttttcttctttgcttctgcaccaggtacttgctgacttgtacatatttcttggactttaataactcaactcattttattttttgtcagttaaattgaaaccattttttaatccataaaaaattcttttgatgaataaagcctctcaaaaaattaggttgtttgcaatgatcacttaatttttccgcaatactgtgtggtctgtacagcagatattaccatcatcactcaytgacagataagattatgaagtgtcaagcaaatcagtgatttaaccagtgacattagatcctaatggcagtttcagagcctgaggacccaggactcctaacgccaaatgtgaatgtcttacctttagtcacattagctccaatggtaagaaatactatgaatttctgagctatagaaagaaagcatgggtatcatttttgtttactgaattacattatgttctcagtttcaaattttaactgacttgagaagtggttaactggttatga

SEQ ID NO: 265597 - DNA, 610 bp, Homo sapiens
aaaaaacagggctgcctacttaacatcgctgggtgccgggaccagccctcagacccagacccaggcccaaggaaggggtaagtgaaggaaccccaggataccacattcctgctgctggcccctgggatcctagctacaagagagttccacgacccccacagacctttggactggcagaaggagctgcccagagaccatgcagaggcactgcttgaacttgcatgaaaccccaaaggcttcagtgttctggggagctacagcaaaatgcaatccttggtgcctaccccccaaggctcagcatcctttcctatgcagctgcagctgctgctgtctgcagggctgaggagtgagcagggcacaggcatgatcacaaaccccgaagagaggctccatcactactgctgagggacagaggtgcatttgagtcagataccccatgccgcctgttcttcccaggactgcctgcctggccattcccacagggggccaaccctgtakctgccattgccccacctgagtgttttgttggtgctctgggagcagttcacccctccctgttacagccagtgcttgggtttaagagccagaaggcaaatctcctggcctagcc

SEQ ID NO: 265598 - DNA, 483 bp, Homo sapiens
ataaaataatacaaatgagtaacatgaatgactcctaggtgtctatactataaaattacattttcaaacttgaagaagcagtggaattcatagattctttccaaacttactctgccaaaggatagttggtggggctttcagttgatataaacatacacggaccatgaggataatggtaatgttggaaatgctacacagacagaggaggaagaaaactaatgctatctctctttccataaaaattggtttcagagggtcccaggtttttcccaaacagtcattgcactactgccttcagtagtgtctgtgtttctctgtcctgtggttgcctccatctggagtttaatatgcactcatctcttttctattccagggggkatatgtaatgaaaagctccatattagtcatcagctgtcaagattgatgaatttcaattaccatcctccggtagcagttcacactagagaaggaaatcaggatagc

SEQ ID NO: 265599 - DNA, 580 bp, Homo sapiens
attatgggttattatatttgtcaacccagaccctccagcaacagatgctgaaattcaagagactgatgaggggtgaggtctgtgaacagcaatagggaaggaatgggagaaggagatgacatgatgcaggtctgcccccagtgaaggagaaaaggaagaaaggaatgtcggatggagccatcttggactgtggtacaattctatgagggctcatcaaggctgtgagagtccttcagctgcagttacacataagaaaaatcctcatcttctagrgccaggttccttattatccctgccatgctcagcactggttgggagaagtctatggggtgtgtggggtccatgagaacatcttaataaatgttggctgcatagtattccatggtgtatatgtaccacattttctttatccagtctatcaactgatgggcatttggattgatttcatgtgtttgctattgtgaatggcacacgtttaccgatgtaacaaacctgcatgtcctgcacttgtatcttggaacttaaaattaaattaaaaaaaatgttggaaggcagcaactgagttcataagtcaattaca

SEQ ID NO: 265600 - DNA, 575 bp, Homo sapiens
cgacctttactccacttcccaagaagttcctcatctccatctgagaactcctcagcctggacttcactgtccacatcactatcagcattttgataacaacaatttaacaagtctctaggaagtgctaaactttccctcatcatcttctcttcttctgagccctccaaactgttccaaactctgcctgttacccacttttaaagtggcttccacattttcaggcatttttatggcaatgcccccacatctctggtaccaactttctgtattaatccattctcacactactataaagaactacctacaactgagaaattcatgcagaaaagaggtttaattgactcatagttccacaggctgtacaggaggcatggctggggaggcctcaggaaacttacaataatgacagaaggtgaagtggaagaaagcatgtcttcacatggccagtaggcggggtgcgtggtgggggagagagagagaaagggaaagtgctacactttcaaacaaacagatcttgtgataactcacccactaytacaagaatggcaagggggaaatctgcccctgtgatccaa

SEQ ID NO: 265601 - DNA, 580 bp, Homo sapiens
tattatcacgtattttgtgcattatatgtattatatacagtattcttataatacagtaagctagaaaaaatcattattatgaaaatcataaggaagagaatcactatstattaagtgaaagtggattatcatacaagtcttcatcctcattgttttcacattgagtgggatgaaaaaggagaagagaggttcatctttcttaggattgtagaggtggaagacaatctgtgtttaatagcccctcacagttcaagtctacattgtctgagggtgaactgtacatgacattacaaggcctgctattatttctatgaaattctagtctctgtattttcttctgtagccttactatcaactctcaggattttagttcactttcataagcctctctttcttgaaactaaaagccctaattcactgctgggcccttgcctttaatcccagcaccttgggaggccaaggtgggaagatagcttgaggccaggagttcaagaccaacctgagcagcacagggagaaactgtctatacaaaaagtaaaatttaaaaaaattttagctgagcatggtggcacacacctat

SEQ ID NO: 265602 - DNA, 597 bp, Homo sapiens
tttatatcatgtgtattttacaatttaaaaacaaattaataataatagtatgttcaaggaaacttttataatccctcactttgactccattttattaatcaagtaactgttggtctccatcatggtggatgagtaggcttctattacagtagcttttttaactgtctctcatccttggtatacaggaagccacaatgagcagaaactgtttctttcatcaccatctacagacttctatgtttcctgaaatttagtaatagatcaataaatgttcactgaaagaatgaatggacaaatgctgttattttgctgccgagagaacagaagcttagaaaagctaagatcacacagctggatagtggcattaatgagacaagaytgcaaattccattgaccaaaattataccttttttattcaatttgaaaaatgtacattagaaccctactacatgccaatactgtgttaaagattaaagatacaaagatgaaacatatctagtttctgctatcactgctatattttgttttaagacaactgcattaaacactcagaattacgtctcagttaaacctccaggagaaagactggcaggtggg

SEQ ID NO: 265603 - DNA, 647 bp, Homo sapiens
gtggatgaggtgtgttgtttattttcatattactactacttaaagtagatgctggctcamagttaagatcgatttattgaacaaaggaatgatccttgaagagatggaagcaccctcaccacactctaccttctgggaggtagaaagagttccctaataccactttattagttcaatacgcaaatgtccattcattctacttggtcatggaagcctttgccacacacgtataccaggctagaaaatctcagatcctttgtatcattgtgttgattgctaggcaaatggacatcttcagtctggaacaattgaacccaagttcttgtaatttgtaggtctgctttaagtttttatggcttaaccctctcctatgtcttatatcctctaatagccttgcttacgtcttctcatgtagcaaaatgtcaatgccctgaaattcaaaaaaacccaagttctaatccaaaatgtgctactaactcttacttttccctgtcattcagactcattgggacttagtggactaatctgtaaaataaatggattaactagcatatcttcaaggttttttccaggaaatctaaaatattgtgaagctctaacatacatcaagcccatgaccaaatgaatataattaaccaactgttttg

SEQ ID NO: 265604 - DNA, 647 bp, Homo sapiens
gtggatgaggtgtgttgtttattttcatattactactacttaaagtagatgctggctcacagttaagatcgatttattgaacaaaggaatgatccttgaagagatggaagcaccctcaccacactctaccttctgggaggtagaaagagttccctaataccactttattagttcaatacgcaaatgtccattcattctacttggtcatggaagcctttgccacacacgtataccaggctagaaaatctcagatcctttgtatcattgtgttgattgctaggcaaatggacatcttcagtctggaacaattgaacccaagttcttgtaatttgtaggtctgctttaagtttttatggcttaaccctctcctatgtcttatatcctctaatagccttgcttacgtcttctcatgtagcaaaatgtcaatgccctgaaattcaaaaaaacccaagttctaatccaaaatgtgctacyaactcttacttttccctgtcattcagactcattgggacttagtggactaatctgtaaaataaatggattaactagcatatcttcaaggttttttccaggaaatctaaaatattgtgaagctctaacatacatcaagcccatgaccaaatgaatataattaaccaactgttttg

SEQ ID NO: 265605 - DNA, 647 bp, Homo sapiens
gtggatgaggtgtgttgtttattttcatattactactacttaaagtagatgctggctcacagttaagatcgatttattgaacaaaggaatgatccttgaagagatggaagcaccctcaccacactctaccttctgggaggtagaaagagttccctaataccactttattagttcaatacgcaaatgtccattcattctacttggtcatggaagcctttgccacacacgtataccaggctagaaaatctcagatcctttgtatcattgtgttgattgctaggcaaatggacatcttcagtctggaacaattgaacccaagttcttgtaatttgtaggtctgctttaagtttttatggcttaaccctctcctatgtcttatatcctctaatagccttgcttacgtcttctcatgtagcaaaatgtcaatgccctgaaattcaaaaaaacccaagttctaatccaaaatgtgctactaactcttacttttccctgtcattcagactcattgggacttagtggactaatctgtaaaataaatgrattaactagcatatcttcaaggttttttccaggaaatctaaaatattgtgaagctctaacatacatcaagcccatgaccaaatgaatataattaaccaactgttttg

SEQ ID NO: 265606 - DNA, 546 bp, Homo sapiens
tcttctgccctgtgtggtctctggtctgcttctacttaagttaagggcatggcttacatgcattcttttgagattcactggtcatttttctctaaaaagaagcatccaagtgatatattgaaagtacatctaaccttccagagccatatagcagacctcagctgaaatgagcaacagaacagcattccaggtggctcatttttaccttctattgtgaagtcaccacctctgtggtacaaaagccatctatycaatttcagatcctaataatagcggaaaaaatctattccagacaatcattggtgagactactgcattgtgactcaaaacacagaacaaaaataagtacattttcagttaaacagaagctgatgttcacctgcttccttttttatgtacacacacacacatgcacgtgcacacacactcacacagacaattcagcattcactgcatgcaaaagagaaggaaagtgattttgaattttactttgaaaaatggatagaaagattgcttatcaattctatagcctttagatgaggaatt

SEQ ID NO: 265607 - DNA, 546 bp, Homo sapiens
tcttctgccctgtgtggtctctggtctgcttctacttaagttaagggcatggcttacatgcattcttttgagattcactggtcatttttctctaaaaagaagcatccaagtgatatattgaaagtacatctaaccttccagagccatatagcagacctcagctgaaatgagcaacagaacagcattccaggtggctcatttttaccttctattgtgaagtcaccacctctgtggtacaaaagccatctattcaatttcagatcctaataatagyggaaaaaatctattccagacaatcattggtgagactactgcattgtgactcaaaacacagaacaaaaataagtacattttcagttaaacagaagctgatgttcacctgcttccttttttatgtacacacacacacatgcacgtgcacacacactcacacagacaattcagcattcactgcatgcaaaagagaaggaaagtgattttgaattttactttgaaaaatggatagaaagattgcttatcaattctatagcctttagatgaggaatt

SEQ ID NO: 265608 - DNA, 618 bp, Homo sapiens
atgtattattttttttgtgctgcatacaaaatccgcaaacttagtggattaaagctacacatttatcacagtttctgtggatagctagtctaggctcaatgtggctgggtcttcttcaaggctgcactcaagctgtctgctgggacttgattctcatccgggaagcatctgattgactgggaagcatctgattgactggaaagcaactgattcttagctttcacaggttgttggcagaatttatctccttgcagttgtaggattaraaaaagcttgtttcttccaagccagcaatgcaatggagagaaaccaaagtgagtctgctagttagatacagttttatataatgtaacataatcatgggagtcacatttcatcacattagtcatattttaatgatttgaagcaagttacaggtcctgcccactaaagggtagaaaattatagtagggcatgaataccagaaggtggaattcatgggagctactttaaaagtctatctatcacagtcttctctctggtttacagtgattcctgttacttccacatgcaaaatgcgttcacgctatcccaaggttcccaggagtctcatttcattaaaacattaatttagagtaa

SEQ ID NO: 265609 - DNA, 546 bp, Homo sapiens
agctttgtgaaaaatgtgtaaaatatataacaatgaggatacaaaacggaaatgcgtcaggaccaaacaaactcccttttctgtaagttatgtttctacaagcatctcttggagactatttgttatatgggaactacagtgggtccttatgtgcatgcatggaagaaagaagatttttttctttccacctgtaccttgtgattacttatatcctgtattagtccattttcacactcctataaagtgtgatttacccaatcattctagttcaggatcaagggtgatcaggccgcccttgagcctgaagtagaatgattgggtaaataattatctgacttgattttctattaatctttcttaaatgtatgcatagctctcatttatttcaatgtttaatattakaagtgttttagtctttatatagaggtttggtaggctgggtgcagtgactcacacctctaatcctagcactttgggaggctgaagtgggcagatcacttgaggtcaggagtttgagaccagcctggccaacatggtgaaaatctg

SEQ ID NO: 265610 - DNA, 546 bp, Homo sapiens
agctttgtgaaaaatgtgtaaaatatataacaatgaggatacaaaacggaaatgcgtcaggaccaaacaaactcccttttctgtaagttatgtttctacaagcatctcttggagactatttgttatatgggaactacagtgggtccttatgtgcatgcatggaagaaagaagatttttttctttccacctgtaccttgtgattacttatatcctgtattagtccattttcacactcctataaagtgtgatttacccaatcattctagttcaggatcaagggtgatcaggccgcccttgagcctgaagtagaatgattgggtaaataattatctgacttgattttctattaatctttcttaaatgtatgcatagctctcatttatttcaatgtttaatattataagtgttttartctttatatagaggtttggtaggctgggtgcagtgactcacacctctaatcctagcactttgggaggctgaagtgggcagatcacttgaggtcaggagtttgagaccagcctggccaacatggtgaaaatctg

SEQ ID NO: 265611 - DNA, 509 bp, Homo sapiens
gaggtaaattctgagatgggggattgggcaccacaagataaactcatttaaaattctggtaaatgtaaccaaattattttccatagatgttataataatttgcatttctattggcaatataagagtcccatttcttcaaagcctcaccagtagagtatgttatcaaacttttgaatttttaccagttatatgagaaatagttatctcatcatagttttcacttatatttcatttattatgagtgaagttgagcatcttctcatattgttcaaaggygatttttatttatttctgtgtaacttaaatagttacattttcacagtttctgaacttgataaaaatatgcttctttattatgtattttctggatgtctcttaatgtggcttcagagaggtagtttctgatccccctgggatggtggtatgtgttacagccttctttcagaattttcacggtgtcccagagagtacagaacaaacctctattcactggaaacatccggaaaaga

SEQ ID NO: 265612 - DNA, 509 bp, Homo sapiens
gaggtaaattctgagatgggggattgggcaccacaagataaactcatttaaaattctggtaaatgtaaccaaattattttccatagatgttataataatttgcatttctattggcaatataagagtcccatttcttcaaagcctcaccagtagagtatgttatcaaacttttgaatttttaccagttatatgagaaatagttatctcatcatagttttcacttatatttcatttattatgagtgaagttgagcatcttctcatattgttcaaaggtgatttttatttatttctgtgtaacttaaatagttacattttcacagtttytgaacttgataaaaatatgcttctttattatgtattttctggatgtctcttaatgtggcttcagagaggtagtttctgatccccctgggatggtggtatgtgttacagccttctttcagaattttcacggtgtcccagagagtacagaacaaacctctattcactggaaacatccggaaaaga

SEQ ID NO: 265613 - DNA, 551 bp, Homo sapiens
aattcccaggagctgactttgcatccaaactaggaattcaaagctgtttcaaagtgagaattgatagctaggttctaaaccacrtaatttacaagaaaacaaatctcctttttgtgtttggtcattattctccctgtcaagcaataaagactgttcaattcaatccagttttcaataccacagataaagtcatcaatagttcttgttagtttgtataggttaaacacagagaacattagatcttatctattaattctatttctcattttagcttttaaaggattaaaaagagtggggagggctgcttttataaggtctttcccaggcaacaggaaaccggaaaaaaatttaattgataattctaattaccaccccccggccccgccaaacacttaggaatatactttgaaaaatgtttcattagatgatagtctaattaagatagtgatttatatgttaatgaccaggtgggtacccaaaaatgttaaaagccttgtggtgcattttataatgttttaaagctatatgtacttcaaattccaacactaacc

SEQ ID NO: 265614 - DNA, 489 bp, Homo sapiens
gacattgccttagatcaagaaacccactggatggcaaagaagaaggatatactarctattgtgtatggcattatccagaattggctgaaaaacataacgatggattgtctgttaaagacttggctagagtacaaggtcaaggctaacaagtgtggatttgggatgctgacctccaaagtgtagcacaggagctgaaacaatgaccaatataaaatgctgtgcccccaatacctggaatatatggattcaagaaccaagggagagtaaaattggtccatctcaccctaactctaaaggatccatttgaactgaagatttgtgcttcccatcccacaacataagcctctgtaccaatagtttccagttcccagaaagaaacacttccatcaggagacagtaaataatttaaacactgcactttaaaccatgattgtcgtttagtttcttcagcttttttatactaatggatcagcaagcaaagaaagaagc

SEQ ID NO: 265615 - DNA, 489 bp, Homo sapiens
gacattgccttagatcaagaaacccactggatggcaaagaagaaggatatactaactattgtgtatggcattatccagaattggctgaaaaacataaygatggattgtctgttaaagacttggctagagtacaaggtcaaggctaacaagtgtggatttgggatgctgacctccaaagtgtagcacaggagctgaaacaatgaccaatataaaatgctgtgcccccaatacctggaatatatggattcaagaaccaagggagagtaaaattggtccatctcaccctaactctaaaggatccatttgaactgaagatttgtgcttcccatcccacaacataagcctctgtaccaatagtttccagttcccagaaagaaacacttccatcaggagacagtaaataatttaaacactgcactttaaaccatgattgtcgtttagtttcttcagcttttttatactaatggatcagcaagcaaagaaagaagc

SEQ ID NO: 265616 - DNA, 599 bp, Homo sapiens
accatgaaaaactagggttgctaccagataacgggggtgagggagaagtatgtctgaaacctggggattaatttgggtatcctttccttcttccatgcccagtgatggcaaacaggcaatcacagaaaccatggcccaccaaaggccaggcaactacaggctcaactccctatgcaaactcttatgctagaaaaatgttgttcataaataatttaaaatgttgaaaaaagaggaagaattaaataaaggaaaaagygaaacaaaaatgaagcaaagcagaaagggttagagcacctttaaaaaactgtgagaatctatagcacttgattctggggatgaacttagtgcacactctttttagtaactacatgttcttaccatgtttacagaatgactgtggattttctgtcagtggtaggttggtactagatcaatgctggtatttttgtttcatttgcacttctgtgctggtttcctgcagtgagttgtgtggaggtgggtccagaataattgtttcattggtgtttgtttattcattcactgagtgttttatttccatctataccaagtgggttgggagctcgaaagaagaaaaaaag

SEQ ID NO: 265617 - DNA, 491 bp, Homo sapiens
tgctgttcatatcatagtagggcaaggacacattctttcttgaatgtctagtcagaaatgtcaactctgttttcttgccttaacttggaataacttttatcccatcaacaactttagtaatattaactttcatgtctttatctacttggactgaactacartgatacacataagttgatgtgaagaccttgaatttttataactttttattttttaaagtgtttatgcagcaaatgataaaaagaaatgagtctacttttaataacatacaagaaagtcagcctaatttgcgtatcaaactatgtagttacattagcatttctctgagaataagctatatataaagctacagtcgtattgtaatttttcctagataagaagaggttttaaaaactttacagttataagtctcttaaacccaagatagctgaattactatttgaaacctccaactttatatttcagtgagtaatgaatcttctcttagaaag

SEQ ID NO: 265618 - DNA, 491 bp, Homo sapiens
tgctgttcatatcatagtagggcaaggacacattctttcttgaatgtctagtcagaaatgtcaactctgttttcttgccttaacttggaataacttttatcccatcaacaactttagtaatattaactttcatgtctttatctacttggactgaactacagtgatacacataagttgatgtgaagaccttgaatttttataactttttattttttaaagtgtttatgcagcaaatgataaaaagaaatgagtctacttttaataacatacaagaaagtcagcctaatttgcgtatcaaactatgtagttacattagcatttctctgagaataagctatatataaagctacagtcgtattgtaatttttcctagataagaagaggttttaaaaactttacagttataagtctcttaaacccaagatagctgaattactayttgaaacctccaactttatatttcagtgagtaatgaatcttctcttagaaag

SEQ ID NO: 265619 - DNA, 520 bp, Homo sapiens
agaaagctctttctgatggattcactaatttacrttaggtgtactaaccccccatgtattcaacagcactgcttacttcttacagtttaccttatcataagaaaacatctatcaattgcatacaccaatttcatgttttatatcttatttctttaatttcttctccaaacaacccttctactggtaacaacttaatcttcagataagatacaagaaaacgatgacctgaagttactgaagagtgaaaaacaggaagcagattcaggaggagaggtcaaaaattgttagaaggggtcagagtaaaatgagtttcctgtttttatggcttttattctgagggcaggccaaggtcagcaatgtatgcagtggttaaaactatgataaaaatctgaagtctttttgacctgaaaaacagagggcagaggtgggggaatatagccatgacaatgagggagggactcctgagatatagaaagccagagaaagggagctccaaattctctgtaaaaatactgttcaa

SEQ ID NO: 265620 - DNA, 520 bp, Homo sapiens
agaaagctctttctgatggattcactaatttacgttaggtgtactaaccccccatgtattcaacagcactgcttacttcttacagtttaccttatcataagaaaacatctatcaattgcatacaccaatttcatgttttatatcttatttctttaatttcttctccaaacaacccttytactggtaacaacttaatcttcagataagatacaagaaaacgatgacctgaagttactgaagagtgaaaaacaggaagcagattcaggaggagaggtcaaaaattgttagaaggggtcagagtaaaatgagtttcctgtttttatggcttttattctgagggcaggccaaggtcagcaatgtatgcagtggttaaaactatgataaaaatctgaagtctttttgacctgaaaaacagagggcagaggtgggggaatatagccatgacaatgagggagggactcctgagatatagaaagccagagaaagggagctccaaattctctgtaaaaatactgttcaa

SEQ ID NO: 265621 - DNA, 509 bp, Homo sapiens
tttattcttcatttccatgagtttgactatttaaatatctcatataaatggaatcatgcagtagttgcccttctgtgactggtttattgtacttaatatcttctaggttcatccatactgttgcagaatttcctttatttttacggctaatattccactgcacttctataccacatttgctttatccaagatgtaaattttttccattcaaactaatcgagccccaaattctttgacacacactctgcagaatcacataacgcctggagacagacaggaaaatgaaaatattcagtgtaggagcaatggggagggattccacttcttaaagttcacccagtgtccctatgcagtttaagctaaataygcaaatggataaacagcagcaaatagtgattcccacactcctgtaactccaattatgtgtatgtgtgtgcatgtatttattggtgtattgaggtggaggatggacagacattgaaattgattacatgaattgcattgtgtca

SEQ ID NO: 265622 - DNA, 543 bp, Homo sapiens
ccattacatttgtgataatttattatagtagaactagaaaataaatgccttaggagttttgacttaggccagaaagaaatgccaccagcgagatttgataggggagcaatacaatcagatttaaagcttaaaatgatgactgactacactggaaaataaagactggcaggggagcaagatttgttgaacagaaattaaagattgtagcaataaaaccggaagttatgtagctaagaattagacccggtcatatcccattagagttgttctagcaaaagcactatggcttctgctgcttggctgcaacactttagctcaaatgaagacactccacattggaagccaaacatcctgtgacttcttctcctgaagaattcaacctgtccaccactacctgaacccaaagattgatcttgcataygctttgtcttcattgtcctcctcttggggaaaaaggtctcctgtcatgtaacttagcaatacagaaagttgtgtaaacaaattctagtgtccactttagtgtgacttattcagaatgtaaac

SEQ ID NO: 265623 - DNA, 378 bp, Homo sapiens
ataatcactattgtcaggcactttgtaggtaaggataatttctaataaaatatgtagcagcatcaaccattgcataaaacactcaaaagtcctcctcctgacaaccctcaggaaccctatttacttaaataggaaggaagaaagaaagcctcaaagtgtctcttggcttcccctactgaccctccaatattcagggacaccacaacarcgctctaatttgaacctagagccatgtgttctctctaaagcatttagccttgaaaccgttactgatggagttactaactcaactcacggcacaatgccagagctgcccaggcaaccattgttggctccaaactgtcatcattacacagctctccttctgagagccagagc

SEQ ID NO: 265624 - DNA, 378 bp, Homo sapiens
ataatcactattgtcaggcactttgtaggtaaggataatttctaataaaatatgtagcagcatcaaccattgcataaaacactcaaaagtcctcctcctgacaaccctcaggaaccctatttacttaaataggaaggaagaaagaaagcctcaaagtgtctcttggcttcccctactgaccctccaatattcagggacaccacaacaacgctctaatttgaacctagagccatgtgttctctctaaagcatttagccttgaaaccrttactgatggagttactaactcaactcacggcacaatgccagagctgcccaggcaaccattgttggctccaaactgtcatcattacacagctctccttctgagagccagagc

SEQ ID NO: 265625 - DNA, 641 bp, Homo sapiens
gagacatgactgttgaccttatgaggtattttaagacaccagacatgcctaggaaaagacacayggtcacatattgcagcttatgccaagagttaaatcagggatacaggtgtggatggttgtctgtttaatccctacatgcccatctatcacctcattctctcattgatctggggcaggactcatacccactctggatgcacaagagtcaagctgaaagaagagagtaattttacttgaaggaaacttgtgtctgcttacagatcactcgttctaggagtggaccagggggaatatccactcactttcttccttcaaggacctgaaaggatgtgaagcagttcctccaattccactgaggggaaaaattaggtgaaaccaactgactgatggactaagtgagagggcgttttggtgggactgagggctttgaaatgttgtcatttggagtcactcttcctctcaacatccccctattgttttccaccccgtgaagaataaaattctaagtcctgcaaggtcctaacatgatctgggcccccctccctagcctgcctcatctctggccactctcatcctagctccctcagctcctgccactctgaccttcctgcagttcttcaggcacaccaagttccctc

SEQ ID NO: 265626 - DNA, 641 bp, Homo sapiens
gagacatgactgttgaccttatgaggtattttaagacaccagacatgcctaggaaaagacacacggtcacatattgcagcttatgccaagagttaaatcagggatacaggtrtggatggttgtctgtttaatccctacatgcccatctatcacctcattctctcattgatctggggcaggactcatacccactctggatgcacaagagtcaagctgaaagaagagagtaattttacttgaaggaaacttgtgtctgcttacagatcactcgttctaggagtggaccagggggaatatccactcactttcttccttcaaggacctgaaaggatgtgaagcagttcctccaattccactgaggggaaaaattaggtgaaaccaactgactgatggactaagtgagagggcgttttggtgggactgagggctttgaaatgttgtcatttggagtcactcttcctctcaacatccccctattgttttccaccccgtgaagaataaaattctaagtcctgcaaggtcctaacatgatctgggcccccctccctagcctgcctcatctctggccactctcatcctagctccctcagctcctgccactctgaccttcctgcagttcttcaggcacaccaagttccctc

SEQ ID NO: 265627 - DNA, 641 bp, Homo sapiens
gagacatgactgttgaccttatgaggtattttaagacaccagacatgcctaggaaaagacacacggtcacatattgcagcttatgccaagagttaaatcagggatacaggtgtggatggttgtctgtttaatccctacatgcccatctatcacctcattctctcattgatctggggcaggactcatacccactctggatgcacaagagtcaagctgaaagaagagagtaattttacttgaaggaaacttgtgtctgcttacagatcactcrttctaggagtggaccagggggaatatccactcactttcttccttcaaggacctgaaaggatgtgaagcagttcctccaattccactgaggggaaaaattaggtgaaaccaactgactgatggactaagtgagagggcgttttggtgggactgagggctttgaaatgttgtcatttggagtcactcttcctctcaacatccccctattgttttccaccccgtgaagaataaaattctaagtcctgcaaggtcctaacatgatctgggcccccctccctagcctgcctcatctctggccactctcatcctagctccctcagctcctgccactctgaccttcctgcagttcttcaggcacaccaagttccctc

SEQ ID NO: 265628 - DNA, 641 bp, Homo sapiens
gagacatgactgttgaccttatgaggtattttaagacaccagacatgcctaggaaaagacacacggtcacatattgcagcttatgccaagagttaaatcagggatacaggtgtggatggttgtctgtttaatccctacatgcccatctatcacctcattctctcattgatctggggcaggactcatacccactctggatgcacaagagtcaagctgaaagaagagagtaattttacttgaaggaaacttgtgtctgcttacagatcactcgttctaggagtggaccagggggaatatccactcactttcttccttcaaggacctgaaaggatgtgaagcagttcctccaattccactgaggggaaaaattaggtgaaaccaactgactgatggactaagtgagagggcgttttggtgggactgagggctttgaaatgttgtcatttggagtcactcttcctctcaacatccccctattgttttccaccccgtgaagaataaaattctaagtcctgcaaggtcctaacatgatctgggcccccctccctagcctgcctcatctctggccactctcatcctagctccctcagctcctgmcactctgaccttcctgcagttcttcaggcacaccaagttccctc

SEQ ID NO: 265629 - DNA, 646 bp, Homo sapiens
tttactttgactctttttcataagttgattttattatcagctataggcctctggcatgtactcttcaatgcaggtttctagtaacttttgagattgtgtcattggaatagggagaaaaacctccagcactttcatggacagcttaggtgtccatgaatatcaagcagaacaagagttaattgcatggactgaattaatagaagactgattttttttaatgattttttgcttgaaacattgctgattctttttgttttgtttttcagggtcaatacaatttctttgagttatttttagctttttacaattgagtaaagtgtacttctgtgagcaaaatttgaatcacatttctttttctctacttgatttctcmagaatttgagaactatttgtgagtattcttaatttatggcaatatagttatttgtataagttcaataagaatctgttttcttttgtaacaggacacaattttagacactgattattttaccatggctttgactagaatgacattttttcagactgcattgagtaattgaggctaacctatagagctgataaaagccctttggaaaaactggtctcatattttgtctatgcagttcttttgcagagttcctgacctgtggtaagtaaagaatat

SEQ ID NO: 265630 - DNA, 548 bp, Homo sapiens
actaaggtcatcattgttcactttggtagggaactatacaagggcaccacaacacagaacatgaggctcattggggackgtacatgcttgagtttatttctgaattcttcattctattccatttgtctacctgtaccaatgcaatacaattttaattaatgtaaataaaaatatgcactcctatctgataaggcaaatattccctttttaaaaaaattttcacttattttaatcatatgagttttaaagccaataataattttcctttaagaagtcatattgagattttgactagatatctttgaatcaatagattaatttgtgtaaaataaatatcatttcaatattgaaacttctaatcataaacttatatgtttattttatttcagttattgtaatatctttgagtaaagttgatttttttcttacaagaatatcaaatatgtcttgttatgtttatatgtgtatgtttgttgcaattgtgagtaaaatattataaaaattttaatttttttattgttacaaaataaagtttctttttacaacat

SEQ ID NO: 265631 - DNA, 597 bp, Homo sapiens
gaactctcatttctaatggtaaattgatgcaatttttattatttccttttgatccatacatgcaaagaatgagctaaatttcctataggaagtgtctattaataaaagccttcttaagttgtagtatgcaggtggtctggggagatagaacacaaaagtcctatgtgtgtgaacaagttggtcatmaagttttgtcaaacacaaaagacataaccagaggaacatgtaccatcagtttcctcatctttttttctttcctttttaagatcccacgttaaatgtgaaaataacaaagtatttggttcaggatggatgtttttgatgtttcatcttaggaagtcttatgtatgaactggtaaatcaatattaaataatttgttatctagtatattttgttatctaatatctttttaccgattaagaatacataatttacagtgaaaacaatcaaaataatgtatgactttgattaaattttcaaagatacagagttcatatgtctatccatctggaaaaaatgataatgaattctaaaattataattcataagctgaaaaaattatattcataactcctagagaactgtgctttaacaac

SEQ ID NO: 265632 - DNA, 597 bp, Homo sapiens
gaactctcatttctaatggtaaattgatgcaatttttattatttccttttgatccatacatgcaaagaatgagctaaatttcctataggaagtgtctattaataaaagccttcttaagttgtagtatgcaggtggtctggggagatagaacacaaaagtcctatgtgtgtgaacaagttggtcatcaagttttgtcaaacacaaaagacataaccagaggaacatgtaccatcagtttcctcatctttttttctttcctttttaagatcycacgttaaatgtgaaaataacaaagtatttggttcaggatggatgtttttgatgtttcatcttaggaagtcttatgtatgaactggtaaatcaatattaaataatttgttatctagtatattttgttatctaatatctttttaccgattaagaatacataatttacagtgaaaacaatcaaaataatgtatgactttgattaaattttcaaagatacagagttcatatgtctatccatctggaaaaaatgataatgaattctaaaattataattcataagctgaaaaaattatattcataactcctagagaactgtgctttaacaac

SEQ ID NO: 265633 - DNA, 519 bp, Homo sapiens
tggggggatctattctgttgataaggcaagacttaacttagattagtatgtgttttttttttccttctgaaaatgttaagaatcatttatgatcatttttgtagtagaccacatattaatcttttcccatctcttttggtattttttatattattttgcttaattgggtaattagacattatgttttcatgtttcagaatagagatgcttcagaatgaatgcagaactgcatatcagatataaacattggcttttgcatttcaaattcttaaaattctgagcaaaaaacacacaataaatttttttgaatattattcccgtgtktggggctttactttttttttaccagaggatgtagagagtatgcaattagtagctaaacagtacttcactcaaacactagcaaaaattccctggactgatggaagtgagaagcacttccatagggaaaacaattattgcctcagctgcattttctgcaggtgaataacaaatagatttgaggatttgagaactgtg

SEQ ID NO: 265634 - DNA, 560 bp, Homo sapiens
ggcaatagctcaaatagtggcaatactggagagcactggtgaagagcaaaaagaatatgcagctgtgatctcatatattgatagccaaaaaccacacagtagaatggataggaccagataggacgtcattctactcagaggataccggcattaacagatgatcagaaagcctcgaaacacaagagcactgcatacattaaatgggcattaacttgctttaaaagaagaaaggccaggcacaatggttcacgcctataatcccagcactttgggaggcagaagcgggtggatcacctgaggtcaggagtttgagaccagcctggccaacatggcaaaatcccttttctactgaaaaaaaaaaaaaaattagacaggcatggtggtgcctgcctgtaattccagctacttgggaggctgaaggatgagaatcgctggaacctgggaaacagaagttgaagtgagccaagayagcaccactgcactccagcctgggtgttgaagtgagactatgtctcaagaaaaaaaaaaaaaaagagaaaagaagtaaaaaatcaaatttt

SEQ ID NO: 265635 - DNA, 580 bp, Homo sapiens
tagttatatgaaaatgtgagaagaacatatgaaataaataattacttcttcctagataggtaaacattgaactgaaaccaaatgataagtctaaatggagaaggtttggtgggtccaaagcttatgcacttcagagagacttatagtttttaaaaatatgaaattttgataaaattaggttcagatgtctagttcaattgcaaggtttgaracatatgtttcatttattttaaacaatatgaaatatagttgtgtaagtgggcaagggtcatatcatgcagaagtttttagttaggtaaacaaacggagatttctatcaaaaattcactgggaaaccatcaatggaatcaattatatagcttgttaaaaaaaaaagaaaaggataagagaagtacaagaattcaagctcagtctgaagaccatggcagtaaaataagtgagggatgatggtggcttagtctgcaatagcaatgacaaagagcaaaagagggtgaacccgtgccatgtgaagacaatggtgacagttcaaatgcaagaaacagaagcaggtgaggaatcaaaaaagactcataagagtggt

SEQ ID NO: 265636 - DNA, 580 bp, Homo sapiens
tagttatatgaaaatgtgagaagaacatatgaaataaataattacttcttcctagataggtaaacattgaactgaaaccaaatgataagtctaaatggagaaggtttggtgggtccaaagcttatgcacttcagagagacttatagtttttaaaaatatgaaattttgataaaattaggttcagatgtctagttcaattgcaaggtttgaaacatatgtttcatttattttaaacaatatgaaatatagttgtgtaagtgggcaagggtcatatcatgcagaagtttttagttaggtaaacaaacggagatttctaycaaaaattcactgggaaaccatcaatggaatcaattatatagcttgttaaaaaaaaaagaaaaggataagagaagtacaagaattcaagctcagtctgaagaccatggcagtaaaataagtgagggatgatggtggcttagtctgcaatagcaatgacaaagagcaaaagagggtgaacccgtgccatgtgaagacaatggtgacagttcaaatgcaagaaacagaagcaggtgaggaatcaaaaaagactcataagagtggt

SEQ ID NO: 265637 - DNA, 611 bp, Homo sapiens
gcaatgacaaagagcaaaagagggtgaacccgtgccatgtgaagacaatggtgacagttcaaatgcaagaaacagaagcaggtgaggaatcaaaaaagactcataagagtggtggcctttcgaagacgtaaagacaacaggagaaatagttgtgagagtttattttggagtttattgaacatccaagttggcagctacatcaaaacaccataatttcaaaatctgaagtgaaggctgaagatttaaaagacaggaacttgaagacaaagttagaaatgattgtgtagcccctcgcttacccacttcctgttatttacacatagatacaatgtttataacgagattttattttttaataaaaactggattttaactagcaaggaggggattttttatcagcaaagaactgtataggctccttaaccttcctggcctcctccatgcttcaaattacaggttttcttctaagtactacataaatatctgactgaggattatgttgtgatgtgcgggaaccaaaaggccatttatcaatgagagaacrctagtgttattcagacaagtttagcatatttctaaagatattcaaaaggtgtatgggtatttgaaaa

SEQ ID NO: 265638 - DNA, 639 bp, Homo sapiens
aaactggctcaaagccttggacttcagggttgcttgagaagaataacaatggttatcatgcaatgattcagctgtattctttgaactggtgcacaggaaacaaaacaaaacgtaacaaaaaaatccatttattctcacctgattttacttcattcattcaaagggagccagatcagttaaaagggctatgtaggtgacaaaatgcatacccatagtcctagagcaagtttctgccaatggagaaaacaaaaacagcaacaacaacaaaacatcctcctctttgaattattttaaaatgtactaaaagaacattatttgtttttttgtaatacaaaggataaatgcttgaggtgatggataccacatttaccctgatgtgattattaagaattagatgcctgtatcaaaaaaatctcaaataacccataaataatacacctactatgtacccagaaacatttaaaaaagaaaatttaggtgtttctgccccctaaacaaaaaaacaaacatgaaacaaaaattgagaactagattttttaattaaatgaagtaatgagttatcaacyttgtgatatgtattgttacttcagttttgtttctaaaatgaataggagaatggtataattacttattttagta

SEQ ID NO: 265639 - DNA, 538 bp, Homo sapiens
aatgaataatactgaaatgtgtattttacaaagtatggtgacttacaatcctatttcaaaatcaaacccctcattttcacgcatatgcattgaactactgtcgccacctgccatattaaattgcctatgatgatgttaacgtgcaattgttgatttaccaccactgtcagcagcacattatgctccatctccaatgaagtagcactaccctcacctttgttgttggttatttaggctttctcttttcctttcggttttgttaattcaaaccrtgcatatatggattgtcatagcatgcatttgccctccactgtcacataatagttctagctcatccaaacagcttacatctctttcaggattctcagctctcacttgcatgatatactggtgaccttagcttcattgatattctgcaaatgtcacagttatgctcgcctcagctgcctgggccctggtgagcaggtggaaaaatgaccagttgaaaatgagttgttaagaccactacagtgaaaagattgatgcaattaatttttca

SEQ ID NO: 265640 - DNA, 587 bp, Homo sapiens
aggagacttttagtattatgaagaagaccctagttgagttgaaatatataaaataattagatgatagattattgtgtgatatgtagcatataagtcagaaaaagtttcaactattagcgttgctataaccaaactccattttttttcttactttcattaagaagacttcttggtacttatatctataaaaaaaagcaggaaatgattggaaactgaaaagtgtttcctattgataataaataaytctcactcactggtctttgaaaaaaatctctcattaaatgatgcattataaaatataatatttttcaaaatatgtaatatatttatgttgttttgaggattcgggtacaaataataatcgtaataacttttattccagaaaaccaaaaataaaaatgtaaatatatatttttatatacaacatttttactgcttataagtattagaactagaactagaaaaaatcatatcaaacattaaataaatttatttaagataatttttttggaggacaaagaaaaaacattacttcaaggagaacaacaagcaacataaatgtagttgagagcccttcatttgcacag

SEQ ID NO: 265641 - DNA, 322 bp, Homo sapiens
atcaggaattgaaaaaaaaatgtggttgcttttatggattatattgtatcataagagagaacatccgatatgacaggaagatgagtaaaacaattggaatttttgatmaattctacgacagaatccaattaaagtatgagacaaaattatagggatgagagacactggaacagatgtggaacggagtaaaccaggtattttggatcctttccttgtttccgcaggaataaaagcctccaactctaagagggttactcagtcattcattggccaatctaaccactgtcatatagtgtaggtggacagtgtggcatctcctcag

SEQ ID NO: 265642 - DNA, 600 bp, Homo sapiens
ggcgtcatagaatttaagagagcgagggccttgctctggattaagcttcagtttatgggaatgttgtggccggtttgatattctctccagaccactaaaacattctccatattagcaataaggctgttcgttttcttatcatttgtgtgttcactgacgtagcacttttaatttttttcaakatcttttcctttgtattcacaacttcgctaactgttggataggttaacaacctagctttcaacctatctcagtttttgacatgcttttctcactaagcttattcatttctagcttttgatttaaagtgagagatacatgattcttactttacttgaacacttagaggcaattgtagggttattacttcacttaattttaatattgttgtgtctcaaggaacaaggagggctggagtgagatgagggagagagacagggaaatggtgagtcaatgaagaaatcagaacatacatatttatgacattcaccatcttttatatgcgcatttcttggtaaaccaaaacaatcatgatggtaacattgaagatcaccgatctcaggtccctataatgcctataataataatgagaatggttaa

SEQ ID NO: 265643 - DNA, 564 bp, Homo sapiens
ttgtgaaatttaagatgctaataaaatgactcagaagatttttattgttattgattattgaaagtgagcataggtttaaagagtttgagatacctgacatatgttattgaaagaagaacttaaattttctacacttcatgaaagtttgtacctaaaatctatgtttggaaactacaatgagtaaaattttttataagtaaaatgataaattttctaacaatctaaatgtttattttattagatatatttggagcaccctcttttataaaaatagtaatccaaatgcaagactatatcacttttggtattatagagaytattaccacctggaaaactatgaaaaagcagaggtggtgattcccattacactataccttcaatttaaaatttcttttttgatatctgcaaaagacagatgagtcttgggagaagagaaaagtaatgtacgtcataccagatggtatcttccattgcagctgctattccagatgtggtctttttattggattaaataaatatagtctctggaacttgttattcagctattataattactgtgtgata

SEQ ID NO: 265644 - DNA, 477 bp, Homo sapiens
caaacagtaaaataacaggtcaaatttctctatctagtgcagggtatccccacacacataataaaacctgtagtttctattcaactgaggaacattcaataatttctccctatgattgggaataagacaagtatatcytttctcactgcttttattgaatgttttactttaggttctagtcagtacaataacgcagaaaaaaaataaaatccattcaaattggaaggtaagaagctaaactgactttattcttagatgacatatatttgtaaaaaaaattccatgacattaatgagaaatacattaattttgaaaggtctcaagatatgcagtcaatatacaaaagtcaaccatatttttatataacttaaaaaattgaaaactgaattctatttaaattagtattagtatcactcacaatagcataaacatggcatgcttaaatctaatgttatatattttcaagatcattacact

SEQ ID NO: 265645 - DNA, 477 bp, Homo sapiens
caaacagtaaaataacaggtcaaatttctctatctagtgcagggtatccccacacacataataaaacctgtagtttctattcaactgaggaacattcaataatttctccctatgattgggaataagacaagtatatcttttctcacwgcttttattgaatgttttactttaggttctagtcagtacaataacgcagaaaaaaaataaaatccattcaaattggaaggtaagaagctaaactgactttattcttagatgacatatatttgtaaaaaaaattccatgacattaatgagaaatacattaattttgaaaggtctcaagatatgcagtcaatatacaaaagtcaaccatatttttatataacttaaaaaattgaaaactgaattctatttaaattagtattagtatcactcacaatagcataaacatggcatgcttaaatctaatgttatatattttcaagatcattacact

SEQ ID NO: 265646 - DNA, 477 bp, Homo sapiens
caaacagtaaaataacaggtcaaatttctctatctagtgcagggtatccccacacacataataaaacctgtagtttctattcaactgaggaacattcaataatttctccctatgattgggaataagacaagtatatcttttctcactgcttttattgaatgttttactttaggttctagtcagtacaataacrcagaaaaaaaataaaatccattcaaattggaaggtaagaagctaaactgactttattcttagatgacatatatttgtaaaaaaaattccatgacattaatgagaaatacattaattttgaaaggtctcaagatatgcagtcaatatacaaaagtcaaccatatttttatataacttaaaaaattgaaaactgaattctatttaaattagtattagtatcactcacaatagcataaacatggcatgcttaaatctaatgttatatattttcaagatcattacact

SEQ ID NO: 265647 - DNA, 610 bp, Homo sapiens
aggtggggccttactggggacgagcccctttcattcaggaatcaatctgcctccagctgccattcatgacccccaggcttggccccatctccctcttggagattagagtaggcactgggaatggagagaggtcaggccaacacccccgagcctgcagggattagcatccttcctggggcacccgagggtgcaggctgcagagacacccagccacggccatcaccatccaccatcattacagcaaaccttgagccatggaattctcacacagtcacataagagagcttgggagtggcttgaartgttcaaatgagatccaatttttttcttttttgaaacaggatgtcactctgttgcccaggctggagtgtggtaacttgatcatagcccactgcaacctcaaattcttgggttcaagcaatcatcctgcctcagccttctgattaactgggactaggggtgcaaggcaccactactggctaattttgttttttggtagagacgttcttgctatgttgctcaggtaggtctcgaactcctggcctcaagccatcctcccaccttcctagttgctgggattgtaggtgtgaggcaccaccaacacctggtt

SEQ ID NO: 265648 - DNA, 492 bp, Homo sapiens
ttccagtgtgtgctaatgttaactttcattagtactaattgcaaaatttatcatagtggtgggtgtttcatgtaccttcaaaacagaggcagtgttatatttgagtacatctgcaatcaggagtcacttcaattatcaagacttatttaacaggtactgacataaagatatagtttatctgaagagaaaatttaagtggtgactytcctgtaagtatttacggatgcatgcataccttaacaatttttgtcagagtacgatagcccaatctgatatgtacaaaagtctaatggattctggaaattaaccaatggctattgtgccttaattagaaagtaagcaccctgttacaggtggtcctatatatcatatttatgactatatgtttagtgatttgtattgtcattttagatgctaatttagaattagtaatgtagtgttcatcatttccgtgcaggacaaatataaaaataaattcactgttacttggaa

SEQ ID NO: 265649 - DNA, 492 bp, Homo sapiens
ttccagtgtgtgctaatgttaactttcattagtactaattgcaaaatttatcatagtggtgggtgtttcatgtaccttcaaaacagaggcagtgttatatttgagtacatctgcaatcaggagtcacttcaattatcaagacttatttaacaggtactgacataaagatatagtttatctgaagagaaaatttaagtggtgactctcctgtaagtatttayggatgcatgcataccttaacaatttttgtcagagtacgatagcccaatctgatatgtacaaaagtctaatggattctggaaattaaccaatggctattgtgccttaattagaaagtaagcaccctgttacaggtggtcctatatatcatatttatgactatatgtttagtgatttgtattgtcattttagatgctaatttagaattagtaatgtagtgttcatcatttccgtgcaggacaaatataaaaataaattcactgttacttggaa

SEQ ID NO: 265650 - DNA, 492 bp, Homo sapiens
ttccagtgtgtgctaatgttaactttcattagtactaattgcaaaatttatcatagtggtgggtgtttcatgtaccttcaaaacagaggcagtgttatatttgagtacatctgcaatcaggagtcacttcaattatcaagacttatttaacaggtactgacataaagatatagtttatctgaagagaaaatttaagtggtgactctcctgtaagtatttacggatgcatgcataccttaacaatttttgtcagagtacgatagcccaatctgatatgtacaaaagtctaatggattctggaaattaaccaatggctattrtgccttaattagaaagtaagcaccctgttacaggtggtcctatatatcatatttatgactatatgtttagtgatttgtattgtcattttagatgctaatttagaattagtaatgtagtgttcatcatttccgtgcaggacaaatataaaaataaattcactgttacttggaa

SEQ ID NO: 265651 - DNA, 443 bp, Homo sapiens
aatccaccattctggggcctggagggcagtggcctcatttccacaacactggcaacaccaggcagtgccctggtggggactcygtgtgggggctccaactccacattttccctctgcactgccctagtagaggtttttctgtgaaggttctgcccctgtggcaggcttctgcctggacatcgaggcttttccatatatcctctgaaatctagggagaagtggccaagcctctttatacttgcattctgtgcatctgcagatctgacaccatgtggaaactgctgaggcttatagcttatgccctgtggagcagcggcccaagctgtacctagggccctttgaggtgtggctccagctgaagcacccaggatgcattaagcagtgtcctaggcctagcagtcctgggacagtgcagcagggcagtgatgtcctgggcctggccc

SEQ ID NO: 265652 - DNA, 443 bp, Homo sapiens
aatccaccattctggggcctggagggcagtggcctcatttccacaacactggcaacaccaggcagtgccctggtggggactccgtgtgggggctccaactccacattttccctctgcactgccctagtagaggtttttctgtgaaggttctgcccctgtggcaggcttctgcctggacatcgaggyttttccatatatcctctgaaatctagggagaagtggccaagcctctttatacttgcattctgtgcatctgcagatctgacaccatgtggaaactgctgaggcttatagcttatgccctgtggagcagcggcccaagctgtacctagggccctttgaggtgtggctccagctgaagcacccaggatgcattaagcagtgtcctaggcctagcagtcctgggacagtgcagcagggcagtgatgtcctgggcctggccc

SEQ ID NO: 265653 - DNA, 626 bp, Homo sapiens
cctttgcttcccttttaaaaataatttccaaatttaagtcatttctttgctcccatatctgatcataggttgttagaagcagagagattacttcttaaacactttgytgcttagaaatttcttctgccagataccctaagtaatcacccttaagttcaaacttccatagatccctattacataaagataatccagtcaagatctcagccagtgtgtaacacaggtgacctttatgccagttcccaataaatgcctcatttccatctaaggcttcatcagcctggccttcactatccatatttctgtcagtgttttggtcacaacaattcaactagtcactaagaagttctaaactttccctccactccctgccttcttctgagccctccaaacccttctaaaatctgcccattacccagttccaaagtttctttcacatttgcaggtatttttatagcaatgccccactccttgatatcaattttctgcgttaggccatttacgttactacaaaggaatacctgagtctgggtattttataaagaaaggacatttaattggctaaccgttctgaagactgtatgagaagcatggtgccaaatctgctcaacttcttgggaggcctt

SEQ ID NO: 265654 - DNA, 626 bp, Homo sapiens
cctttgcttcccttttaaaaataatttccaaatttaagtcatttctttgctcccatatctgatcataggttgttagaagcagagagattacttcttaaacactttgctgcttagaaatttcttctgccagataccctaagtaatcamccttaagttcaaacttccatagatccctattacataaagataatccagtcaagatctcagccagtgtgtaacacaggtgacctttatgccagttcccaataaatgcctcatttccatctaaggcttcatcagcctggccttcactatccatatttctgtcagtgttttggtcacaacaattcaactagtcactaagaagttctaaactttccctccactccctgccttcttctgagccctccaaacccttctaaaatctgcccattacccagttccaaagtttctttcacatttgcaggtatttttatagcaatgccccactccttgatatcaattttctgcgttaggccatttacgttactacaaaggaatacctgagtctgggtattttataaagaaaggacatttaattggctaaccgttctgaagactgtatgagaagcatggtgccaaatctgctcaacttcttgggaggcctt

SEQ ID NO: 265655 - DNA, 622 bp, Homo sapiens
cagtgtgtatctgctttgtaaagttttagctaattagtttaataataataagtgcttaattcaaatattttgtcaggaaagtagaaattgtaatgccttttaattcttgtaactttagcaatctttgagaaataaagacggttttaaagattattggtaaaatacaattgtcttcaaactgtaaacgtgtgttctaaattttgttcaaatattaggtttgctaaatgctttcaggtcatgaactgctttggcttttgaaaattgtttaacttgcctgcattctagttaggtaaggcctggggacatgtggagttagccatgcccttgttatgctggaaacagtctaacctgatcagaatataacttaccaagatttacattcttgttaaacttgccaagagtcaccactggaacattcaatgaagactactagaaagagtgttacatgcaaggtgygtaaaaatagtagtttttttgtttgttttgtttttgttttttctgtaaaaggttataatgggtttttacttctttacaatttctgagtcatcattttggccaaataaataattatggtaatctggaattccaaaaccaaacttcagtttcaaaattgtctttccta

SEQ ID NO: 265656 - DNA, 536 bp, Homo sapiens
tctaacattctaatgtctaaagtatatgctacaaatcacaattacagttattatgttaagttattgtaaaccrcagaaataaccaaattttcatgtataaaactactcacccaagtaaaacaacaaaaaaattaaatatcaagaaaatacttttatgttaaatcagctaataccgaaattgtttaaaatagtttataaccaatgcttgatcccatatccctgggaaatcaattatagcttcatgtacctttagttacctggttggccatttaaacattttataaagggatttctttccattgttgttttcaattcatgctttcttgttctataaaagctttcccttgcaggagggctgatgttataacagtagattattatgctcggtgtattttcaccaggtaaagaaagcttttttatggtttgaatattctggaaacatcagagaaagactgtcttttctatccacactaaaacaaaactttgaaaccttgaactttgggttcataatatcacaattgagaaaggtatctcca

SEQ ID NO: 265657 - DNA, 536 bp, Homo sapiens
tctaacattctaatgtctaaagtatatgctacaaatcacaattacagttattatgttaagttattgtaaaccgcagaaataaccaaattttcatgtataaaactactcacccaagtaaaacaacaaaaaaattaaatatcaagaaaatacttttatgttaaatcagctaataccgaaattgtttaaaatagtttataaccaatgcttgatcccatatccctgggaaatcaattatagcttcatgtacctttagttacctggttggccatttaaacattttataaagggatttctttccattgttgttttcaattcatgctttcttgttctataaaagctttcccttgcaggagggctgatgttataacagtagattattatgctcrgtgtattttcaccaggtaaagaaagcttttttatggtttgaatattctggaaacatcagagaaagactgtcttttctatccacactaaaacaaaactttgaaaccttgaactttgggttcataatatcacaattgagaaaggtatctcca

SEQ ID NO: 265658 - DNA, 599 bp, Homo sapiens
gaaaacatttggctatttggttaatggtcatttggttaatggtcatttttcaatataaagcaagttatttttaaaaaaattgaaaatctatttttagttttacatgatattcagtcagagtcaagtatcttgacttagtgttaggactttgtctaaattgtaattgtcaaagcttaccctgagtatgatcctgtcattcacttcaaagaaacattgcaatgaaaaccaatcaagacagcagaagagaaagagaaagaaaacaaaattatatatacatgccaaatgcaaactctattgtcaatttgtccatcttattgaagaatgtattcttgtatgayggttatggctgagatatgctttctctcaaattgagtttatattcttattaaaaggaaaaatgcaataaaaatactaacagcaaaacaaaagaattaggttgcatttttaggaaaaaaattaaaagcaggtgttaaacacagagaacatttttactccatatgtgctgcccagtcagaaactatgagaataaaaaatgtaacaatgaattaacaaagataactataatccacttctatcgacatctattaaggtaaaacaac

SEQ ID NO: 265659 - DNA, 588 bp, Homo sapiens
actataatccacttctatcgacatctattaaggtaaaacaaccacaacatcaacactgagattaaaattgactttgtaatgccattttttgtttccatgaaataaattcaaaaatagagccaagaataatttgaacatttatagaatacatcaatgatacatcattacctagatcttcttcaattcagtgattttaattttctgttgaacaagtagggtttatcagagaacttagcatctgaatgtaacaggggaattgtaaaatgatttcttgaaatttgcatgtctttggctcctgaatagccatcaaagtaattgtttcttaaatgttatgcaaatcttttctcctgtgttgaccctaatcaaagcaattaattctataatgatgtctttctttgcagacaccatcttattattatcttggyctaaattaataacatcatgataataattagtagatttgaaatcatctatttatttcttacagcatgtgggctccttataaaagagcaacaggaatggaaattagagtaaaacatggcagctgtgttgattggtgtgccctcctaaccttagcacctgcaacat

SEQ ID NO: 265660 - DNA, 588 bp, Homo sapiens
actataatccacttctatcgacatctattaaggtaaaacaaccacaacatcaacactgagattaaaattgactttgtaatgccattttttgtttccatgaaataaattcaaaaatagagccaagaataatttgaacatttatagaatacatcaatgatacatcattacctagatcttcttcaattcagtgattttaattttctgttgaacaagtagggtttatcagagaacttagcatctgaatgtaacaggggaattgtaaaatgatttcttgaaatttgcatgtctttggctcctgaatagccatcaaagtaattgtttcttaaatgttatgcaaatcttttctcctgtgttgaccctaatcaaagcaattaattctataatgatgtctttctttgcagacaccatcttattattatcttggcctaaattaataacatcatgataataattagtagatttgaaatcatctatttatttcttacagcatgtggrctccttataaaagagcaacaggaatggaaattagagtaaaacatggcagctgtgttgattggtgtgccctcctaaccttagcacctgcaacat

SEQ ID NO: 265661 - DNA, 551 bp, Homo sapiens
gaggcaaaattaatataggtagagagtttatttgaagcaagcttcagagatgcaacttcagagcatagattcaagttgccctgaatatacactccaattaacaagtacaagtaggttkttaagaggaaagaagaggtagtttctgtcaggcctctgagcccaagccaagccatcacatcccctgtgacttgcacgtatatgcccagatggcctgaagtaactgaagaatcacaaaagaagtgaatgtccctgcctcgccttaactgatgacattccaccacaaaagaagtgtaaatggccagtccttgcctcaactggtgatattccaccacaaaagaagtgaaaatggccagtccttgccttaagtgatgacattaccttgtgaaagtccttttcctgactcatcctggctcaaaaacctcccccactgagcaccttgcgacccccactcctgcctgccagagaacaaaccttctttgactgtaattttcctttacctgcccaaatcttataaaatggccccacccttatctccctttgatgactctctt

SEQ ID NO: 265662 - DNA, 551 bp, Homo sapiens
gaggcaaaattaatataggtagagagtttatttgaagcaagcttcagagatgcaacttcagagcatagattcaagttgccctgaatatacactccaattaacaagtacaagtaggttgttaagaggaaagaagaggtagtttctgtcaggcctctgagcccaagccaagccatcacatcccctgtgacttgcacgtatatgcccagatggcctgaagyaactgaagaatcacaaaagaagtgaatgtccctgcctcgccttaactgatgacattccaccacaaaagaagtgtaaatggccagtccttgcctcaactggtgatattccaccacaaaagaagtgaaaatggccagtccttgccttaagtgatgacattaccttgtgaaagtccttttcctgactcatcctggctcaaaaacctcccccactgagcaccttgcgacccccactcctgcctgccagagaacaaaccttctttgactgtaattttcctttacctgcccaaatcttataaaatggccccacccttatctccctttgatgactctctt

SEQ ID NO: 265663 - DNA, 551 bp, Homo sapiens
gaggcaaaattaatataggtagagagtttatttgaagcaagcttcagagatgcaacttcagagcatagattcaagttgccctgaatatacactccaattaacaagtacaagtaggttgttaagaggaaagaagaggtagtttctgtcaggcctctgagcccaagccaagccatcacatcccctgtgacttgcacgtatatgcccagatggcctgaagtaactgaagaatcacaaaagaagtgaatgtccctgcctcgccttaactgatgacattccaccacaaaagaagtgtaaatggccagtccttgcctcaactggtgatattccaccacaaaagaagtgaaaatggccagtccttgccttaagtgatgacattaccttgtgaaagtccttttcctgactcatcctggctcaaaaacctcccccactgagcaccttgcgacccccactcctgcctgccagagaacaarccttctttgactgtaattttcctttacctgcccaaatcttataaaatggccccacccttatctccctttgatgactctctt

SEQ ID NO: 265664 - DNA, 597 bp, Homo sapiens
tgtaatatattaaaatatatgtaactatatgcgtacatacatgacgtacacacacatataaatacatgtatctatctatataaacatgcctccccatatatacttatatgtatctgttctgtgattattggagcattcctatatgtttttattttacatatttatttttcacaaagattcatacctaattgtggcatttatttattcattctaaagttaatatgctcttagcaggttgaatctatagacagtagacaagtcatataatatgtcaagcaatttcatttacaagaacctttartatcaatacaataatgccatgagctagacttctacattctttcttgatatccttgaagtaagtttttctaattaacttgttttaatttgatgaggtatcctgatatctttatagttagtacactgaggtccaggatttttatgcaaactttctggctaatttaggtggtctgtcatcctggcagttctcttcatgaatagatttctcttagtgggtattcttattgaatacctatcttagacacagttttctatttgtcccacctgcatttgatgtttcatcaattaacttatttg

SEQ ID NO: 265665 - DNA, 519 bp, Homo sapiens
ctagcaagcactctatctatcttgcttgtttttcttttttgtttgtttgtttttwaaaaaaagaatctcctgtatttgctaatcttttgaatggcttttcatatctcagtctccttcaattctgctcttattttggttatttcttctcttctagtagctttggggttgatttacacttgattatttagatcttttagttgtaatgttaggttattaatttgaagtctttctgtttgatttggccatttagtgcatataaattttcttcttaatactgccttagctgtgtgctgtattttggttctcattagtttcaaataacttctttatttctgccttaatttcattatttacccaaaagtaaatcaggagcaggttgtttaatttctaggaaattgtatggtttctagcaattttcttcattttgagttctatttttgttgcactgtggtctgagacagtggttggtatgattttgttttcctttttttgcatttgcttaggatcattttatgtcaa

SEQ ID NO: 265666 - DNA, 519 bp, Homo sapiens
ctagcaagcactctatctatcttgcttgtttttcttttttgtttgtttgtttttaaaaaaaagaatctcctgtatttgctaatcttttgaatggcttttcatatctcagtctccttcaattctgctcttattttggttatttcttctcttctagtagctttggggttgatttacacttgattatttagatcttttagttgtaatgttaggttattaatttgaagtctttctgtttgatttggccatttagtgcatataaattttcttcttaatactgccttagctgtgtgctgtattttggttctcattagtttcarataacttctttatttctgccttaatttcattatttacccaaaagtaaatcaggagcaggttgtttaatttctaggaaattgtatggtttctagcaattttcttcattttgagttctatttttgttgcactgtggtctgagacagtggttggtatgattttgttttcctttttttgcatttgcttaggatcattttatgtcaa

SEQ ID NO: 265667 - DNA, 654 bp, Homo sapiens
ttttaaacttttgaatcttgtaatttatattattatcatcaggtatattttatgtccacaaaattatattctattgtccagatagattgcatgtgcattatgttcttctttctaaaaattatcagtcagtcaacttagaccaatacagactcagaaatttaggattttaaaaggaaatattataatgattagtataaatgaataatgttttacataatgtttaaaatttgtagataaaataacacaacaaggttactatggcaaatctcaccacttttttttagagatgaagaaataaaattgaataattttttcagggtcacagaataggaaaaatcaaggcagtattttaactcaaactaggtttacttattctattcctttattctataatacttccagattcaaaactatctctaaatctcttttaattacttccaattttcagataaaatctaaagctggtaagaatatatacattaagtaggtgtaatgccaaaatctatgtctgctctttattttaccyatagtgtttaatcatgttacagttgaaattcaacagatataaatattatacaacagttatctaaaatttattatgaatttagaaacaagctctaatgaggacaggggtcaatgtgatcaaatatttat

SEQ ID NO: 265668 - DNA, 450 bp, Homo sapiens
acttattctattcctttattctataatacttccagattcaaaactatctctaaatctcttttaattacttccaattttcagataaaatctaaagctggtaagaatatatacattaagtaggtgtaatgccaaaatctatgtctgctctttattttacctatagtgtttaatcatgttacagttgaaattcaacagatataaatattatacaacagttatctaaaatttattatgaatttagaaacaagctctaatgaggacaggggtcaatgtgatcaaatatttatttggacttataattttatctatgacagaaaaatatatacttctgcttctagaaggtggattacatgcactattgtaaccataataggctcattggtcaatatgcrtagcaagtcaacattcagagacaccaggttgtaatagagaaagaggtttaattattgg

SEQ ID NO: 265669 - DNA, 467 bp, Homo sapiens
gttgctggaatttgggatctgaaaaatatcttaagcaattattaaataaaagccttatgattttaatgtcagagatcttgtrtatttggacaatggggatggaaataaattcttaaacacacttatcaccctaatgtcagaaattccatctataggaaaaatggggatgcaaatggtcagtattttgtgctgtgtgacttttagcaacagagaagtaggtcaaagagcaacctgtttattgcttaattataattatatttctgttcagaacccatcattcatttcttgccaactctgtagcagtggattcactttgtcttgtgcttttccacaataagcacacctaaaaaccctagacattaaatatgaaacaaacctaagaagattatagcagaaggagagaagacagactgattaatgatcttaggttcttagaaaggacatggagatgagatctttgggttttc

SEQ ID NO: 265670 - DNA, 566 bp, Homo sapiens
caagaaaatagacatcatagaattattagacaaatatttaaagcagtcatggtaggattgcttcaacaagcaattgaaaacactattgaaacaaatmaaaaagtagagatttagcaagtaaatgaatgatacaaataaaaaccaacggaaagttttgaactgaaaaacagtaactagaataaaaagctcacttgatgggctcaacagcagaatgaaggggacaaaggaaagaatcactaaactggagcacataacaataaaagttactaaaaggaaacagcagagatagagtagaaaaaaaaaatatatatatatatatagggctcagggacctgggaagctataataaaagacctaatgttgtgttactggaattcaatgaggagaaaagaaaagatggtactgaaaatgtactggaagaaataatgactgaacatttctgttatttcacaagagacataagattcaggaacatgaatgaatctttactaggataaacctaaatataccaagagacagcattccttttcttttaccatttgaatgatattgtgccactttcttct

SEQ ID NO: 265671 - DNA, 549 bp, Homo sapiens
ttgtaatattgagtcaaagaaaattattttcaagatttaaaattgaatgttgtttttcctcttgggttttagacttacttgagacctgttactccttgstttcttctgatttctcctttttgggaacgaaaaagtttattctatgcatgtttcactattttatgttggacgcacataacttacttgattttgcaggctcacagctggagagaaatttgccttaggataaatcacacctttaatttcacctctatgtaatttagatgatatttagttgagactggacttagactttaaagtttatcttgaaaaagttaagaaattggggctactagaattaaattaatttactttgcatgtgagaaggacattaattttgagtggccaggggcaaatgctatggtctgaattttgtgtccccccaaattaatatgtggaaatctaagccacaatatgttggtattaagtgacaggacctttagaaagtgactagatgttgaaactaatattctcatgaatgtgattagttcacttatttaaaaaaaaaaa

SEQ ID NO: 265672 - DNA, 625 bp, Homo sapiens
tgggcctctgtcttcacagagcttatgtggtccagtgtgtgtgagggcatctcaggcaatcagaatgcagtctcaaaagcacctgccgagggaaaggacattgtgctttgagagcaccgaggaggggtccctaacctaatctccaatttgtgtaggaagagactgggaccaagttaagcttcctagaggaagttatcaggctgagaaatgaaggcgataaaattgagctcagcaacaagagtgaggaaggcaattcttctaatatttgaaggcaactaacatgtttcatccccatttccrccatccttcttgtgggagggtttccagaactttcatcagcacaatctcctgagaaaatctacttgttgattgatattgctcttaaaataggtatttcaaattagaatggaataatccagatgcaatggaaatagcatttgtcatagtaaagttttgctacctttttttgatattgttttttggaggatactaacattattgtgacatattgtttattcattttgagcttacggtaaactaaaacaaaatagatttttttccaactgaaattaatgtttgttcaagtccttcccatcatatataagaagatttcacatatccttat

SEQ ID NO: 265673 - DNA, 597 bp, Homo sapiens
aagctaaacagactaggtaaccaaaaagcataagaaaggaaaagcaaactctcctaataaattagtacytaggacattatgaacaagatatttgaaaatggatgaaattccttatgattcctgcctttttaggccaggaattgagtccaggagttggagctcaaaattggagggtgtctttgtccagaaatttgagaaaaatgaagccagcactgccgccagagcttctgcctgggcatgctgtcctggtgctgtctgtgggcactgcattgacagacatcgatttgtcttgggtgagcttcactgggtcctcatgtggctccataaaccaggcctgtggccagcacttcaagcacgtttcgttccattgctgtcttgcttgtctgccatgctttagctggggctgggacacaggggcgttgtcttgaggtggctctaatgctgctctgtgccactgtctagcagggtcggttagtggcactcacgtcactttttcttggctgctttccaactgccaactgttgccagttgtgtaaaccactggtgggcacagaattcttcctgccagacacctactattttttgcttggtaatcaa

SEQ ID NO: 265674 - DNA, 597 bp, Homo sapiens
aagctaaacagactaggtaaccaaaaagcataagaaaggaaaagcaaactctcctaataaattagtacctaggacattatgaacaagatatttgaaaatggatgaaattccttatgattcctgcctttttaggccaggaattgagtccaggagttggagctcaaaattggagggtgtctttgtccagaaatttgagaaaaatgaagccagcactgccrccagagcttctgcctgggcatgctgtcctggtgctgtctgtgggcactgcattgacagacatcgatttgtcttgggtgagcttcactgggtcctcatgtggctccataaaccaggcctgtggccagcacttcaagcacgtttcgttccattgctgtcttgcttgtctgccatgctttagctggggctgggacacaggggcgttgtcttgaggtggctctaatgctgctctgtgccactgtctagcagggtcggttagtggcactcacgtcactttttcttggctgctttccaactgccaactgttgccagttgtgtaaaccactggtgggcacagaattcttcctgccagacacctactattttttgcttggtaatcaa

SEQ ID NO: 265675 - DNA, 584 bp, Homo sapiens
tcgctaagtttgtggtaactttgacagcaaccacctcctgacatgtccaccgtcttgcacatgtgttctcagcaccggtttttgtttccttcctcaaatgcaccacatggtacccaccaaaaagccgctgggatgctgttcctccacctgcaacaygcctgcttcctgtctgtacatcactgccttttccttcctttcagcctttgtttaaacgtcactttctcagtgagactctccttgaccacccaatctagaacatgctctttctccaacccatgacatttgcttcctgtcccctgtttttttacttaatagcttgtatgaaaaaaaaaaaacaaaaacaaaaaacagactcaggaccccaaactcactatgccaagggaaatgttaagcttggaaaccgagtcatgcaaaaccgcctcccactttgatcctaaatacatagctgcgaagacagagggccacagagatccccaggggcctcgcttccaacttgctcccaaggaaattccttggaccccaaggaatttctaccctaaaacagagttccactgaatttcaccctgacaatatcaattaacagc

SEQ ID NO: 265676 - DNA, 584 bp, Homo sapiens
tcgctaagtttgtggtaactttgacagcaaccacctcctgacatgtccaccgtcttgcacatgtgttctcagcaccggtttttgtttccttcctcaaatgcaccacatggtacccaccaaaaagccgctgggatgctgttcctccacctgcaacacgcctgcttcctgtctgtacatcactgccttttccttcctttcagcctttgtttaaacgtcactttctcagtgagactctccttgaccacccaatctagaacatgctctttctccaacccatgacatttgcttcctgtsccctgtttttttacttaatagcttgtatgaaaaaaaaaaaacaaaaacaaaaaacagactcaggaccccaaactcactatgccaagggaaatgttaagcttggaaaccgagtcatgcaaaaccgcctcccactttgatcctaaatacatagctgcgaagacagagggccacagagatccccaggggcctcgcttccaacttgctcccaaggaaattccttggaccccaaggaatttctaccctaaaacagagttccactgaatttcaccctgacaatatcaattaacagc

SEQ ID NO: 265677 - DNA, 522 bp, Homo sapiens
ctctttctgagcgactgattttatggtatttatctaccagtgactttgtgtttaattattataatgttaaaaatacttaggatgagatagaaacattgtcctcgcattctaatttaaaaatattttttgctgttatatgtgtgcttttttcacatcttgataattcctccatcatattctgtaaatatcatattgytattttgattagtatgaaaattaatatatacattaatttttgaagtagttcttatccttccaatatgttgcactttcattaagtatcacagtatgtttctatttttattcaaatattattttaatctctcagtagagttctatatttaaaaaatgttcctaatgactaatttattttttgttaggatcattcaaaggtattttatttttaagttgttattgtaaattaattattttaacacttatattttgaattgtttattgacaatatataagaaaggattttggcctattttcctggcttaagtggcataactgaaattttgt

SEQ ID NO: 265678 - DNA, 637 bp, Homo sapiens
ttacacattatcagcctcaatagatacttattttttttcctttccttgtccccctcccctcttccttgttaagatgcagaatcggtgcctgtgagtaaagcggccatttgtcccccttgttctgatcattctagttcctgttgtttcaggtgttgttacacgggctggaacatcaaaaggcattttaaatactagtgcttattcattatagttagtctaaggaagcatcttataatttctggtttcccaagaggttttttcaggagtagatttttaattttatcatattttcctaagtgtcttaatctttgaatatgattcattgtatttatgtatttcctaatgttctattgtccttacattttttcgtagtcacagggtaatrttttttaatgttatattgacctaggtttgcaagtattttatttagagtctttgcatatatcacataaataaaaaagagaactacagtctcattttcctttgtgtcaattttaggtttttgtgttagagtaatggtagcttcataaaatgaatagggatactttgtatctctttcagtgctctaaaatcaatctctctctctctttctctatgtgtgtgtgtttcagtgtgtgtctttttatctctcttacac

SEQ ID NO: 265679 - DNA, 593 bp, Homo sapiens
cttcctactgcttttaggacagctgctgtgagctctagtatttactgtgaagaaggtaccaaaaggtcagttccaggagccccagctggtgcagaagccacctgacaagaagtggaggccaggagtctgctcccaagaccgcctaggctgaaaagtatggagaggacagcaaamacacctggctccacaaccagcatgcaggtgaagctcagctgtgaatagaactttctggagattctacaactttaaagtcaacactccttttcccattacttttttttactcatttatcaggctctactacatgatttactaggactgttatagaaccagctcttttgattaaatacttttggtaagtgcctatagtagaatctataatattgacaagtgtctaattatacattctatgagaagaccttgctcacacaaactgtcgaaacacgagctctccttcaggcaaataagctgggtgctcacatgtgaaccagagttcactgatggaaaaaacgtgcccagttatctagcttccatgatgctgttgggctttcttgacccaccttctcatctcagttacttttgagactcctatt

SEQ ID NO: 265680 - DNA, 584 bp, Homo sapiens
atatttaaaaacaggaaaagtagattattgttaataactataatgaagcataagtctatattaaactcttccttaataggaattgggcattaggtaatagatgctttatttyagtatttataacagaaaatacattaccagtttatgattatttttattgttttgcgcattttgaaattttagatttgtgatctttctgtctttttagtctataaagttatcaactcagataaggttcatgtaccgagaatgtgtaaattatgaaagaatattaaatatttattaagatcttaatgcttctgaaattatacatttttttatcctaagtatttaaaataggaaggcttctttttcattttcacttgatactgaaaaatatctatctaccatctgtgtcttaatcgccaaagataaaactgggtccccatcagtaagactgaactttctactgaaatctgaatcagcactctggaataaatccacctggttcattgtgagccatgggaacaggtggcagcaggttgtagctgcagaaaccagagccaaagaagtaaaacaaggcaggggatgatagagaagagaag

SEQ ID NO: 265681 - DNA, 584 bp, Homo sapiens
atatttaaaaacaggaaaagtagattattgttaataactataatgaagcataagtctatattaaactcttccttaataggaattgggcattaggtaatagatgctttatttcagtatttataacagaaaatacattaccagtttatgattatttttattgttttgcgcattttgaaattttagatttgtgatctttctgtctttttagtctataaagttatcaactcagataaggttcatgtaccgagaatgtgtaaattatgaaagaatattaaatatttattaagatmttaatgcttctgaaattatacatttttttatcctaagtatttaaaataggaaggcttctttttcattttcacttgatactgaaaaatatctatctaccatctgtgtcttaatcgccaaagataaaactgggtccccatcagtaagactgaactttctactgaaatctgaatcagcactctggaataaatccacctggttcattgtgagccatgggaacaggtggcagcaggttgtagctgcagaaaccagagccaaagaagtaaaacaaggcaggggatgatagagaagagaag

SEQ ID NO: 265682 - DNA, 648 bp, Homo sapiens
tgtcatggcccattgtggcttctccactggatgaatatcataaatactcagttcttaaaaagatggtgtttgtttttcaaaccggtggttaggaatcaatagcctaagaattaaaacaaatctagaagcttattcaaccaaaaaaatattaggttggaagcagagggtcaaggcaaacacaacctagctgcgtattactccttggaggatgttgtccattgccaaatattcgctgtgacaccataattttcagtgaggctttctctgtaagataacaattagaatgggaaagatacactttaaggaagggggcctcctctctacacatggcatacacagtatgtattgctgcccttggcaatgcccttgttataatgacaactttgcttttatttataatgcatttcatcttttttctgtaagttattcatcataaatcctcttagacatagtaatgatagagygacaacagcaagaactaacctttatagaatgcttcctgtgtaccaggcaccactctgagctctgacaccctgggcgaccaccaccttgattatcaccaatctacagatgaagaagcggaggcctccggacatcctgtgccttgccagtgctcacacagctaatgggtgcagaacaggaagcaga

SEQ ID NO: 265683 - DNA, 635 bp, Homo sapiens
atctgacaggtctattccatcaggacctcttgagtcgaatatcagccagagggtcagccacataatcccatgccctgaagaaaccctcgggcatgaacacttgctagctatgatttataaactgctctcacatggacaagaacttcaggagcccaatttctcaatcacacaaactggggctaaaaatgtggtgtttctcttatttgtagggttttggtcaggttgaagtggaataatatccctaaggctgtcttcaaattataaaactccatttgctaactatttatattataatcaccaycgactggaaaagaactcatatatttttaaatctccctattcccaaatgagtgttcctgatgaggttgattttagagcaagatttaataataaaaaggaaagaaccctaaagatttagaggttataaacacttttgtataatttttaaaatatttttatagccatatattattatttgattttacagatgagaacactgaggttcaatcagcgttttaaaatggcctaagaagactcaataaaagcagcagcaaattccctgtgtttcttctgctctacactgagcaaatttgacaatatcacatatcattgcatttcatttggattgagtgggt

SEQ ID NO: 265684 - DNA, 635 bp, Homo sapiens
atctgacaggtctattccatcaggacctcttgagtcgaatatcagccagagggtcagccacataatcccatgccctgaagaaaccctcgggcatgaacacttgctagctatgatttataaactgctctcacatggacaagaacttcaggagcccaatttctcaatcacacaaactggggctaaaaatgtggtgtttctcttatttgtagggttttggtcaggttgaagtggaataatatccctaaggctgtcttcaaattataaaactccatttgctaactatttatattataatcaccatcgactggaaaagaactcatatatttttaaatctccctattcccaaatgagtgttcctgatgaggttgattttagagcaagatttaataataaaaaggaaagaaccctaaagatttagaggttataaacacttttgtataatttttaaaatatttttakagccatatattattatttgattttacagatgagaacactgaggttcaatcagcgttttaaaatggcctaagaagactcaataaaagcagcagcaaattccctgtgtttcttctgctctacactgagcaaatttgacaatatcacatatcattgcatttcatttggattgagtgggt

SEQ ID NO: 265685 - DNA, 635 bp, Homo sapiens
atctgacaggtctattccatcaggacctcttgagtcgaatatcagccagagggtcagccacataatcccatgccctgaagaaaccctcgggcatgaacacttgctagctatgatttataaactgctctcacatggacaagaacttcaggagcccaatttctcaatcacacaaactggggctaaaaatgtggtgtttctcttatttgtagggttttggtcaggttgaagtggaataatatccctaaggctgtcttcaaattataaaactccatttgctaactatttatattataatcaccatcgactggaaaagaactcatatatttttaaatctccctattcccaaatgagtgttcctgatgaggttgattttagagcaagatttaataataaaaaggaaagaaccctaaagatttagaggttataaacacttttgtataatttttaaaatatttttatagccatatattattatttgattttacagatgagaacactgaggttcaatcagcgttttaaaatggcctaagaagactcaataaaagcagcagcaaattccctgtgtttcttctgctctacactragcaaatttgacaatatcacatatcattgcatttcatttggattgagtgggt

SEQ ID NO: 265686 - DNA, 639 bp, Homo sapiens
aagagagaaaattttttgatatttctaaaccttagaaatatgtttcttcagaaaaaatatatcagttatcctttttttacatctacttcaatttttgcaaagaaagcgattttgacatggaaaatatacagaaaaaaaactgcctaaaagattgcaagttattgttaacataaaaagtatgaaggaaaaagtatcttttctgtttctatttttggcccctatgccatgtgaactgattttcttcagcagagattctggatacctatttgcattttagwtaacatattttctttgctattcttttcctttctcccatgccaatatacccccctgatgactaataatcaaaaatatttcctaataggaaagatttaatttgtaataaaatctatggaaaaggctgtgcaaatgaaaatcagtgtaaaacaaaaaagagcctttttaaagagataataaatatttgaaaccatatttcttacaaaataggtcacaaaatgccactaaacttgctctatgactctaataaattggcgcatgcctttggaaaatgaagacagcaatgctcattaaaagtacagataagacaaatatggactagcattttctattgcaacactggatggtttttgttgtttatta

SEQ ID NO: 265687 - DNA, 535 bp, Homo sapiens
gagaaggaccaagaggagatggaggaaaaggaggaggagagggaggagcaagagaaggatggagaggagaaggaggaagaggaggagagggtgaagaaagaggaggaggagaggaagaagaggaggagatggaggaggaagaagagtgccagcctgatattgtttaagtgatattttcacttaaacaatatcatgtcttacgtgaccttttgcaacttgctgcttcttttctggtgtcctggagtcagcagtctgaagccaccgctaagtggattaaagctgataggcagcaactctacatgtgcttctcagtgctaatgggcaagctttatyactgaaccttcctacattcccatgtcagaaatcacaacgccacatagccctctgctcatggcgcctgcagattccttatggaagtgctcataacccttgtctgtaaaaccacacttggtttactttcatattcacgaagaggaaggttgtgtaacaaacataaggttaaatgtgtgcagtgcctatgttttgagttcagtgt

SEQ ID NO: 265688 - DNA, 554 bp, Homo sapiens
actctgcctgggaatgcaaggggacaaagcagcttctctgctctgcgatataaaagagcttaaactcagcttctcagggtttctgcaggacatcgcagaggttcacacatcattcagtgaggctcaggacattcctgtggtgtttagacagtaacctgcagatggaacccactttgttttaaaaaaatacatattcacggattttttttaaaaaagaagaagtcactggcraggaaaacatacaaaatcaagaggaaaagcatattttatgttttctctttggccccatttcttggagataacagttaccacttttgtgtgtttttccaagtttttctatgctgctcaagcacacacacatacacaaacacatatctatctatctatctatctatctatctatctatatatagatataattgataaatcctttttatgcaaatgacaccacatcgtaaatactattctggttagaaagaatgaataagacctactatttgatagcacaatggggtgactatagtcaataataactgtacattataaaataaagg

SEQ ID NO: 265689 - DNA, 612 bp, Homo sapiens
actcacagaaccagtcccctagtggtgaacawtcaggttgtttataggcttcctttttattgcaaacaatgctgtaattaaaaaaaaatcttcacatatatactgctaactatttgtgcaagcatgtgtgctggttaaattcctagtcctggaattactagattaaaggagatatgtattttaaatgttgtactattggacaaactgctgtccacagaggtcacacctattcttgcctacacttctgatgctgattgagctccctgtttaagggatggctcttccgcagtgaatgcaaaaggtctatatcaataaaatgtaaaataaaagcattgagaaagctcacaaacaaacctattctaaccagtaatgcttggctaagtacctgatttaaagcttagatcagtcaagctcttaacagaagtaatccaaataaaaatgtgacagtttgcaagtagagctggggaaggagaaggagcctgtggagaaggttcctgtagttaaatttcacagtgtgtgttccactgggctcctggtgaaattttatgttttatctttcagtggttgtatgccaccggctaggtggctcaatcattttacaccagtaaagat

SEQ ID NO: 265690 - DNA, 633 bp, Homo sapiens
ctggattgtaaggtgaagagaacacctctttgctttagacagcttattttaaaggaagaaaaataatttgttgttcacagttgtgattccttcaatttcctaaactttctgtaatttataagaattttctacaaattcattgttggatgatcctctttgttgtttaaattaaggacrtggggctcatacagagacccatgacatggccctagccagggagtgagccctggaggcaactggcattggcaaggggaggaagaatctttggcatcacgttcaggtctaaaagtcagccatcccactgtgaacggagaacttctggtggagtaggagtaaggcttcactgtggaccagcttgtgctcctgagaggcctcagaaagaattcccagtggcttgcgtgaacccgggaggtggaggtttcagtgagctgagatagcgccagtgcattccagcctgggcgacagaatgagcctctgaaaaaaaaaaaaaagaaaaaaaggaagaaagatgaaagaaagaaaggaaagaaagaaaaaaagaaagaaaggaaagaaagaaaggaaatgaaagaaaaaagaaagaaagaaaagaaagagaaagaattctcagtggctttgctggcaaagacagtg

SEQ ID NO: 265691 - DNA, 641 bp, Homo sapiens
ataataaccagcaatccctttggatcagagcatgacaacctcagatagtcctggcagatgcaggctgggtggacccacctgggatgtggtgtatgcctggaatgagcccaccttctgacctggcacccacagggctcattcactgcttcatgctttgtgactcccacttgtttctacttcagagatttgatgagattcctatttagctccaacgtgaaggctcttcaagtccaaaaagggatttaagatgggaatgctttcttgctcttcagtttttattctgttgttgattcagacattattcaccaatgttgactctcttgcccaatatttttgcatccatttgactccatcttaactttctctttgattatctgccttygtttcttctccctgggaagctatatagttttggaggcccagagtaatgtcagtgttttgttatgtttttgtttttgtttttctttttttagaagaagcattttggggaatatttattaacatgcatagggcatcttaactaagaagaaataatttatgcactgtagaagggtttgcaagtccatttccagtgcactagagagcattcattccatgctgagccctgagatgagcagaagatattggactattcctttctt

SEQ ID NO: 265692 - DNA, 535 bp, Homo sapiens
tatgtcatagcatctgtgattttaaagaataaatgtttaaaataatctttgtttaaccttatgagctaaacaaaattggaagccctgagggagtggctacaagagctgcacctgcaaccatgtacatcatcatcaatcacataatctagaaatgacttaggtcctatcaggtgattagctttttgctgggcacttagcataacaagattcatcttgtttcctccccacaaggattccccaaggtatgtaatgacayaagggcacaaggacacatgcaaatcattacagcgtgacgtgatgagtgctttgttagagataagggacagacgtggaaacccccttttaggatgcatgcactatttttttcttagttaagatgtcctatgcatgttaataaatattgcccccaaatgcctctcctaatgggatcaccctgggtctcccaaacaatggcttcccaggatatggatggggcctgggtgagtgcagaggtgccaaggtgatgctgggaaagggtttagagagcaagaagcaa

SEQ ID NO: 265693 - DNA, 535 bp, Homo sapiens
tatgtcatagcatctgtgattttaaagaataaatgtttaaaataatctttgtttaaccttatgagctaaacaaaattggaagccctgagggagtggctacaagagctgcacctgcaaccatgtacatcatcatcaatcacataatctagaaatgacttaggtcctatcaggtgattagctttttgctgggcacttagcataacaagattcatcttgtttcctccccacaaggattccccaaggtatgtaatgacacaagggcacaaggacacatgcaaatcattacagcgtgacgtgatgagtgctttgttagagataagggacagaygtggaaacccccttttaggatgcatgcactatttttttcttagttaagatgtcctatgcatgttaataaatattgcccccaaatgcctctcctaatgggatcaccctgggtctcccaaacaatggcttcccaggatatggatggggcctgggtgagtgcagaggtgccaaggtgatgctgggaaagggtttagagagcaagaagcaa

SEQ ID NO: 265694 - DNA, 441 bp, Homo sapiens
ggcctggcagccatcccagtgaggaggttaaatagaaaccatatgggtgccacacgtgcctgggctcctactctgcctcctctctctactgttctaaccaccatttccaccaacaacacctgctccaccttgaattgcactcccacttcaagagtcagggcaaatatgtcaccttctctgggaaccctttcttgaccccttcccaatctcacatgccaccctgcaygatcatacactgtttatttgtgtgtgagccaccacacggtgagatccctccagtcaggaagacactctgattcagctttatatcctcagcaccaaccactacaccttctgcaaagtggaactctcagcaaatgttcctggaactgaactagtctattacctgtaagacactatgctaagagctatgaaagatgcaaaaatgtaaaagacacagtc

SEQ ID NO: 265695 - DNA, 531 bp, Homo sapiens
aactatatattaaaggaatagccttagtagatgtttttaggatacagattataatacacatttgaatttctcattttgaaatatatttgattatgttatgactccttgacatagctattattcatttatctcataacatatatttttcacatcttaaatggatagacacactgaaaatgtaatgagttcacatttataatacactgtttattacctttacatcatttcatttaaagcctatattttgcttaattactgagggaaatctcaagaataattgcatggctaccaaagtattttaatttatcttaaaacaagtaaagaatagcaaatttttctcagttaaaatattttccatgtttggagtcgcatagatttctggctgaaaggagagagcttagaaaacttttattttatttttttttktgtgtgtgtgaaaagctgaaatataaattactttgttatgattcctgcagtaaagcttgagaagctgtattgaactcgctgcagtgactccatctctccatttct

SEQ ID NO: 265696 - DNA, 540 bp, Homo sapiens
gaggttcaatacaggtggtccaaatatctaagaggagctccagaaagagtaaacagaaaattatacaaaaaattatcaaacragtaatagaatatttcctagaatcaaagatagcttatttccataatgaaataactcaataaatgtccagcacaatgagtaaaagagccatcccaggtcatattactatatatttcagaacaatgattagaaaaaggtctgaaaaacttccagaggagagagacaggtcaaaaaccctggaaatgaaagacatctgatttcttaaaagtaacactggaatctaggagataaagtaagaacagtttcaaaattcttatcttcaacctaaacttccagacttaaataaattgcctttcaggactgaggatggaataaaaaaacgttgaggtgtaaaaaatgtcaagaatttactttttgtgcatcttttctcaggaagctgctggaagatgtatttcaaccaaacaaagggtggaaaatctaagaaagagatagatgtgggctctagggaacagagaatac

SEQ ID NO: 265697 - DNA, 637 bp, Homo sapiens
gaaaaaaataatttttgtatatatatatgtcatttggaaatatcagaggaggtaacagcagaaaatgctgaatgtggtttcctccgggagaaaagaataaagtggacactcaggagacaaagaatgctgctttcttgttgttgttataatcttcttagggctctttaactatttaatgtttacaattacttgtaagtaataccataaataaaacaaatattaataaaaaataagttatcaacccaatatttctaacacctggcagcctaacatgaagaaacgactgcctgatcaaatgctgaggtcctatacctgtgtggaatctgagggcagamtgagtgacttcagagtcattggcgcacattgaacaataatgttcaagaaaaatacaaacaaatactctctaagcaattaacccacgtcgccattacacatcaggaatgctctattgtaaaccgcgtatcagtttgggcttaaccaccatgtgggcctagaggagagagaagttttgttgtaatggaaaaagaaggtctgcaactccaggaggtgttcctgaagaccctttgtcctgggtagggttggtttgtcaggcaggtgcagagggagcgtcaaatgcctcagggattttaatgaaatg

SEQ ID NO: 265698 - DNA, 548 bp, Homo sapiens
atatttgttgctatgaagacaaaccacaatctcgctcctcttttccatggccagaatttctcttaattgcctttaatctaaatatcatttaaaaaaaaaaaaacccacccgttactattcaatcagactgctatgattttcaggaggaaggcaggggctagccatcaaaggcattgacaattaccaggggaaaaatacacagatcactaaaaacagaagcaacagaagagattgcactgggcagccacctctttcctatatattctatttgattggcattcttctatgaaaagtaaaatctaactttttgagaaaaggacaaaagttgcaagagstttgattttaaagactcagattttaggaaatacaaataacattttattgggaaaaaaactatattttattgacataaaaccctgggattgatagtgagatcaaagatagggcgggagaatgtaaatgcaaagtggatgtcactgatgctgaaatttgtgtattcggagcaggatgatgcatatgagccaaagaagagggtcttcaaaagcaag

SEQ ID NO: 265699 - DNA, 556 bp, Homo sapiens
tgcataagaataagacccttggaaatcccatttattagaaagtatgacttaggaattttgaattttagtgcaggtaaagatgactttagttcatatcaatgaattgcccaatcttttaaaaataggaataatacaacattaataaatagattagtaaaggaatgatgttattattacttacatataacaaataggttaaaaattaatggaaaaatactaaaattacttgaccacatgaagctaccttttttggttayttatggtttattttttactttccatataacccaatgattagttatgttattaagcaaaaaccaacaaaaaccaaattaacatattttaggttttatttattataatggtaattattgaccaaagttttttatttcctttttaaaatcagtgacatctctggactctgggagataaataccaaaagattaataacaaacaaatacattagtctctaaaataagtacagaaaattaatcattgccacttactcttccaccttaatatctttatttgccttccactggaggaatgtatgtaa

SEQ ID NO: 265700 - DNA, 398 bp, Homo sapiens
tctatggtttcccttgagatgtctgttgccagatgaattggagctcatttttacgctatgtagttcttttctcttgctgcattcttagaatcttctctttgtttgacctttgagcgtttgattattatataccytgtggtagtcttatttaggtcagacctgtttggtattctctgactttcctgtacctgggtatttatatcatactcaagttttgaaagttttttaattattatttctttgaataagttttctaccccttttcttcctcatctgactcttaaatgccaataatttttagattttgtcttttgaggtaattttctctattttttaggtggtccttcgttcttttttatttttttttctctctttgacagtattttcaaatagtctgt

SEQ ID NO: 265701 - DNA, 596 bp, Homo sapiens
atctctgtctctgaacattccccatcagagcaattccagatcccatttaactatgctattcagcattttactgacgcaccactttcatgattatctacacatttaaaacttagtaattctagacttcaaaaaggatagacaacaaaagtcagctttgtagatatttgttacataaaataaatttgtgagaaagttctgtgtttaaaatgtatttgatrcctattggagggcaactacaaggtagccagttttaatcatgctttttagattcagtaacttaaaggctaacataagagggtacaccagatgggatacaagatgactccacagaactaaacaatgcctatgatatgttgtggggagctctaactagaaacaaccactggcccactaagaagagactcgcctaggaggtgaacttgacagagaccaccgtctacatatacagagttcttggccctctattaaaaagtttcttctctgccattggctaaaggagaaataattgaatgctcagagggagaagttaagggctgctcttggcttgatgacatacatgcccagtagtttcacatctccgctaaaataattacaaa

SEQ ID NO: 265702 - DNA, 573 bp, Homo sapiens
gatttctttatgaaggatatggataaagaattgcaacaatttgtgacaaaacccagaagtttttataaaaygacataaaatatacattgattttttaaaagataaattaccaaaagaacaataaaaagcatatgagaaagttttaattcaagaaaaggaaaacagggtttgactcagtagattccccattctgaggaattaagaacaaatcattgaaacattgccaacatgaaataggaacagatgacaaagatgaggaaaaactcttgataaagagaacacatattgaattaaaaaaaaaacagtttagtctgaatcaataattagcagacttgacattgcagaaaatttaattagtgatttacaggacaaaactgggaagaaatagaaaaatccaaagacaaagggcagagagtacgctaacagagaaaatgaaaaaaatgccaagcaaaatgaaaaccaggcttataagagatacccccaaaaggaagtagaccaaatggaatgtaaataataaccaaataaataattctagaaaattatccagttttaaaatattgtattttgggattg

SEQ ID NO: 265703 - DNA, 527 bp, Homo sapiens
caatatattcactcggtgtccaggaaataaatcctgagatgcctacaggtaagagtgaggcatacattacacaaaagatccaatccaagctctacatgtttctgtggaagcccaaggtctccaggattaataaataaataagcagcacgacattcaaygccattttaagtggatagataattgtctatttagcagagaaagccaacacacctctactagttagagtcaaggattatcagatagtaagctgtgggtttcctatgtgtaggttattgagcttcaactgttagtgcagggccaggggtccaggcagttcagaggagcatcaagtctcttccacctggaacttttatcctttactcacccgaaaagtgacatcatcaccatgctaacaaattaatgtgtgctgtaactgccagctacctgaatacaactgaatggctcttatcaatgtgcaatttttatcaaagtaacaggaagattttatcccagtattaccaaatgatataggatttttctacatggca

SEQ ID NO: 265704 - DNA, 466 bp, Homo sapiens
aatatctctctaatccttattttgtgaatggtatcttattcactcagaccgtgaatttatatatttatatatatgttttaaatttattcataaayacatattatttatatattcatatatattaatttatatacatattacatatatatgtaaattcatatgtatgtattccgagtctgtgtattttcttggaaatgtacttatttgcaagaatttgatctccttttaaccaggatataattggacaaattgatgctgcaattgaggctatacttgaagtaacatattggagaataaatctcatggtaattagatatgacaaacacatcattaaggaatatggattgtatttcatatgtggaactgatgctcacaaaaccttccccagaaactggaacaatatctactctgtcttaaaaggtctcagcttttatggacaagccgaacctaatctgatttggcaaac

SEQ ID NO: 265705 - DNA, 585 bp, Homo sapiens
cacaatttctttaaggaaggacttgctgcccagccttgggaagtgtgatcagcacagcccctccagctcccagccccatcaggatctgccttagctgcagcgagccacctgcctgaaggacacatccttcccagggcagcccacatctggtcctgagccagggaagggggttaagacctctcaactttggcagacacttcttgctccaaaacggccttaggcaatgttggrctttcatcacagttcagcttcttcccgggcccagtcttgtttccaccacctcttttccacttttattgattaaaagtaaaacattttgcatcctagattttacctgcttctggagaatcccaattgtggaaactttgaaaataactttgtcaaaaccttgggctttgaatttagctctttctatttatggaaaatatctaagctatttaacttagcttatagcgaagttagtaagaaaattatttactttctgtctgaaaaatcttccttcattttatatttcaagtaagcacattaaaatgttttttgagaaagattatgtttaaaagtacagaaagaaattatttaacaagt

SEQ ID NO: 265706 - DNA, 536 bp, Homo sapiens
ttctttataaggaaaaaaaaaaagcggtagtttgratttggcctagagccctagttttttgactgaccccagccttagactactaacaggtctgatgacaagtggcattatgtaccagcatttccagagaaatcactggaagttcctcaaaatttaaaactagcactaatttctgttatatgcacagcctacagacaattcgtcagtgattcccaaaataaacatttccaataaaacaagtctgcaatgtccacctggggatagcaagtctgtgatattatcaggttagaaaacatactatatttttattttttcaaaaagcttcatgtcagaacctaagacggtccaattagaaaaagaatgtgtttaaactgattttggcaaaatttgtaaatgttgcacaaggtccaagtcagactgaaagtactacaaatcagtgttgttcaatcagcactttttggtgaggtcagacttggaccctctcagcatccactttgactcacatgtggttttatctctgccacccaggacgccta

SEQ ID NO: 265707 - DNA, 536 bp, Homo sapiens
ttctttataaggaaaaaaaaaaagcggtagtttggatttggccyagagccctagttttttgactgaccccagccttagactactaacaggtctgatgacaagtggcattatgtaccagcatttccagagaaatcactggaagttcctcaaaatttaaaactagcactaatttctgttatatgcacagcctacagacaattcgtcagtgattcccaaaataaacatttccaataaaacaagtctgcaatgtccacctggggatagcaagtctgtgatattatcaggttagaaaacatactatatttttattttttcaaaaagcttcatgtcagaacctaagacggtccaattagaaaaagaatgtgtttaaactgattttggcaaaatttgtaaatgttgcacaaggtccaagtcagactgaaagtactacaaatcagtgttgttcaatcagcactttttggtgaggtcagacttggaccctctcagcatccactttgactcacatgtggttttatctctgccacccaggacgccta

SEQ ID NO: 265708 - DNA, 591 bp, Homo sapiens
tgcaatgtccacctggggatagcaagtctgtgatattatcaggttagaaaacatactatatttttattttttcaaaaagcttcatgtcagaacctaagacggtccaattagaaaaagaatgtgtttaaactgattttggcaaaatttgtaaatgttgcacaaggtccaagtcagactgaaagtactacaratcagtgttgttcaatcagcactttttggtgaggtcagacttggaccctctcagcatccactttgactcacatgtggttttatctctgccacccaggacgcctacttgatatcaagtgacagcagaggtcatttataagaaagtcctggagaatttcccatccaccaaccagagctatgtttattgtaacaaaaattcaccaactaggataggatcacagctccataaaaagccttctgtgtgttggaagctaaaatggggtctttgaaagcacaagagaagagacattctggtaaaaataattaatagaaccatgacaaagatgactatagcccaagaggatctttcaatattgattgaatttgtgcccgatgtcccagcatgactgtgcatggggaaag

SEQ ID NO: 265709 - DNA, 620 bp, Homo sapiens
cacaaaaccctaagtgaaagggcccagtggtcaatgtgagggtgtctttatgaatctctaagtttctcctcgacatgggaaacctactctttccctgtcatttaatcacagctccttcactcaggcagttttgacagctttcaggcacccccaggatctagtaacttttcttaataagcttcttccttaaaggcagtcaattcagtcttctggtcttgattcttcttagccagcctctctggtcttcaaattcatrtattgcctgtggcttcaggaacaaaacttccagataggtgccagattacctaggattggatttggttacagtagagacccaaaagaacagcaacataaatatgatcaaagtccattttttctcccacaaagaacaatatctgtgaatattacactgaaaagagtaatttgggtctcatatagtgtctccccagttgtgtgggattcagagaaattttagttttcctctccaccatccccagtgtgtggcctgcaagaacatggcccaagatggaactagagacatcatgttctagtgcaggtaggttgaatagagacaggaagaaaagaggtgagggtcatatgtcagtaatcttataaggaag

SEQ ID NO: 265710 - DNA, 620 bp, Homo sapiens
cacaaaaccctaagtgaaagggcccagtggtcaatgtgagggtgtctttatgaatctctaagtttctcctcgacatgggaaacctactctttccctgtcatttaatcacagctccttcactcaggcagttttgacagctttcaggcacccccaggatctagtaacttttcttaataagcttcttccttaaaggcagtcaattcagtcttctggtcttgattcttcttagccagcctctctggtcttcaaattcatgtattgcctgtggcttcaggaacaaaacttccagataggtgccagattacctaggattggatttggttacagtagagacccaamagaacagcaacataaatatgatcaaagtccattttttctcccacaaagaacaatatctgtgaatattacactgaaaagagtaatttgggtctcatatagtgtctccccagttgtgtgggattcagagaaattttagttttcctctccaccatccccagtgtgtggcctgcaagaacatggcccaagatggaactagagacatcatgttctagtgcaggtaggttgaatagagacaggaagaaaagaggtgagggtcatatgtcagtaatcttataaggaag

SEQ ID NO: 265711 - DNA, 657 bp, Homo sapiens
ctgtgaatctgttcaagcttgaacaattttgtagatttctccactgaaatatcccattgttgttgatgtatcatgttaaggattcttgtaagagtcaagtgaaataaacttctaacacagtgtctkgcaaaaaaggggaaatttaacccctacctatgtctttttccaataatagaagcacagagacaatcatggtgatctgagtcttacaagacaatgataagtcacagtgcttgagcccttattttgtagttctccgtgttcagtgcattgcatgggatacctcatagatccacacaactttgggtaatgatattctcatctttcctgttttatggatgaggatgttgaaggttagagaggtttaattgtcaaggttatccagctggcaagtggtgaacctggagaaaagaccccagaagtcaatgtcagactccgactcttgggtcttcattaatgtaattcactgaaagccattttggcaaatattaacatataatcaatttgccaaaaactctcaaacaaaggaggtatacagttagagctagtacagacacagcattcaggcagagtgtaaatctccaagagatacatagcctttaagaaacagcccacccattccccaataaaatgatgagtattgcaaaagtcaactat

SEQ ID NO: 265712 - DNA, 551 bp, Homo sapiens
attgggaacaataattctatgccaaagaataatgccaaataataccactaatgccaaagaggcattcctgaattggtaggttatgcagcctatgtggagaaagcaaattctctggttaggaaagccccaaaccagagacctagggctttctgtaatgttttaggccagtgaaaagcgtaaggtcggaaatcaggtccccactcaaggatgtcatataaagatgttgtcattatagcacacttacatcctcycatattctatttttaactgagtcttcaggagtacctgaggtttcaacataacagggtaaggtaaagccttccacgtgttttttaaatctttgtttctctctagcatgttttgttccacaaagctaagggccaggaaaccgtttctttttattaatgaaacaaatctgttccttgctatagacaatttttactttgtagagatcttattcccttctttgtgagaactttcaggatgctcatggatagctctggccatgacagttttaatagagcttctttttcctcttttatttatgattt

SEQ ID NO: 265713 - DNA, 551 bp, Homo sapiens
attgggaacaataattctatgccaaagaataatgccaaataataccactaatgccaaagaggcattcctgaattggtaggttatgcagcctatgtggagaaagcaaattctctggttaggaaagccccaaaccagagacctagggctttctgtaatgttttaggccagtgaaaagcgtaaggtcggaaatcaggtccccactcaaggatgtcatataaagatgttgtcattatagcacacttacatcctcccatattctatttttaactgagtcwtcaggagtacctgaggtttcaacataacagggtaaggtaaagccttccacgtgttttttaaatctttgtttctctctagcatgttttgttccacaaagctaagggccaggaaaccgtttctttttattaatgaaacaaatctgttccttgctatagacaatttttactttgtagagatcttattcccttctttgtgagaactttcaggatgctcatggatagctctggccatgacagttttaatagagcttctttttcctcttttatttatgattt

SEQ ID NO: 265714 - DNA, 545 bp, Homo sapiens
aattcataacagtattaacaacagagtcgcaggtgttctaggaaggaaaataaggcacaggtggackataagagatgcaaaattccaagccaaggggctgagggtgtcatcaaaggagtaatctcaggcccagtagccagctgtctcctaatactgatgttcttttctgcatatcactgtcagacaaatcttcaacatatttctgaatcaaagcctgcacaaatgataacgttcaatgtgcaatatttccttttattttaattatttttcagacaaggtctcactctgtcacccaggctgaagtgcaatggcatgatcgcgactcactgcaatctccacttcccaggttcaagtgattctccatgcctcagcctcctgagaagctgggactacaggcgcgcaccaccacgcctggctactttttgtatttttagtagagaaagggtttcaccaagttgacgaggctggtctcaaactcctgacctcaagtgatctgcccacctcagcctcccaaagtgttgagattacaggcattagccaccaca

SEQ ID NO: 265715 - DNA, 545 bp, Homo sapiens
aattcataacagtattaacaacagagtcgcaggtgttctaggaaggaaaataaggcacaggtggactataagagatgcaaaattccaagccaaggggctgagggtgtcatcaaaggagtaatctcaggcccagtagccagctgtctcctaatactgatgttcttttctgcatatcactgtcagacaaatcttcaacatatttctgaatcaaagcctgcacaaatgataacgttcaatrtgcaatatttccttttattttaattatttttcagacaaggtctcactctgtcacccaggctgaagtgcaatggcatgatcgcgactcactgcaatctccacttcccaggttcaagtgattctccatgcctcagcctcctgagaagctgggactacaggcgcgcaccaccacgcctggctactttttgtatttttagtagagaaagggtttcaccaagttgacgaggctggtctcaaactcctgacctcaagtgatctgcccacctcagcctcccaaagtgttgagattacaggcattagccaccaca

SEQ ID NO: 265716 - DNA, 545 bp, Homo sapiens
aattcataacagtattaacaacagagtcgcaggtgttctaggaaggaaaataaggcacaggtggactataagagatgcaaaattccaagccaaggggctgagggtgtcatcaaaggagtaatctcaggcccagtagccagctgtctcctaatactgatgttcttttctgcatatcactgtcagacaaatcttcaacatatttctgaatcaaagcctgcacaaatgataacgttcaatgtgcaatatttccttttattttaattatttttcagacaaggtctcactctgtcacccaggctgaagtgcaatggcrtgatcgcgactcactgcaatctccacttcccaggttcaagtgattctccatgcctcagcctcctgagaagctgggactacaggcgcgcaccaccacgcctggctactttttgtatttttagtagagaaagggtttcaccaagttgacgaggctggtctcaaactcctgacctcaagtgatctgcccacctcagcctcccaaagtgttgagattacaggcattagccaccaca

SEQ ID NO: 265717 - DNA, 501 bp, Homo sapiens
ttcctaatatagtgtaggtgtgttcaattttctcaataaatttaagttgaagtttcattagctcttttttggaattctaaatggaacttatttttactggttttgtacaacaacaagcagagctcacgagaagtcacttamaatgaagaggaataaagcagggtgctggtttcttctgtgaccaatgtcaattaactgacatatattaaataaaacttgtcagtgtatgtgtgcatgtgtgtgtgtgtataagcatgcacacacttgaccatgacaagtaagggctgttgatacagagttcagcctacagtgtaaatcgggggtataagaaaaccaggagacgcttgctccattagtttcctagggcttccacatcaaagcaccaaaaaataggtgacttgaaacagcagcactttatttcctcacaatgctgaaagctagaattccaaaataaaggtgttagcagaccccccactctctctgggataagcctttctgtgt

SEQ ID NO: 265718 - DNA, 501 bp, Homo sapiens
ttcctaatatagtgtaggtgtgttcaattttctcaataaatttaagttgaagtttcattagctcttttttggaattctaaatggaacttatttttactggttttgtacaacaacaagcagagctcacgagaagtcacttaaaatgaagaggaataaagcagggtgctggtttcttctgtgaccaatgtcaattaactgacatatattaaataaaacttgtcagtgtatgtgtgcatgtgtgtgtgtgtataagcatgcacacacttgaccatgacaagtargggctgttgatacagagttcagcctacagtgtaaatcgggggtataagaaaaccaggagacgcttgctccattagtttcctagggcttccacatcaaagcaccaaaaaataggtgacttgaaacagcagcactttatttcctcacaatgctgaaagctagaattccaaaataaaggtgttagcagaccccccactctctctgggataagcctttctgtgt

SEQ ID NO: 265719 - DNA, 501 bp, Homo sapiens
ttcctaatatagtgtaggtgtgttcaattttctcaataaatttaagttgaagtttcattagctcttttttggaattctaaatggaacttatttttactggttttgtacaacaacaagcagagctcacgagaagtcacttaaaatgaagaggaataaagcagggtgctggtttcttctgtgaccaatgtcaattaactgacatatattaaataaaacttgtcagtgtatgtgtgcatgtgtgtgtgtgtataagcatgcacacacttgaccatgacaagtaagggctgttgatacagagttcagcctacagtgtaaatcgggggtataagaaaaccaggagacgcttgctcyattagtttcctagggcttccacatcaaagcaccaaaaaataggtgacttgaaacagcagcactttatttcctcacaatgctgaaagctagaattccaaaataaaggtgttagcagaccccccactctctctgggataagcctttctgtgt

SEQ ID NO: 265720 - DNA, 572 bp, Homo sapiens
aaactatttgatccaacagccttttagaatatcaatttttaaaaaagtttaaagcaatatttatgagcatatattatttttattacacaaatttaagtctgtctgactcaattatctctattctttcttctaaaccatgttatctcattatctctttgattatggtctcccctgtgtctctctataattcttacaaatgaaccagttgagcttaacagtaaaccaattatagtatgactttctccattttaatcaaagaagggaaacctgcctgattattcggggattttgataacttaagtattccttcaggtctttgtgtatacttgaggcaataatgtagttttctcctaagttaactgcactgtctttgaactcttggactcatgtatgcttaaattagggttgtcagatttagaaaattaaaattctgaattccaagttaaatttgaatttcagattaacaatgattttttttagtataaatatgcttcatgtaatgtttgggacatagttatactgaaaaaatgttatttatctgaaatctyaatttaattgaatattctgtattt

SEQ ID NO: 265721 - DNA, 534 bp, Homo sapiens
ttactttcattttcaaatttcctattgcaagcctcttcttcagagatgtgtttctgttttaattgggctttgtctgttgctctatacctgtcaggtctcaaatgttgttccataattcttagatacrattaaatggtaaccaattcatcattatctcagaggcaatttaaagccttatgagttggatttttgttcacatacacatggcgaaaaagagaggttgtctatgatgaaaggtgactgtttccctcagggaggcagtataatgctgtggtaaagggcacaggttctggaattcaaatttcaactcagaggaattccaattcattcattcatttaacaaatttttattgaattgttactatgtcctagacactgttgtaggtgctagagtgtaacagagaaaaaaaaaactgcccttgtttatcttccattttaatgaaggaattaaaaacaaacaagataaatgaaaacaatatatacctaaatatattagatcatgataagcgtagggagaaaaggaaattaaaagag

SEQ ID NO: 265722 - DNA, 534 bp, Homo sapiens
ttactttcattttcaaatttcctattgcaagcctcttcttcagagatgtgtttctgttttaattgggctttgtctgttgctctatacctgtcaggtctcaaatgttgttccataattcttagatacgattaaatggtaaccaattcatcattatctcagaggcaatttaaagccttatgagttggatttttgttcacatacacatggcgaaaaagagaggttgtctatgatgaaaggtgactgtttccctcagggaggcagtataatgctgtggtaaagggcacaggttctggaattcaaatttcaactcagaggaattccaattcattcattcatttaacaaatttttattgaattgttactatgtcctagacactgttgtaggtgctagagtgtaacagagaaaaaaaaaactgcccttgtttatcttccattttaatgaaggarttaaaaacaaacaagataaatgaaaacaatatatacctaaatatattagatcatgataagcgtagggagaaaaggaaattaaaagag

SEQ ID NO: 265723 - DNA, 521 bp, Homo sapiens
cttcatgagggtggatccctccaaacccaaatacttcccaaaggtcccaccacctctcaacaccatcacgttggggtccaagcctccacttgagttttagggaggacaaaccatattccaaccatagcacatgtgttgtgttacctagaatttatgtaatacttttctgcaaagtttacaatagtgtgtctctgtcagaactctttgctgggcttctgccagcatttggaagggccttgtgaaagtgggggatcttaagcttcatttgcttcacgttaagcacacacctaaatctgacacttattaataatcagggtgactttggccaagtaacttaacctctctaaaaagttcccagctgtgaaatggagataataaaagtattagttcactttattggatatattataaggctcagacaagatgatgtataaaaaaaattcgtcattgtgttaagcacaaaatagatactaaattcytaaattcttaaatgcattcttatgtgtcctgtcagttttgcc

SEQ ID NO: 265724 - DNA, 688 bp, Homo sapiens
taagcacacacctaaatctgacacttattaataatcagggtgactttggccaagtaacttaacctctctaaaaagttcccagctgtgaaatggagataataaaagtattagttcactttattggatatattataaggctcagacaagatgatgtataaaaaaaattcgtcattgtgttaagcacaaaatagatactaaattcctaaattcttaaatgcattcttatgtgtcctgtyagttttgcctacttgcttcttactttttctttatttatttaactacccaggctatttatgtgttcaccgtcatgtttttaaagcaaaatgttagttaaattaaaaatcctgatttagctgagcttttttaaggtgcccaagtctgggaagaaggtaaaatgacataaatgaagcatctaccttttatatatatttatttatttaaacttctatcacactaggagcacttgcagtattattaaactcatcttttagatggagacagagaggctgagaaatattaagtaaattgtctagtcactcagctcaaagagctataactgggattcagtcacagatatgtgtacttaaaagtttatactgtttccataaagtctgaatgaataaaatcttccacagaaatgaattattcataaaatgaaggtgctattatcagtcttgaccttacaaaa

SEQ ID NO: 265725 - DNA, 630 bp, Homo sapiens
ttttgttttccaattctattattcattctacagtactatctggacttctgtaaagtagacacttctctcttgacagaattatcttgaaaaacagcatctattggagaggcaggaaggctgttcaattcatttccattaattacctctaaacttagttttcagtactcataggttattgaagtgtaactccacacctccaatcaactctgtcccatttaaaattctcactgggtctctttgtaataactctctgggaaaaataattatgttttatcacatcccttatttacctcatgttgttattgaaatttccctgaatatctgtattcctggtaacttttcttactaaatcccataaaccccaatgcaagaatgtactcagcacatttaatgctacccttctgcmagggtatttccaaactctgtcttaaacatttcaattacatcctttattggatactggattgattcccacaagcttataataatctcatcctagtgttcatttccaacttgctctatcacccctggtgccatccctgtacatctggactggccagctcatgctcttctctatggcctcagtaataattcagacaactaatactcattaaagtatgaacaccaggg

SEQ ID NO: 265726 - DNA, 534 bp, Homo sapiens
tttgcagtcagaaagatgtggggtcaaatttcttgctaatcatgttatctgggacaattcaytttgtgtctttgtgtctctgtttcctcatctggtaagtatggctgccaatagggagggttggatgagagcatacatgcaaagaacttagaactcaataaattagtgctcaataaattaagctattatttgaaatattttgacaaggttagcactctcactgtaaaattttatggagaatcatgagtccagtcagagctgttttacttaatcaagcagggccctgtctatcctaaatctcttccctgaggtgataccagtaggctgtgtacttgacagccagtgcttaaagacatatgtcatgcctttcttgaagctttgtgtttttcctctgtgtgactaaggggtccctatttttttcagactttttttcacataacttgctttaacaatgcttaacactctgagttgatgatactaaatgagggaaaggagtgaaagaattttgagtaagaaatattagaaataattaat

SEQ ID NO: 265727 - DNA, 528 bp, Homo sapiens
tttaagctccagacgttttcaattagccccatctcaggtctctcgacaaaaacaaaaaacaatatatgtagtcatttaactttaaaatacaaccctacccatggtgcaaaatatcatcgagactatcagggtaacattttctcatatttcagaaggccaacttaaagaatcattactgggaaagctgactcaattttctatattatagaagatattcggttctaaatactacttttttaatacaaaaattatttatttatttgaaaattcttatcgtgccaggaactaggacaaagattaagaataccaagatggcaaagtgggccaggccctcagtccagtggtactgctcctcattcatccctctgtaatgttcgaaatccagatttgaggtgatgccagatattttctgagaatgatggtcgtcagacatccttgttgtctcatccaaaatctactaaaaatatcctgagatctaagaaattgaaaaaawactaaatcgaaaaagtgaccaaccgtttggtttca

SEQ ID NO: 265728 - DNA, 629 bp, Homo sapiens
gttttttcactatgaaactttcagtggctgaatacttcctataggttaaagctgaaaatttttaacataaaaaagatggccmatggtatggtctttgcttttctttctaactatatcctctatggctcccaacatgtatagaactccagccgtatcttccaagataatgccttgcactgcttatcctcaaacgtgaggtcttctgtgataactgtcccctccatttctctttaggcccttccaatacccttcattccttggtctttgcacttcacccgtaacagacccttgccacttttcctttcaccatgctattttattcttctgggactttgttcacatttttcctttgctggagtttccagctcactccttacgtcaccaggctaactcataattctgctaacctccagacagcttctctcatcctctcctgattgtttgatttacttcttccttcctgcagtcccacaacaccaagttcaaattcatgatataaaacttgcttaccttgtgtggctgaggtgggcagatcacttgaggtcaggactttgagaccagcctggccaacatggtgaaactctgtgtctactaaaaatacaaaagaatacaaaaaaaattagcagggt

SEQ ID NO: 265729 - DNA, 629 bp, Homo sapiens
gttttttcactatgaaactttcagtggctgaatacttcctataggttaaagctgaaaatttttaacataaaaaagatggccaatggtatggtctttgcttttctttctaactatatcctctatggctcccaacatgtatagaactccagccgtatcttccaagataatgccttgcactgcttatcctcaaacgtgaggtcttctgtgataactgtcccctccatttctctttaggcccttccaatacccttcattccttggtctttgcacttcacccgtaacagacccttgccacttttcctttcaccatgctattttattcttctgggactttsttcacatttttcctttgctggagtttccagctcactccttacgtcaccaggctaactcataattctgctaacctccagacagcttctctcatcctctcctgattgtttgatttacttcttccttcctgcagtcccacaacaccaagttcaaattcatgatataaaacttgcttaccttgtgtggctgaggtgggcagatcacttgaggtcaggactttgagaccagcctggccaacatggtgaaactctgtgtctactaaaaatacaaaagaatacaaaaaaaattagcagggt

SEQ ID NO: 265730 - DNA, 561 bp, Homo sapiens
taacatacttctaagcacatggttagcattttatcaatgatrttgtcatgtcagttttactattaatatgtgtgtccttaatttaagaaaaagggaagaaatgtatgagcagataatttagtactggcaatatgatctttttatttttctccatttgcctggagaaatgttccttcctagattcacagactttcaaagctaaaaaaagttgagacatcatctgattaattctgtctttataaaaggaggcccagagaggctaatgaactttttcaagactacacagctagttgtttaaaaagtttgaactgaaacctaagtcacttgctcatttcaggaggaattattttcatggtattactatacataactcaattaggcttctaaacccaaatgtttccgtaaccagaccacatttaagccacattatttccctgtgcaaaaagaatatctcaactgactgacctctctgcagcatttaaaagtatttgctattctccttttctccaagaactccattcccttatattctagaatgctgttgccttctcgtttctctcc

SEQ ID NO: 265731 - DNA, 561 bp, Homo sapiens
taacatacttctaagcacatggttagcattttatcaatgatgttgtcatgtcagttttactattaatatgtgtgtccttaatttaagaaaaagggaagaaatgtatgagcagataatttagtactggcaatatgatctttttatttttctccatttgcctggagaaatgttccttcctagattcacagactttcaaagctaaaaaaagttgagacatcatctgattaattctgtctttataaaaggaggcccagagaggctaatgaactttttcaagactacacagctagttgtttaaaaagtttgaactgaaacctaagtcacttgctcatttcaggaggaattattttcatggtattactatacataactcaattaggcytctaaacccaaatgtttccgtaaccagaccacatttaagccacattatttccctgtgcaaaaagaatatctcaactgactgacctctctgcagcatttaaaagtatttgctattctccttttctccaagaactccattcccttatattctagaatgctgttgccttctcgtttctctcc

SEQ ID NO: 265732 - DNA, 572 bp, Homo sapiens
tgtattgtggcttcttcttatagtccaaatctaaaactctttacccacccactgccttgaactccttcctcgttgtgaaagtaggatggggcaaagagagaatgcatgcccctcccaactgctcaaacaagtaaaggtgctgttacagttatcttttgctaccttaatacaataattattttattatatctcacaattytatggatcaggaatttagactgggctcagctaggcgattcttctgctttactgacatcataggagatcacttggtggtattcaactgtcaggtaggcttatctggagggtccaagatagctgtactctggtgcctggtgccttggtaaagagggatgatgatgtggggcctctccagcatgaacagcctcagagaagtttgctttcttacatgctggcccagggctccaagagcaaatgttgcagtgagtaaagcagaagatacaaggacttttataatctggtctcagaagccacatggcatcagttctgtattattctattggtcaaaacattcataagcctgccagatgcaaggggaaggcatatgtacc

SEQ ID NO: 265733 - DNA, 572 bp, Homo sapiens
tgtattgtggcttcttcttatagtccaaatctaaaactctttacccacccactgccttgaactccttcctcgttgtgaaagtaggatggggcaaagagagaatgcatgcccctcccaactgctcaaacaagtaaaggtgctgttacagttatcttttgctaccttaatacaataattattttattatatctcacaattttatggatcaggaatttagactgggctcagctaggcgattcttctgctttactgacatcatwggagatcacttggtggtattcaactgtcaggtaggcttatctggagggtccaagatagctgtactctggtgcctggtgccttggtaaagagggatgatgatgtggggcctctccagcatgaacagcctcagagaagtttgctttcttacatgctggcccagggctccaagagcaaatgttgcagtgagtaaagcagaagatacaaggacttttataatctggtctcagaagccacatggcatcagttctgtattattctattggtcaaaacattcataagcctgccagatgcaaggggaaggcatatgtacc

SEQ ID NO: 265734 - DNA, 572 bp, Homo sapiens
tgtattgtggcttcttcttatagtccaaatctaaaactctttacccacccactgccttgaactccttcctcgttgtgaaagtaggatggggcaaagagagaatgcatgcccctcccaactgctcaaacaagtaaaggtgctgttacagttatcttttgctaccttaatacaataattattttattatatctcacaattttatggatcaggaatttagactgggctcagctaggcgattcttctgctttactgacatcataggagatcacttggtggtattcaactgtcaggtaggcttatctggagggtccaagatagctgtactctggtgcctggtgccttggtaaagagggatgatgatgtggggcctctccagcatgaacagcctcagagaagtttgctttcttacatgctggyccagggctccaagagcaaatgttgcagtgagtaaagcagaagatacaaggacttttataatctggtctcagaagccacatggcatcagttctgtattattctattggtcaaaacattcataagcctgccagatgcaaggggaaggcatatgtacc

SEQ ID NO: 265735 - DNA, 572 bp, Homo sapiens
tgtattgtggcttcttcttatagtccaaatctaaaactctttacccacccactgccttgaactccttcctcgttgtgaaagtaggatggggcaaagagagaatgcatgcccctcccaactgctcaaacaagtaaaggtgctgttacagttatcttttgctaccttaatacaataattattttattatatctcacaattttatggatcaggaatttagactgggctcagctaggcgattcttctgctttactgacatcataggagatcacttggtggtattcaactgtcaggtaggcttatctggagggtccaagatagctgtactctggtgcctggtgccttggtaaagagggatgatgatgtggggcctctccagcatgaacagcctcagagaagtttgctttcttacatgctggcccagggctccaagagcaaatgttgcagtgagtaaagcagaagatacaaggacttttataatctggtctcagaagccacatggcatcagttctgtattattstattggtcaaaacattcataagcctgccagatgcaaggggaaggcatatgtacc

SEQ ID NO: 265736 - DNA, 617 bp, Homo sapiens
cttgtcttctatgacattgaggtttttaaagtatacaattctggttttttactagaatgatttcattttgcatttygtcagatattatgaatcgattcagttgttgcattcctggatggaatactgcataggtgatcctgtgtccttctcaagatattatttcttgaggcacatgacactcatttgcccctcattggcattatgagcccaaggtgttatatccaatttctccattgtagagttactaattttgcctttgcaaataataaacagttttctgtaagaaaacattttcaggccacacaaatgtatcactccttgtcaaaatttctgtcttgatttaggattgatccattgatgatttttcatctgaaccagtctttactgtgacagtttacaagatggtgattttataaaataatgcttgtccaattccaggcctctcccacatttaccatttggcaactattattctactataagcaagagtcttccctccatttatttattatttatcgattattaacatggaatcatggattctgtattttccagttgtttgtgtttcattactggacttaattattttggtgctcacactatcccagatttagagg

SEQ ID NO: 265737 - DNA, 607 bp, Homo sapiens
ttctgtgatttactttatccttcaaagcttaccctgtgttaccgggaagacaaggatggatgaagaacagatacagatttttaaaagagactgaccacaaggtcaagctcaatcaagttcaatcagcccttcctttctaaatcctccaaagagaacttgaaatatttaaatgctacagcttaaaaaacacccagcaaagcaacaacaaagctcaatgtaggccagagggccatggaatgatgtgaatgagtctgcccaccacaggggaatttactgaaataaaaagaaggcattggttctaatatgcaaagtctatggcttatttctattttaaaataaaactaggtcatcaaattatgctcaaaatgcctctttggtgtttctgaatttgtggggttattttcccagtatgcagaatggggttcactactgttagcagaaggctgagcaccagtgacacctgagacattccttgatcagaaaaaactccaaatacttaagatagtaaatgaagctttgccttggatgactgggtgagagagggragaaattgatggaatgtgaggctttaggtatagaaaagcctaacattacaggaggcagagcc

SEQ ID NO: 265738 - DNA, 505 bp, Homo sapiens
gggcaataagttcatttcaactgagagagcattcactagtacccttggacccagtatttggactctttgcagttgcatccttatttgcacgatagagttaaccatcaaaactaaatgaaacaattcaagtaaagttctagaagtgtgtctggctcaaaaaaatgttggttatgattgtcactatgattattactcattctcccctactggactcagcggacaccttgaaccatgaaggcagagtacacttactgaatgggtggggccacatgaaggtagaagagatagccaagggtatgttaggtgacaaaagtaggtttttaaaaattatgataggcagaaattataactgaacccaggtttggctgctcaccactygaaaaacaaactcaagagacaagagtttcttgggtgggaagaaaaccaggtttattctgagagccagcaaatcacgaaaatggcagactaacatcctaaactaccatcttatgtcagtacagatttt

SEQ ID NO: 265739 - DNA, 610 bp, Homo sapiens
attactcctggtgtctggcccggtgtccacacagtcctcatctgcttggctgtgctctttcacattactcagtgacagagggtgctcctggtctgccagcccaggccccagccagccactgctgccactatccttctgcaatgcccacaggcgggtgtcgcacttctgcttcaccctggacaccagagcccgcgcatccaaatgccttggcactctccggcctctctgggtcgcgcttcagctgcsggcccctgcccactgctatcatctccacttttaactacccctaagccactatcctctcttgcgagagcctctatatacatctccgcacttcctccaggcatgcatcattatcttcccccagtagtaagaatggttctaaaaccagagtcagacaacactcttcctttgtttaaaattccagtgatttttcatcctctcttgggataaaattccaaggcctctaagcccttcatgctctttccacctttcacaatgccctctctgaccagccaccaccaacctcttcttactcattagttctagtggcctcttcatgttccccaagtgcatcatgcaggctccctgccagccacggcctgagcac

SEQ ID NO: 265740 - DNA, 585 bp, Homo sapiens
tgccatgtgccagtaactatgttagatgtttagatggcagatgtgtctctagacagagcttacagttgagagtatgggttgtgtggggagaagtgaatagatgactatattccatgatacatgctgtattacaatacagtcctacttcacttaacgatggggatacattctcagaaatgagttaggaggcaaattggttgttgaatgaacatcacagagagcacttacacaaacctagatggcatagccacacctaggctatatggtataatctattgctcctaggctacaaacctgtgcagcatgttggtattgaatactacaggcaattgttacataaagttaagtgtttgtgtacctaaaaatagaaaaggtaatgcattacactacagtcttatggggctgggatgtcactaggtgataggaatttttcagctctgttctaatcttacgggaccaccatcatgtatgcagcacatgactaactgtaattacaagatggtgrctatattaaacagaactacttaagctagccatggaggtatggtccgtgagattttcctgaagaattaacgtctggatcaa

SEQ ID NO: 265741 - DNA, 607 bp, Homo sapiens
ttttcccttttttatttgctaatctagctagtggtctattaatcatagttatcatttgaaagaactaacttttgatttcaccgattctttggggtctcaatttcattcagttccgctgattttagttaatttcktctgctagcttacggattagtttgttcttctttctctatttccactaggtgtgatgttagatcattaatttgagatctttctaagttcggggtaggcatttagcactaccaactttcctcttaatactgcttttgctccatcccagagattttggtatgctgtgtctctgttttcacttatgtcacatatcttttttttttattattatttctgccttaaaatcattgtttatccaaaagtcattcaggagcaagctgtttaatttggatattattgtgtgattttgagagatctttttggtatagatttccgtttttatttcactgtgtcccaagagtatgaatggtatggttttaaggggtttttttttaagtttattaaaacttgctttatgagtgagcatgtggttaatcttggagtatgttctgcgtgcagatgacaggaacgtatattctgtagttgataggtggag

SEQ ID NO: 265742 - DNA, 607 bp, Homo sapiens
ttttcccttttttatttgctaatctagctagtggtctattaatcatagttatcatttgaaagaactaacttttgatttcaccgattctttggggtctcaatttcattcagttccgctgattttagttaatttcgtctgctagcttacggattagtttgttcttctttctctatttccactaggtgtgatgttagatcattaatttgagatctttctaagttcggggtaggcatttagcactaycaactttcctcttaatactgcttttgctccatcccagagattttggtatgctgtgtctctgttttcacttatgtcacatatcttttttttttattattatttctgccttaaaatcattgtttatccaaaagtcattcaggagcaagctgtttaatttggatattattgtgtgattttgagagatctttttggtatagatttccgtttttatttcactgtgtcccaagagtatgaatggtatggttttaaggggtttttttttaagtttattaaaacttgctttatgagtgagcatgtggttaatcttggagtatgttctgcgtgcagatgacaggaacgtatattctgtagttgataggtggag

SEQ ID NO: 265743 - DNA, 671 bp, Homo sapiens
aatgttaaaatttgaagctttccaattattttaccacatgaatctaaattataaagttatgaatataaccagttataaattcccaaccatgatttcaagagaatgttaatataaataatcaggagatatgtattcaacaaattgatagatctcattgttctcaacttaaaatcatcataagatcacttttrtaagattatattaattggtctaatccaggcttcattcacaaaggtctaaaaaagttatttattgtttttataagtttagctatatattaaagtggaagattttcttatcaaatgcctaggtatattttgcctatggtcaacttaagttagaataatcttttcagttaggatatgaaaatgttgtttcctcctttacaaatggtagcactggaaaatgataggtaggtggtatcatgttgtacgaatttgacagacttctgaatatttttaaattaatcactttaaaattaaacttatctatttcataatttaaataactttaaaagaagtcactttctttgaacttttaaataagatataaatccgtaattatatttctgaataattaaaaatggatatcaagtttctttttctaatcaaagatttaaaattttaatgagtatttattaaaatgctgaacagtttgagacaattctgaaa

SEQ ID NO: 265744 - DNA, 671 bp, Homo sapiens
aatgttaaaatttgaagctttccaattattttaccacatgaatctaaattataaagttatgaatataaccagttataaattcccaaccatgatttcaagagaatgttaatataaataatcaggagatatgtattcaacaaattgatagatctcattgttctcaacttaaaatcatcataagatcacttttataagattatattaattggtctaatycaggcttcattcacaaaggtctaaaaaagttatttattgtttttataagtttagctatatattaaagtggaagattttcttatcaaatgcctaggtatattttgcctatggtcaacttaagttagaataatcttttcagttaggatatgaaaatgttgtttcctcctttacaaatggtagcactggaaaatgataggtaggtggtatcatgttgtacgaatttgacagacttctgaatatttttaaattaatcactttaaaattaaacttatctatttcataatttaaataactttaaaagaagtcactttctttgaacttttaaataagatataaatccgtaattatatttctgaataattaaaaatggatatcaagtttctttttctaatcaaagatttaaaattttaatgagtatttattaaaatgctgaacagtttgagacaattctgaaa

SEQ ID NO: 265745 - DNA, 556 bp, Homo sapiens
aacaatttatattatccttagtgacagaaaggagccaacatatttagcttctargtttataaagaaataaccttttttgttttcaagattttattggcaaaggcaatatttcatagctagaaaatcactttttataaaatctcttcaattgatttgtaaaagtttacagatgttatagcctcctagaaatatagtgagaaaatacacaaaaaagaataaatgaaacactcataatttactcacagataataatctgtttttaacatttttgtgtttgtctttttagacaaggacaaatatgcattttccccttgaaatatgttaattttataaagactgttttgtagcttggtttttaaaagttttttcaatgtcttattttacttgtaccataatttctaattgttgatcatgtacattttctgtcaagtgtttcacattacaaatattgacatgaatgcccttgaggctaatttttgtcattcattctataactacagttgtcaaagttgctaatatatctatacacttgatagcattactatcagttgtagat

SEQ ID NO: 265746 - DNA, 655 bp, Homo sapiens
tggtacccaaaatttacaaaatacaatttgttggagtttacatgttaaaccatggtctctgcacagaagggacagaagcaaagagagacaaagagagagggagacagggagagagaacctgatcagacttgtctgsgtgttgcaagttgttattgtgtgaaatggcattctttaaagtgaagggattataatcctatttgattttctagttgactgaagggcttcaaggtggggtgaaatatgtcacaattagtgtttaatgacggaggaagaaagttttcaaacatataatacctgctaggaattctagtactgacatgtttcagacattagtaaaaactacaaaaagaagaaaaaagtgaaagctggaaaagaaacatgcataataatattgaaactcaatatcataaataaagcaccccaaacacacatacacaccaaatgaaaaatatgtggaaggacacatactaaattgacaatcctagttaccttagaagacggaattagatgtgtatgggaggcatgtttctgtagatagctctgtaccattttgaatgttacaatggaaatgtagcatttgcttgaatgggataagggcctggaaacaaaaaggtccagtaatagcatacctttgcattatttatatacaatttat

SEQ ID NO: 265747 - DNA, 574 bp, Homo sapiens
tactgctctatttagaattattttatcaatggtgcattacgttaagagattagttcagatttttaaaagtatcatggcacacaaatgctgcactttgggtttctgtttgaagtgagttgtgtgtggtcctgcacacaatccggatcatcaccagctaatcctcatgtctcccagagaacagaattcccattgttgtggttcttcactagaaacagctgggttaccttttctgggttagctggtgggatgggcagctgcattccccaaatcacacaaatcaccagtgaagcttattttgattgctagtttctgcacatcaagatactcttaawttttttttttctgtatgttgtcatagattcctttcatgcactgctccacccagcaaaatatttgggctgcagattctgtatttccactgtaaagattccattcttttccaaaattaaaaaaaaatactctgagatttgttgcttcagttttgaatgggaaaaaataggtttctttctttctttttagttgtattcatagttcccttagggcagttttggcactttcattttgacatacactg

SEQ ID NO: 265748 - DNA, 574 bp, Homo sapiens
tactgctctatttagaattattttatcaatggtgcattacgttaagagattagttcagatttttaaaagtatcatggcacacaaatgctgcactttgggtttctgtttgaagtgagttgtgtgtggtcctgcacacaatccggatcatcaccagctaatcctcatgtctcccagagaacagaattcccattgttgtggttcttcactagaaacagctgggttaccttttctgggttagctggtgggatgggcagctgcattccccaaatcacacaaatcaccagtgaagcttattttgattgctagtttctgcacatcaagatactcttaatttttttttttctgtatgttgtcatagattcctttcatgcactgctccacccagcaaaatatttgggctgcasattctgtatttccactgtaaagattccattcttttccaaaattaaaaaaaaatactctgagatttgttgcttcagttttgaatgggaaaaaataggtttctttctttctttttagttgtattcatagttcccttagggcagttttggcactttcattttgacatacactg

SEQ ID NO: 265749 - DNA, 574 bp, Homo sapiens
tactgctctatttagaattattttatcaatggtgcattacgttaagagattagttcagatttttaaaagtatcatggcacacaaatgctgcactttgggtttctgtttgaagtgagttgtgtgtggtcctgcacacaatccggatcatcaccagctaatcctcatgtctcccagagaacagaattcccattgttgtggttcttcactagaaacagctgggttaccttttctgggttagctggtgggatgggcagctgcattccccaaatcacacaaatcaccagtgaagcttattttgattgctagtttctgcacatcaagatactcttaatttttttttttctgtatgttgtcatagattcctttcatgcactgctccacccagcaaaatatttgggctgcagattctgtatttccactgtaaagatwccattcttttccaaaattaaaaaaaaatactctgagatttgttgcttcagttttgaatgggaaaaaataggtttctttctttctttttagttgtattcatagttcccttagggcagttttggcactttcattttgacatacactg

SEQ ID NO: 265750 - DNA, 574 bp, Homo sapiens
tactgctctatttagaattattttatcaatggtgcattacgttaagagattagttcagatttttaaaagtatcatggcacacaaatgctgcactttgggtttctgtttgaagtgagttgtgtgtggtcctgcacacaatccggatcatcaccagctaatcctcatgtctcccagagaacagaattcccattgttgtggttcttcactagaaacagctgggttaccttttctgggttagctggtgggatgggcagctgcattccccaaatcacacaaatcaccagtgaagcttattttgattgctagtttctgcacatcaagatactcttaatttttttttttctgtatgttgtcatagattcctttcatgcactgctccacccagcaaaatatttgggctgcagattctgtatttccactgtaaagattccattcttttccaaaattaaaaaaaaatactctgagatttgttgcttcagttttgaatgggaaaaaataggtttmtttctttctttttagttgtattcatagttcccttagggcagttttggcactttcattttgacatacactg

SEQ ID NO: 265751 - DNA, 634 bp, Homo sapiens
gtgtacataattgatgtggttaggttgtgttcccacccaaatctcatctggaattgtaacttccacagttcccttgtgttatgacaggaacctggtgggaggtaattgaatcatgggggtgggtctttcttgtgctgctcttgtgatactgaataagtctcacgagaactgatggttttaaaatgcaagttttcctgcacgagctctcttctcttgtctgctgtcatgtgagatgtgctttcaccttctaccataattgtgaggtctctccacccatgtggaactgtaagtccaataaacctctttcttttgtaaatttcccagtctcgggtatgtatttatcagaagcatgaggacagactaatacataaatgtaatagctaaagcagcagcagcagcagcaacaacaacaacaaaacctaaaaagtgatacactttaaaacactataaatctctcaaaatagactttcacaatatgtttaagtaacacacagtaaggaaggagaaggaaacagagaagtgaaaaagaaagaacaaacagaaaacaatacaaatgcagwattaagcttcagtttttcaatatcacattgaacttaaatggttcaaatatactaataaaagacagagattggag

SEQ ID NO: 265752 - DNA, 529 bp, Homo sapiens
tctgtatttggttaggatccatttaaactctctaggataatgtcaaaatcaatttcttcctttatactttcttatttccaaagaaaaggtgctagatatttctatgaatatatagaaatatctatgcaaatatgtatctgactaaaaatgttgcaggcatcttttctgttttttttaccctttgtaatatttttattttctgtttatttagtgatataagggaaagttgtaagcatttaactacataatcttttatgtttccaccaaactcaattttttagttcttagtatatggcctrtaatctaactttaatatatcccttttatattagcttatttccttgttaacaacaaggatatctcttctggagtatcccaagtcaaggtggaaaaagtagtcaacaggaaaatgaacagaacacttattggatctgtatgagaatttaaagcaaatgtttctaaatgagaaattgtaactcaggaaatattttgcatattctatcaaaattttgtgaattttgataataaa

SEQ ID NO: 265753 - DNA, 536 bp, Homo sapiens
aagcccaacatagtgtcttgtaggaaaccagaggtgaaaatatcaacttatctttacagaaaaaaaaaggattaaaaaaacacattggacatatcagaagccatccaagcaagaggaaaatggattgcaattttaaaagtgttgccagaaaaaccacaccaacctagcattctatatccagggaaataatccttcaaaaatgaagaataaaaaacactttctcagaccaacaagaaccaagggaatttgtcccgactagatctgctctgcaaaaatatggtaaaagaagttgttgagagaaggaaaacatatgtaaaaattctaatctacatgaagaaaaaagatattcagagaagggataaaygaaaataaaataaaaatatttttctttttcttaattgatctaatagataactctctcttcaaagtaatagcatcaataacatattgggtggttataatatatggtaaatgaaacacataataaaaataacatggatcagagtacagaaaataagaacatctctgttttaagg

SEQ ID NO: 265754 - DNA, 604 bp, Homo sapiens
tatctacaataataaacctactgtgtatctacaataaacctgctgcatccattgtttatctacaacaataaacctattctttatctacaataagcctactgcatccgttataattaactgtgagaaagtagatgctttcctcctaaaattggkagtaaggaaggatgtcctgtcccactcttcttatccaatattgaactgaagttgtaactagtgcaataagataaggaaataaatcaagggtgtacagaatgagaagagagcactaaaaccatctgtcatttacaggtaacataattgtctatgtagaaaaattctgaagaattgccaaacatatcccttgaactgtgagaagtctaacacaaccacaggataaaacaattaatataccatagtcaattgttttctgatatataagttcaacaactggaatttgaaattaaaattaaaaacacaatgcaatttaaaatagcaccaaaaatgaaatatgttaagtataaactaacaatatctgtatatactaaaatcttcatgaaagaaatgaaatatctaaataaatatagagatattccctgtttaaggattggaagactcaatatagtta

SEQ ID NO: 265755 - DNA, 604 bp, Homo sapiens
tatctacaataataaacctactgtgtatctacaataaacctgctgcatccattgtttatctacaacaataaacctattctttatctacaataagcctactgcatccgttataattaactgtgagaaagtagatgctttcctcctaaaattgggagtaagraaggatgtcctgtcccactcttcttatccaatattgaactgaagttgtaactagtgcaataagataaggaaataaatcaagggtgtacagaatgagaagagagcactaaaaccatctgtcatttacaggtaacataattgtctatgtagaaaaattctgaagaattgccaaacatatcccttgaactgtgagaagtctaacacaaccacaggataaaacaattaatataccatagtcaattgttttctgatatataagttcaacaactggaatttgaaattaaaattaaaaacacaatgcaatttaaaatagcaccaaaaatgaaatatgttaagtataaactaacaatatctgtatatactaaaatcttcatgaaagaaatgaaatatctaaataaatatagagatattccctgtttaaggattggaagactcaatatagtta

SEQ ID NO: 265756 - DNA, 604 bp, Homo sapiens
tatctacaataataaacctactgtgtatctacaataaacctgctgcatccattgtttatctacaacaataaacctattctttatctacaataagcctactgcatccgttataattaactgtgagaaagtagatgctttcctcctaaaattgggagtaaggaaggatgtcctgtcccactcttcttatccaatattgaactgaagttgtaactagtgcaataagataaggaaataaatcaagggtgtacagaatgagaagagagcactaaaaccatctgtcatttacaggtaacataatygtctatgtagaaaaattctgaagaattgccaaacatatcccttgaactgtgagaagtctaacacaaccacaggataaaacaattaatataccatagtcaattgttttctgatatataagttcaacaactggaatttgaaattaaaattaaaaacacaatgcaatttaaaatagcaccaaaaatgaaatatgttaagtataaactaacaatatctgtatatactaaaatcttcatgaaagaaatgaaatatctaaataaatatagagatattccctgtttaaggattggaagactcaatatagtta

SEQ ID NO: 265757 - DNA, 604 bp, Homo sapiens
tatctacaataataaacctactgtgtatctacaataaacctgctgcatccattgtttatctacaacaataaacctattctttatctacaataagcctactgcatccgttataattaactgtgagaaagtagatgctttcctcctaaaattgggagtaaggaaggatgtcctgtcccactcttcttatccaatattgaactgaagttgtaactagtgcaataagataaggaaataaatcaagggtgtacagaatgagaagagagcactaaaaccatctgtcatttacaggtaacataattgtctatgtagaaaaattctgaagaattgccaaacayatcccttgaactgtgagaagtctaacacaaccacaggataaaacaattaatataccatagtcaattgttttctgatatataagttcaacaactggaatttgaaattaaaattaaaaacacaatgcaatttaaaatagcaccaaaaatgaaatatgttaagtataaactaacaatatctgtatatactaaaatcttcatgaaagaaatgaaatatctaaataaatatagagatattccctgtttaaggattggaagactcaatatagtta

SEQ ID NO: 265758 - DNA, 591 bp, Homo sapiens
atgcatagtcagctactttcatggaacatatagaaaatctgttcttgaacatgatataccacagtaaagcaattctgaagcctgaatttcttacagtaatcacagctttctctgacactgtattcagcttcaattggaagcccaggtgctaagcattcttcacagtataaagcatttgacactttgaagataaccagacctttgttaaaagtaaaaaatgtggtttctagccaagacaataagaatactgtccatgtgagtgayaacccaaggcactagggctaaatagtcaaaatgaacagtcacaactgaaatcctctatagtggcagacacatgtgtgggtgtgataatatgtttaaataaggagaaaaatatcatttttctctagaagcttgattaaaatatgacacttgtgaaagtacatttttgttcccaacagtagcttgcttttctatattcaatgcacattccttcttttcattaggaagccctaaatagatcagtttatataaagaataactcaaagttatttcacttcaagcatcttgcaaaaatatttactctaattgtctccctaagcctgttgtagc

SEQ ID NO: 265759 - DNA, 599 bp, Homo sapiens
aaaatatcatttttctctagaagcttgattaaaatatgacacttgtgaaagtacatttttgttcccaacagtagcttgcttttctatattcaatgcacattccttcttttcattaggaagccctaaatagatcagtttatataaagaataactcaaagttatttcacttcaagcatcttgcaaaaatatttactctaattgtctccctaagcctgttgtagcgatgaaggtgtttgatgatccaatattaacagagaggagagcctgtgccagttactccattaagatattcaaggcactgtattataaaaataattggatagaggagagccgagggaatttggaaaaatcatttgagtaaccaaacattcatgattttacagtggacaaagtaaagattgttaatgtcaagaaatgcaagacacagcatgtgagcaagttgagccatattgttattgaattccactccctaactcatattattaaactcttcagatcactttaatcttataaatctttaaatcacttccagccagcccctctctgcctttcccaaatatttytaaacatgcttattgttccctagctatcatttgtaa

SEQ ID NO: 265760 - DNA, 551 bp, Homo sapiens
atctgttgccacactgtatagcagaaggagtgtgtaccccctccttctaggtcaactgagataattaaaagggaacaactcatggactttgatgacaactgatgccactgaatgtctctggaaatttcaatgggctgcactcagcagtcatttgactaaatccacccactgctatctctgctgctgtcacttcaaccttaggtgtggctgccaaattccgatgtaaacaagaagttcacattctgttcacattttcattctcaaacttgaacgaatgtcttcatctgagagccacaagtcccctccgtgttcaaaactgattgttttccttcacgtctacaaatcctgtcctctctccccaactcaacaagagtttaagaatctcagaagttgaggattaagttcacgggacaagacwtttttttctaggattacatcgtttttccggtattttgattttacctatgggctacagttttaaagtcagaaatcaataatttgcacccgtccccccaccttgtggctctaaaatagcattttatcaacaactt

SEQ ID NO: 265761 - DNA, 457 bp, Homo sapiens
atagttatccctaaagctgaatgttcacatatcaaatgatgaagtgcaaagtggcattaagtaactgcatatcaaacactgaagaatatttggggtattttttctgttttatttttgcccccctctcccaaatgttattcaggtgtaacattacacctgaggggtaaacaatcattagtttttttccccaaatactgataaggagataatctaatgtagccggacctgaaataatccacatatcgaacctggcctgagattctctgataggtaaacaatgtaaagagagatagttggatatgaggtgattccaytggacatgaattttaaatagagttatacatcacctgtctacgttgtaagcagtattaaggcctcaatagaggacattttatttagaaagatttacagcaaaattctaaattttgctacttaagaagaattagaacgtttattc

SEQ ID NO: 265762 - DNA, 583 bp, Homo sapiens
atgattttgtatattttaccagatttcgaattactaacagtagcattttgtcccattttttaacgcccaggagctacaacagcaaatggcaattaagaattttttaattaaatttgtagactgaataaaaaagcatatcaataaaataatayatataattgtatattagtttgagaattatttttctaaccagatctttcatcttgattagactttttcaatatccaagagccaaaaagatagttgagtatatttgaaataatcaaatttttaggttgctaattaagataaaaattggtgagactaagatagatatataatgagactgatactctgaaagatattctaatggaatataaatacattttaactacttagaatctggaggcaagaagaatattgatttttctgccaagcaagcaaagttggattttgtatgataaatgactgcagaaactcatttatcaaagttattgtgacatgaaagatgtataagatctgatttcatatgcttatctcaacttttttataggttaaagagacatttattgagcatatacaatgtcctttgtaccaagactat

SEQ ID NO: 265763 - DNA, 540 bp, Homo sapiens
gatttctgttattcagtgaacaagattgataagtcaacaggacattgtaataaaacatcaaacagtgatagtctatgaattatctctgtgtcctttggcaggccatgcaatttacttgttttgatggcttcatctgtaaaacaagctaagtgaatgaagtacaatttagagattcttctarctctggtatttataaacatttctatgaaagaatagtctgatgtctttacatctaaacatgtctccagaagagcaaatattagctttctaaatatttccagatatgttacgtaagtctacaattccaaaactatgtgttgaagcatcctgcagaaccacagagataactctaagagacagtttacattttttgaaacaaaagaagagatatttaatatcttttgaaagctatatgaactagcagcttgagatatttcacagtttgcacattagattccattgcattcctttcaacaatgtgaagctgggattttagcaggtgttggacttagaagcaaacaccaatataaagcaagaaaa

SEQ ID NO: 265764 - DNA, 540 bp, Homo sapiens
gatttctgttattcagtgaacaagattgataagtcaacaggacattgtaataaaacatcaaacagtgatagtctatgaattatctctgtgtcctttggcaggccatgcaatttacttgttttgatggcttcatctgtaaaacaagctaagtgaatgaagtacaatttagagattcttctaactctggtatttataaacatttctatgaaagaatagtctgatgtctttacatctaaacatgtctccagaagagcaaatattagctttctaaatatttccagatatgttacgtaagtcyacaattccaaaactatgtgttgaagcatcctgcagaaccacagagataactctaagagacagtttacattttttgaaacaaaagaagagatatttaatatcttttgaaagctatatgaactagcagcttgagatatttcacagtttgcacattagattccattgcattcctttcaacaatgtgaagctgggattttagcaggtgttggacttagaagcaaacaccaatataaagcaagaaaa

SEQ ID NO: 265765 - DNA, 541 bp, Homo sapiens
ggagtttgggaccagcctgggcaacatggtgaaaaaccatctctacaaaaaaatacaaaaattagctggacgtggtggtgcacacctgtggtcccagctacttggtaggctgatgtgagaggatggcttgagcccaggagacaaaggttgcagtgaaccgagattgtgccactgcactttagcctgagtgacagagtgaaaccttgtctcaaaaaaaaaaaaaaaaaaaaaattgggcattgacgaggcagaaaaagtgtctcaaaaaattgaaaataattaaaaacatatgcattttattttagggtctcgaaactagaaatcaataacaaaattacatctataaaattcccaattatttgaaaaattaaaagcctttttcaaaactcggcatggtacacttctrtttgtccatttaattgtatgtaaattttggcttaaaattttaaaaatgtaaataaatgctcacttctatttaataatttgaatgttaaacttttcagaggagagtgtcaaaatttgcaatttaccttgaaatgca

SEQ ID NO: 265766 - DNA, 626 bp, Homo sapiens
atcccactccccaccctctgaaaggccacagtgtgtgttgttcccctctatgtgtccatgtgttctcattgtttagctcccacttacacaggagaacatgtggtatttggttttctgttcctgcattagtttgctagggataatggcctctagggaaacctacatttattttaaatgcttgaaaatcatttattcattcattcgctcattcatcagttatcacacttattctatatatcatgtattgtgctcaaagttaggaatacaaagaaaaccaataattatttatyatacgttggtgcaaaagtaattgtgatgttacttttcatggcaaaaaccgcaattacttttgcattggcctgataatatgccttgttctgtaggcgttcactctctagtcagagaggtagtttggtaaacaagacattttacagcactctgaaagaaggaaaacctataagtcaactctacctctgctgtcagtgaaaatattcctacaaccattaccagaggggaaagaatattctaggctgagggctagcatacgttatgcaagatcattaatagttctggggtgcctggctataaggaggtgtgtgtgtttgaagcattgagtggaagcttca

SEQ ID NO: 265767 - DNA, 537 bp, Homo sapiens
aaacactgcatgttctcatttataggtgggaattgaacaatgagaactcttggacacaggatgtggaacatcacacayccagggtctgtcatggggtgggaggagtggggagggatagcattaggagatatacctaatgtaaatgatgaattaatgggtgcagcacgccaacatggcacgtgtatacatatgtaacacacctgcacattgtgcacatataccctagaacttaaattataataaaaaaaactacataggaaagtattgatcaattttggagtgttatctcagttctcagactcctagtaaataataaaaacatgaaaggaggatgtcttataaaaacatggaaagactgataacccacactaagtaaggtagaaatgctgcttctgatagcttatgcaaaacaggattacaaggcttaagtaaataggtattctagagtggaaataccatgtaagcctgaaacacacagaaacacacacacacacacacacagccctcagattactgcgttccgttggtgtggcaggg

SEQ ID NO: 265768 - DNA, 537 bp, Homo sapiens
aaacactgcatgttctcatttataggtgggaattgaacaatgagaactcttggacacaggatgtggaacatcacacatccagggtctgtcatggggtgggaggagtggggagggatagcattaggagatatacctaatgtaaatgatgaattaatgggtgcagcacgccaacatggcacgtgtatacatatgtaacacacctgcacattgtgcacatataccctagaacttaaattataataaaaaaaactacataggaaagtattgatcaattttggagtgttatctcagttctcagactcctagtaaataataaaaacatgaaaggaggatgtcttataaaaacatggaaagactgataamccacactaagtaaggtagaaatgctgcttctgatagcttatgcaaaacaggattacaaggcttaagtaaataggtattctagagtggaaataccatgtaagcctgaaacacacagaaacacacacacacacacacacagccctcagattactgcgttccgttggtgtggcaggg

SEQ ID NO: 265769 - DNA, 607 bp, Homo sapiens
ggattgtatggtttggctctatatccccaaccaaatctcatattgaattgtaattcccataattcccaagtgtcgagggtgggaactggtaagaggtgactggatcatgggggaagtatctcccatgctgttctcgtgataatgagtgaattctcatgagatctggtggttttcaaaggggcagttttttcatgcgccctcacttctctctcctgccatcatgtgaagaaggtctttgcttcctcttcatcttccacygtgattataagtttcctgaggcctctccagccatgtggaattgtgagtcaattaactctcttttctttataaattacctagtcttaggcagttctttatagcagtgtgaaaacagactaatacagtaaataggtattggaagtggggctctaccctgcaaacccacagaggcggagctgcccaagaccgtggaagtccacctcttgcatcagcatgctctggatttgagacatggagtcacaggagatcattttaaagctttaatgtctgtcttgctggatttcagacttgtatgggggcctgtagcccctttgttttggccaatttatttcatttggaattggaatat

SEQ ID NO: 265770 - DNA, 607 bp, Homo sapiens
ggattgtatggtttggctctatatccccaaccaaatctcatattgaattgtaattcccataattcccaagtgtcgagggtgggaactggtaagaggtgactggatcatgggggaagtatctcccatgctgttctcgtgataatgagtgaattctcatgagatctggtggttttcaaaggggcagttttttcatgcgccctcacttctctctcctgccatcatgtgaagaaggtctttgcttcctcttcatcttccaccgtgattataagtttcctgaggcctcyccagccatgtggaattgtgagtcaattaactctcttttctttataaattacctagtcttaggcagttctttatagcagtgtgaaaacagactaatacagtaaataggtattggaagtggggctctaccctgcaaacccacagaggcggagctgcccaagaccgtggaagtccacctcttgcatcagcatgctctggatttgagacatggagtcacaggagatcattttaaagctttaatgtctgtcttgctggatttcagacttgtatgggggcctgtagcccctttgttttggccaatttatttcatttggaattggaatat

SEQ ID NO: 265771 - DNA, 656 bp, Homo sapiens
tctgtagtgccttcccaaactgagaactcactttgaattaaactaagcccctagggtatgactgcattttaggtcactatttttctatacctaattgttttcctctcatcccttttgcaggtgatgttcctaagtgaacacttcttaacaaatcatttgcaaactaatctttgtctaggaagcatcttcctggggartataatatgccatagatgccttattctcaagcctttcaactaaaagtggtcagaaaagaattgtatgatttttttccttttattcttaacagttcttagcatggcacaattatacaggataaatatacattaaattaatctagtgtctttaaattcattttcaatttaaacataataaaatataaaacttgtggaagtctgtttggatctaaaatacatgcattttccattatatcactttgcactaacacctaacacaataccttatgttgctttagcatgcattatctttcagaacagtaacacatctcagcatctgttaactcgttgaagaaattctaccaggcattgaaagtgacactacaaaaataaatgactagggcattgttcctgtcctagagatgttcatgctgtagcttagggaaacaaactaaaatacggataagcacaatatattga

SEQ ID NO: 265772 - DNA, 656 bp, Homo sapiens
tctgtagtgccttcccaaactgagaactcactttgaattaaactaagcccctagggtatgactgcattttaggtcactatttttctatacctaattgttttcctctcatcccttttgcaggtgatgttcctaagtgaacacttcttaacaaatcatttgcaaactaatctttgtctaggaagcatcttcctggggaatataatatgccatagatgccttattctcaagcctttcaactaaaagtggtcagaaaagaattgtatgatttttttccttttattcttaacagttcttagcatggcacaattatacaggataaatatacattaaattaatctagtgtctttaaattcattttcaatttaaacataataaaatataaaacttgtggaagtctgtttggatctaaartacatgcattttccattatatcactttgcactaacacctaacacaataccttatgttgctttagcatgcattatctttcagaacagtaacacatctcagcatctgttaactcgttgaagaaattctaccaggcattgaaagtgacactacaaaaataaatgactagggcattgttcctgtcctagagatgttcatgctgtagcttagggaaacaaactaaaatacggataagcacaatatattga

SEQ ID NO: 265773 - DNA, 638 bp, Homo sapiens
aataaatattttgtaagccatgatttgctcaacaattgtgagacgtttttgtttgtttgtttgtttgtttgtaactattgtttcaactgcaaagtcascaaaaacactgagtcattgaaaacagagcaatggtccttaagaaaaatacagggttaggttcctgtgaatctctgatcacaacactttttgcatctgatcaatacataactttgttttatgttatttctgtttagaaatacacaattttaatatatttttgatttaacattgaactgacagccaacaacattatctgcctgaacgaggctcatctagcacatatagtgtctgttttccgtaaggcacgttacagctttcaggcactttacagctttcttgtgtacagggacactaaacaacatttcagcactctgctttgaggccatattgaacaacgaaatcaccaatacaaagcagaaaatgtggtactaaatagaccacaaacagacatggggggatagtacgagagctgaaacaataaggcagattatcaccttttttacttcagccgtgcatgccagtgactcaaatttttcactgctgtgaatgtttttacaaactataaaggtgccatgagtattggggttataaagaaaatg

SEQ ID NO: 265774 - DNA, 512 bp, Homo sapiens
gcttctatggtgctctactgtgaagttttttagaaaaagtgatgattaacctaaatgtagaagggtatgtaattttttagataaacaagtagaggaaggtagacaaaagggaaaataaacacaggagacatacatgaatatagtctatttaaasaatggtgacaaattgacttagataaagtgcatgagtttacaggaggagagtgagattatgacgcgggagaggcctgttaaaggtgaaaaaaatttatttactaacatttgttgaagctgtgattatattatcaaatgctactctatcaaatcattcagcaagtaatctgaaggttgtataagagttttaaaaaacttgaatcatgaagactaattaaaagtatatcccagtagttcagagaacagatgatatatgtcaagatttcttgtgggaagtgggaaaatatctgtagctgtgagttagtgtctatctatgtggcctgtggatggattgtagtctgaataagtgtggagagctt

SEQ ID NO: 265775 - DNA, 512 bp, Homo sapiens
gcttctatggtgctctactgtgaagttttttagaaaaagtgatgattaacctaaatgtagaagggtatgtaattttttagataaacaagtagaggaaggtagacaaaagggaaaataaacacaggagacatacatgaatatagtctatttaaacaatggtgacaaattgacttagataaagtgcatgagtttacaggaggagagtgagattatgacgcgggagaggcctgttaaaggtgaaaaaaatttatttactaacatttgttgaagctgtgattatattatcaaatgctacyctatcaaatcattcagcaagtaatctgaaggttgtataagagttttaaaaaacttgaatcatgaagactaattaaaagtatatcccagtagttcagagaacagatgatatatgtcaagatttcttgtgggaagtgggaaaatatctgtagctgtgagttagtgtctatctatgtggcctgtggatggattgtagtctgaataagtgtggagagctt

SEQ ID NO: 265776 - DNA, 638 bp, Homo sapiens
aataaatattttgtaagccatgatttgctcaacaattgtgagacgtttttgtttgtttgtttgtttgtttgtaactattgtttcaactgcaaagtcaccaaaaacactgagtcattgaaaacagagcaatggtccttaagaaaaatacagggttaggttcctgtgaatctctgatcacaacactttttgcatctgatcaatacataactttgttttatgttatttctgtttagaaatacacaattttaatatatttttgatttaacattgaactgacagccaacaacattatctgcctgaacgaggctcatctagcacatatagtgtctgttttccgtaaggcacgttacagctttcaggcactttacagctttcttgtgtacagggacactaracaacatttcagcactctgctttgaggccatattgaacaacgaaatcaccaatacaaagcagaaaatgtggtactaaatagaccacaaacagacatggggggatagtacgagagctgaaacaataaggcagattatcaccttttttacttcagccgtgcatgccagtgactcaaatttttcactgctgtgaatgtttttacaaactataaaggtgccatgagtattggggttataaagaaaatg

SEQ ID NO: 265777 - DNA, 642 bp, Homo sapiens
aaactcccatctctgtgggaaagagtgcctgggggaaagggcagctgtgggaacagcttcagcagacttaaactttgtggcctcccagctctaaagagagcagctaatcctgacaaggatgattctcccagcacagtgcttgagctctgctaagggacagaatgactcctcaagtgggtccctggcccccgtgcctcctggctgggagagacctcctaacaggggtcgacagacacyttatataggagagctctggctggcatcagactggtgcccctctgggacaaagtttccacaggaaggagcaggcagcaatctttgctgttctgcagccttccctgatgatacccaggcgaacagggtctgaagtggacctccagcaaactgcagtggacttgcagaagaggggcctgactgttagaagaaaaattaacaaacaataagcaacaacatcaacatcaacaaaaaggaccccccacccaaaatccccatccaaagctcatcagccgcaaagatcaaaggtagataaatccacgaagatgaggagaaaccagtgcaaaaatgctgaaaattcaaaaaaacagaatgcctcttcgtctccaaatgatcgcaactcctctccagcaagggcataaaactgga

SEQ ID NO: 265778 - DNA, 522 bp, Homo sapiens
tgggtccctggcccccgtgcctcctggctgggagagacctcctaacaggggtcgacagacactttatataggagagctctggctggcatcagactggtgcccctctgggacaaagtttccacaggaaggagcaggcagcaatctttgctgttctgcagccttccctgatgatacccaggcgaacagggtctgaagtggacctccagcaaactgcagtggacttgcagaagaggggcctgactgttagaagaaaaattaacaaacaataagcaacaacatcaacatcaacaaaaaggaccccccacccaaaatccccatccaaagctcatcagccgcaaagatcaaaggtagataaatccacgaagatgaggagaaaccagtgcaaaaatgctgaaaattcaaaaaaacagaatgcctcttcgtctccaaatgatcgcaactcctctccagcaagggcakaaaactggatggagagtgagattgatgaattgacagaagtaggcttcagaaggtgggtaataa

SEQ ID NO: 265779 - DNA, 522 bp, Homo sapiens
aacctagctagaatttttgagcttataaaaataaaagctattaaacttttgcatagaaaacgacaatgaattttctagcttatcaaatgcagaatcataattactaaaaatcatcactctagaastccaaaggtatgataattatccctttgtcaaaataattatacaattgctaagatgtgaacatgtcttttatattccactgcgcaatatctggatttctatattactcttagggaccctgaatgtgctttagaaaaaaaataactaaaaatatttatcctttcatttcttattgtgactctatttctaaagagaaaactaacataaattcttaatatctagggtcttagaagaagccaattactcttttgaaaatgtttttttacatgtagaggagtttcttattttctcaccaattctagatggcaataattactaaaccactaggcagaagctactggaaatgttatacagtagtaattacacagatatccttaaatttacttatctataaccaat

SEQ ID NO: 265780 - DNA, 620 bp, Homo sapiens
gaaacatgacaacatgacttcaacatgtgaagtcctggatagaatcctggcacagaaaaaggacagcagattaaaactaagtgaaatatgaataaataatgggatttatttaataatactctatcagtaatggtgcattgattataacaaatgtagcacactaataacgtaaatgttagtaatgggggtggagattgggactgggtgcagcataaaggaaattaaaatattttacccaaaaatatttccctttaacatattttgaaatggctgccacttggcacacaaacagaagcagccttgcaaagcagtcttttgtggggaaaatttgcatctgtggagaatcttcattaatgcagccattcctcctcccctttctatgccttccctggttcaggagagattgagagtctgacacctttaaaagtctgaaaagaaacattttccrtatattctctctaaggaagccttcgtcaacgtaacaaggtccacctttgctagccaagacttttctccctccacccttcccataacctgtttcactacagtctaagcccttattctttccagaacctcaaaatggtatataaatttctataatgcattaggaaactggatgt

SEQ ID NO: 265781 - DNA, 350 bp, Homo sapiens
ggagcatgaataaaattaggaactttctgaagaagtataaatacttgtcaaaagggacagaaaagggtgagttacctccttttgtggctttgagacaggaataatacagggtagttacagaagaagaaaattccgggtagcaatttcacatgacttggcaaaaagaaattcttgaaatagctgcataagctaggggccaataagaccctgaaaaataggatattggcccagccagataggacaaaatatacccaacagggtgctggatttggcctgtttcacctatgaccttgctgtatgctcattaaacaytaaatcacacacccatcagctccatgacatttccaaga

SEQ ID NO: 265782 - DNA, 592 bp, Homo sapiens
gatttaaaggatggagttgtcattagccaacacggagaggattgtggctgaagcagccctgaggaaaagcagcagttccttcttggacaggtccagttggagatgcctgtttgatagttatgtggagatggcaagtagtcagttggacayatgagtctggggataggagaattaccaagggttgtcaattttggaattatcagcccacagattgtagtgtaagtcaagagattacataatatcagaaagagaggactgaaataggattttttggggattttctttaatatataaaaaggaacatgctaagcaagttggctcactcatgcctgtaattacaatactttgggaggctgagatgagaagatcgcttgaggccaggagcttgagccctccagcctgatcaacagaacaagatcccatctctacaaaaaaaaaaaacaaaaacaaacaaacaaaaaacagtcatagtggtgtgcatctatagtcccagatactgaggaagacacagcaggaggattgcttgagcagagaagctggaggttgcagtgaactgtgatgataacactgcactcctgcctggaaaacagag

SEQ ID NO: 265783 - DNA, 627 bp, Homo sapiens
atgatttaattcagaaaagacagaagtgctcagggtgaaataaatgcttgatagaaatgtggttactgtatttatatatgagaaagtaaagctttaaaaacttgaagtaagacaggaaatgagaaaagttaatttagggaaagatgtacrcataggcagctcctggtccatcaaagacagaatgagaaaattggacactgaaagtgaaaatggcagggttattagaggagaaaatttacactggagataaacttttccttcttcaaaatggctgcagtttgctttccactgtatgaagtaacagtgaattcatgactgaatataaatgaaagcccattagaaagaactgacagtgacttactacagactatactcccctatgatggaagctttgaacataatttctttttttttccagcctatcactataatcttgtcattcagttatcaattttgttattaaacaagttagaaaattaaaatccagaaacattaaaactttaaatttttcacttagtaggagcagatgcagatctttctgactccaaagcccatatatacattttaatataatatgaagataggcaactgactgcagtggatatatcagtttcttcttgccctgca

SEQ ID NO: 265784 - DNA, 569 bp, Homo sapiens
cctttttccatggatgactgtatcaacttcctaatgcagtctatgcttctgtcytgtcctcttcatagcctattttcaaaagagcatctccaataattctttcaaaaggaagttggattatgctactcatatgctcaaaccattcagcagttcccaattttacccaaaagccaaagtctttacaatggcacacagtatgcttgctaagtggcaatcatggtctgagtgaagttacacacaaaaatatttaagggcaccaatcttaatggttgtgtaattttctcaacaaattaataataaaatagcagattagactattttgtattgatctatgattgggattttgcagggatgctgaagaaaagcaaaggaatgcagaaactgaaatcagcaacaaaagagaaggaataaatgtgctacgttctagttggatgggagagtcaggaggaattaaattgtgcaggaaagctgggtgcagtggctcatgcctataatcccagtcctttaagaggcctaggtgggaggattgcttttgggcctaggagtttgagaccagcctgggaaataga

SEQ ID NO: 265785 - DNA, 539 bp, Homo sapiens
tatagcagggcatgttaatgttctgctcttaattcctcaacgcatctagttcatctattgctgctttagtaaggtttataggtttcccttaagctgacagcttctgtcttaagtacctttgcctcttgtctcttcctgaggatattcttcagcaccaggaaaccatgataacacctccacaagcaaccttaagccaatggggttgtgatgttgttagtggataaacgcccagccttctttttccttccccttcctcaccttagtggggtgattctaagacacattccacatgggtttttgcagagtcgccagcaaggctgaggtccatttccctcaataataacccaatyagtaacactctccttatcttatttctcttgcaggttttacattcttgttttccactgtaatgcatcccaggtgaatcttgctcttaataatctacctgcaatcaaacccctgtattacagtctgcttttgtggaactcagactaagacattctcattgcagttgccatcatcatcatcatcatcatcat

SEQ ID NO: 265786 - DNA, 596 bp, Homo sapiens
gtaattggtgattttagttttaaacacgagtgttttagctttgagaacatgagttctccaatacatttggaatatttatagagaatttttatttaaattgattatccatgttgtttctrcttctcccttgtttattttatatacaggaacaaaactctactcaaactcacagaaatagtacagttcatgacttcagtcgcaaggctattcatcttttttgcactatattttttagtttaaaaattgtatagtaagcatcaaatattgagtactttattttaggcactgctgaaaaataatgctgaaaactgattaatatttcacttaatatttctattttattatttgttttcaatttgatttatatttataaacctaaaaacaggtattataaatagttggtgctggatttgtttataagctcatttatctttcaaaaagcataattctatacaatataagctacttaagttgtaatgatataagctatttaaattgtaattatctaatatttctattcaaaatgaaattatcttagggaagaaactgatgtttaatagcaagctataatgcagtatgaaaaatgctataataca

SEQ ID NO: 265787 - DNA, 580 bp, Homo sapiens
cttacatcccatccagctttccacaacacttcccatgctttgtctctgactatgagcraagaactacaccctccccttagctataaaacatataccattaatctttacatataccttactaaaccatcagttaataccctccaataatgtaactgctagacctgccactttgaccccaagaatatgccaggatattattgtcaaaaaaacaaaacaaaaaaaaggtggccaggtgcggtggctcacgcctgtaatcccagcactttgggaggccgaggcgggtggatcatgaggttaggagatcgagaccatcctggctaacacggtgaaaccccatctctactaaaaatacaaaaaattagccagatgtggtggcgggtgcctgtagtcccagctacttgggaggctgcagcaggagaatggcgtgaacctgggaggtggagcttgcagtgagccgagattgcaccactgtactccagcctgggtgatgagtgagactccgtctcaaaaaaataagtaaataaataaataaataaaagtaactcacacttttagtgcacttttaatctccaccaatata

SEQ ID NO: 265788 - DNA, 580 bp, Homo sapiens
cttacatcccatccagctttccacaacacttcccatgctttgtctctgactatgagcgaagaactacaccctccccttagctataaaacatataccattaatctttacatataccttactaaaccatcagttaataccctccaataatgtaactgctagacctgccactttgaccccaagaatatgccaggatattattgtcaaaaaaacaaaacaaaaaaaaggtggccaggtgcggtggctcaygcctgtaatcccagcactttgggaggccgaggcgggtggatcatgaggttaggagatcgagaccatcctggctaacacggtgaaaccccatctctactaaaaatacaaaaaattagccagatgtggtggcgggtgcctgtagtcccagctacttgggaggctgcagcaggagaatggcgtgaacctgggaggtggagcttgcagtgagccgagattgcaccactgtactccagcctgggtgatgagtgagactccgtctcaaaaaaataagtaaataaataaataaataaaagtaactcacacttttagtgcacttttaatctccaccaatata

SEQ ID NO: 265789 - DNA, 580 bp, Homo sapiens
cttacatcccatccagctttccacaacacttcccatgctttgtctctgactatgagcgaagaactacaccctccccttagctataaaacatataccattaatctttacatataccttactaaaccatcagttaataccctccaataatgtaactgctagacctgccactttgaccccaagaatatgccaggatattattgtcaaaaaaacaaaacaaaaaaaaggtggccaggtgcggtggctcacgcctgtaatcccagcactttgggaggccgaggcgggtggatcatgaggttaggagatcgagaccatcctggctaacacggtgaaaccccatctctactaaaaatacaaaaaattagccagatgtggtggcgggtgcctgtagtcccagctacttgggaggctgcagcaggagaatggcgtgaacctgggaggyggagcttgcagtgagccgagattgcaccactgtactccagcctgggtgatgagtgagactccgtctcaaaaaaataagtaaataaataaataaataaaagtaactcacacttttagtgcacttttaatctccaccaatata

SEQ ID NO: 265790 - DNA, 541 bp, Homo sapiens
tttgtctctgactatgagcgaagaactacaccctccccttagctataaaacatataccattaatctttacatataccttactaaaccatcagttaataccctccaataatgtaactgctagacctgccactttgaccccaagaatatgccaggatattattgtcaaaaaaacaaaacaaaaaaaaggtggccaggtgcggtggctcacgcctgtaatcccagcactttgggaggccgaggcgggtggatcatgaggttaggagatcgagaccatcctggctaacacggtgaaaccccatctctactaaaaatacaaaaaattagccagatgtggtggcgggtgcctgtagtcccagctacttgggaggctgcagcaggagaatggcgtgaacctgggaggtggagcttgcagtgagccgagattgcacyactgtactccagcctgggtgatgagtgagactccgtctcaaaaaaataagtaaataaataaataaataaaagtaactcacacttttagtgcacttttaatctccaccaatat

SEQ ID NO: 265791 - DNA, 591 bp, Homo sapiens
gaattcatgagtcatttagtgaattaatgtctgtttccttttttgctttttctggtaaggtctattaacttgaacaaggcatgctatctctttcagttttagttcctttatctctgaaattaataggatctataccatggtcgccaagatgccactaactttgagattcattgttacattacctgggacttttcacaaaaatatctgtttcttccattataaaaacaaagttttcatttttttttcaaaatgacagaactttttaagttgtgtggaaagtagagtcctctttaactaattacaaattgtagatactacaatagtaccatccatcctttatctcgaattaggagataaggtctaaagttcaataccagatcccaaagcacagaatatgcacctggcatcagaggaaacctcagaatactttacatgtygcaatgcattttaattcaacagccctttagtgaaagttacatgcaaaatattgtaagggatggaagggataatgagattctgtccagtgaattcacagagccaggcaccagcttttaagatcatataaccggcactcattttgcagagaaatat

SEQ ID NO: 265792 - DNA, 520 bp, Homo sapiens
ttactagtacttgaaaatgcaaaggtaaaataatcatggtctgtatactcaaaggaaatcaagagtaatggggaatttatagtctagtgttagtctagatttctagtgggaaaagaaaaatacatgaatayatcattacaaacttgaaatttgaaatatggttatccttacactctcagtataaaataagttgatatttaactcttatggattacatgctaatgtaatcaccttgcaaaaatatttaaaagtgttaagtcatttattcctattgataattttaatagatgtgatatggagataaactctatattttatctctacatctctaggtaccgagatatagtgagtacttttttaagtttataatagcttctctattcacctaattatttgaaattacttataaaattatttctgatgtactcaaatattttgtaacaacagtgcactttattgtgataaaaataaacggtctacacatttatggagttttttgttaaacttcagaatataagaa

SEQ ID NO: 265793 - DNA, 350 bp, Homo sapiens
aagaaaaataagtgaaacctccaagaatatgggattttgtaaagcgaaaaaatctatgactcattgtcattcctgagagagaaggagagagaatamgcaacttggaaaatatatttgaagatacagttcatgaaaattcctcatctctttagggaggtttacatacaaatccaagaaacacacagaaccccagctagatatgacatgaaatgactacctccaaggcacatagtacaatattcatcaaggtcaacactaaagaataaagtcttaaaggcagctaaagggcagggtaaagtcacatacaaggaacttcatcaggctagcagcagatctctcagcaggtatct

SEQ ID NO: 265794 - DNA, 350 bp, Homo sapiens
aagaaaaataagtgaaacctccaagaatatgggattttgtaaagcgaaaaaatctatgactcattgtcattcctgagagagaaggagagagaataagcaacttggaaaatatatttgaagatacagttcatgaaaattcctcatctctttagggagrtttacatacaaatccaagaaacacacagaaccccagctagatatgacatgaaatgactacctccaaggcacatagtacaatattcatcaaggtcaacactaaagaataaagtcttaaaggcagctaaagggcagggtaaagtcacatacaaggaacttcatcaggctagcagcagatctctcagcaggtatct

SEQ ID NO: 265795 - DNA, 350 bp, Homo sapiens
aagaaaaataagtgaaacctccaagaatatgggattttgtaaagcgaaaaaatctatgactcattgtcattcctgagagagaaggagagagaataagcaacttggaaaatatatttgaagatacagttcatgaaaattcctcatctctttagggaggtttacatacaaatccaagaaacacrcagaaccccagctagatatgacatgaaatgactacctccaaggcacatagtacaatattcatcaaggtcaacactaaagaataaagtcttaaaggcagctaaagggcagggtaaagtcacatacaaggaacttcatcaggctagcagcagatctctcagcaggtatct

SEQ ID NO: 265796 - DNA, 350 bp, Homo sapiens
aagaaaaataagtgaaacctccaagaatatgggattttgtaaagcgaaaaaatctatgactcattgtcattcctgagagagaaggagagagaataagcaacttggaaaatatatttgaagatacagttcatgaaaattcctcatctctttagggaggtttacatacaaatccaagaaacacacagaaccccagctagatatgacatgaaatgactacctccaaggcacatagtacaatattcatcaaggtcaacactaaagaawaaagtcttaaaggcagctaaagggcagggtaaagtcacatacaaggaacttcatcaggctagcagcagatctctcagcaggtatct

SEQ ID NO: 265797 - DNA, 204 bp, Homo sapiens
atgcgtatataaggagagaacttggtactgaatattttacttgaactgagctttgacaggtaagtaaacttcyttcaaggtaattgtgcatgagacactaatggacaataaaagagcaagagtataaaggagtataaaagtgagcagaatgcttcatgaatgttgattcctagaactagagtgcaagatgtatgatggagttga

SEQ ID NO: 265798 - DNA, 550 bp, Homo sapiens
gaagacaatagagagttgacatgtaccatagtcctctttcctaaagttaataaataataataattttgtcaatggagacatgagaaaagtcttgtaaaaagatactggccttctttgactcttatactcctcttcttgaaatagagtagactcttagtttatgtttgataactgaatcaatgagtgaaaaaacatagagctgattgtcttactcctgttcccattttcaaaaacattaacttggttcttcagaatcttttcataggaattttatattactttgagtgctgctaaaacttcttccccatcatctttttgttttcacaaatagcatttgtaatatacttttaatctgttcattgacattttaaatattctttctgtattagtgaatcatccctgtactctattatgccatatttatttctgaacttgttgaacatctattcaatctttcctgaattggtaaacagaatataatacagatttttaarcacagaatttaaaacacacaagatttttaaacatgcaatattgtagaatattggat

SEQ ID NO: 265799 - DNA, 466 bp, Homo sapiens
ccctctggtatattccacctgtaggaggggatgacctctctgtcctcagtctgttgccaggtgcattagacagggtgctgggagaggtcatccccmataaaggccccttggttacctgtacctcggactcccttggaattaactgaatgaaaagccataggaattgtaggctgtacagatgttatttccagcatcattggtgaaagaggtgagtggcatattgctgctttctatctcttaactaggatgtctctgataaaggactggacgcaagtgaccaaacttcagatagtcattgtaggactggatgtactgatcaccaaatacctcatctgcacatttttagaaactcttgggccattgcctaagagttgtcccctttatggaaatctcttgtcttacagaaacccaaaatataaatcaagatcacacatatcactacatatactaaagccacaacacaagg

SEQ ID NO: 265800 - DNA, 491 bp, Homo sapiens
agaagtaaggatatatgaaatcagggaattagactgaaaacaattgcctatatcagcacaatgatctgggaattcagcctttagatgtccgtaagctaaggtagctaatttactgaaaatccaggttcaattaatctaggtacactaaaaaagagtaaaatttgggacttcttcttatgagttgtagccaatttaggcttyaaggatttcaagagagggagactttatatttaaatttatattaaatattatttaaagtaggcaaactattttcaaaaaataagataaataaaagcaaacaaaataaattaaaatgaccaatagttttagataaccaaaagccaccagagttttgaataattagaaactgattaaaatcattattaaaatatttaaagaaataaaatataaacatatgagaaagcaaaaaggttattgaaaattttaaaaatgattcaaaaaatgccacatacaaatttaaaactgagaaa

SEQ ID NO: 265801 - DNA, 491 bp, Homo sapiens
agaagtaaggatatatgaaatcagggaattagactgaaaacaattgcctatatcagcacaatgatctgggaattcagcctttagatgtccgtaagctaaggtagctaatttactgaaaatccaggttcaattaatctaggtacactaaaaaagagtaaaatttgggacttcttcttatgagttgtagccaatttaggcttcaaggatttcaagagagggagactttatatttaaatttatattaaatattatttaaagtaggcaaactattttcaaaaaataagataaataaaagcaaacaaaataaattaaaatgacsaatagttttagataaccaaaagccaccagagttttgaataattagaaactgattaaaatcattattaaaatatttaaagaaataaaatataaacatatgagaaagcaaaaaggttattgaaaattttaaaaatgattcaaaaaatgccacatacaaatttaaaactgagaaa

SEQ ID NO: 265802 - DNA, 624 bp, Homo sapiens
ttggggccacagagatgagctccagcgtcttttctgcggtgttctgttctttctccccattcacgccattctcctctcctctgagtctctgctctgttcccttctattgtgttttgggtttgaaattacaccagagatggtactgaggataccacagatcttgcctagaaagcaggcttttaagaaccagccggattccccgcatgaggagctgcggttttacatttctgcttaggtgactcggtcttgctccccgcaaggctttgctccttctctggacctgagctcctcatggcrtgttccctgcccctttgaacctcagtatttaacttggaacaagaatgttctcactgtgggagggccggctggccgagagaacggtttgtgcctaagatgcccagtgcgttgctgggagtttctgctgtcctcgggctctggacatttgtgcctaagatgcccagtgcgttgctgggtgtttctgctgtcctcgggctctggacatgaggccagaccttgtgaccttgttggcagtgggcagtggcttgatgtgaggtcccagagacggcaggttgtgagtgtccaggcagagcagccagcgtggggtttaatgtgagtgtgtgttgg

SEQ ID NO: 265803 - DNA, 469 bp, Homo sapiens
ttggtttataaaaccctcaaatttggtagaratattgcagttcctgccttgtgagtggaacaacaccctaagtccaagtagcagagggcagaggtcagaggtcacctcgtatttgcttttagctgttcacttgcaaaatttccattttaagtctacattgcctggggcaggcaaacacaacctttgatcctacttctgctttctgatcccaggacttatttgagtctcttgtttatcaactgtcttcaatcccaaaccccatggggcttcccaggagccacctagaggccacactgttttccaggaccttggctgctgtcttgtcctggggctgcgcagataggaaggttgacttataacctgtcattgccagtgctgggccctggagggtgctgggtccctgtcacattgtccctgtgtctgtgtctgtgcagaggtgcttgtcaagtgcatgtgcggaaccagctgt

SEQ ID NO: 265804 - DNA, 501 bp, Homo sapiens
accacacaccatgaatgcaggagatcacacaccttggcccagagccaaggccataaagcatgcagaggaggaygcaggagaaaatctcgtgaccctgcgctcctcaagaattcttatgaaattacttaccaggtcacacagaaataccaccattgctactgaaagcgtttcctgtttatatactgctttgtagtttacagactgacgtcccacaccattcacggtgtaatctactcctcaccctgcgaccgtgtccagggtgagatgagaacagtgaggctgagaagcacaaaattctcccagctgggggttcaagatcccagggagccccacgtaccatggtgtgaatctagaatcccgtcgacataggaggaggccccacctctgaaccatgccagggctttctacctttgtcaggaaatttacgttagggtttgcacaacgcccaacacattccttcagattccaggtctcttcctcatagccagtcctcttgtgggc

SEQ ID NO: 265805 - DNA, 501 bp, Homo sapiens
accacacaccatgaatgcaggagatcacacaccttggcccagagccaaggccataaagcatgcagaggaggatgcaggagaaaatctcgtgaccctgcgctcctcaagaattcttatgaaattacttaccaggtcacacagaaatascaccattgctactgaaagcgtttcctgtttatatactgctttgtagtttacagactgacgtcccacaccattcacggtgtaatctactcctcaccctgcgaccgtgtccagggtgagatgagaacagtgaggctgagaagcacaaaattctcccagctgggggttcaagatcccagggagccccacgtaccatggtgtgaatctagaatcccgtcgacataggaggaggccccacctctgaaccatgccagggctttctacctttgtcaggaaatttacgttagggtttgcacaacgcccaacacattccttcagattccaggtctcttcctcatagccagtcctcttgtgggc

SEQ ID NO: 265806 - DNA, 500 bp, Homo sapiens
gttgttgagcccttatagtgagttttaaaattttagttgtgctttgcaatgccagaatttccacttggttctttttttttagaatttctgtctctttattgataacctctatgtgatcagttgttgtcatcatattttcttttaattctttatgcatggatccctttagttatttgaacatatttataatagctattttaaagtcttcttctactgagtccaacacctgtgcctcttcaaaagcagtttgtgtcctgcttattatttttttcctgtgtgaaccacacttttctgtttctttgtataactcattttgttttcttgttgcaagctggacattttaggtaaactatagtagcagctgtggatacagattcccccacttgggggaaggatgacttactgtttgcttgtttgttttgtgatttggctggactagtgcagtctctggrcctcttctccctcagatgtggtggttctggctggctgtgaccctccct

SEQ ID NO: 265807 - DNA, 606 bp, Homo sapiens
ttgctacactaatcaagagagtttggtattggtgtcaaggaagaaaaacagaccaggacagagattctagaaatagacccacacatataatcaactgatttctgacaaacatacaaaggcagatgaaagggaaaaaggatagttttttcaacaaatgatgttggaacaattggtcatccatatttacaaaaaacccttcaattcatgtkttataacttatataaaaattaactcaaaatgaatcataaaacttaaaactataacattctaaaagaaaacataggtaaaatccttatgaccttgggttaggcaaagagttcttaaatatgacattaaaagtatgattaatttacaaaaccactgaacttggttttatcaaaatttaaaacttctgcttttcaaaagacactattaatagaatggaaagacataccacaaactgggagaaaatatttgcaaagcatatgatagatccagaacaaataaagaactctcaaaacacagacaaacagctcagttaagaaacaggcaaatgatttgcacacacttcaccaaaagaaaatacggagatggcaaataagcccatgagaagatgctctacatcac

SEQ ID NO: 265808 - DNA, 455 bp, Homo sapiens
gttaattttcttgattgtagggatcatttcacagaggtataatgtgtctaaatttatcaaattatacacttggaacawgtgtactttattatatgctaattatgcttcaataaaacttttaaaaataataagaaatagctattattgaaactgtactgtgaatgggttgcgctaacatctccaacaatatgcatcatctcacactcctaccagcctgtgagctgggtactctttattcccattttacaaaggagcaaagagagaaaaatctcacttgtagactaaattttttttttctctgtctatgaactctgcatcctactgactacttaatatatacctgggacggtcttaagagccaggggcctgcaagatgtagaagccatgtggtcctacacattacttatggtttataagggtgaaaataactaatgggaatacaaaggatacattga

SEQ ID NO: 265809 - DNA, 501 bp, Homo sapiens
ctaggtcactcaaacataagaatcaaagggtgaagaatgagtcatgaattaaactgcaattttatttaagaagtatttatggagtttgtcatatgtccttgtaatattttaggtgctggggacccarcagtaagccaaatagatatgttttcaggaagttcaaagcaagcttcaagtatacatatatttagtatggggttagctgtcatggccttattaatttatgtaaatgggaaaaataaataaggatgcaaaagagatgataaggattattcattactggaaaaaaaaagaaaaactaaacaaaggataattacataatatgaatgcaattcttcctaatagatactatgactcacatataaaaagtctcaagtcaactcatggtcacctctccatttttattttcaccaaacattagggacacaatctaaaattaaggttccatctccactgccagttggagtgtggccacagctcagttgccaatgcaaagcaaac

SEQ ID NO: 265810 - DNA, 586 bp, Homo sapiens
acacagttcctgaagaaaagtggcttttttcttcagaggagcaaccaaagcagggcacagaccatttttatggcagtaaaaatactgtctatgatactatcatggtggatacatgtcattacacattttcccaaattcatggaatgcacaaaaccaagagtgaacactaacataaagtttggactttgggtgataatgatatgtcaatctaggttccctgactgcagcaaatgtaccactctggggttagaagctgtgaatatgcatgggcagggataaatggctatctccttatcttccggtcaatttagctgtgaacctaaagctgctctaaaaaataaagtctaaaaaacaaaaaataatatttttaagtagctttcaatcatttttaaaagtcaaatatttcaaggccctatttgattacgagttgtgctttggtttttgttgatcaggaaaatgcctaaaaataagaaaaaaaatgaaacatagagctctgatatcaatttgtactttatcatagcagcatctacatttattagtaaaagagatgaatggkgcatatgtgacatacatatttaatttacaa

SEQ ID NO: 265811 - DNA, 586 bp, Homo sapiens
acacagttcctgaagaaaagtggcttttttcttcagaggagcaaccaaagcagggcacagaccatttttatggcagtaaaaatactgtctatgatactatcatggtggatacatgtcattacacattttcccaaattcatggaatgcacaaaaccaagagtgaacactaacataaagtttggactttgggtgataatgatatgtcaatctaggttccctgactgcagcaaatgtaccactctggggttagaagctgtgaatatgcatgggcagggataaatggctatctccttatcttccggtcaatttagctgtgaacctaaagctgctctaaaaaataaagtctaaaaaacaaaaaataatatttttaagtagctttcaatcatttttaaaagtcaaatatttcaaggccctatttgattacgagttgtgctttggtttttgttgatcaggaaaatgcctaaaaataagaaaaaaaatgaaacatagagctctgatatcaatttgtactttatcatagcagcatctacatttattagtaaaagagatgaatgggrcatatgtgacatacatatttaatttacaa

SEQ ID NO: 265812 - DNA, 451 bp, Homo sapiens
gaagttatcctattataaaacagttaccacattcatgtaaatggccaggcaaaggtcaaaatatgagcaacattatttgtagctcagtgagagatttgatgttcaaagtctgtcagcatttgtcagaagactgatattgtcaatggctgtttcagattaagaccaactaaaaagtgatttggtgtgaactcagaatatagggaaaataagacaatttgaawgtaccccaggaaacaagagccctgcacttgactccaaaaggagttctattattctggctgtttccagactttattgtatcttgagaagagaactgttttccctctaaatcagtttcatcatctgtatccagggtagtactcacaagaacatgtcaatatcaatagcatgcatatggggtgttggattcttagaacttattgcaattgcttcctctaggttctatgatgat

SEQ ID NO: 265813 - DNA, 564 bp, Homo sapiens
cagggtttgggaaataatggaataaaatgatggatactgtgcacagtgcttgacacataagtactcaaataatggaagctgccattactttttaaattaaagttttatacattatagcaaagtatcagccaagcttattttactatttgtatctggttgcttgtacacagtgtttttcattttctcagggcctgcacatgctttatctttggagtaatgtttgattctttatctttcctttcccttcctctctgccacaattattacctgcctgttgtattctaggtactggggacaggaactgaataaatgagcagacattattcattcctgagttttcttctcagtttttgctgttgtattagcctacatcctcctcttctcatgccatcctctgaatgctaacattgctctttgacagcctctcaccagtgtaacccatcctatctgagggggacaggatcatctttctccaktaccaccactgccagttgagttctttagtgaggacttgagaaaattcagctttaccctcaagtcttcaacagacactgtggtgcaggc

SEQ ID NO: 265814 - DNA, 548 bp, Homo sapiens
atgaccttaaaaatggtttagattttgctgagtggccattactgctgctttatgacatggaataatggtttcaacctgcacagtttttcatttttttcatttttgtactgaaacaatgtcatgcatcagtcaatgtgaagttcatttttttttttcttttaaagggacttgggagaatgttagacattagaataagtggctgggttctaactccagagaactttggttcttgaaaaaaaaagtgaagattctccaagccgttacaaatgagctttgtagtgatcwctgatgaaatgataaaaacactgcttttcccactggaagataaatgccccttttcattaactatagtatgaggaacaaaatcatgtgattttcttttttttttttttaagtttaaccttaattactttttaaaggcagttttcattttgtgattacttttttttttcttccggtgcctagcatagttgaggattttatcttcttgtctattttaggatactctaatgaataacggaattttgacgtgctctttcaaaggaaga

SEQ ID NO: 265815 - DNA, 578 bp, Homo sapiens
aggcaactccagtgcaaggttctaattttagaattagtttgcttttgtgttcattgggtagattacaaaaacttggaacagagaaccatakagaggaaagtgtgggctctggagtttcaaactccagacctgtggcacattaacctcttgattttgcacaggatactcatatctcaatccctgccccccccagtttctttctttaaataaaaaagatttgtttaataataaacatggggtatgatatgcaaatatgagatacagttatcagtgtgacaatatgataaacaattctccatgtctcttctctcctccttcctcttttttcacataaggcagagacgtgatctcatggtttttttttttcaaattttcatgtttctttcccaacacgctaataaatgaaaatgcagtgatctagatcaagtataggaactaaacatgtttgttaatgggaatatcattgtagatggtgtttaaaggttgcaaatgcattcaattttcacattgtctgtttaaattaataaataatttgagcattcagcattaccccagaacatttttctcttaataatcat

SEQ ID NO: 265816 - DNA, 567 bp, Homo sapiens
aggtggtccatggaggccacttctacagctgaattgcatgttgctttaaaatattataataccttgactcctgcttggaagaagaaagaaactgatgttgtagatgaagatgatggtgatgcactctcctgtttcaatccacaacacccctaaaagataggcagagacattcatattcttattgtccttcaatatttcataacttaaaaaaagttactaacagtaaaatatatgtccacatttttctttttaaatgagtaaagagttaacccataaattgagataaaaacaccatgattttcaggtgctgatgtggagattttatttattgtaaagtcatcttgtgaataactttgtcccccacactgatgacrgccttatcttttcctgtgtacttaccttgataagatagtaaattgcatttttactaaatttctcatttaaaaatattatcaaagcagcataatctcatcagtgtgttctctccaactttgtgttgtctcacctactctgtttatattctagatagtagttttcttattgcaaatactgggtgccatttataga

SEQ ID NO: 265817 - DNA, 567 bp, Homo sapiens
aggtggtccatggaggccacttctacagctgaattgcatgttgctttaaaatattataataccttgactcctgcttggaagaagaaagaaactgatgttgtagatgaagatgatggtgatgcactctcctgtttcaatccacaacacccctaaaagataggcagagacattcatattcttattgtccttcaatatttcataacttaaaaaaagttactaacagtaaaatatatgtccacatttttctttttaaatgagtaaagagttaacccataaattgagataaaaacaccatgattttcaggtgctgatgtggagattttatttattgtaaagtcatcttgtgaataactttgtcccccacactgatgacagccttatcttttcctgtktacttaccttgataagatagtaaattgcatttttactaaatttctcatttaaaaatattatcaaagcagcataatctcatcagtgtgttctctccaactttgtgttgtctcacctactctgtttatattctagatagtagttttcttattgcaaatactgggtgccatttataga

SEQ ID NO: 265818 - DNA, 567 bp, Homo sapiens
aggtggtccatggaggccacttctacagctgaattgcatgttgctttaaaatattataataccttgactcctgcttggaagaagaaagaaactgatgttgtagatgaagatgatggtgatgcactctcctgtttcaatccacaacacccctaaaagataggcagagacattcatattcttattgtccttcaatatttcataacttaaaaaaagttactaacagtaaaatatatgtccacatttttctttttaaatgagtaaagagttaacccataaattgagataaaaacaccatgattttcaggtgctgatgtggagattttatttattgtaaagtcatcttgtgaataactttgtcccccacactgatgacagccttatcttttcctgtgtacttaccttgataagatagtaaattgcatttttactaaatttctcatttaaaaatattatcaaagcagcataatctcatcagtgtgttctctccaactttgtgttgtctcacctactctgtttatattctagatwgtagttttcttattgcaaatactgggtgccatttataga

SEQ ID NO: 265819 - DNA, 565 bp, Homo sapiens
ttattctaagaaaagaaaattaagaaaaatgtttgaaggagacaagtatttgttgagggcctactgggtgacaaactgcattggaaaatgggctatagagtatggtggagagctcagggccttggagtcagatgacttcaatttgaattttggctatgacaactgctatttgggtgcttatgggagtaagagaactgcaatctatatgattgtagtgaggattggagggaatcaagtgatttgtctctattctgtgcctggcatgtaataggccctcaataaacatgggtcttattattgttagtattgtcattattattatttttgtaatttaattattacacccattacttgaggaaagtggtattgtacacattttcatatgagaaaccaaggcttaagtaaccaagagatttgcctagagcagtggctctcacctgaggatgattttagctcccagaagacaytgggcaatgtctggagagctgtttttggtggtcccaactggcagcgcagggtgttactggcatctcctgggtataggccaggggtgctgccgaacatt

SEQ ID NO: 265820 - DNA, 565 bp, Homo sapiens
ttattctaagaaaagaaaattaagaaaaatgtttgaaggagacaagtatttgttgagggcctactgggtgacaaactgcattggaaaatgggctatagagtatggtggagagctcagggccttggagtcagatgacttcaatttgaattttggctatgacaactgctatttgggtgcttatgggagtaagagaactgcaatctatatgattgtagtgaggattggagggaatcaagtgatttgtctctattctgtgcctggcatgtaataggccctcaataaacatgggtcttattattgttagtattgtcattattattatttttgtaatttaattattacacccattacttgaggaaagtggtattgtacacattttcatatgagaaaccaaggcttaagtaaccaagagatttgcctagagcagtggctctcacctgaggatgattttagctcccagaagacattgggcaatgtctggagagctgtttttggtggtcccaactggcagygcagggtgttactggcatctcctgggtataggccaggggtgctgccgaacatt

SEQ ID NO: 265821 - DNA, 623 bp, Homo sapiens
cttgtggttcatgggaagtgctatatatacgtgtgtggcgatgaaaaaatctgggtcttgcasacagttagtctgcaagttcttgaaccacacttcataatgtaccgagtatgtggagcttcaattttctctttttgtaatatgcggatgattctagttataatgtcaatttttatgagaaatcggggagataatgcatatgtaaagtgctcagcataggatttggaacatgggaaatactcactactcatagcaaagacttttcttgtaattgctactaccattactatgattatttccattatttttagtcctactatgaatatgcctctggcttatatagaacttatattcgaagtgaattccacaaacactctgtggaaataaaaaggattaatatgtagaaaataatgtggagagtaatgtgactgtgggtgtatttctataaatggagctgtgtcagcaaattgaaaaatatccagtaaaagtcttataatcatgcatttgcaattttgcagatcacaaaagatcagagttagtcaggggcagagtggggtggacagttttatattcatggaaaatgactcataggaaacatcaggagctaaaatttccaaaataaa

SEQ ID NO: 265822 - DNA, 583 bp, Homo sapiens
atgattattaaaagaaaaatgttctggggtaatgctgaatgctcaaattatttattaatttaaacagacaatgtgaaaattgaatgcatttgcaacctttaaacaccatctacaatgatattcccattaacaaacatgtktagttcctatacttgatctagatcactgcattttcatttattagcgtgttgggaaagaaacatgaaaatttgaaaaaaaaaaaccatgagatcacgtctctgccttatgtgaaaaaagaggaaggaggagagaagagacatggagaattgtttatcatattgtcacactgataactgtatctcatatttgcatatcataccccatgtttattattaaacaaatcttttttatttaaagaaagaaactggggggggcagggattgagatatgagtatcctgtgcaaaatcaagaggttaatgtgccacaggtctggagtttgaaactccagagcccacactttcctctctatggttctctgttccaagtttttgtaatctacccaatgaacacaaaagcaaactaattctaaaattagaaccttgcactggagttgcctcttta

SEQ ID NO: 265823 - DNA, 563 bp, Homo sapiens
tattagaactgcctatatgtttcatgctgggtctatttcattggtgcagtagaacttggaaaatgcagtttcatgctttgaataatagtgaacaacagtagaggaggccttagtttccaagactggtggagcagaggtattcggggaactttctgggaatgagacttggataattaagttgctgtgccctgagagttgctccttgaagtagagacggatgtgctgaatcctyatctgtacttgccagaagtgaagctgtcatctagcacagttgctgcctctgtttttgaaaagagatatgactagttgattccatcactatctgatgcagaattttcaaagatgagtagtggatcagagaaacgaaacaaaacaaagccaactgaactaaactgtgttgctagctgaaagggtctgatagtgagcaaagggccacatgtttggagttgctttcttcaattttatttcactgcttttatccattaaattgggcaacagcagcactcactggggaaaataggaacaacagattcaagttttcctatgtgctgtgacagagatgc

SEQ ID NO: 265824 - DNA, 563 bp, Homo sapiens
tattagaactgcctatatgtttcatgctgggtctatttcattggtgcagtagaacttggaaaatgcagtttcatgctttgaataatagtgaacaacagtagaggaggccttagtttccaagactggtggagcagaggtattcggggaactttctgggaatgagacttggataattaagttgctgtgccctgagagttgctccttgaagtagagacggatgtgctgaatcctcatctgtacttgccagaagtgaagctgtcatctagcacagttgctgcctctgtttttgaaaagagatatgactagttgattccatcactatctgatgcagaattttcaaagatgagtagtggatcagagaaacgaaacaaaacaaagccaactgaactaaactgtgttgctagctgaaagggtctgatagtgagcaaagggccasatgtttggagttgctttcttcaattttatttcactgcttttatccattaaattgggcaacagcagcactcactggggaaaataggaacaacagattcaagttttcctatgtgctgtgacagagatgc

SEQ ID NO: 265825 - DNA, 563 bp, Homo sapiens
tattagaactgcctatatgtttcatgctgggtctatttcattggtgcagtagaacttggaaaatgcagtttcatgctttgaataatagtgaacaacagtagaggaggccttagtttccaagactggtggagcagaggtattcggggaactttctgggaatgagacttggataattaagttgctgtgccctgagagttgctccttgaagtagagacggatgtgctgaatcctcatctgtacttgccagaagtgaagctgtcatctagcacagttgctgcctctgtttttgaaaagagatatgactagttgattccatcactatctgatgcagaattttcaaagatgagtagtggatcagagaaacgaaacaaaacaaagccaactgaactaaactgtgttgctagctgaaagggtctgatagtgagcaaagggccacatgtttggagttgctttcttcaattttatttcactgcttttatccattaaattggkcaacagcagcactcactggggaaaataggaacaacagattcaagttttcctatgtgctgtgacagagatgc

SEQ ID NO: 265826 - DNA, 623 bp, Homo sapiens
cttgtggttcatgggaagtgctatatatacgtgtgtggcgatgaaaaaatctgggtcttgcacacagttagtctgcaagttcttgaaccacacttcataatgtaccgagtatgtggagcttcaattttctctttttgtaatatgcggatgattctagttataatgtcaatttttatgagaaatcggggagataatgcatatgtaaagtgctcagcataggatttggaacatgggaaatactcactactcatagcaaagacttttcttgtaattgctactaccattactatgattatttccattatttttagtcctactatgaatatgcctctggcttatatagaacttatattcgaagtgaattccacaaacactctgtggaaataaaaaggattaatatgtagaaaataatgtkgagagtaatgtgactgtgggtgtatttctataaatggagctgtgtcagcaaattgaaaaatatccagtaaaagtcttataatcatgcatttgcaattttgcagatcacaaaagatcagagttagtcaggggcagagtggggtggacagttttatattcatggaaaatgactcataggaaacatcaggagctaaaatttccaaaataaa

SEQ ID NO: 265827 - DNA, 623 bp, Homo sapiens
cttgtggttcatgggaagtgctatatatacgtgtgtggcgatgaaaaaatctgggtcttgcacacagttagtctgcaagttcttgaaccacacttcataatgtaccgagtatgtggagcttcaattttctctttttgtaatatgcggatgattctagttataatgtcaatttttatgagaaatcggggagataatgcatatgtaaagtgctcagcataggatttggaacatgggaaatactcactactcatagcaaagacttttcttgtaattgctactaccattactatgattatttccattatttttagtcctactatgaatatgcctctggcttatatagaacttatattcgaagtgaattccacaaacactctgtggaaataaaaaggattaatatgtagaaaataatgtggagagtaatgtkactgtgggtgtatttctataaatggagctgtgtcagcaaattgaaaaatatccagtaaaagtcttataatcatgcatttgcaattttgcagatcacaaaagatcagagttagtcaggggcagagtggggtggacagttttatattcatggaaaatgactcataggaaacatcaggagctaaaatttccaaaataaa

SEQ ID NO: 265828 - DNA, 475 bp, Homo sapiens
atttgattttgttctctgtcatttccagtgttaagcaccagtcccatgtacactgcagatgcttcgtaaatatctgtcaaatgaacaactgcatgaatggcctcatttatccctcacagtggcctctgaaggtaggcattattatttccttgtcactgataaggatttttaagctaagactagtagacttaaagcaatatatgtgttccacctatcacacagataatgttgaaattacatgtcttttcagggagttaatcaaaactgatcttttgataaaaratcaaaactagtatgttaaaaaagttattttaaatcctacttctattacttaatttcaaaagctgagcacaccgccatcaaataaatccctggactgcccaagctcacactggacagcaatccaagaacccagcttacagcaaacgcagtttgaacttcaaaaacctatccaattcagtgtgaaagatttaag

SEQ ID NO: 265829 - DNA, 583 bp, Homo sapiens
acaaaactaacattcttcctgcccttgtaatatacagcggaaaagataacaacaaataagcaaatacacagatgattaaaatacatgataacaaatgttcttaatcactgcaaaaaaacccaagaaaccagcaggtagctgtcatttascataacatgagatggtcagggaaggcctcattcttttttgctccacccaaggaagaaatccttaaaaattattagagggggattctgaggtgtggaatacctttaaaacatcaaagttaccattaaaattttagataaaattataaatggtcatcaaaatattagttatttttaaattctagtttccttccaaccgagaagaaaggattacaaatggagaggaggttaagaaacacgtggcaatagatcaattatcttcctaacttaaattggttagctaagaagacaaagggaaattgcaagatcagaaaaaaagttacaaggcaaaattatgtcatattgtagacttggttcttgtttgtttaaatagaatgaacatgaagagtcagcaaatgattcctataacatgtctccacaatacacccagaaaatga

SEQ ID NO: 265830 - DNA, 583 bp, Homo sapiens
acaaaactaacattcttcctgcccttgtaatatacagcggaaaagataacaacaaataagcaaatacacagatgattaaaatacatgataacaaatgttcttaatcactgcaaaaaaacccaagaaaccagcaggtagctgtcatttaccataacatgagatggtcagggaaggcctcattcttttytgctccacccaaggaagaaatccttaaaaattattagagggggattctgaggtgtggaatacctttaaaacatcaaagttaccattaaaattttagataaaattataaatggtcatcaaaatattagttatttttaaattctagtttccttccaaccgagaagaaaggattacaaatggagaggaggttaagaaacacgtggcaatagatcaattatcttcctaacttaaattggttagctaagaagacaaagggaaattgcaagatcagaaaaaaagttacaaggcaaaattatgtcatattgtagacttggttcttgtttgtttaaatagaatgaacatgaagagtcagcaaatgattcctataacatgtctccacaatacacccagaaaatga

SEQ ID NO: 265831 - DNA, 516 bp, Homo sapiens
ccttccacaagacagccaactcccagatcttccttcactcagagctccctcactgaagatggtctctgcccctccaggactctgagaccctgcagagaccctcgaaagcagaacaaaaagaaattgaaatgatacatgttagagtcaaataaaaacacttgctctcrtatcacaaaagcaaaccacatcttgaaactaccaattcttaactgcactttcgtacataaactttccaaaattcaagtaaaaaaataaacatcctaatatcaagtgtatattttaagagatttattcacaaaaatgtagtaaatgttgggcatggaagaattatagagagaaaaggttaagtgttaaagaatgtggaaaaagagggaaacgccagaataaaagagggagcctcaaccccgaaagggtgcaaagggttcaaagagattaactgttgaggaaaaggtggagaagggagaggagagaagagagggagtaaaggggaaagggggtaggggagaggaaggggag

SEQ ID NO: 265832 - DNA, 568 bp, Homo sapiens
aaggaagtagcaggagccagggatccagtctgagttcaggccccattctctataactaacacacaacaatgtaaataaaagctaggaagctagaaaatttgcagatgggttctaaactttgatcttagcctttgatctctcacggagagacgtccaattcatgctagcaacctattggaccccmttggaaaaataatgaatctttgagattgcccactgcaaagtggacaatttatttgcccaaaaccctcagggcaatcacttgggcccagacatagtccccactactgatcctaattgggactataacacccctgtaaggatgaacaactgggctacatttcttgaggctctccttagaggaatgaaaaagggaataactaaggcagtaaattataataaagtaagagaagttgcacaaggaaaggaggaaaatccagccatgttttatggcaggatggaggaggcctttaaaaaatatatcagtctagacccttcctcttctgaaggtaaaataataatggcacagcatttcattagccaatgccacccagacattacacataag

SEQ ID NO: 265833 - DNA, 571 bp, Homo sapiens
ctgaaattcttcagctattagaagaaatacagctgccaaaggctgtagctattatccattgtagggggaatcaaagggacttaacccccataacacaaggtaacagaaaggctgataggccaaagctgcagccctcagggtgtaagttcaacaggttctaycaatgattcctttctatgattccccaatagaacctgaatatataccacaggaaaaacagttaataaaggagcaagagggggcaaaaaaaaggatcttggtggcatatgggactaaaagtatctctccctcaaacagcccaatgaagaattataaaaaccctccatgactctttccatatggggagagatgcctccctggccttggttaacaggctcttctttggtggttaagcaagtctgtcaagcctgctcgctgtgtgcaattaacaacccaggaaacaaaatgtctcctctaatagaaccagtccagaggagaggaacttgcccaggggaagactggcaattggactttacccatatgccagcctgtagaagatagaagtttttgttagtactaatagatgccttta

SEQ ID NO: 265834 - DNA, 571 bp, Homo sapiens
ctgaaattcttcagctattagaagaaatacagctgccaaaggctgtagctattatccattgtagggggaatcaaagggacttaacccccataacacaaggtaacagaaaggctgataggccaaagctgcagccctcagggtgtaagttcaacaggttctaccaatgattcctttctatgattccccaatagaacctgaatatataccacaggaaaaacagttaataaaggagcaagagggggcaaaaamaaggatcttggtggcatatgggactaaaagtatctctccctcaaacagcccaatgaagaattataaaaaccctccatgactctttccatatggggagagatgcctccctggccttggttaacaggctcttctttggtggttaagcaagtctgtcaagcctgctcgctgtgtgcaattaacaacccaggaaacaaaatgtctcctctaatagaaccagtccagaggagaggaacttgcccaggggaagactggcaattggactttacccatatgccagcctgtagaagatagaagtttttgttagtactaatagatgccttta

SEQ ID NO: 265835 - DNA, 555 bp, Homo sapiens
tgtacttgcttcttctgaatagtaaatcaattgcttcatcttatctttttctacaattataatattcacaatgctattttggtaactattttaaaaggatcattattaatcttttatatccctgagaaaaccaaaggttagaaagttattatttaactataatcaaaaggctagaacacggtaaaaaacargatgtaatttctgatgtttggactcctagttaaacgctcttcacattacaccttcacagattctttactgtgagtacaaaggataatgtgatctccctcttgcaactgtaattctctttttgtctcaaaacctgaaaccctggaagggtagtgtatgtggacagagtccatggctgaggatacagggaatcattacagctccttttttgacccctatcttgaggacctttagaaaattctttataaaaatactttgttgttatttcacataaattctttaatggcatagcatgaaagtccatagagcatacaatatacgacagatggacaaagcactcatactttgttggtggccaggtcccaa

SEQ ID NO: 265836 - DNA, 562 bp, Homo sapiens
cataggcgtggtcaattactattctacaccctagctatgctcaaggtatgtgacccaagtcactgtgctctgggaaaattgctaaagctgtgagtaaagatgctcccgcttcctttggtatctcaagcaataaggaccatgtatgcatcaagtcatcagtggccatcttgtcacctgatggagggagatactgagaatgtagccaacacagaggaaaatagaaccaaggtacggacagaaacaaaaccctagttatatagttgaaaacacgtagcaagctattcctgaagactgatgtccctagacatttcagcattgtgagacaatacattctctttttggtatcaagcccttctaagtttctaccactcgcaaccaagggcagaccaaaatattacggcacagcaccaacaatatttttaaatactatggaaatgtaaaaaacttttattgttgccaaataaatgcaaaaacttcctccaaaataytacattttatctgattcaagtccagtgactccttcaatcttggatatatctttaagtcaattctcactgtccta

SEQ ID NO: 265837 - DNA, 196 bp, Homo sapiens
caaatttttggctgcagccaaatgctaaattaaaataggttattttcttcactcttgaagtactattttatccattttttcatttggtttgagcataccttcttggttagccatrccaaacaagagacactaaggcctaaaatacaaatgtaaagtttcagggcaaaaagaagaaaaaaattttccaggattggag

SEQ ID NO: 265838 - DNA, 580 bp, Homo sapiens
aaggaatcaggctcctttccctcttccagtctccttcctgggagcttagatgaatggaagcctttccagatattaataggggagagtcctatgttcaggttatttagagaagtgctgactagaaactatgttcaggttatttaaaggaaataagcctgtaatatgttcctctcattgactatccaaagcagagatactccatactacatggtccaaaataatttayctacagaaactttctcaaggtgcatcttatggaattagtgttctaattaggttggataatatgatctggtacttctagtgaggaaaaaaggcttaaagggtagaaaataagaaggctagtggtatatactcatttaaatgtagaaatagaagtgatgaatatacattctattgaattttactatgtaggaaaccagatagcaagcttggggatagttgtaagagagatactttccagtgttgcatggcctcagatttgtggttaggaaacccaccagagcttctgatatgcaaactcttcccatgacaccataacagggccttcaccaaacacaatctctgactcgttataact

SEQ ID NO: 265839 - DNA, 580 bp, Homo sapiens
aaggaatcaggctcctttccctcttccagtctccttcctgggagcttagatgaatggaagcctttccagatattaataggggagagtcctatgttcaggttatttagagaagtgctgactagaaactatgttcaggttatttaaaggaaataagcctgtaatatgttcctctcattgactatccaaagcagagatactccatactacatggtccaaaataatttacctacagaaactttctcaaggtgcatcttatggaattagtgttctaattaggttggataatatkatctggtacttctagtgaggaaaaaaggcttaaagggtagaaaataagaaggctagtggtatatactcatttaaatgtagaaatagaagtgatgaatatacattctattgaattttactatgtaggaaaccagatagcaagcttggggatagttgtaagagagatactttccagtgttgcatggcctcagatttgtggttaggaaacccaccagagcttctgatatgcaaactcttcccatgacaccataacagggccttcaccaaacacaatctctgactcgttataact

SEQ ID NO: 265840 - DNA, 596 bp, Homo sapiens
acaaaggaaaaagggaaaataacctcttagtattactataaaaatagttgtgcacttgtggacctcttgaaagagtcttgggaactcctggagatctacagttcaccctttgagaattctcgtctaatttaaacagctgacaatccctatctggttttccaatgggattggtttaggatttgttggggttgaggtagggagaaaagtgatggcattgaatgaagagtcacattcccacagttgttatgggaagtcctcttgtgaccatgaggaagcaagtctgagaataagccatacaaagcagggtgccgaccaggaaccttcacagaaaaataaggccaaagaccccatggtacccactgttccactagactttttggttacatgagctaaatggtcccttcattttcaagccagtttgactttttctgtgttctaggcrttgccatgagcaaaacaaacaaaaaatctcttttctcacagaaactaatctaagaatctttctcattacaagtaatttctttcatttaccttcattttttaaaacagatattatttgttcttatttctgacatttatattttctgattttagca

SEQ ID NO: 265841 - DNA, 561 bp, Homo sapiens
aggccaggtacccagggaataagaaaacatgagacagggttgagcaaaacgtctacacaaaattaaaatcagacatgatattaaaacataggaacaggaagtcactataagattagttttatgaaatagtctgacaaaagctttaaaattagtataaagacgctcaaaaaatatgaagaaacaactttcatttagaaaagagcaagagattatattataataggggaaaaaagcaagtagaggatgaaattaaaaagaacacaaggccaggcactgtggctcacgcctgtaatcccagcactttgggaggctgaggtgggtggatcacctgaagtcaggagctttagattagcctggccaacatggcgaaaccccgactctactatamatacaaaaataagccaggcgtggtggtggatgtctgtagtcccagctacttggaaggctgaggccagtgaattgcttaaacttgggaggtggaggttgcagtgagccgagatcaccccactgcactccagcctggcgacagagtgagactatatctcaaaaattaaaaaaatt

SEQ ID NO: 265842 - DNA, 461 bp, Homo sapiens
aggagaaaacacctgattttttattgtaacactgtctggccacattgccagctggaaagccaagaacaatgggcagtcagtggtagccttaattatgacaccatcctgcaattagacctgttttgcaaaaggaagcgtaaatgatcagaaatcccatatgtacaggcctttatgaccyataccaaaacccaaaaatctgcaaaaatgccataacctgccccccaaaaggaaagtcctaaggcagaactagatattgtaaatgacccccttttacaagggccacctgtctgtcaggggggaatagcaaccacccccatataaccccttgctaagtgctcctgaggctcaagcccaacagcaaacagtgggaaccttgctaagtacccctcacactcagaggggaacaccctattcaactccccctccagccctgctaccctttaaggaagtagcaggagcca

SEQ ID NO: 265843 - DNA, 553 bp, Homo sapiens
gcctcctttaagtctctacttttacaacagaataaatagatgtatttttaaaaagaaaacacaggaattccctctcagtaatgctaatcagaaacaaataaatattttaacttccattctctgtattttctcccatcttcatcttttttttgtgtactataattcaatccattctcctagacctcactcatcccccaaagccacatttctggaacacatttcatttcttacatttgttgactatcacatctgcaacatgattaactatagtctgagtcttctatcttctacagtggttcttaaaccttagtttcacaagtattacctaatgtacttgtgaaargaaaaaaataaaatgttgtcctgttttcttctccatcctgattcagtgtattcaatatagacagaggcccaggaatcagcagtttaagtcaagccctaaggaaaatgtgatgaccttcctgaatcactactatttagatattgcccctccatgtaatgccacgtttttatagatctttccaaagatgttctgtatcaatgctattgtctc

SEQ ID NO: 265844 - DNA, 489 bp, Homo sapiens
ttgtcacccacactcattcacttgcattccaatatgcccttttaaaggaacacaaaattagtgtaatgatagctatcattatcaggccagcatttgtacagaattttggttccaccaatgagagtgcacctcaaagggaaatagcatttttgtgtatgtcatttatgagaacctctgggtcaaaaaaaaaatctaaggttacaaatgttatttatttatttatttatttatttatttattttactggtcacagactacaccagccacagtacaaagttgtgcctttgggtcataagtgggaccagtgaagatctgggrttagaagagacctggggctgttattggaaaagagaaccaatgtaatcatctctgtatataaatgccaacatcttgcttttggtcacatttactatcatgaccaaaggagtaggaaaaactagaaaaaaattaaaagaacaggactcagcctccattagccagtacaaatgc

SEQ ID NO: 265845 - DNA, 505 bp, Homo sapiens
aaaatagtgaaaacgggaataacgctagtcaagggaaaatacagcagtttttaaagcctctctcttaatggtctacatgagtttttgtgtaacgtttgttatacaagcttttactcatctaacaatggatttttataaacattcagtttattttttcatgtcaatcttctagatcatttaattgatattcaagatatgccccaaatgttatggacckttttttcaactctgggtggataaacaaaagtcacttcatcatgtcacatgttatgagatccaattttctaaagaattaaatcacagcatttatctgacttctgtcattataggaatatagtctaggtcatatttgtatatgttcttctcccttcagtgcactgctgcctgtattcaattgtaagcttcctacaggtagtatctgtaaacagtcgctggttatctctcatctgtatggtcttcatggcacttggctgtgaggactcaaacagtgctctttgaactgtgt

SEQ ID NO: 265846 - DNA, 634 bp, Homo sapiens
acccttgcactgatatttccatacctagaaaggagtatggaaataattgtaaattacaaatcatcccttgaacactgggcccaatgtgatttgataaccaaaaggttaataagaacaaactggaaagaaatgaggactgtttagtctgcatgggcaaagattgagagagaactttattggaatcttataaaaattgtggattagaggaacactgatgtcataagttctaaaatatgaggacacagagtactacaggttatcctaagaggtggtgtcaacgcaaatataggtggattcctaggaagtttttactaagttacagaacagctgcagagggagctatgctattggtaactttggaaaatgacatcaggaaagctaaccagcctcttcccctgtcctagctgatattaaatagggattctggaagggaacataagcagaggttcagagctgccgactcttcctcctctttaaggtctgctatttctatgaccaaaagcagttttaaaataaacccctgatcacctctttttaaaaacccttttttwaaaaatgagaagctgagcttctcatttaaaatagacttgagtaatttcagtgatgttaatattttcatgagctgtgctaggtt

SEQ ID NO: 265847 - DNA, 617 bp, Homo sapiens
aatatcatttagcaaataatcattttaaccgatttaagaactgattttttcaagaattttaaaaaatacttgatcaagtcagtaaaatcatgactatacataaaacagatgttgactttttattttgaatttctgcaatgatattaaatgttaagaacagaaaggagtcgggcgcagtggctcatgcctgtaatcccagcactttgggaggctgaggtgggaggatcacctgaggttgggagtttgagaccagcctgaccaacatggagaaaccccgtctctttagtaaatacaaaattagttgggcatggtggcacatgcctgtaatctcagctacttgggaggctgaggcagaagaactgcttgaacccgggaggcggaagttgcrgtgggccgagatcgtgtcattgcactccagcactccagcctgggcaacaagagcaaaaatccatctcaaaaaaaaaaaaaaaaaagaacagaaaggaaatttttctaatcattaggtagcagtagagatgtaattaatgttatacaggagatggtttcctgaaaatcatgtgaaactaaactttagtgaaccataccacatttaaaatatatcagagagtttgtcattt

SEQ ID NO: 265848 - DNA, 323 bp, Homo sapiens
taggttttcaactattgtttattagtgtttttcataatctcatgcataggaacccatgctcagatatagaaaatgttttaataattttcatctgacaacatggatgataatattcagagaaacaaagagaaaaattagacatgtatgtcaacatgggggtggggaagggtgaaaccgacaggtggccaccacgcacygagctctgggcctgagcagcagttggtagtgcttcgcatattactcagcagtgactcacactgcacgtgtgtgtcagccctcagcacatactctaggaagaaggaccttggaaacgggtcccctcg

SEQ ID NO: 265849 - DNA, 323 bp, Homo sapiens
taggttttcaactattgtttattagtgtttttcataatctcatgcataggaacccatgctcagatatagaaaatgttttaataattttcatctgacaacatggatgataatattcagagaaacaaagagaaaaattagacatgtatgtcaacatgggggtggggaagggtgaaaccgacaggtggccaccacgcactgagctctgggcctgagcagcagttggtagtgyttcgcatattactcagcagtgactcacactgcacgtgtgtgtcagccctcagcacatactctaggaagaaggaccttggaaacgggtcccctcg

SEQ ID NO: 265850 - DNA, 634 bp, Homo sapiens
catgttatatactgctgaatgctgtaggcaactgtaacacaatggcaagtatttatgtatctacacatagaaaaggtacagtaaaaatacagtataaacaaactgtacacctctatagggcacttaccatgaatgaagccttcaagactgaaagttgctctgggtgagccagtgagtgagtggtgagtgaatgtgaaggcttacaatattactgcacactacataaatgctgtacacttaggctacacaaaatttataaaaaatatgctttcttcagtaataaattaaccttagcttactgyatcttttctatataaacttaaaaataattttaactttttgactcctgtaatacaacttagtttaaaacacatactgtacagctatacaaaaatgttttctttatatccttattccataatgtttttttctatttttaaaatttttattttttgtttttttactctttaaacttttttgttaaaaactaaaacacaaacatacacatttagcccaggcctatatggggttaggggcaataacatgcatggagctgtcatcttctgtggtaacaatgccttcttctggaatatctcctacggaacctgcctgaggctgttaacttttttttaat
